United States Patent Application Publication US 2024/0327476 A1 - sequence listing, part 39

SEQ ID NO: 69517 - protein, 418 aa, Homo sapiens
MKTERPRPNTFIIRCLQWTTVIERTFHVETPEEREEWTTAIQTVADGLKKQEEEEMDFRSGSPSDNSGAEEMEVSLAKPKHRVTMNEFEYLKLLGKGTFGKVILVKEKATGRYYAMKILKKEVIVAKDEVAHTLTENRVLQNSRHPFLTALKYSFQTHDRLCFVMEYANGGELFFHLSRERVFSEDRARFYGAEIVSALDYLHSEKNVVYRDLKLENLMLDKDGHIKITDFGLCKEGIKDGATMKTFCGTPEYLAPEVLEDNDYGRAVDWWGLGVVMYEMMCGRLPFYNQDHEKLFELILMEEIRFPRTLGPEAKSLLSGLLKKDPKQRLGGGSEDAKEIMQHRFFAGIVWQHVYEKKLSPPFKPQVTSETDTRYFDEEFTAQMITITPPDQDDSMECVDSERRPHFPQFSYSASGTA

SEQ ID NO: 69518 - protein, 480 aa, Homo sapiens [sequence omitted]

SEQ ID NO: 69519 - protein, 480 aa, Homo sapiens [sequence omitted]

SEQ ID NO: 69520 - protein, 480 aa, Homo sapiens [sequence omitted]

SEQ ID NO: 69521 - protein, 92 aa, Homo sapiens
MSDVAIVKEGWLHKRGEYIKTWRPRYFLLKNDGTFIGYKERPQDVDQREAPLNNFSVAQCQLMKTERPRPNTFIIRCLQWTTVIERTFHVET

SEQ ID NO: 69522 - protein, 806 aa, Homo sapiens
MASGADSKGDDLSTAILKQKNRPNRLIVDEAINEDNSVVSLSQPKMDELQLFRGDTVLLKGKKRREAVCIVLSDDTCSDEKIRMNRVVRNNLRVRLGDVISIQPCPDVKYGKRIHVLPIDDTVEGITGNLFEVYLKPYFLEAYRPIRKGDIFLVRGGMRAVEFKVVETDPSPYCIVAPDTVIHCEGEPIKREDEEESLNEVGYDDIGGCRKQLAQIKEMVELPLRHPALFKAIGVKPPRGILLYGPPGTGKTLIARAVANETGAFFFLINGPEIMSKLAGESESNLRKAFEEAEKNAPAIIFIDELDAIAPKREKTHGEVERRIVSQLLTLMDGLKQRAHVIVMAATNRPNSIDPALRRFGRFDREVDIGIPDATGRLEILQIHTKNMKLADDVDLEQVANETHGHVGADLAALCSEAALQAIRKKMDLIDLEDETIDAEVMNSLAVTMDDFRWALSQSNPSALRETVVEVPQVTWEDIGGLEDVKRELQELVQYPVEHPDKFLKFGMTPSKGVLFYGPPGCGKTLLAKAIANECQANFISIKGPELLTMWFGESEANVREIFDKARQAAPCVLFFDELDSIAKARGGNIGDGGGAADRVINQILTEMDGMSTKKNVFIIGATNRPDIIDPAILRPGRLDQLIYIPLPDEKSRVAILKANLRKSPVAKDVDLEFLAKMTNGFSGADLTEICQRACKLAIRESIESEIRRERERQTNPSAMEVEEDDPVPEIRRDHFEEAMRFARRSVSDNDIRKYEMFAQTLQQSRGFGSFRFPSGNQGGAGPSQGSGGGTGGSVYTEDNDDDLYG

SEQ ID NO: 69523 - protein, 1222 aa, Homo sapiens
MSQPPPPPPPLPPPPPPPEAPQTPSSLASAAASGGLLKRRDRRILSGSCPDPKCQARLFFPASGSVSIECTECGQRHEQQQLLGVEEVTDPDVVLHNLLRNALLGVTGAPKKNTELVKVMGLSNYHCKLLSPILARYGMDKQTGRAKLLRDMNQGELFDCALLGDRAFLIEPEHVNTVGYGKDRSGSLLYLHDTLEDIKRANKSQECLIPVHVDGDGHCLVHAVSRALVGRELFWHALRENLKQHFQQHLARYQALFHDFIDAAEWEDIINECDPLFVPPEGVPLGLRNIHIFGLANVLHRPIILLDSLSGMRSSGDYSATFLPGLIPAEKCTGKDGHLNKPICIAWSSSGRNHYIPLVGIKGAALPKLPMNLLPKAWGVPQDLIKKYIKLEEDGGCVIGGDRSLQDKYLLRLVAAMEEVFMDKHGIHPSLVADVHQYFYRRTGVIGVQPEEVTAAAKKAVMDNRLHKCLLCGALSELHVPPEWLAPGGKLYNLAKSTHGQLRTDKNYSFPLNNLVCSYDSVKDVLVPDYGMSNLTACNWCHGTSVRKVRGDGSIVYLDGDRTNSRSTGGKCGCGFKHFWDGKEYDNLPEAFPITLEWGGRVVRETVYWFQYESDSSLNSNVYDVAMKLVTKHFPGEFGSEILVQKVVHTILHQTAKKNPDDYTPVNIDGAHAQRVGDVQGQESESQLPTKIILTGQKTKTLHKEELNMSKTERTIQQNITEQASVMQKRKTEKLKQEQKGQPRTVSPSTIRDGPSSAPATPTKAPYSPTTSKEKKIRITTNDGRQSMVTLKSSTTFFELQESIAREFNIPPYLQCIRYGFPPKELMPPQAGMEKEPVPLQHGDRITIEILKSKAEGGQSAAAHSAHTVKQEDIAVTGKLSSKELQEQAEKEMYSLCLLATLMGEDVWSYAKGLPHMFQQGGVFYSIMKKTMGMADGKHCTFPHLPGKTFVYNASEDRLELCVDAAGHFPIGPDVEDLVKEAVSQVRAEATTRSRESSPSHGLLKLGSGGVVKKKSEQLHNVTAFQGKGHSLGTASGNPHLDPRARETSVVRKHNTGTDFSNSSTKTEPSVFTASSSNSELIRIAPGVVTMRDGRQLDPDLVEAQRKKLQEMVSSIQASMDRHLRDQSTEQSPSDLPQRKTEVVSSSAKSGSLQTGLPESFPLTGGTENLNTETTDGCVADALGAAFATRSKAQRGNSVEELEEMDSQDAEMTNTTEPMDHS

SEQ ID NO: 69524 - protein, 1264 aa, Homo sapiens
MSTLYVSPHPDAFPSLRALIAARYGEAGEGPGWGGAHPRICLQPPPTSRTPFPPPRLPALEQGPGGLWVWGATAVAQLLWPAGLGGPGGSRAAVLVQQWVSYADTELIPAACGATLPALGLRSSAQDPQAVLGALGRALSPLEEWLRLHTYLAGEAPTLADLAAVTALLLPFRYVLDPPARRIWNNVTRWFVTCVRQPEFRAVLGEVVLYSGARPLSHQPGPEAPALPKTAAQLKKEAKKREKLEKFQQKQKIQQQQPPPGEKKPKPEKREKRDPGVITYDLPTPPGEKKDVSGPMPDSYSPRYVEAAWYPWWEQQGFFKPEYGRPNVSAANPRGVFMMCIPPPNVTGSLHLGHALTNAIQDSLTRWHRMRGETTLWNPGCDHAGIATQVVVEKKLWREQGLSRHQLGREAFLQEVWKWKEEKGDRIYHQLKKLGSSLDWDRACFTMDPKLSAAVTEAFVRLHEEGIIYRSTRLVNWSCTLNSAISDIEVDKKELTGRTLLSVPGYKEKVEFGVLVSFAYKVQGSDSDEEVVVATTRIETMLGDVAVAVHPKDTRYQHLKGKNVIHPFLSRSLPIVFDEFVDMDFGTGAVKITPAHDQNDYEVGQRHGLEAISIMDSRGALINVPPPFLGLPRFEARKAVLVALKERGLFRGIEDNPMVVPLCNRSKDVVEPLLRPQWYVRCGEMAQAASAAVTRGDLRILPEAHQRTWHAWMDNIREWCISRQLWWGHRIPAYFVTVSDPAVPPGEDPDGRYWVSGRNEAEAREKAAKEFGVSPDKISLQQDEDVLDTWFSSGLFPLSILGWPNQSEDLSVFYPGTLLETGHDILFFWVARMVMLGLKLTGRLPFREVYLHAIVRDAHGRKMSKSLGNVIDPLDVIYGISLQGLHNQLLNSNLDPSEVEKAKEGQKADFPAGIPECGTDALRFGLCAYMSQGRDINLDVNRILGYRHFCNKLWNATKFALRGLGKGFVPSPTSQPGGHESLVDRWIRSRLTEAVRLSNQGFQAYDFPAVTTAQYSFWLYELCDVYLECLKPVLNGVDQVAAECARQTLYTCLDVGLRLLSPFMPFVTEELFQRLPRRMPQAPPSLCVTPYPEPSECSWKDPEAEAALELALSITRAVRSLRADYNLTRIRPDCFLEVADEATGALASAVSGYVQALASAGVVAVLALGAPAPQGCAVALASDRCSIHLQLQGLVDPARELGKLQAKRVEAQRQAQRLRERRAASGYPVKVPLEVQEADEAKLQQTEAELRKVDEAIALFQKML

SEQ ID NO: 69525 - protein, 1264 aa, Homo sapiens; identical to SEQ ID NO: 69524

SEQ ID NO: 69526 - protein, 174 aa, Homo sapiens
MSTLYVSPHPDAFPSLRALIAARYGEAGEGPGWGGAHPRICLQPPPTSRTSFPPPRLPALEQGPGGLWVWGATAVAQLLWPAGLGGPGGSRAAVLVQQWVSYADTELIPAACGATLPALGLRSSAQDPQAVLGALGRALSPLEEWLRLHTYLAGEAPTLADLAAVTALLLPFRY

SEQ ID NO: 69527 - protein, 174 aa, Homo sapiens; identical to SEQ ID NO: 69526

SEQ ID NO: 69528 - protein, 288 aa, Homo sapiens
  VARIANT 1: note = MOD_RES - Any amino acid
XKERGLFRGIEDNPMVVPLCNRSKDVVEPLLRPQWEWCISRQLWWGHRIPAYFVTVSDPAVPPGEDPDGRYWVSGRNEAEAREKAAKEFGVSPDKISLQQDEDVLDTWFSSGLFPLSILGWPNQSEDLSVFYPGTLLETGHDILFFWVARMVMLGLKLTGRLPFREVYLHAIVRDAHGRKMSKSLGNVIDPLDVIYGISLQGLHNQLLNSNLDPSEVEKAKEGQKADFPAGIPECGTDALRFGLCAYMSQGRDINLDVNRILGYRHFCNKLWNATKFALRGLGKGFVP

SEQ ID NO: 69529 - protein, 1264 aa, Homo sapiens [sequence omitted]

SEQ ID NO: 69530 - protein, 366 aa, Homo sapiens
MSTLYVSPHPDAFPSLRALIAARYGEAGEGPGWGGAHPRICLQPPPTSRTPFPPPRLPALEQGPGGLWVWGATAVAQLLWPAGLGGPGGSRAAVLVQQWVSYADTELIPAACGATLPALGLRSSAQDPQAVLGALGRALSPLEEWLRLHTYLAGEAPTLADLAAVTALLLPFRYVLDPPARRIWNNVTRWFVTCVRQPEFRAVLGEVVLYSGARPLSHQPGPEAPALPKTAAQLKKEAKKREKLEKFQQKQKIQQQQPPPGEKKPKPEKREKRDPGVITYDLPTPPGEKKDVSGPMPDSYSPRYVEAAWYPWWEQQGFFKPEYGRPNVSAANPRGVFMMCIPPPNVTGSLHLGHALTNAIQDSLTR

SEQ ID NO: 69531 - protein, 174 aa, Homo sapiens
MSTLYVSPHPDAFPSLRALIAARYGEAGEGPGWGGAHPRICLQPPPTSRTPFPPPRLPALEQGPGGLWVWGATAVAQLLWPAGLGGPGGSRAAVLVQQWVSYADTELIPAACGATLPALGLRSSAQDPQAVLGALGRALSPLEEWLRLHTYLAGEAPTLADLAAVTALLLPFRY

SEQ ID NO: 69532 - protein, 1183 aa, Homo sapiens
  VARIANT 1: note = MOD_RES - Any amino acid
XGLGGPGGSRAAVLVQQWVSYADTELIPAACGATLPALGLRSSAQDPQAVLGALGRALSPLEEWLRLHTYLAGEAPTLADLAAVTALLLPFRYVLDPPARRIWNNVTRWFVTCVRQPEFRAVLGEVVLYSGARPLSHQPGPEAPALPKTAAQLKKEAKKREKLEKFQQKQKIQQQQPPPGEKKPKPEKREKRDPGVITYDLPTPPGEKKDVSGPMPDSYSPRYVEAAWYPWWEQQGFFKPEYGRPNVSAANPRGVFMMCIPPPNVTGSLHLGHALTNAIQDSLTRWHRMRGETTLWNPGCDHAGIATQVVVEKKLWREQGLSRHQLGREAFLQEVWKWKEEKGDRIYHQLKKLGSSLDWDRACFTMDPKLSAAVTEAFVRLHEEGIIYRSTRLVNWSCTLNSAISDIEVDKKELTGRTLLSVPGYKEKVEFGVLVSFAYKVQGSDSDEEVVVATTRIETMLGDVAVAVHPKDTRYQHLKGKNVIHPFLSRSLPIVFDEFVDMDFGTGAVKITPAHDQNDYEVGQRHGLEAISIMDSRGALINVPPPFLGLPRFEARKAVLVALKERGLFRGIEDNPMVVPLCNRSKDVVEPLLRPQWYVRCGEMAQAASAAVTRGDLRILPEAHQRTWHAWMDNIREWCISRQLWWGHRIPAYFVTVSDPAVPPGEDPDGRYWVSGRNEAEAREKAAKEFGVSPDKISLQQDEDVLDTWFSSGLFPLSILGWPNQSEDLSVFYPGTLLETGHDILFFWVARMVMLGLKLTGRLPFREVYLHAIVRDAHGRKMSKSLGNVIDPLDVIYGISLQGLHNQLLNSNLDPSEVEKAKEGQKADFPAGIPECGTDALRFGLCAYMSQGRDINLDVNRILGYRHFCNKLWNATKFALRGLGKGFVPSPTSQPGGHESLVDRWIRSRLTEAVRLSNQGFQAYDFPAVTTAQYSFWLYELCDVYLECLKPVLNGVDQVAAECARQTLYTCLDVGLRLLSPFMPFVTEELFQRLPRRMPQAPPSLCVTPYPEPSECSWKDPEAEAALELALSITRAVRSLRADYNLTRIRPDCFLEVADEATGALASAVSGYVQALASAGVVAVLALGAPAPQGCAVALASDRCSIHLQLQGLVDPARELGKLQAKRVEAQRQAQRLRERRAASGYPVKVPLEVQEADEAKLQQTEAELRKVDEAIALFQKML

SEQ ID NO: 69533 - protein, 174 aa, Homo sapiens; identical to SEQ ID NO: 69531

SEQ ID NO: 69534 - protein, 288 aa, Homo sapiens; identical to SEQ ID NO: 69528
  VARIANT 1: note = MOD_RES - Any amino acid

SEQ ID NO: 69535 - protein, 174 aa, Homo sapiens; identical to SEQ ID NO: 69531

SEQ ID NO: 69536 - protein, 288 aa, Homo sapiens; identical to SEQ ID NO: 69528
  VARIANT 1: note = MOD_RES - Any amino acid

SEQ ID NO: 69537 - protein, 288 aa, Homo sapiens; identical to SEQ ID NO: 69528
  VARIANT 1: note = MOD_RES - Any amino acid

SEQ ID NO: 69538 - protein, 1264 aa, Homo sapiens [sequence omitted]

SEQ ID NO: 69539 - protein, 174 aa, Homo sapiens; identical to SEQ ID NO: 69531

SEQ ID NO: 69540 - protein, 297 aa, Homo sapiens
MPDSYSPRYVEAAWYPWWEQQGFFKPEYGRPNVSAANPRGVFMMCIPPPNVTGSLHLGHALTNAIQDSLTRWHRMRGETTLWNPGCDHAGIATQVVVEKKLWREQGLSRHQLGREAFLQEVWKWKEEKGDRIYHQLKKLGSSLDWDRACFTMDPKLSAAVTEAFVRLHEEGIIYRSTRLVNWSCTLNSAISDIEVDKKELTGRTLLSVPGYKEKVEFGVLVSFAYKVQGSDSDEEVVVATTRIETMLGDVAVAVHPKDTRYQHLKGKNVIHPFLSRSLPIVFDEFVDMDFGTGPAQV

SEQ ID NO: 69541 - protein, 288 aa, Homo sapiens; identical to SEQ ID NO: 69528
  VARIANT 1: note = MOD_RES - Any amino acid

SEQ ID NO: 69542 - protein, 288 aa, Homo sapiens; identical to SEQ ID NO: 69528
  VARIANT 1: note = MOD_RES - Any amino acid

SEQ ID NO: 69543 - protein, 95 aa, Homo sapiens
  VARIANT 1: note = MOD_RES - Any amino acid
XPAGLGGPGGSRAAVLVQQWVSYADTELIPAACGATLPALGLRSSAQDPQAVLGALGRALSPLEEWLRLHTYLAGEAPTLADLAAVTALLLPFRY

SEQ ID NO: 69544 - protein, 1264 aa, Homo sapiens; identical to SEQ ID NO: 69524

SEQ ID NO: 69545 - protein, 676 aa, Homo sapiens
MSTLYVSPHPDAFPSLRALIAARYGEAGEGPGWGGAHPRICRLPRFEARKAVLVALKERGLFRGIEDNPMVVPLCNRSKDVVEPLLRPQWYVRCGEMAQAASAAVTRGDLRILPEAHQRTWHAWMDNIREWCISRQLWWGHRIPAYFVTVSDPAVPPGEDPDGRYWVSGRNEAEAREKAAKEFGVSPDKISLQQDEDVLDTWFSSGLFPLSILGWPNQSEDLSVFYPGTLLETGHDILFFWVARMVMLGLKLTGRLPFREVYLHAIVRDAHGRKMSKSLGNVIDPLDVIYGISLQGLHNQLLNSNLDPSEVEKAKEGQKADFPAGIPECGTDALRFGLCAYMSQGRDINLDVNRILGYRHFCNKLWNATKFALRGLGKGFVPSPTSQPGGHESLVDRWIRSRLTEAVRLSNQGFQAYDFPAVTTAQYSFWLYELCDVYLECLKPVLNGVDQVAAECARQTLYTCLDVGLRLLSPFMPFVTEELFQRLPRRMPQAPPSLCVTPYPEPSECSWKDPEAEAALELALSITRAVRSLRADYNLTRIRPDCFLEVADEATGALASAVSGYVQALASAGVVAVLALGAPAPQGCAVALASDRCSIHLQLQGLVDPARELGKLQAKRVEAQRQAQRLRERRAASGYPVKVPLEVQEADEAKLQQTEAELRKVDEAIALFQKML

SEQ ID NO: 69546 - protein, 676 aa, Homo sapiens; identical to SEQ ID NO: 69545

SEQ ID NO: 69547 - protein, 297 aa, Homo sapiens; identical to SEQ ID NO: 69540

SEQ ID NO: 69548 - protein, 297 aa, Homo sapiens; identical to SEQ ID NO: 69540

SEQ ID NO: 69549 - protein, 297 aa, Homo sapiens; identical to SEQ ID NO: 69540

SEQ ID NO: 69550 - protein, 676 aa, Homo sapiens; identical to SEQ ID NO: 69545

SEQ ID NO: 69551 - protein, 676 aa, Homo sapiens; identical to SEQ ID NO: 69545

SEQ ID NO: 69552 - protein, 297 aa, Homo sapiens; identical to SEQ ID NO: 69540

SEQ ID NO: 69553 - protein, 1063 aa, Homo sapiens
MPHLPLASFRPPFWGLRHSRGLPRFHSVSTQSEPHGSPISRRNREAKQKRLREKQATLEAEIAGESKSPAESIKAWRPKELVLYEIPTKPGEKKDVSGPLPPAYSPRYVEAAWYPWWVREGFFKPEYQARLPQATGETFSMCIPPPNVTGSLHIGHALTVAIQDALVRWHRMRGDQVLWVPGSDHAGIATQAVVEKQLWKERGVRRHELSREAFLREVWQWKEAKGGEICEQLRALGASLDWDRECFTMDVGSSVAVTEAFVRLYKAGLLYRNHQLVNWSCALRSAISDIEVENRPLPGHTQLRLPGCPTPVSFGLLFSVAFPVDGEPDAEVVVGTTRPETLPGDVAVAVHPDDSRYTHLHGRQLRHPLMGQPLPLITDYAVQPHVGTGAVKVTPAHSPADAEMGARHGLSPLNVIAEDGTMTSLCGDWLQGLHRFVAREKIMSVLSEWGLFRGLQNHPMVLPICSRSGDVIEYLLKNQWFVRCQEMGARAAKAVESGALELSPSFHQKNWQHWFSHIGDWCVSRQLWWGHQIPAYLVVEDHAQGEEDCWVVGRSEAEAREVAAELTGRPGAELTLERDPDVLDTWFSSALFPFSALGWPQETPDLARFYPLSLLETGSDLLLFWVGRMVMLGTQLTGQLPFSKVLLHPMVRDRQGRKMSKSLGNVLDPRDIISGVEMQVLQEKLRSGNLDPAELAIVAAAQKKDFPHGIPECGTDALRFTLCSHGVQAGDLHLSVSEVQSCRHFCNKIWNALRFILNALGEKFVPQPAEELSPSSPMDAWILSRLALAAQECERGFLTRELSLVTHALHHFWLHNLCDVYLEAVKPVLWHSPRPLGPPQVLFSCADLGLRLLAPLMPFLAEELWQRLPPRPGCPPAPSISVAPYPSACSLEHWRQPELERRFSRVQEVVQVLRALRATYQLTKARPRVLLQSSEPGDQGLFEAFLEPLGTLGYCGAVGLLPPGAAAPSGWAQAPLSDTAQVYMELQGLVDPQIQLPLLAARRYKLQKQLDSLTARTPSEGEAGTQRQQKLSSLQLELSKLDKAASHLRQLMDEPPAPGSPEL

SEQ ID NO: 69554 - protein, 257 aa, Homo sapiens
MPHLPLASFRPPFWGLRHSRGLPRFHSVSTQSEPHGSPISRRNREAKQKRLREKQATLEAEIAGESKSPAESIKAWRPKELVLYEIPTKPGEKKDVSGPLPPAYSPRYVEAAWYPWWVREGFFKPEYQARLPQATGETFSMCIPPPNVTGSLHIGHALTVAIQDALVRWHRMRGDQVLWVPGSDHAGIATQAVVEKQLWKERGVRRHELSREAFLREVWQWKEAKGGEICEQLRALGASLDWDRVFYHGCWLLSGCD

SEQ ID NO: 69555 - protein, 1063 aa, Homo sapiens; identical to SEQ ID NO: 69553

SEQ ID NO: 69556 - protein, 115 aa, Homo sapiens
MPHLPLASFRPPFWGLRHSRGLPRFHSVSTQSEPHGSPISRRNREAKQKRLREKQATLEAEIAGESKSPAESIKAWRPKELVLYEIPTKPGEKKDVSGPLPPAYSPRYVEAAWYP

SEQ ID NO: 69557 - protein, 326 aa, Homo sapiens
MPHLPLASFRPPFWGLRHSRGLPRFHSVSTQSEPHGSPISRRNREAKQKRLREKQATLEAEIAGESKSPAESIKAWRPKELVLYEIPTKPGEKKDVSGPLPPAYSPRYVEAAWYPWWVREGFFKPEYQARLPQATGETFSMCIPPPNVTGSLHIGHALTVAIQDALVRWHRMRGDQVLWVPGSDHAGIATQAVVEKQLWKERGVRRHELSREAFLREVWQWKEAKGGEICEQLRALGASLDWDRECFTMDVGSSVAVTEAFVRLYKAGLLYRNHQLVNWSCALRSAISDIEVENRPLPGHTQLRLPGCPTPVSFGLLFSVAFPVDG

SEQ ID NO: 69558 - protein, 1093 aa, Homo sapiens
MGGKAWPRRAVGTAGGPCAEQISAPFQTLLMPHLPLASFRPPFWGLRHSRGLPRFHSVSTQSEPHGSPISRRNREAKQKRLREKQATLEAEIAGESKSPAESIKAWRPKELVLYEIPTKPGEKKDVSGPLPPAYSPRYVEAAWYPWWVREGFFKPEYQARLPQATGETFSMCIPPPNVTGSLHIGHALTVAIQDALVRWHRMRGDQVLWVPGSDHAGIATQAVVEKQLWKERGVRRHELSREAFLREVWQWKEAKGGEICEQLRALGASLDWDRECFTMDVGSSVAVTEAFVRLYKAGLLYRNHQLVNWSCALRSAISDIEVENRPLPGHTQLRLPGCPTPVSFGLLFSVAFPVDGEPDAEVVVGTTRPETLPGDVAVAVHPDDSRYTHLHGRQLRHPLMGQPLPLITDYAVQPHVGTGAVKVTPAHSPADAEMGARHGLSPLNVIAEDGTMTSLCGDWLQGLHRFVAREKIMSVLSEWGLFRGLQNHPMVLPICSRSGDVIEYLLKNQWFVRCQEMGARAAKAVESGALELSPSFHQKNWQHWFSHIGDWCVSRQLWWGHQIPAYLVVEDHAQGEEDCWVVGRSEAEAREVAAELTGRPGAELTLERDPDVLDTWFSSALFPFSALGWPQETPDLARFYPLSLLETGSDLLLFWVGRMVMLGTQLTGQLPFSKVLLHPMVRDRQGRKMSKSLGNVLDPRDIISGVEMQVLQEKLRSGNLDPAELAIVAAAQKKDFPHGIPECGTDALRFTLCSHGVQAGDLHLSVSEVQSCRHFCNKIWNALRFILNALGEKFVPQPAEELSPSSPMDAWILSRLALAAQECERGFLTRELSLVTHALHHFWLHNLCDVYLEAVKPVLWHSPRPLGPPQVLFSCADLGLRLLAPLMPFLAEELWQRLPPRPGCPPAPSISVAPYPSACSLEHWRQPELERRFSRVQEVVQVLRALRATYQLTKARPRVLLQSSEPGDQGLFEAFLEPLGTLGYCGAVGLLPPGAAAPSGWAQAPLSDTAQVYMELQGLVDPQIQLPLLAARRYKLQKQLDSLTARTPSEGEAGTQRQQKLSSLQLELSKLDKAASHLRQLMDEPPAPGSPEL

SEQ ID NO: 69559 - protein, 923 aa, Homo sapiens
MCIPPPNVTGSLHIGHALTVAIQDALVRWHRMRGDQVLWVPGSDHAGIATQAVVEKQLWKERGVRRHELSREAFLREVWQWKEAKGGEICEQLRALGASLDWDRECFTMDVGSSVAVTEAFVRLYKAGLLYRNHQLVNWSCALRSAISDIEVENRPLPGHTQLRLPGCPTPVSFGLLFSVAFPVDGEPDAEVVVGTTRPETLPGDVAVAVHPDDSRYTHLHGRQLRHPLMGQPLPLITDYAVQPHVGTGAVKVTPAHSPADAEMGARHGLSPLNVIAEDGTMTSLCGDWLQGLHRFVAREKIMSVLSEWGLFRGLQNHPMVLPICSRSGDVIEYLLKNQWFVRCQEMGARAAKAVESGALELSPSFHQKNWQHWFSHIGDWCVSRQLWWGHQIPAYLVVEDHAQGEEDCWVVGRSEAEAREVAAELTGRPGAELTLERDPDVLDTWFSSALFPFSALGWPQETPDLARFYPLSLLETGSDLLLFWVGRMVMLGTQLTGQLPFSKVLLHPMVRDRQGRKMSKSLGNVLDPRDIISGVEMQVLQEKLRSGNLDPAELAIVAAAQKKDFPHGIPECGTDALRFTLCSHGVQAGDLHLSVSEVQSCRHFCNKIWNALRFILNALGEKFVPQPAEELSPSSPMDAWILSRLALAAQECERGFLTRELSLVTHALHHFWLHNLCDVYLEAVKPVLWHSPRPLGPPQVLFSCADLGLRLLAPLMPFLAEELWQRLPPRPGCPPAPSISVAPYPSACSLEHWRQPELERRFSRVQEVVQVLRALRATYQLTKARPRVLLQSSEPGDQGLFEAFLEPLGTLGYCGAVGLLPPGAAAPSGWAQAPLSDTAQVYMELQGLVDPQIQLPLLAARRYKLQKQLDSLTARTPSEGEAGTQRQQKLSSLQLELSKLDKAASHLRQLMDEPPAPGSPEL

SEQ ID NO: 69560 - protein, 294 aa, Homo sapiens
MASASGAMAKHEQILVLDPPTDLKFKGPFTDVVTTNLKLRNPSDRKVCFKVKTTAPRRYCVRPNSGIIDPGSTVTVSVMLQPFDYDPNEKSKHKFMVQTIFAPPNTSDMEAVWKEAKPDELMDSKLRCVFEMPNENDKLGITPPGNAPTVTSMSSINNTVATPASYHTKDDPRGLSVLKQEKQKNDMEPSKAVPLNASKQDGPMPKPHSVSLNDTETRKLMEECKRLQGEMMKLSEENRHLRDEGLRLRKVAHSDKPGSTSTASFRDNVTSPLPSLLVVIAAIFIGFFLGKFIL

SEQ ID NO: 69561 - protein, 249 aa, Homo sapiens
MASASGAMAKHEQILVLDPPTDLKFKGPFTDVVTTNLKLRNPSDRKVCFKVKTTAPRRYCVRPNSGIIDPGSTVTVSVMLQPFDYDPNEKSKHKFMVQTIFAPPNTSDMEAVWKEAKPDELMDSKLRCVFEMPNENDKLNDMEPSKAVPLNASKQDGPMPKPHSVSLNDTETRKLMEECKRLQGEMMKLSEENRHLRDEGLRLRKVAHSDKPGSTSTASFRDNVTSPLPSLLVVIAAIFIGFFLGKFIL

SEQ ID NO: 69562 - protein, 99 aa, Homo sapiens
MAKVEQVLSLEPQHELKFRGPFTDVVTTNLKLGNPTDRNVCFKVKTTAPRRYCVRPNSGIIDAGASINVSGRRWTADEEDSAEQQPHFSISPNWEGRRP

SEQ ID NO: 69563 - protein, 243 aa, Homo sapiens
MAKVEQVLSLEPQHELKFRGPFTDVVTTNLKLGNPTDRNVCFKVKTTAPRRYCVRPNSGIIDAGASINVSVMLQPFDYDPNEKSKHKFMVQSMFAPTDTSDMEAVWKEAKPEDLMDSKLRCVFELPAENDKPHDVEINKIISTTASKTETPIVSKSLSSSLDDTEVKKVMEECKRLQGEVQRLREENKQFKEEDGLRMRKTVQSNSPISALAPTGKEEGLSTRLLALVVLFFIVGVIIGKIAL

SEQ ID NO: 69564 - protein, 524 aa, Homo sapiens
MDTESTYSGYSYYSSHSKKSHRQGERTRERHKSPRNKDGRGSEKSVTIQPPTGEPLLGNDSTRTEEVQDDNWGETTTAITGTSEHSISQEDIARISKDMEDSVGLDCKRYLGLTVASFLGLLVFLTPIAFILLPPILWRDELEPCGTICEGLFISMAFKLLILLIGTWALFFRKRRADMPRVFVFRALLLVLIFLFVVSYWLFYGVRILDSRDRNYQGIVQYAVSLVDALLFIHYLAIVLLELRQLQPMFTLQVVRSTDGESRFYSLGHLSIQRAALVVLENYYKDFTIYNPNLLTASKFRAAKHMAGLKVYNVDGPSNNATGQSRAMIAAAARRRDSSHNELYYEEAEHERRVKKRKARLVVAVEEAFIHIQRLQAEEQQKAPGEVMDPREAAQAIFPSMARALQKYLRITRQQNYHSMESILQHLAFCITNGMTPKAFLERYLSAGPTLQYDKDRWLSTQWRLVSDEAVTNGLRDGIVFVLKCLDFSLVVNVKKIPFIILSEEFIDPKSHKFVLRLQSETSV

SEQ ID NO: 69565 - protein, 524 aa, Homo sapiens; identical to SEQ ID NO: 69564

SEQ ID NO: 69566 - protein, 524 aa, Homo sapiens; identical to SEQ ID NO: 69564

SEQ ID NO: 69567 - protein, 522 aa, Homo sapiens
MDTESTYSGYSYYSSHSKKSHRQGERTRERHKSPRNKDGRGSEKSVTIQPPTGEPLLGNDSTRTEEDDNWGETTTAITGTSEHSISQEDIARISKDMEDSVGLDCKRYLGLTVASFLGLLVFLTPIAFILLPPILWRDELEPCGTICEGLFISMAFKLLILLIGTWALFFRKRRADMPRVFVFRALLLVLIFLFVVSYWLFYGVRILDSRDRNYQGIVQYAVSLVDALLFIHYLAIVLLELRQLQPMFTLQVVRSTDGESRFYSLGHLSIQRAALVVLENYYKDFTIYNPNLLTASKFRAAKHMAGLKVYNVDGPSNNATGQSRAMIAAAARRRDSSHNELYYEEAEHERRVKKRKARLVVAVEEAFIHIQRLQAEEQQKAPGEVMDPREAAQAIFPSMARALQKYLRITRQQNYHSMESILQHLAFCITNGMTPKAFLERYLSAGPTLQYDKDRWLSTQWRLVSDEAVTNGLRDGIVFVLKCLDFSLVVNVKKIPFIILSEEFIDPKSHKFVLRLQSETSV

SEQ ID NO: 69568 - protein, 521 aa, Homo sapiens
MDTESQYSGYSYKSGHSRSSRKHRDRRDRHRSKSRDGGRGDKSVTIQAPGEPLLDNESTRGDERDDNWGETTTVVTGTSEHSISHDDLTRIAKDMEDSVPLDCSRHLGVAAGATLALLSFLTPLAFLLLPPLLWREELEPCGTACEGLFISVAFKLLILLLGSWALFFRRPKASLPRVFVLRALLMVLVFLLVVSYWLFYGVRILDARERSYQGVVQFAVSLVDALLFVHYLAVVLLELRQLQPQFTLKVVRSTDGASRFYNVGHLSIQRVAVWILEKYYHDFPVYNPALLNLPKSVLAKKVSGFKVYSLGEENSTNNSTGQSRAVIAAAARRRDNSHNEYYYEEAEHERRVRKRRARLVVAVEEAFTHIKRLQEEEQKNPREVMDPREAAQAIFASMARAMQKYLRTTKQQPYHTMESILQHLEFCITHDMTPKAFLERYLAAGPTIQYHKERWLAKQWTLVSEEPVTNGLKDGIVFLLKRQDFSLVVSTKKVPFFKLSEEFVDPKSHKFVMRLQSETSV

SEQ ID NO: 69569 - protein, 513 aa, Homo sapiens
MTTQLPAYVAILLFYVSRASCQDTFTAAVYEHAAILPNATLTPVSREEALALMNRNLDILEGAITSAADQGAHIIVTPEDAIYGWNFNRDSLYPYLEDIPDPEVNWIPCNNRNRFGQTPVQERLSCLAKNNSIYVVANIGDKKPCDTSDPQCPPDGRYQYNTDVVFDSQGKLVARYHKQNLFMGENQFNVPKEPEIVTFNTTFGSFGIFTCFDILFHDPAVTLVKDFHVDTIVFPTAWMNVLPHLSAVEFHSAWAMGMRVNFLASNIHYPSKKMTGSGIYAPNSSRAFHYDMKTEEGKLLLSQLDSHPSHSAVVNWTSYASSIEALSSGNKEFKGTVFFDEFTFVKLTGVAGNYTVCQKDLCCHLSYKMSENIPNEVYALGAFDGLHTVEGRYYLQICTLLKCKTTNLNTCGDSAETASTRFEMFSLSGTFGTQYVFPEVLLSENQLAPGEFQVSTDGRLFSLKPTSGPVLTVTLFGRLYEKDWASNASSGLTAQARIIMLIVIAPIVCSLSW

SEQ ID NO: 69570 - protein, 520 aa, Homo sapiens
MVTSSFPISVAVFALITLQVGTQDSFIAAVYEHAVILPNKTETPVSQEDALNLMNENIDILETAIKQAAEQGARIIVTPEDALYGWKFTRETVFPYLEDIPDPQVNWIPCQDPHRFGHTPVQARLSCLAKDNSIYVLANLGDKKPCNSRDSTCPPNGYFQYNTNVVYNTEGKLVARYHKYHLYSEPQFNVPEKPELVTFNTAFGRFGIFTCFDIFFYDPGVTLVKDFHVDTILFPTAWMNVLPLLTAIEFHSAWAMGMGVNLLVANTHHVSLNMTGSGIYAPNGPKVYHYDMKTELGKLLLSEVDSHPLSSLAYPTAVNWNAYATTIKPFPVQKNTFRGFISRDGFNFTELFENAGNLTVCQKELCCHLSYRMLQKEENEVYVLGAFTGLHGRRRREYWQVCTLLKCKTTNLTTCGRPVETASTRFEMFSLSGTFGTEYVFPEVLLTEIHLSPGKFEVLKDGRLVNKNGSSGPILTVSLFGRWYTKDSLYSSCGTSNSAITYLLIFILLMIIALQNIVML

SEQ ID NO: 69571 - protein, 166 aa, Homo sapiens
MVTSSFPISVAVFALITLQVGTQDSFIAAVYEHAVILPNKTETPVSQEDALNLMNENIDILETAIKQAAEQGARIIVTPEDALYGWKFTRETVFPYLEDIPDPQVNWIPCQDPHRFGHTPVQARLSCLAKDNSIYVLANLGDKKPCNSRDSTCPPNGYFQYNTNVV

SEQ ID NO: 69572 - protein, 467 aa, Homo sapiens
MNENIDILETAIKQAAEQGARIIVTPEDALYGWKFTRETVFPYLEDIPDPQVNWIPCQDPHRFGHTPVQARLSCLAKDNSIYVLANLGDKKPCNSRDSTCPPNGYFQYNTNVVYNTEGKLVARYHKYHLYSEPQFNVPEKPELVTFNTAFGRFGIFTCFDIFFYDPGVTLVKDFHVDTILFPTAWMNVLPLLTAIEFHSAWAMGMGVNLLVANTHHVSLNMTGSGIYAPNGPKVYHYDMKTELGKLLLSEVDSHPLSSLAYPTAVNWNAYATTIKPFPVQKNTFRGFISRDGFNFTELFENAGNLTVCQKELCCHLSYRMLQKEENEVYVLGAFTGLHGRRRREYWQVCTLLKCKTTNLTTCGRPVETASTRFEMFSLSGTFGTEYVFPEVLLTEIHLSPGKFEVLKDGRLVNKNGSSGPILTVSLFGRWYTKDSLYSSCGTSNSAITYLLIFILLMIIALQNIVML

SEQ ID NO: 69573 - protein, 102 aa, Homo sapiens
MNENIDILETAIKQAAEQGARIIVTPEDALYGWKFTRETVFPYLEDIPDPQVNWIPCQDPHRFGHTPVQARLSCLAKDNSIYVLANLGDKKPCNSRDSTCPP

SEQ ID NO: 69574 - protein, 101 aa, Homo sapiens
MVTSSFPISVAVFALITLQVGTQDSFIAAVYEHAVILPNKTETPVSQEDALNLMNENIDILETAIKQAAEQGARIIVTPEDALYGWKFTRETVFPYLEDIP

SEQ ID NO: 69575 - protein, 500 aa, Homo sapiens
MIISHFPKCVAVFALLALSVGALDTFIAAVYEHAVILPNRTETPVSKEEALLLMNKNIDVLEKAVKLAAKQGAHIIVTPEDGIYGWIFTRESIYPYLEDIPDPGVNWIPCRDPWRFGNTPVQQRLSCLAKDNSIYVVANIGDKKPCNASDSQCPPDGRYQYNTDVVFDSQGKLLARYHKYNLFAPEIQFDFPKDSELVTFDTPFGKFGIFTCFDIFSHDPAVVVVDESIDSILYPTAWYNTLPLLSAVPFHSAWAKAMGVNLLAANTHNTSMHMTGSGIYAPEAVKVYHYDMETESGQLLLSELKSRPRREPTYPAAVDWHAYASSVKPFSSEQSDFLGMIYFDEFTFTKLKRNTGNYTACQKDLCCHLTYKMSEKRTDEIYALGAFDGLHTVEGQYYLQICALLKCQTTDLETCGEPVGSAFTKFEDFSLSGTFGTRYVFPQIILSGSQLAPERHYEISRDGRLRSRSGAPLPVLVMALYGRVFEKDPPRLGQGSGKFQ

SEQ ID NO: 69576 - protein, 274 aa, Homo sapiens
MIISHFPKCVAVFALLALSVGALDTFIAAVYEHAVILPNRTETPVSKEEALLLMNKNIDVLEKAVKLAAKQGAHIIVTPEDGIYGWIFTRESIYPYLEDIPDPGVNWIPCRDPWRFGNTPVQQRLSCLAKDNSIYVVANIGDKKPCNASDSQCPPDGRYQYNTDVVFDSQGKLLARYHKYNLFAPEIQFDFPKDSELVTFDTPFGKFGIFTCFDIFSHDPAVVVVDEFQLTAFSTPQHGTTRCPSSRLFPSIQHGPRPWESIYLLQIPTTPACT

SEQ ID NO: 69577 - protein, 147 aa, Homo sapiens
MIISHFPKCVAVFALLALSVGALDTFIAAVYEHAVILPNRTETPVSKEEALLLMNKNIDVLEKAVKLAAKQGAHIIVTPEDGIYGWIFTRESIYPYLEDIPDPGVNWIPCRDPWRKSKKMNEPVSKELCYHCHSECNQYGQWKLYRT

SEQ ID NO: 69578 - protein, 207 aa, Homo sapiens
MIISHFPKCVAVFALLALSVGALDTFIAAVYEHAVILPNRTETPVSKEEALLLMNKNIDVLEKAVKLAAKQGAHIIVTPEDGIYGWIFTRESIYPYLEDIPDPGVNWIPCRDPWRFGNTPVQQRLSCLAKDNSIYVVANIGDKKPCNASDSQCPPDGRYQYNTDVVFDSQGKLLARYHKGVESTPQKQSRCTTMTWKQRVVSCCYQN

SEQ ID NO: 69579 - protein, 186 aa, Homo sapiens
MSPKPRASGPPAKATEAGKRKSSSQPSPSDPKKKTTKVAKKGKAVRRGRRGKKGAATKMAAVTAPEAESAPAAPGPSDQPSQELPQHELPPEEPVSEGTQHDPLSQEAELEEPLSQESEVEEPLSQESQVEEPLSQESEVEEPLSQESQVEEPLSQESEMEEPLSQESQVEEPPSQESEMEELPSV

SEQ ID NO: 69580 - protein, 206 aa, Homo sapiens
MSPKPRASGPPAKATEAGKRKSSSQPSPSDPKKKTTKVAKKGKAVRRGRRGKKGAATKMAAVTAPEAESAPAAPGPSDQPSQELPQHELPPEEPVSEGTQHDPLSQEAELEEPLSQESEVEEPLSQESQVEEPLSQESEVEEPLSQESQVEEPLSQESEVEEPLSQESQVEEPLSQESEMEEPLSQESQVEEPPSQESEMEELPSV

SEQ ID NO: 69581 - protein, 139 aa, Homo sapiens [sequence omitted]

SEQ ID NO: 69582 - protein, 186 aa, Homo sapiens
MSPKPRASGPPAKATEAGKRKSSSQPSPSDPKKKTTKVAKKGKAVRRGRRGKKGAATKMAAVTAPEAESGPAAPGPSDQPSQELPQHELPPEEPVSEGTQHDPLSQESELEEPLSQESEVEEPLSQESQVEEPLSQESEVEEPLSQESQVEEPLSQESEVEEPLSQESQVEEPLSQESEMEELPSV

SEQ ID NO: 69583 - protein, 166 aa, Homo sapiens
MSPKPRASGPPAKATEAGKRKSSSQPSPSDPKKKTTKVAKKGKAVRRGRRGKKGAATKMAAVTAPEAESGPAAPGPSDQPSQELPQHELPPEEPVSEGTQHDPLSQESELEEPLSQESEVEEPLSQESQVEEPLSQESEVEEPLSQESQVEEPLSQESEMEELPSV

SEQ ID NO: 69584 - protein, 125 aa, Homo sapiens
MSPKPRASGPPAKATEAGKRKSSSQPSPSDPKKKTTKVAKKGKAVRRGRRGKKGAATKMAAVTAPEAESGPAAPGPSDQPSQELPQHELPPEEPVSEGTQHDPLSQESELEEPLSQERPATPLSP

SEQ ID NO: 69585 - protein, 125 aa, Homo sapiens
MSPKPRASGPPAKAKETGKRKSSSQPSPSGPKKKTTKVAEKGEAVRGGRRGKKGAATKMAAVTAPEAESGPAAPGPSDQPSQELPQHELPPEEPVSEGTQHDPLSQESELEEPLSKGRPSTPLSP

SEQ ID NO: 69586 - protein, 739 aa, Homo sapiens
MPGKMVVILGASNILWIMFAASQAFKIETTPESRYLAQIGDSVSLTCSTTGCESPFFSWRTQIDSPLNGKVTNEGTTSTLTMNPVSFGNEHSYLCTATCESRKLEKGIQVEIYSFPKDPEIHLSGPLEAGKPITVKCSVADVYPFDRLEIDLLKGDHLMKSQEFLEDADRKSLETKSLEVTFTPVIEDIGKVLVCRAKLHIDEMDSVPTVRQAVKELQVYISPKNTVISVNPSTKLQEGGSVTMTCSSEGLPAPEIFWSKKLDNGNLQHLSGNATLTLIAMRMEDSGIYVCEGVNLIGKNRKEVELIVQEKPFTVEISPGPRIAAQIGDSVMLTCSVMGCESPSFSWRTQIDSPLSGKVRSEGTNSTLTLSPVSFENEHSYLCTVTCGHKKLEKGIQVELYSFPRDPEIEMSGGLVNGSSVTVSCKVPSVYPLDRLEIELLKGETILENIEFLEDTDMKSLENKSLEMTFIPTIEDTGKALVCQAKLHIDDMEFEPKQRQSTQTLYVNVAPRDTTVLVSPSSILEEGSSVNMTCLSQGFPAPKILWSRQLPNGELQPLSENATLTLISTKMEDSGVYLCEGINQAGRSRKEVELIIQVTPKDIKLTAFPSESVKEGDTVIISCTCGNVPETWIILKKKAETGDTVLKSIDGAYTIRKAQLKDAGVYECESKNKVGSQLRSLTLDVQGRENNKDYFSPELLVLYFASSLIIPAIGMIIYFARKANMKGSYSLVEAQKSKV

SEQ ID NO: 69587 - protein, 647 aa, Homo sapiens
MPGKMVVILGASNILWIMFAASQAFKIETTPESRYLAQIGDSVSLTCSTTGCESPFFSWRTQIDSPLNGKVTNEGTTSTLTMNPVSFGNEHSYLCTATCESRKLEKGIQVEIYSFPKDPEIHLSGPLEAGKPITVKCSVADVYPFDRLEIDLLKGDHLMKSQEFLEDADRKSLETKSLEVTFTPVIEDIGKVLVCRAKLHIDEMDSVPTVRQAVKELQVYISPKNTVISVNPSTKLQEGGSVTMTCSSEGLPAPEIFWSKKLDNGNLQHLSGNATLTLIAMRMEDSGIYVCEGVNLIGKNRKEVELIVQAFPRDPEIEMSGGLVNGSSVTVSCKVPSVYPLDRLEIELLKGETILENIEFLEDTDMKSLENKSLEMTFIPTIEDTGKALVCQAKLHIDDMEFEPKQRQSTQTLYVNVAPRDTTVLVSPSSILEEGSSVNMTCLSQGFPAPKILWSRQLPNGELQPLSENATLTLISTKMEDSGVYLCEGINQAGRSRKEVELIIQVTPKDIKLTAFPSESVKEGDTVIISCTCGNVPETWIILKKKAETGDTVLKSIDGAYTIRKAQLKDAGVYECESKNKVGSQLRSLTLDVQGRENNKDYFSPELLVLYFASSLIIPAIGMIIYFARKANMKGSYSLVEAQKSKV

SEQ ID NO: 69588 - protein, 540 aa, Homo sapiens
MPGKMVVILGASNILWIMFAASQAFKIETTPESRYLAQIGDSVSLTCSTTGCESPFFSWRTQIDSPLNGKVTNEGTTSTLTMNPVSFGNEHSYLCTATCESRKLEKGIQVEIYSFPKDPEIHLSGPLEAGKPITVKCSVADVYPFDRLEIDLLKGDHLMKSQEFLEDADRKSLETKSLEVTFTPVIEDIGKVLVCRAKLHIDEMDSVPTVRQAVKELQVYISPKNTVISVNPSTKLQEGGSVTMTCSSEGLPAPEIFWSKKLDNGNLQHLSGNATLTLIAMRMEDSGIYVCEGVNLIGKNRKEVELIVQVAPRDTTVLVSPSSILEEGSSVNMTCLSQGFPAPKILWSRQLPNGELQPLSENATLTLISTKMEDSGVYLCEGINQAGRSRKEVELIIQVTPKDIKLTAFPSESVKEGDTVIISCTCGNVPETWIILKKKAETGDTVLKSIDGAYTIRKAQLKDAGVYECESKNKVGSQLRSLTLDVQGRENNKDYFSPELLVLYFASSLIIPAIGMIIYFARKANMKGSYSLVEAQKSKV

SEQ ID NO: 69589 - protein, 677 aa, Homo sapiens
MPGKMVVILGASNILWIMFAASQAFKIETTPESRYLAQIGDSVSLTCSTTGSFPKDPEIHLSGPLEAGKPITVKCSVADVYPFDRLEIDLLKGDHLMKSQEFLEDADRKSLETKSLEVTFTPVIEDIGKVLVCRAKLHIDEMDSVPTVRQAVKELQVYISPKNTVISVNPSTKLQEGGSVTMTCSSEGLPAPEIFWSKKLDNGNLQHLSGNATLTLIAMRMEDSGIYVCEGVNLIGKNRKEVELIVQEKPFTVEISPGPRIAAQIGDSVMLTCSVMGCESPSFSWRTQIDSPLSGKVRSEGTNSTLTLSPVSFENEHSYLCTVTCGHKKLEKGIQVELYSFPRDPEIEMSGGLVNGSSVTVSCKVPSVYPLDRLEIELLKGETILENIEFLEDTDMKSLENKSLEMTFIPTIEDTGKALVCQAKLHIDDMEFEPKQRQSTQTLYVNVAPRDTTVLVSPSSILEEGSSVNMTCLSQGFPAPKILWSRQLPNGELQPLSENATLTLISTKMEDSGVYLCEGINQAGRSRKEVELIIQVTPKDIKLTAFPSESVKEGDTVIISCTCGNVPETWIILKKKAETGDTVLKSIDGAYTIRKAQLKDAGVYECESKNKVGSQLRSLTLDVQGRENNKDYFSPELLVLYFASSLIIPAIGMIIYFARKANMKGSYSLVEAQKSKV

SEQ ID NO: 69590 - protein, 521 aa, Homo sapiens
MEANWTAFLFQAHEASHHQQQAAQNSLLPLLSSAVEPPDQKPLLPIPITQKPQGAPETLKDAIGIKKEKPKTSFVCTYCSKAFRDSYHLRRHESCHTGIKLVSRPKKTPTTVVPLISTIAGDSSRTSLVSTIAGILSTVTTSSSGTNPSSSASTTAMPVTQSVKKPSKPVKKNHACEMCGKAFRDVYHLNRHKLSHSDEKPFECPICNQRFKRKDRMTYHVRSHEGGITKPYTCSVCGKGFSRPDHLSCHVKHVHSTERPFKCQTCTAAFATKDRLRTHMVRHEGKVSCNICGKLLSAAYITSHLKTHGQSQSINCNTCKQGISKTCMSEETSNQKQQQQQQQQQQQQQQQQQQHVTSWPGKQVETLRLWEEAVKARKKEAANLCQTSTAATTPVTLTTPFSITSSVSSGTMSNPVTVAAAMSMRSPVNVSSAVNITSPMNIGHPVTITSPLSMTSPLTLTTPVNLPTPVTAPVNIAHPVTITSPMNLPTPMTLAAPLNIAMRPVESMPFLPQALPTSPPW

SEQ ID NO: 69591 - protein, 521 aa, Homo sapiens; identical to SEQ ID NO: 69590

SEQ ID NO: 69592 - protein, 457 aa, Homo sapiens
MRPPSPLPARWLCVLAGALAWALGPAGGQAARLQEECDYVQMIEVQHKQCLEEAQLENETIGCSKMWDNLTCWPATPRGQVVVLACPLIFKLFSSIQGRNVSRSCTDEGWTHLEPGPYPIACGLDDKAASLDEQQTMFYGSVKTGYTIGYGLSLATLLVATAILSLFRKLHCTRNYIHMHLFISFILRAAAVFIKDLALFDSGESDQCSEGSVGCKAAMVFFQYCVMANFFWLLVEGLYLYTLLAVSFFSERKYFWGYILIGWGVPSTFTMVWTIARIHFEDYGCWDTINSSLWWIIKGPILTSILVNFILFICIIRILLQKLRPPDIRKSDSSPYSRLARSTLLLIPLFGVHYIMFAFFPDNFKPEVKMVFELVVGSFQGFVVAILYCFLNGEVQAELRRKWRRWHLQGVLGWNPKYRHPSGGSNGATCSTQVSMLTRVSPGARRSSSFQAEVSLV

SEQ ID NO: 69593 - protein, 416 aa, Homo sapiens
MIEVQHKQCLEEAQLENETIGCSKMWDNLTCWPATPRGQVVVLACPLIFKLFSSIQGRNVSRSCTDEGWTHLEPGPYPIACGLDDKAASLDEQQTMFYGSVKTGYTIGYGLSLATLLVATAILSLFRKLHCTRNYIHMHLFISFILRAAAVFIKDLALFDSGESDQCSEGSVGCKAAMVFFQYCVMANFFWLLVEGLYLYTLLAVSFFSERKYFWGYILIGWGVPSTFTMVWTIARIHFEDYGCWDTINSSLWWIIKGPILTSILVNFILFICIIRILLQKLRPPDIRKSDSSPYSRLARSTLLLIPLFGVHYIMFAFFPDNFKPEVKMVFELVVGSFQGFVVAILYCFLNGEVQAELRRKWRRWHLQGVLGWNPKYRHPSGGSNGATCSTQVSMLTRVSPGARRSSSFQAEVSLV

SEQ ID NO: 69594 - protein, 247 aa, Homo sapiens
MTRQRVWMRWAVRQPWSFSNIVSWLTSSGCWWRASTCTPCLPSPSSLSGSTSGGVPSTFTMVWTIARIHFEDYGCWDTINSSLWWIIKGPILTSILVNFILFICIIRILLQKLRPPDIRKSDSSPYSRLARSTLLLIPLFGVHYIMFAFFPDNFKPEVKMVFELVVGSFQGFVVAILYCFLNGEVQAELRRKWRRWHLQGVLGWNPKYRHPSGGSNGATCSTQVSMLTRVSPGARRSSSFQAEVSLV

SEQ ID NO: 69595 - protein, 409 aa, Homo sapiens
MRAGRRPRLGPWAGGCSKMWDNLTCWPATPRGQVVVLACPLIFKLFSSIQGRNVSRSCTDEGWTHLEPGPYPIACGLDDKAASLDEQTMFYGSVKTGYTIGYGLSLATLLVATAILSLFRKLHCTRNYIHMHLFISFILRAAAVFIKDLALFDSGESDQCSEGSVGCKAAMVFFQYCVMANFFWLLVEGLYLYTLLAVSFFSERKYFWGYILIGWGVPSTFTMVWTIARIHFEDYGCWDTINSSLWWIIKGPILTSILVNFILFICIIRILLQKLRPPDIRKSDSSPYSRLARSTLLLIPLFGVHYIMFAFFPDNFKPEVKMVFELVVGSFQGFVVAILYCFLNGEVQAELRRKWRRWHLQGVLGWNPKYRHPSGGSNGATCSTQVSMLTRVSPGARRSSSFQAEVSLV

SEQ ID NO: 69596 - protein, 438 aa, Homo sapiens
MRTLLPPALLTCWLLAPVNSIHPECRFHLEIQEEETKCAELLRSQTEKHKACSGVWDNITCWRPANVGETVTVPCPKVFSNFYSKAGNISKNCTSDGWSETFPDFVDACGYSDPEDESKITFYILVKAIYTLGYSVSLMSLATGSIILCLFRKLHCTRNYIHLNLFLSFILRAISVLVKDDVLYSSSGTLHCPDQPSSWVGCKLSLVFLQYCIMANFFWLLVEGLYLHTLLVAMLPPRRCFLAYLLIGWGLPTVCIGAWTAARLYLEDTGCWDTNDHSVPWWVIRIPILISIIVNFVLFISIIRILLQKLTSPDVGGNDQSQYKRLAKSTLLLIPLFGVHYMVFAVFPISISSKYQILFELCLGSFQGLVVAVLYCFLNSEVQCELKRKWRSRCPTPSASRDYRVCGSSFSRNGSEGALQFHRGSRAQSFLQTETSVI

SEQ ID NO: 69597 - protein, 422 aa, Homo sapiens
MPLWEAPSDHPANPPATLQGHTSLPGCQEEPARDPQSGLPQITSESSSFSEGSLPSWSSGPAGAKLNASHEGIGSSSDGNGDSKAATERVVSAMDTVRRKHPEITFYILVKAIYTLGYSVSLMSLATGSIILCLFRKLHCTRNYIHLNLFLSFILRAISVLVKDDVLYSSSGTLHCPDQPSSWVGCKLSLVFLQYCIMANFFWLLVEGLYLHTLLVAMLPPRRCFLAYLLIGWGLPTVCIGAWTAARLYLEDTGCWDTNDHSVPWWVIRIPILISIIVNFVLFISIIRILLQKLTSPDVGGNDQSQYKRLAKSTLLLIPLFGVHYMVFAVFPISISSKYQILFELCLGSFQGLVVAVLYCFLNSEVQCELKRKWRSRCPTPSASRDYRVCGSSFSRNGSEGALQFHRGSRAQSFLQTETSVI

SEQ ID NO: 69598 - protein, 77 aa, Homo sapiens
MRTLLPPALLTCWLLAPVNSIHPECRFHLEIQEEETKCAELLRSQTEKHKGHTKGFILIHAGGLKRILDPHTYPLAP

SEQ ID NO: 69599 - protein, 673 aa, Homo sapiens
MCSRVPLLLPLLLLLALGPGVQGCPSGCQCSQPQTVFCTARQGTTVPRDVPPDTVGLYVFENGITMLDAGSFAGLPGLQLLDLSQNQIASLPSGVFQPLANLSNLDLTANRLHEITNETFRGLRRLERLYLGKNRIRHIQPGAFDTLDRLLELKLQDNELRALPPLRLPRLLLLDLSHNSLLALEPGILDTANVEALRLAGLGLQQLDEGLFSRLRNLHDLDVSDNQLERVPPVIRGLRGLTRLRLAGNTRIAQLRPEDLAGLAALQELDVSNLSLQALPGDLSGLFPRLRLLAAARNPFNCVCPLSWFGPWVRESHVTLASPEETRCHFPPKNAGRLLLELDYADFGCPATTTTATVPTTRPVVREPTALSSSLAPTWLSPTEPATEAPSPPSTAPPTVGPVPQPQDCPPSTCLNGGTCHLGTRHHLACLCPEGFTGLYCESQMGQGTRPSPTPVTPRPPRSLTLGIEPVSPTSLRVGLQRYLQGSSVQLRSLRLTYRNLSGPDKRLVTLRLPASLAEYTVTQLRPNATYSVCVMPLGPGRVPEGEEACGEAHTPPAVHSNHAPVTQAREGNLPLLIAPALAAVLLAALAAVGAAYCVRRGRAMAAAAQDKGQVGPGAGPLELEGVKVPLEPGPKATEGGGEALPSGSECEVPLMGFPGPGLQSPLHAKPYI

SEQ ID NO: 69600 - protein, 845 aa, Homo sapiens
MELWRQCTHWLIQCRVLPPSHRVTWDGAQVCELAQALRDGVLLCQLLNNLLPHAINLREVNLRPQMSQFLCLKNIRTFLSTCCEKFGLKRSELFEAFDLFDVQDFGKVIYTLSALSWTPIAQNRGIMPFPTEEESVGDEDIYSGLSDQIDDTVEEDEDLYDCVENEEAEGDEIYEDLMRSEPVSMPPKMTEYDKRCCCLREIQQTEEKYTDTLGSIQQHFLKPLQRFLKPQDIEIIFINIEDLLRVHTHFLKEMKEALGTPGAANLYQVFIKYKERFLVYGRYCSQVESASKHLDRVAAAREDVQMKLEECSQRANNGRFTLRDLLMVPMQRVLKYHLLLQELVKHTQEAMEKENLRLALDAMRDLAQCVNEVKRDNETLRQITNFQLSIENLDQSLAHYGRPKIDGELKITSVERRSKMDRYAFLLDKALLICKRRGDSYDLKDFVNLHSFQVRDDSSGDRDNKKWSHMFLLIEDQGAQGYELFFKTRELKKKWMEQFEMAISNIYPENATANGHDFQMFSFEETTSCKACQMLLRGTFYQGYRCHRCRASAHKECLGRVPPCGRHGQDFPGTMKKDKLHRRAQDKKRNELGLPKMEVFQEYYGLPPPPGAIGPFLRLNPGDIVELTKAEAEQNWWEGRNTSTNEIGWFPCNRVKPYVHGPPQDLSVHLWYAGPMERAGAESILANRSDGTFLVRQRVKDAAEFAISIKYNVEVKHIKIMTAEGLYRITEKKAFRGLTELVEFYQQNSLKDCFKSLDTTLQFPFKEPEKRTISRPAVGSTKYFGTAKARYDFCARDRSELSLKEGDIIKILNKKGQQGWWRGEIYGRVGWFPANYVEEDYSEYC

SEQ ID NO: 69601 - protein, 748 aa, Homo sapiens
MSQFLCLKNIRTFLSTCCEKFGLKRSELFEAFDLFDVQDFGKVIYTLSALSWTPIAQNRGIMPFPTEEESVGDEDIYSGLSDQIDDTVEEDEDLYDCVENEEAEGDEIYEDLMRSEPVSMPHFLKPLQRFLKPQDIEIIFINIEDLLRVHTHFLKEMKEALGTPGAANLYQVFIKYKERFLVYGRYCSQVESASKHLDRVAAAREDVQMKLEECSQRANNGRFTLRDLLMVPMQRVLKYHLLLQELVKHTQEAMEKENLRLALDAMRDLAQCVNEVKRDNETLRQITNFQLSIENLDQSLAHYGRPKIDGELKITSVERRSKMDRYAFLLDKALLICKRRGDSYDLKDFVNLHSFQVRDDSSGDRDNKKWSHMFLLIEDQGAQGYELFFKTRELKKKWMEQFEMAISNIYPENATANGHDFQMFSFEETTSCKACQMLLRGTFYQGYRCHRCRASAHKECLGRVPPCGRHGQDFPGTMKKDKLHRRAQDKKRNELGLPKMEVFQEYYGLPPPPGAIGPFLRLNPGDIVELTKAEAEQNWWEGRNTSTNEIGWFPCNRVKPYVHGPPQDLSVHLWYAGPMERAGAESILANRSDGTFLVRQRVKDAAEFAISIKYNVEVKHIKIMTAEGLYRITEKKAFRGLTELVEFYQQNSLKDCFKSLDTTLQFPFKEPEKRTISRPAVGSTKYFGTAKARYDFCARDRSELSLKEGDIIKILNKKGQQGWWRGEIYGRVGWFPANYVEEDYSEYC

SEQ ID NO: 69602 - protein, 813 aa, Homo sapiens
MELWRQCTHWLIQCRVLPPSHRVTWDGAQVCELAQALRDGVLLCQLLNNLLPHAINLREVNLRPQMSQFLCLKNIRTFLSTCCEKFGLKRSELFEAFDLFDVQDFGKVIYTLSALSWTPIAQNRGIMPFPTEEESVGDEDIYSGLSDQIDDTVEEDEDLYDCVENEEAEGDEIYEDLMRSEPVSMPHFLKPLQRFLKPQDIEIIFINIEDLLRVHTHFLKEMKEALGTPGAANLYQVFIKYKERFLVYGRYCSQVESASKHLDRVAAAREDVQMKLEECSQRANNGRFTLRDLLMVPMQRVLKYHLLLQELVKHTQEAMEKENLRLALDAMRDLAQCVNEVKRDNETLRQITNFQLSIENLDQSLAHYGRPKIDGELKITSVERRSKMDRYAFLLDKALLICKRRGDSYDLKDFVNLHSFQVRDDSSGDRDNKKWSHMFLLIEDQGAQGYELFFKTRELKKKWMEQFEMAISNIYPENATANGHDFQMFSFEETTSCKACQMLLRGTFYQGYRCHRCRASAHKECLGRVPPCGRHGQDFPGTMKKDKLHRRAQDKKRNELGLPKMEVFQEYYGLPPPPGAIGPFLRLNPGDIVELTKAEAEQNWWEGRNTSTNEIGWFPCNRVKPYVHGPPQDLSVHLWYAGPMERAGAESILANRSDGTFLVRQRVKDAAEFAISIKYNVEVKHIKIMTAEGLYRITEKKAFRGLTELVEFYQQNSLKDCFKSLDTTLQFPFKEPEKRTISRPAVGSTKYFGTAKARYDFCARDRSELSLKEGDIIKILNKKGQQGWWRGEIYGRVGWFPANYVEEDYSEYC

SEQ ID NO: 69603 - protein, 845 aa, Homo sapiens; identical to SEQ ID NO: 69600

SEQ ID NO: 69604 - protein, 868 aa, Homo sapiens
MEQWRQCGRWLIDCKVLPPNHRVVWPSAVVFDLAQALRDGVLLCQLLHNLSPGSIDLKDINFRPQMSQFLCLKNIRTFLKVCHDKFGLRNSELFDPFDLFDVRDFGKVISAVSRLSLHSIAQNKGIRPFPSEETTENDDDVYRSLEELADEHDLGEDIYDCVPCEDGGDDIYEDIIKVEVQQPMKMGMTEDDKRNCCLLEIQETEAKYYRTLEDIEKNYMSPLRLVLSPADMAAVFINLEDLIKVHHSFLRAIDVSVMVGGSTLAKVFLDFKERLLIYGEYCSHMEHAQNTLNQLLASREDFRQKVEECTLKVQDGKFKLQDLLVVPMQRVLKYHLLLKELLSHSAERPERQQLKEALEAMQDLAMYINEVKRDKETLRKISEFQSSIENLQVKLEEFGRPKIDGELKVRSIVNHTKQDRYLFLFDKVVIVCKRKGYSYELKEIIELLFHKMTDDPMNNKDVKKWSYGFYLIHLQGKQGFQFFCKTEDMKRKWMEQFEMAMSNIKPDKANANHHSFQMYTFDKTTNCKACKMFLRGTFYQGYMCTKCGVGAHKECLEVIPPCKFRTSGDRDASGAGPGPKMVAMQNYHGNPAPPGKPVLTFQTGDVLELLRGDPESPWWEGRLVQTRKSGYFPSSSVKPCPVDGRPPISRPPSREIDYTAYPWFAGNMERQQTDNLLKSHASGTYLIRERPAEAERFAISIKFNDEVKHIKVVEKDNWIHITEAKKFDSLLELVEYYQCHSLKESFKQLDTTLKYPYKSRERSASRASSRSPASCASYNFSFLSPQGLSFASQGPSAPFWSVFTPRVIGTAVARYNFAARDMRELSLREGDVVRIYSRIGGDQGWWKGETNGRIGWFPSTYVEEEGIQ

SEQ ID NO: 69605 - protein, 878 aa, Homo sapiens
MEQWRQCGRWLIDCKVLPPNHRVVWPSAVVFDLAQALRDGVLLCQLLHNLSPGSIDLKDINFRPQMSQFLCLKNIRTFLKVCHDKFGLRNSELFDPFDLFDVRDFGKVISAVSRLSLHSIAQNKGIRPFPSEETTENDDDVYRSLEELADEHDLGEDIYDCVPCEDGGDDIYEDIIKVEVQQPMIRYMQKMGMTEDDKRNCCLLEIQETEAKYYRTLEDIEKNYMSPLRLVLSPADMAAVFINLEDLIKVHHSFLRAIDVSVMVGGSTLAKVFLDFKERLLIYGEYCSHMEHAQNTLNQLLASREDFRQKVEECTLKVQDGKFKLQDLLVVPMQRVLKYHLLLKELLSHSAERPERQQLKEALEAMQDLAMYINEVKRDKETLRKISEFQSSIENLQVKLEEFGRPKIDGELKVRSIVNHTKQDRYLFLFDKVVIVCKRKGYSYELKEIIELLFHKMTDDPMNNKDVKKSHGKMWSYGFYLIHLQGKQGFQFFCKTEDMKRKWMEQFEMAMSNIKPDKANANHHSFQMYTFDKTTNCKACKMFLRGTFYQGYMCTKCGVGAHKECLEVIPPCKFTSPADLDASGAGPGPKMVAMQNYHGNPAPPGKPVLTFQTGDVLELLRGDPESPWWEGRLVQTRKSGYFPSSSVKPCPVDGRPPISRPPSREIDYTAYPWFAGNMERQQTDNLLKSHASGTYLIRERPAEAERFAISIKFNDEVKHIKVVEKDNWIHITEAKKFDSLLELVEYYQCHSLKESFKQLDTTLKYPYKSRERSASRASSRSPASCASYNFSFLSPQGLSFASQGPSAPFWSVFTPRVIGTAVARYNFAARDMRELSLREGDVVRIYSRIGGDQGWWKGETNGRIGWFPSTYVEEEGIQ

SEQ ID NO: 69606 - protein, 868 aa, Homo sapiens
MEQWRQCGRWLIDCKVLPPNHRVVWPSAVVFDLAQALRDGVLLCQLLHNLSPGSIDLKDINFRPQMSQFLCLKNIRTFLKVCHDKFGLRNSELFDPFDLFDVRDFGKVISAVSRLSLHSIAQNKGIRPFPSEETTENDDDVYRSLEELADEHDLGEDIYDCVPCEDGGDDIYEDIIKVEVQQPMKMGMTEDDKRNCCLLEIQETEAKYYRTLEDIEKNYMSPLRLVLSPADMAAVFINLEDLIKVHHSFLRAIDVSVMVGGSTLAKVFLDFKERLLIYGEYCSHMEHAQNTLNQLLASREDFRQKVEECTLKVQDGKFKLQDLLVVPMQRVLKYHLLLKELLSHSAERPERQQLKEALEAMQDLAMYINEVKRDKETLRKISEFQSSIENLQVKLEEFGRPKIDGELKVRSIVNHTKQDRYLFLFDKVVIVCKRKGYSYELKEIIELLFHKMTDDPMNNKDVKKWSYGFYLIHLQGKQGFQFFCKTEDMKRKWMEQFEMAMSNIKPDKANANHHSFQMYTFDKTTNCKACKMFLRGTFYQGYMCTKCGVGAHKECLEVIPPCKFTSPADLDASGAGPGPKMVAMQNYHGNPAPPGKPVLTFQTGDVLELLRGDPESPWWEGRLVQTRKSGYFPSSSVKPCPVDGRPPISRPPSREIDYTAYPWFAGNMERQQTDNLLKSHASGTYLIRERPAEAERFAISIKFNDEVKHIKVVEKDNWIHITEAKKFDSLLELVEYYQCHSLKESFKQLDTTLKYPYKSRERSASRASSRSPASCASYNFSFLSPQGLSFASQGPSAPFWSVFTPRVIGTAVARYNFAARDMRELSLREGDVVRIYSRIGGDQGWWKGETNGRIGWFPSTYVEEEGIQ

SEQ ID NO: 69607 - protein, 839 aa, Homo sapiens
MEQWRQCGRWLIDCKVLPPNHRVVWPSAVVFDLAQALRDGVLLCQLLHNLSPGSIDLKDINFRPQMSQFLCLKNIRTFLKVCHDKFGLRNSELFDPFDLFDVRDFGKVISAVSRLSLHSIAQNKGIRPFPSEETTENDDDVYRSLEELADEHDLGEDIYDCVPCEDGGDDIYEDIIKVEVQQPMKMGMTEDDKRNCCLLEIQETEAKYYRTLEDIEKNYMSPLRLVLSPADMAAVFINLEDLIKVHHSFLRAIDVSVMVGGSTLAKVFLDFKERLLIYGEYCSHMEHAQNTLNQLLASREDFRQKVEECTLKVQDGKFKLQDLLVVPMQRVLKYHLLLKELLSHSAERPERQQLKEALEAMQDLAMYINEVKRDKETLRKISEFQSSIENLQVKLEEFGRPKIDGELKVRSIVNHTKQDRYLFLFDKVVIVCKRKGYSYELKEIIELLFHKMTDDPMNNKDVKKWSYGFYLIHLQGKQGFQFFCKTEDMKRKWMEQFEMAMSNIKPDKANANHHSFQMYTFDKTTNCKACKMFLRGTFYQGYMCTKCGVGAHKECLEVIPPCKFTSPADLDASGAGPGPKMVAMQNYHGNPAPPGKPVLTFQTGDVLELLRGDPESPWWEGRLVQTRKSGYFPSSSVKPCPVDGRPPISRPPSREIDYTAYPWFAGNMERQQTDNLLKSHASGTYLIRERPAEAERFAISIKFNDEVKHIKVVEKDNWIHITEAKKFDSLLELVEYYQCHSLKESFKQLDTTLKYPYKSRERSASRASSRSPVFTPRVIGTAVARYNFAARDMRELSLREGDVVRIYSRIGGDQGWWKGETNGRIGWFPSTYVEEEGIQ

SEQ ID NO: 69608 - protein, 847 aa, Homo sapiens
MEPWKQCAQWLIHCKVLPTNHRVTWDSAQVFDLAQTLRDGVLLCQLLNNLRAHSINLKEINLRPQMSQFLCLKNIRTFLTACCETFGMRKSELFEAFDLFDVRDFGKVIETLSRLSRTPIALATGIRPFPTEESINDEDIYKGLPDLIDETLVEDEEDLYDCVYGEDEGGEVYEDLMKAEEAHQPKCPENDIRSCCLAEIKQTEEKYTETLESIEKYFMAPLKRFLTAAEFDSVFINIPELVKLHRNLMQEIHDSIVNKNDQNLYQVFINYKERLVIYGQYCSGVESAISSLDYISKTKEDVKLKLEECSKRANNGKFTLRDLLVVPMQRVLKYHLLLQELVKHTTDPTEKANLKLALDAMKDLAQYVNEVKRDNETLREIKQFQLSIENLNQPVLLFGRPQGDGEIRITTLDKHTKQERHIFLFDLAVIVCKRKGDNYEMKEIIDLQQYKIANNPTTDKENKKWSYGFYLIHTQGQNGLEFYCKTKDLKKKWLEQFEMALSNIRPDYADSNFHDFKMHTFTRVTSCKVCQMLLRGTFYQGYLCFKCGARAHKECLGRVDNCGRVNSGEQGTLKLPEKRTNGLRRTPKQVDPGLPKMQVIRNYSGTPPPALHEGPPLQLQAGDTVELLKGDAHSLFWQGRNLASGEVGFFPSDAVKPCPCVPKPVDYSCQPWYAGAMERLQAETELINRVNSTYLVRHRTKESGEYAISIKYNNEAKHIKILTRDGFFHIAENRKFKSLMELVEYYKHHSLKEGFRTLDTTLQFPYKEPEHSAGQRGNRAGNSLLSPKVLGIAIARYDFCARDMRELSLLKGDVVKIYTKMSANGWWRGEVNGRVGWFPSTYVEEDE

SEQ ID NO: 69609 - protein, 556 aa, Homo sapiens
MSQFLCLKNIRTFLTACCETFGMRKSELFEAFDLFDVRDFGKVIETLSRLSRTPIALATGIRPFPTEESINDEDIYKGLPDLIDETLVEDEEDLYDCVYGEDEGGEVYEDLMKAEEAHQPKCPENDIRSCCLAEIKQTEEKYTETLESIEKYFMAPLKRFLTAAEFDSVFINIPELVKLHRNLMQEIHDSIVNKNDQNLYQVFINYKERLVIYGQYCSGVESAISSLDYISKTKEDVKLKLEECSKRANNGKFTLRDLLVVPMQRVLKYHLLLQELVKHTTDPTEKANLKLALDAMKDLAQYVNEVKRDNETLREIKQFQLSIENLNQPVLLFGRPQGDGEIRITTLDKHTKQERHIFLFDLAVIVCKRKGDNYEMKEIIDLQQYKIANNPTTDKENKKWSYGFYLIHTQGQNGLEFYCKTKDLKKKWLEQFEMALSNIRPDYADSNFHDFKMHTFTRVTSCKVCQMLLRGTFYQGYLCFKCGARAHKECLGRVDNCGRVNSGEQGTLKLPEKRTNGLRRTPKQVDPDVPCLLHFFISMAPATRSIVKSQKKNKKF

SEQ ID NO: 69610 - protein, 287 aa, Homo sapiens
MPIFTFLSEQGTLKLPEKRTNGLRRTPKQVDPGLPKMQVIRNYSGTPPPALHEGPPLQLQAGDTVELLKGDAHSLFWQGRNLASGEVGFFPSDAVKPCPCVPKPVDYSCQPWYAGAMERLQAETELINRVNSTYLVRHRTKESGEYAISIKYNNEAKHIKILTRDGFFHIAENRKFKSLMELVEYYKHHSLKEGFRTLDTTLQFPYKEPEHSAGQRGNRAGNSLLSPKVLGIAIARYDFCARDMRELSLLKGDVVKIYTKMSANGWWRGEVNGRVGWFPSTYVEEDE

SEQ ID NO: 69611 - protein, 875 aa, Homo sapiens
MEPWKQCAQWLIHCKVLPTNHRVTWDSAQVFDLAQTLRDGVLLCQLLNNLRAHSINLKEINLRPQMSQFLCLKNIRTFLTACCETFGMRKSELFEAFDLFDVRDFGKVIETLSRLSRTPIALATGIRPFPTEESINDEDIYKGLPDLIDETLVEDEEDLYDCVYGEDEGGEVYEDLMKAEEAHQPKCPENDIRSCCLAEIKQTEEKYTETLESIEKYFMAPLKRFLTAAEFDSVFINIPELVKLHRNLMQEIHDSIVNKNDQNLYQVFINYKERLVIYGQYCSGVESAISSLDYISKTKEDVKLKLEECSKRANNGKFTLRDLLVVPMQRVLKYHLLLQELVKHTTDPTEKANLKLALDAMKDLAQYVNEVKRDNETLREIKQFQLSIENLNQPVLLFGRPQGDGEIRITTLDKHTKQERHIFLFDLAVIVCKRKGDNYEMKEIIDLQQYKIANNPTTDKENKKWSYGFYLIHTQGQNGLEFYCKTKDLKKKWLEQFEMALSNIRPDYADSNFHDFKMHTFTRVTSCKVCQMLLRGTFYQGYLCFKCGARAHKECLGRVDNCGRVNSGEQGTLKLPEKRTNGLRRTPKQVDPGLPKMQVIRNYSGTPPPALHEGPPLQLQAGDTVELLKGDAHSLFWQGRNLASGEVGFFPSDAVKPCPCVPKPVDYSCQPWYAGAMERLQAETELINRVNSTYLVRHRTKESGEYAISIKYNNEAKHIKILTRDGFFHIAENRKFKSLMELVEYYKHHSLKEGFRTLDTTLQFPYKEPEHSAGQRGNRAGNSSPSLFCGFSFVTPPDYSFVPPSSTPFWSVLSPKVLGIAIARYDFCARDMRELSLLKGDVVKIYTKMSANGWWRGEVNGRVGWFPSTYVEEDE

SEQ ID NO: 69612 - protein, 251 aa, Homo sapiens [sequence omitted]

SEQ ID NO: 69613 - protein, 303 aa, Homo sapiens
MSSARFDSSDRSAWYMGPVSRQEAQTRLQGQRHGMFLVRDSSTCPGDYVLSVSENSRVSHYIINSLPNRRFKIGDQEFDHLPALLEFYKIHYLDTTTLIEPAPRYPSPPMGSVSAPNLPTAEDNLEYVRTLYDFPGNDAEDLPFKKGEILVIIEKPEEQWWSARNKDGRVGMIPVPYVEKLVRSSPHGKHGNRNSNSYGIPEPAHAYAQPQTTTPLPAVSGSPGAAITPLPSTQNGPVFAKAIQKRVPCAYDKTALALEVGDIVKVTRMNINGQWEGEVNGRKGLFPFTHVKIFDPQNPDENE

SEQ ID NO: 69614 - protein, 303 aa, Homo sapiens; identical to SEQ ID NO: 69613

SEQ ID NO: 69615 - protein, 290 aa, Homo sapiens
MGDGGAERDRGPARRAESGGGGGRCGDRSGAGDLRADGGGHSPTEVAGTSASSPAGSRESGADSDGQPGPGEADHCRRILVRDAKGTIREIVLPKGLDLDRPKRTRTSFTAEQLYRLEMEFQRCQYVVGRERTELARQLNLSETQVKVWFQNRRTKQKKDQSRDLEKRASSSASEAFATSNILRLLEQGRLLSVPRAPSLLALTPSLPGLPASHRGTSLGDPRNSSPRLNPLSSASASPPLPPPLPAVCFSSAPLLDLPAGYELGSSAFEPYSWLERKVGSASSCKKANT

SEQ ID NO: 69616 - protein, 833 aa, Homo sapiens
MHQLFRLVLGQKDLSRAGDLFSLDDSEIEDSLTEALEQIKIISSSSDYQTNNNDQAVVEICITRITTAIRETESIEKHAKALVGLWDSCLEHNLRPFGKDEDTPHAKIASDIMSCILQNYNRPPVMALAIPIAVKFLHRGNKELCRNMSNYLSLAAITKADLLADHTEVIVKSILQGNTMLLRVLPAVYEKQPQPINRHLTELLALMSQLEQPEQYHLLRLLHVAAKKKQLEVVQKCIPFLIGHLKDSTHNDIILNILIEIAVYEPVALNSFLPMLKEIGERFPYLTGQMARIYGAVGHVDEERARSCLTYLVSQLANMEHSFHHILLLEIKSITDTFSSILGPQSRDIFRMSNSFTAIAKLLTRQLENTKAGSGRRKISTEIEFPEKLEETKLIVTENEDHEKLQVKIQAFEDKINAGSNTPGSIRRYSLGQVSKEERKNIRFNRSKSLAFHTMLTKGVGSDDGEDENRGDIPASISLSEIDPLGQGNDKLPFKTDTERSQLGESSVSYPNIIHIDSENLSETVKENSQEETPETTASPIEYQDKLYLHLKKNLSKVKAYAMEIGKKIPVPDQCTIEDTVRSCVAKLFFTCSLKGHYCLYSKSSFILISQEPQPWIQIMFLFQQSLFPEPLSIQSHSVQFLRALWEKTQAGGAHSFETAMMESTFPQQKDLDQVQLHLEEVRFFDVFGFSETAGAWQCFMCNNPEKATVVNQDGQPLIEGKLKEKQVRWKFIKRWKTRYFTLAGNQLLFQKGKSKDDPDDCPIELSKVQSVKAVAKKRRDRSLPRAFEIFTDNKTYVFKAKDEKNAEEWLQCINVAVAQAKERESREVTTYL

SEQ ID NO: 69617 - protein, 833 aa, Homo sapiens; identical to SEQ ID NO: 69616

SEQ ID NO: 69618 - protein, 788 aa, Homo sapiens
MHQLFRLVLGQKDLSRAGDLFSLDDSEIEDSLTEALEQIKIISSSSDYQTNNNDQAVVEICITRITTAIRETESIEKHAKALVGLWDSCLEHNLRPFGKDEDTPHAKIASDIMSCILQNYNRPPVMALAIPIAVKFLHRGNKELCRNMSNYLSLAAITKADLLADHTEVIVKSILQGNTMLLRVLPAVYEKQPQPINRHLTELLALMSQLEQPEQYHLLRLLHVAAKKKQLEVVQKCIPFLIGHLKDSTHNDIILNILIEIAVYEPVALNSFLPMLKEIGERFPYLTGQMARIYGAVGHVDEERARSCLTYLVSQLANMEHSFHHILLLEIKSITDTFSSILGPQSRDIFRMSNSFTAIAKLLTRQLENTKAGSGRRKISTEIEFPEKLEETKLIVTENEDHEKLQVKIQAFEDKINAGSNTPGSIRRYSLGQVSKEERKNIRFNRSKSLAFHTMLTKGVGSDDGEDENRGDIPASISLSEIDPLGQGNDKLPFKTDTERSQLGESSVSYPNIIHIDSENLSETVKENSQEETPETTASPIEYQDKLYLHLKKNLSKVKAYAMEIGKKIPVPDQCTIEDTVRSCVAKLFFTCSLKGHYCLYSKSSFILISQEPQPWIQIMFLFQQDLDQVQLHLEEVRFFDVFGFSETAGAWQCFMCNNPEKATVVNQDGQPLIEGKLKEKQVRWKFIKRWKTRYFTLAGNQLLFQKGKSKDDPDDCPIELSKVQSVKAVAKKRRDRSLPRAFEIFTDNKTYVFKAKDEKNAEEWLQCINVAVAQAKERESREVTTYL

SEQ ID NO: 69619 - protein, 63 aa, Homo sapiens
MHQLFRLVLGQKDLSRAGDLFSLDDSEIEDSLTEALEQIKIISSSSDYQTNNNDQAVVEICIT

SEQ ID NO: 69620 - protein, 213 aa, Homo sapiens
MHQLFRLVLGQKDLSRAGDLFSLDDSEIEDSLTEALEQIKIISSSSDYQTNNNDQAVVEICITRITTAIRETESIEKHAKALVGLWDSCLEHNLRPFGKDEDTPHAKIASDIMSCILQNYNRPPVMALAIPIAVKFLHRGNKELCRNMSNYLSLAAITKADLLADHTEVIVKSILQGMVRKLSLGTCFGRYLKVFSSSIYGLWEARPRVLEAN

SEQ ID NO: 69621 - protein, 165 aa, Homo sapiens
MHQLFRLVLGQKDLSRAGDLFSLDDSEIEDSLTEALEQIKIISSSSDYQTNNNDQAVVEICITRITTAIRETESIEKHAKALVGLWDSCLEHNLRPFGKDEDTPHAKIASDIMSCILQNYNRPPVMALAIPIAVKFLHRGNKELCRNMSNYLSLAAITKADLLAD

SEQ ID NO: 69622 - protein, 55 aa, Homo sapiens
MHQLFRLVLGQKDLSRAGDLFSLDDSEIEDSLTEALEQIKIISSSSDYQTNNNDQ

SEQ ID NO: 69623 - protein, 213 aa, Homo sapiens; identical to SEQ ID NO: 69620

SEQ ID NO: 69624 - protein, 177 aa, Homo sapiens
MHQLFRLVLGQKDLSRAGDLFSLDDSEIEDSLTEALEQIKIISSSSDYQTNNNDQAVVEICITRITTAIRETESIEKHAKALVGLWDSCLEHNLRPFGKDEDTPHAKIASDIMSCILQNYNRPPVMALAIPIAVKFLHRGNKELCRNMSNYLSLAAITKADLLADHTEVIVKSILQV

SEQ ID NO: 69625 - protein, 788 aa, Homo sapiens; identical to SEQ ID NO: 69618

SEQ ID NO: 69626 - protein, 1255 aa, Homo sapiens [sequence omitted]

SEQ ID NO: 69627 - protein, 1225 aa, Homo sapiens
MKLRLPASPETHLDMLRHLYQGCQVVQGNLELTYLPTNASLSFLQDIQEVQGYVLIAHNQVRQVPLQRLRIVRGTQLFEDNYALAVLDNGDPLNNTTPVTGASPGGLRELQLRSLTEILKGGVLIQRNPQLCYQDTILWKDIFHKNNQLALTLIDTNRSRACHPCSPMCKGSRCWGESSEDCQSLTRTVCAGGCARCKGPLPTDCCHEQCAAGCTGPKHSDCLACLHFNHSGICELHCPALVTYNTDTFESMPNPEGRYTFGASCVTACPYNYLSTDVGSCTLVCPLHNQEVTAEDGTQRCEKCSKPCARVCYGLGMEHLREVRAVTSANIQEFAGCKKIFGSLAFLPESFDGDPASNTAPLQPEQLQVFETLEEITGYLYISAWPDSLPDLSVFQNLQVIRGRILHNGAYSLTLQGLGISWLGLRSLRELGSGLALIHHNTHLCFVHTVPWDQLFRNPHQALLHTANRPEDECVGEGLACHQLCARGHCWGPGPTQCVNCSQFLRGQECVEECRVLQGLPREYVNARHCLPCHPECQPQNGSVTCFGPEADQCVACAHYKDPPFCVARCPSGVKPDLSYMPIWKFPDEEGACQPCPINCTHSCVDLDDKGCPAEQRASPLTSIISAVVGILLVVVLGVVFGILIKRRQQKIRKYTMRRLLQETELVEPLTPSGAMPNQAQMRILKETELRKVKVLGSGAFGTVYKGIWIPDGENVKIPVAIKVLRENTSPKANKEILDEAYVMAGVGSPYVSRLLGICLTSTVQLVTQLMPYGCLLDHVRENRGRLGSQDLLNWCMQIAKGMSYLEDVRLVHRDLAARNVLVKSPNHVKITDFGLARLLDIDETEYHADGGKVPIKWMALESILRRRFTHQSDVWSYGVTVWELMTFGAKPYDGIPAREIPDLLEKGERLPQPPICTIDVYMIMVKCWMIDSECRPRFRELVSEFSRMARDPQRFVVIQNEDLGPASPLDSTFYRSLLEDDDMGDLVDAEEYLVPQQGFFCPDPAPGAGGMVHHRHRSSSTRSGGGDLTLGLEPSEEEAPRSPLAPSEGAGSDVFDGDLGMGAAKGLQSLPTHDPSPLQRYSEDPTVPLPSETDGYVAPLTCSPQPEYVNQPDVRPQPPSPREGPLPAARPAGATLERPKTLSPGKNGVVKDVFAFGGAVENPEYLTPQGGAAPQPHPPPAFSPAFDNLYYWDQDPPERGAPPSTFKGTPTAENPEYLGLDVPV

SEQ ID NO: 69628 - protein, 979 aa, Homo sapiens
MELAALCRWGLLLALLPPGAASTQDNYLSTDVGSCTLVCPLHNQEVTAEDGTQRCEKCSKPCARVCYGLGMEHLREVRAVTSANIQEFAGCKKIFGSLAFLPESFDGDPASNTAPLQPEQLQVFETLEEITGYLYISAWPDSLPDLSVFQNLQVIRGRILHNGAYSLTLQGLGISWLGLRSLRELGSGLALIHHNTHLCFVHTVPWDQLFRNPHQALLHTANRPEDECVGEGLACHQLCARGHCWGPGPTQCVNCSQFLRGQECVEECRVLQGLPREYVNARHCLPCHPECQPQNGSVTCFGPEADQCVACAHYKDPPFCVARCPSGVKPDLSYMPIWKFPDEEGACQPCPINCTHSCVDLDDKGCPAEQRASPLTSIISAVVGILLVVVLGVVFGILIKRRQQKIRKYTMRRLLQETELVEPLTPSGAMPNQAQMRILKETELRKVKVLGSGAFGTVYKGIWIPDGENVKIPVAIKVLRENTSPKANKEILDEAYVMAGVGSPYVSRLLGICLTSTVQLVTQLMPYGCLLDHVRENRGRLGSQDLLNWCMQIAKGMSYLEDVRLVHRDLAARNVLVKSPNHVKITDFGLARLLDIDETEYHADGGKVPIKWMALESILRRRFTHQSDVWSYGVTVWELMTFGAKPYDGIPAREIPDLLEKGERLPQPPICTIDVYMIMVKCWMIDSECRPRFRELVSEFSRMARDPQRFVVIQNEDLGPASPLDSTFYRSLLEDDDMGDLVDAEEYLVPQQGFFCPDPAPGAGGMVHHRHRSSSTRSGGGDLTLGLEPSEEEAPRSPLAPSEGAGSDVFDGDLGMGAAKGLQSLPTHDPSPLQRYSEDPTVPLPSETDGYVAPLTCSPQPEYVNQPDVRPQPPSPREGPLPAARPAGATLERPKTLSPGKNGVVKDVFAFGGAVENPEYLTPQGGAAPQPHPPPAFSPAFDNLYYWDQDPPERGAPPSTFKGTPTAENPEYLGLDVPV

SEQ ID NO: 69629 - protein, 603 aa, Homo sapiens
MKLRLPASPETHLDMLRHLYQGCQVVQGNLELTYLPTNASLSFLQDIQEVQGYVLIAHNQVRQVPLQRLRIVRGTQLFEDNYALAVLDNGDPLNNTTPVTGASPGGLRELQLRSLTEILKGGVLIQRNPQLCYQDTILWKDIFHKNNQLALTLIDTNRSRACHPCSPMCKGSRCWGESSEDCQSLTRTVCAGGCARCKGPLPTDCCHEQCAAGCTGPKHSDCLACLHFNHSGICELHCPALVTYNTDTFESMPNPEGRYTFGASCVTACPYNYLSTDVGSCTLVCPLHNQEVTAEDGTQRCEKCSKPCARVCYGLGMEHLREVRAVTSANIQEFAGCKKIFGSLAFLPESFDGDPASNTAPLQPEQLQVFETLEEITGYLYISAWPDSLPDLSVFQNLQVIRGRILHNGAYSLTLQGLGISWLGLRSLRELGSGLALIHHNTHLCFVHTVPWDQLFRNPHQALLHTANRPEDECVGEGLACHQLCARGHCWGPGPTQCVNCSQFLRGQECVEECRVLQGLPREYVNARHCLPCHPECQPQNGSVTCFGPEADQCVACAHYKDPPFCVARCPSGVKPDLSYMPIWKFPDEEGACQPCPINCTHS

SEQ ID NO: 69630 - protein, 1225 aa, Homo sapiens; identical to SEQ ID NO: 69627

SEQ ID NO: 69631 - protein, 1240 aa, Homo sapiens
MPRGSWKPQVCTGTDMKLRLPASPETHLDMLRHLYQGCQVVQGNLELTYLPTNASLSFLQDIQEVQGYVLIAHNQVRQVPLQRLRIVRGTQLFEDNYALAVLDNGDPLNNTTPVTGASPGGLRELQLRSLTEILKGGVLIQRNPQLCYQDTILWKDIFHKNNQLALTLIDTNRSRACHPCSPMCKGSRCWGESSEDCQSLTRTVCAGGCARCKGPLPTDCCHEQCAAGCTGPKHSDCLACLHFNHSGICELHCPALVTYNTDTFESMPNPEGRYTFGASCVTACPYNYLSTDVGSCTLVCPLHNQEVTAEDGTQRCEKCSKPCARVCYGLGMEHLREVRAVTSANIQEFAGCKKIFGSLAFLPESFDGDPASNTAPLQPEQLQVFETLEEITGYLYISAWPDSLPDLSVFQNLQVIRGRILHNGAYSLTLQGLGISWLGLRSLRELGSGLALIHHNTHLCFVHTVPWDQLFRNPHQALLHTANRPEDECVGEGLACHQLCARGHCWGPGPTQCVNCSQFLRGQECVEECRVLQGLPREYVNARHCLPCHPECQPQNGSVTCFGPEADQCVACAHYKDPPFCVARCPSGVKPDLSYMPIWKFPDEEGACQPCPINCTHSCVDLDDKGCPAEQRASPLTSIISAVVGILLVVVLGVVFGILIKRRQQKIRKYTMRRLLQETELVEPLTPSGAMPNQAQMRILKETELRKVKVLGSGAFGTVYKGIWIPDGENVKIPVAIKVLRENTSPKANKEILDEAYVMAGVGSPYVSRLLGICLTSTVQLVTQLMPYGCLLDHVRENRGRLGSQDLLNWCMQIAKGMSYLEDVRLVHRDLAARNVLVKSPNHVKITDFGLARLLDIDETEYHADGGKVPIKWMALESILRRRFTHQSDVWSYGVTVWELMTFGAKPYDGIPAREIPDLLEKGERLPQPPICTIDVYMIMVKCWMIDSECRPRFRELVSEFSRMARDPQRFVVIQNEDLGPASPLDSTFYRSLLEDDDMGDLVDAEEYLVPQQGFFCPDPAPGAGGMVHHRHRSSSTRSGGGDLTLGLEPSEEEAPRSPLAPSEGAGSDVFDGDLGMGAAKGLQSLPTHDPSPLQRYSEDPTVPLPSETDGYVAPLTCSPQPEYVNQPDVRPQPPSPREGPLPAARPAGATLERPKTLSPGKNGVVKDVFAFGGAVENPEYLTPQGGAAPQPHPPPAFSPAFDNLYYWDQDPPERGAPPSTFKGTPTAENPEYLGLDVPV

SEQ ID NO: 69632 - protein, 752 aa, Homo sapiens
MGTSALWALWLLLALCWAPRESGATGTGRKAKCEPSQFQCTNGRCITLLWKCDGDEDCVDGSDELDCAPPTCGAHEFQCSTSSCIPISWVCDDDADCSDQSDESLEQCGRQPVIHTKCPASEIQCGSGECIHKKWRCDGDPDCKDGSDEVNCPSRTCRPDQFECEDGSCIHGSRQCNGIRDCVDGSDEVNCKNVNQCLGPGKFKCRSGECIDISKVCNQEQDCRDWSDEPLKECHINECLVNNGGCSHICKDLVIGYECDCAAGFELIDRKTCGDIDECQNPGICSQICINLKGGYKCECSRGYQMDLATGVCKAVGKEPSLIFTNRRDIRKIGLERKEYIQLVEQLRNTVALDADIAAQKLFWADLSQKAIFSASIDDKVGRHVKMIDNVYNPAAIAVDWVYKTIYWTDAASKTISVATLDGTKRKFLFNSDLREPASIAVDPLSGFVYWSDWGEPAKIEKAGMNGFDRRPLVTADIQWPNGITLDLIKSRLYWLDSKLHMLSSVDLNGQDRRIVLKSLEFLAHPLALTIFEDRVYWIDGENEAVYGANKFTGSELATLVNNLNDAQDIIVYHELVQPSGKNWCEEDMENGGCEYLCLPAPQINDHSPKYTCSCPSGYNVEENGRDCQSTATTVTYSETKDTNTTEISATSGLVPGGINVTTAVSEVSVPPKGTSAAWAILPLLLLVMAAVGGYLMWRNWQHKNMKSMNFDNPVYLKTTEEDLSIDIGRHSASVGHTYPAISVVSTDDDLA

SEQ ID NO: 69633 - protein, 173 aa, Homo sapiens
MGTSALWALWLLLALCWAPRESGATGTGRKAKCEPSQFQCTNGRCITLLWKCDGDEDCVDGSDEKNCVKKTCAESDFVCNNGQCVPSRWKCDGDPDCEDGSDESPEQCRNITCSPDEFTCSSGRCISRNFVCNGQDDCSDGSDELDCAPPTCGAHEFQCSTSSCIPISWVCDD

SEQ ID NO: 69634 - protein, 845 aa, Homo sapiens
MGTSALWALWLLLALCWAPRESGATGTGRKAKCEPSQFQCTNGRCITLLWKCDGDEDCVDGSDEKNCVKKTCAESDFVCNNGQCVPSRWKCDGDPDCEDGSDESPEQCHMRTCRIHEISCGAHSTQCIPVSWRCDGENDCDSGEDEENCGNITCSPDEFTCSSGRCISRNFVCNGQDDCSDGSDELDCAPPTCGAHEFQCSTSSCIPISWVCDDDADCSDQSDESLEQCGRQPVIHTKCPASEIQCGSGECIHKKWRCDGDPDCKDGSDEVNCPSRTCRPDQFECEDGSCIHGSRQCNGIRDCVDGSDEVNCKNVNQCLGPGKFKCRSGECIDISKVCNQEQDCRDWSDEPLKECHINECLVNNGGCSHICKDLVIGYECDCAAGFELIDRKTCGDIDECQNPGICSQICINLKGGYKCECSRGYQMDLATGVCKAVGKEPSLIFTNRRDIRKIGLERKEYIQLVEQLRNTVALDADIAAQKLFWADLSQKAIFSASIDDKVGRHVKMIDNVYNPAAIAVDWVYKTIYWTDAASKTISVATLDGTKRKFLFNSDLREPASIAVDPLSGFVYWSDWGEPAKIEKAGMNGFDRRPLVTADIQWPNGITLDLIKSRLYWLDSKLHMLSSVDLNGQDRRIVLKSLEFLAHPLALTIFEDRVYWIDGENEAVYGANKFTGSELATLVNNLNDAQDIIVYHELVQPSGKNWCEEDMENGGCEYLCLPAPQINDHSPKYTCSCPSGYNVEENGRDCQRINVTTAVSEVSVPPKGTSAAWAILPLLLLVMAAVGGYLMWRNWQHKNMKSMNFDNPVYLKTTEEDLSIDIGRHSASVGHTYPAISVVSTDDDLA

SEQ ID NO: 69635 - protein, 873 aa, Homo sapiens
MGTSALWALWLLLALCWAPRESGATGTGRKAKCEPSQFQCTNGRCITLLWKCDGDEDCVDGSDEKNCVKKTCAESDFVCNNGQCVPSRWKCDGDPDCEDGSDESPEQCHMRTCRIHEISCGAHSTQCIPVSWRCDGENDCDSGEDEENCGNITCSPDEFTCSSGRCISRNFVCNGQDDCSDGSDELDCAPPTCGAHEFQCSTSSCIPISWVCDDDADCSDQSDESLEQCGRQPVIHTKCPASEIQCGSGECIHKKWRCDGDPDCKDGSDEVNCPSRTCRPDQFECEDGSCIHGSRQCNGIRDCVDGSDEVNCKNVNQCLGPGKFKCRSGECIDISKVCNQEQDCRDWSDEPLKECHINECLVNNGGCSHICKDLVIGYECDCAAGFELIDRKTCGDIDECQNPGICSQICINLKGGYKCECSRGYQMDLATGVCKAVGKEPSLIFTNRRDIRKIGLERKEYIQLVEQLRNTVALDADIAAQKLFWADLSQKAIFSASIDDKVGRHVKMIDNVYNPAAIAVDWVYKTIYWTDAASKTISVATLDGTKRKFLFNSDLREPASIAVDPLSGFVYWSDWGEPAKIEKAGMNGFDRRPLVTADIQWPNGITLDLIKSRLYWLDSKLHMLSSVDLNGQDRRIVLKSLEFLAHPLALTIFEDRVYWIDGENEAVYGANKFTGSELATLVNNLNDAQDIIVYHELVQPSGKNWCEEDMENGGCEYLCLPAPQINDHSPKYTCSCPSGYNVEENGRDCQSTATTVTYSETKDTNTTEISATSGLVPGGINVTTAVSEVSVPPKGTSAAWAILPLLLLVMAAVGGYLMWRNWQHKNMKSMNFDNPVYLKTTEEDLSIDIGRHSASVGHTYPAISVVSTDDDLA

SEQ ID NO: 69636 - protein, 242 aa, Homo sapiens
MSDEREVAEAATGEDASSPPPKTEAASDPQHPAASEGAAAAAASPPLLRCLVLTGFGGYDKVKLQSRPAAPPAPGPGQLTLRLRACGLNFADLMARQGLYDRLPPLPVTPGMEGAGVVIAVGEGVSDRKAGDRVMVLNRSGMWQEEVTVPSVQTFLIPEAMTFEEAAALLVNYITAYMVLFDFGNLQPGHSVLVHMAAGGVGMAAVQLPYSGECDSVRNGLGQQARGTEGEWGHTSHRLSHD

SEQ ID NO: 69637 - protein, 393 aa, Homo sapiens
MSDEREVAEAATGEDASSPPPKTEAASDPQHPAASEGAAAAAASPPLLRCLVLTGFGGYDKVKLQSRPAAPPAPGPGQLTLRLRACGLNFADLMARQGLYDRLPPLPVTPGMEGAGVVIAVGEGVSDRKAGDRVMVLNRSGMWQEEVTVPSVQTFLIPEAMTFEEAAALLVNYITAYMVLFDFGNLQPGHSVLVHMAAGGVGMAAVQLCRTVENVTVFGTASASKHEALKENGVTHPIDYHTTDYVDEIKKISPKGVDIVMDPLGGSDTAKGYNLLKPMGKVVTYGMANLLTGPKRNLMALARTWWNQFSVTALQLLQANRAVCGFHLGYLDGEVELVSGVVARLLALYNQGHIKPHIDSVWPFEKVADAMKQMQEKKNVGKVLLVPGPEKEN

SEQ ID NO: 69638 - protein, 259 aa, Homo sapiens
MVLNRSGMWQEEVTVPSVQTFLIPEAMTFEEAAALLVNYITAYMVLFDFGNLQPGHSVLVHMAAGGVGMAAVQLCRTVENVTVFGTASASKHEALKENGVTHPIDYHTTDYVDEIKKISPKGVDIVMDPLGGSDTAKGYNLLKPMGKVVTYGMANLLTGPKRNLMALARTWWNQFSVTALQLLQANRAVCGFHLGYLDGEVELVSGVVARLLALYNQGHIKPHIDSVWPFEKVADAMKQMQEKKNVGKVLLVPGPEKEN

SEQ ID NO: 69639 - protein, 300 aa, Homo sapiens
MARQGLYDRLPPLPVTPGMEGAGVVIAVGEGVSDRKAGDRVMVLNRSGMWQEEVTVPSVQTFLIPEAMTFEEAAALLVNYITAYMVLFDFGNLQPGHSVLVHMAAGGVGMAAVQLCRTVENVTVFGTASASKHEALKENGVTHPIDYHTTDYVDEIKKISPKGVDIVMDPLGGSDTAKGYNLLKPMGKVVTYGMANLLTGPKRNLMALARTWWNQFSVTALQLLQANRAVCGFHLGYLDGEVELVSGVVARLLALYNQGHIKPHIDSVWPFEKVADAMKQMQEKKNVGKVLLVPGPEKEN

SEQ ID NO: 69640 - protein, 217 aa, Homo sapiens
MSSDFEGYEQDFAVLTAEITSKIARVPRLPPDEKKQMVANVEKQLEEAKELLEQMDLEVREIPPQSRGMYSNRMRSYKQEMGKLETDFKRSRIAYSDEVRNELLGDDGNSSENQRAHLLDNTERLERSSRRLEAGYQIAVETEQIGQEMLENLSHDREKIQRARERLRETDANLGKSSRILTGMLRRIIQNRILLVILGIIVVITILMAITFSVRRH

SEQ ID NO: 69641 - protein, 203 aa, Homo sapiens
MSSDFEGYEQDFAVLTAEITSKIARVPRLPPDEKKQMVANVEKQLEEAKELLEQMDLEVREIPPQSRGMYSNRMRSYKQEMGKLETDFKRSRIAYSDEVRNELLGDDGNSSENQRAHLLDNTERLERSSRRLEAGYQIAVETEQIGQEMLENLSHDREKIQRARERLRETDANLGKSSRILTGMLRRGCSVKKQCNLSLAPKA

SEQ ID NO: 69642 - protein, 143 aa, Homo sapiens
MSAPAQPPAEGTEGTAPGGGPPGPPPNMTSNRRLQQTQAQVEEVVDIIRVNVDKVLERDQKLSELDDRADALQAGASQFESSAAKLKRKYWWKNCKMMIMLGRWQLTQYCLVMWSFPSWTRPEEGPGGGPKSNLVSVQYPFRK

SEQ ID NO: 69643 - protein, 117 aa, Homo sapiens
MSAPAQPPAEGTEGTAPGGGPPGPPPNMTSNRRLQQTQAQVEEVVDIIRVNVDKVLERDQKLSELDDRADALQAGASQFESSAAKLKRKYWWKNCKMMIMLGAICAIIVVVIVSKYR

SEQ ID NO: 69644 - protein, 118 aa, Homo sapiens
MSAPAQPPAEGTEGTAPGGGPPGPPPNMTSNRRLQQTQAQVEEVVDIIRVNVDKVLERDQKLSELDDRADALQAGASQFESSAAKLKRKYWWKNCKMMIMLGAICAIIVVVIVIYFFT

SEQ ID NO: 69645 - protein, 247 aa, Homo sapiens
MSAPAQPPAEGTEGTAPGGGPPGPPPNMTSNRRLQQTQAQVEEVVDIIRVNVDKVLERDQKLSELDDRADALQAGASQFESSAAKLKRKYWWKNCKMMIMLGAICAIIVVVIVIYFYLRMYHPFPVVHCHPHSCPLPSVCSLNTLPHPPSSIPAQASPSPIPPFSLRSFALCPSTLEMLLVAQSKSLPEEQQLAPPPCLLFLYSQVPPKPQRVGGQGKGQGGEWLRRSTHEAAQTWEEKSIGAHGDF

SEQ ID NO: 69646 - protein, 116 aa, Homo sapiens
MSAPAQPPAEGTEGTAPGGGPPGPPPNMTSNRRLQQTQAQVEEVVDIIRVNVDKVLERDQKLSELDDRADALQAGASQFESSAAKLKRKYWWKNCKMMIMLGAICAIIVVVIVRRD

SEQ ID NO: 69647 - protein, 116 aa, Homo sapiens
MSATAATAPPAAPAGEGGPPAPPPNLTSNRRLQQTQAQVDEVVDIMRVNVDKVLERDQKLSELDDRADALQAGASQFETSAAKLKRKYWWKNLKMMIILGVICAIILIIIIVYFST

SEQ ID NO: 69648 - protein, 100 aa, Homo sapiens
MSTGPTAATGSNRRLQQTQNQVDEVVDIMRVNVDKVLERDQKLSELDDRADALQAGASQFETSAAKLKRKYWWKNCKMWAIGITVLVIFIIIIIVWVVSS

SEQ ID NO: 69649 - protein, 116 aa, Homo sapiens
MAGIELERCQQQANEVTEIMRNNFGKVLERGVKLAELQQRSDQLLDMSSTFNKTTQNLAQKKCWENIRYRICVGLVVVGVLLIILIVLLVVFLPQSSDSSSAPRTQDAGIASGPGN

SEQ ID NO: 69650 - protein, 260 aa, Homo sapiens
MAILFAVVARGTTILAKHAWCGGNFLEVTEQILAKIPSENNKLTYSHGNYLFHYICQDRIVYLCITDDDFERSRAFNFLNEIKKRFQTTYGSRAQTALPYAMNSEFSSVLAAQLKHHSENKGLDKVMETQAQVDELKGIMVRNIVCHLQNYQQKSCSSHVYEEPQAHYYHHHRINCVHLYHCFTSLWWIYMAKLCEEIGKKKLPLTKDMREQGVKSNPCDSSLSHTDRWYLPVSSTLFSLFKILFHASRFIFVLSTSLFL

SEQ ID NO: 69651 - protein, 220 aa, Homo sapiens
MAILFAVVARGTTILAKHAWCGGNFLEVTEQILAKIPSENNKLTYSHGNYLFHYICQDRIVYLCITDDDFERSRAFNFLNEIKKRFQTTYGSRAQTALPYAMNSEFSSVLAAQLKHHSENKGLDKVMETQAQVDELKGIMVRNIDLVAQRGERLELLIDKTENLVDSSVTFKTTSRNLARAMCMKNLKLTIIIIIVSIVFIYIIVSPLCGGFTWPSCVKK

SEQ ID NO: 69652 - protein, 179 aa, Homo sapiens
MAILFAVVARGTTILAKHAWCGGNFLEDFERSRAFNFLNEIKKRFQTTYGSRAQTALPYAMNSEFSSVLAAQLKHHSENKGLDKVMETQAQVDELKGIMVRNIDLVAQRGERLELLIDKTENLVDSSVTFKTTSRNLARAMCMKNLKLTIIIIIVSIVFIYIIVSPLCGGFTWPSCVKK

SEQ ID NO: 69653 - protein, 100 aa, Homo sapiens
MEEASEGGGNDRVRNLQSEVEGVKNIMTQNVERILARGENLEHLRNKTEDLEATSEHFKTTSQKVARKFWWKNVKMIVLICVIVFIIILFIVLFATGAFS

SEQ ID NO: 69654 - protein, 258 aa, Homo sapiens
MEEMKKTAIRLPKGKQKPIKTEWNSRCVLFTYFQGDISSVVDEHFSRALSNIKSPQELTPSSQSEGVMLKNDDSMSPNQWRYSSPWTKPQPEVPVTNRAANCNLHVPGPMAVNQFSPSLARRASVRPGELWHFSSLAGTSSLEPGYSHPFPARHLVPEPQPDGKREPLLSLLQQDRCLARPQESAARENGNPGQIAGSTGLLFNLPPGSVHYKKLYVSRGSASTSLPNETLSELETPGKYSLTPPNHWGHPHRYLQHL

SEQ ID NO: 69655 - protein, 115 aa, Homo sapiens
MKKTAIRLPKGKQKPIKTEWNSRCVLFTYFQGDISSVVDEHFSRALSNIKSPQELTPSSQSEGVMLKNDKKLYVSRGSASTSLPNETLSELETPGKYSLTPPNHWGHPHRYLQHL

SEQ ID NO: 69656 - protein, 163 aa, Homo sapiens
  VARIANT 1: note = MOD_RES - Any amino acid
XISSVVDEHFSRALSNIKSPQELTPSSQSEGVMLKNDDSMSPNQWRYSSPWTKPQPEVPVTNRAANCNLHVPGPMAVNQFSPSLARRASVRPGELWHFSSLAGTSSLEPGYSHPFPARHLVPEPQPDGKHKKLYVSRGSASTSLPNETLSELETPGKYSLTPP

SEQ ID NO: 69657 - protein, 60 aa, Homo sapiens
TPSSQSEGVMLKNDKKLYVSRGSASTSLPNETLSELETPGKYSLTPPNHWGHPHRYLQHL

SEQ ID NO: 69658 - protein, 317 aa, Homo sapiens
MSCLDVMYQVYGPPQPYFAAAYTPYHQKLAYYSKMQEAQECNASPSSSGSGSSSFSSQTPASIKEEEGSPEKERPPEAEYINSRCVLFTYFQGDISSVVDEHFSRALSQPSSYSPSCTSSKAPRSSGPWRDCSFPMSQRSFPASFWNSAYQAPVPPPLGSPLATAHSELPFAAADPYSPAALHGHLHQGATEPWHHAHPHHAHPHHPYALGGALGAQAAPYPRPAAVHEVYAPHFDPRYGPLLMPAASGRPARLATAPAPAPGSPPCELSGKGEPAGAAWAGPGGPFASPSGDVAQGLGLSVDSARRYSLCGASLLS

SEQ ID NO: 69659 - protein, 143 aa, Homo sapiens
MSCLDVMYQVYGPPQPYFAAAYTPYHQKLAYYSKMQEAQECNASPSSSGSGSSSFSSQTPASIKEEEGSPEKERPPEAEYINSRCVLFTYFQGDISSVVDEHFSRALSQPSSYSPSCTSSKAPRSSGPWRARRYSLCGASLLS

SEQ ID NO: 69660 - protein, 320 aa, Homo sapiens
MSCAEVMYHPQPYGASQYLPNPMAATTCPTAYYQPAPQPGQQKKLAVFSKMQDSLEVTLPSKQEEEDEEEEEEEKDQPAEMEYLNSRCVLFTYFQGDIGSVVDEHFSRALGQAITLHPESAISKSKMGLTPLWRDSSALSSQRNSFPTSFWTSSYQPPPAPCLGGVHPDFQVTGPPGTFSAADPSPWPGHNLHQTGPAPPPAVSESWPYPLTSQVSPSYSHMHDVYMRHHHPHAHMHHRHRHHHHHHHPPAGSALDPSYGPLLMPSVHAARIPAPQCDITKTEPTTVTSATSAWAGAFHGTVDIVPSVGFDTGWSAMARS

SEQ ID NO: 69661 - protein, 326 aa, Homo sapiens
MSCAEVMYHPQPYGASQYLPNPMAATTCPTAYYQPAPQPGQQKKLAVFSKMQDSLEVTLPSKQEEEDEEEEEEEKDQPAEMEYLNSRCVLFTYFQGDIGSVVDEHFSRALGQAITLHPESAISKSKMGLTPLWRDSSALSSQRNSFPTSFWTSSYQPPPAPCLGGVHPDFQVTGPPGTFSAADPSPWPGHNLHQTGPAPPPAVSESWPYPLTSQVSPSYSHMHDVYMRHHHPHAHMHHRHRHHHHHHHPPAGSALDPSYGPLLMPSVHAARIPAPQCDITKTEPTTVTSATSAWAGAFHGTVDIVPSVGFDTGLQHQDKSKESPWY

SEQ ID NO: 69662 - protein, 441 aa, Homo sapiens
MKAAVDLKPTLTIIKTEKVDLELFPSPDMECADVPLLTPSSKEMMSQALKATFSGFTKEQQRLGIPKDPRQWTETHVRDWVMWAVNEFSLKGVDFQKFCMNGAALCALGKDCFLELAPDFVGDILWEHLEILQKEDVKPYQVNGVNPAYPESRYTSDYFISYGIEHAQCVPPSEFSEPSFITESYQTLHPISSEELLSLKYENDYPSVILRDPLQTDTLQNDYFAIKQEVVTPDNMCMGRTSRGKLGGQDSFESIESYDSCDRLTQSWSSQSSFNSLQRVPSYDSFDSEDYPAALPNHKPKGTFKDYVRDRADLNKDKPVIPAAALAGYTGSGPIQLWQFLLELLTDKSCQSFISWTGDGWEFKLSDPDEVARRWGKRKNKPKMNYEKLSRGLRYYYDKNIIHKTAGKRYVYRFVCDLQSLLGYTPEELHAMLDVKPDADE

SEQ ID NO: 69663 - protein, 354 aa, Homo sapiens
MKAAVDLKPTLTIIKTEKVDLELFPSPDMECADVPLLTPSSKEMMSQALKATFSGFTKEQQRLGIPKDPRQWTETHVRDWVMWAVNEFSLKGVDFQKFCMNGAALCALGKDCFLELAPDFVGDILWEHLEILQKEDVKPYQVNGVNPAYPESRYTSDYFISYGIEHAQCVPPSEFSEPSFITESYQTLHPISSEELLSLKYENDYPSVILRDPLQTDTLQNDYFAIKQEVVTPDNMCMGRTSRGSGPIQLWQFLLELLTDKSCQSFISWTGDGWEFKLSDPDEVARRWGKRKNKPKMNYEKLSRGLRYYYDKNIIHKTAGKRYVYRFVCDLQSLLGYTPEELHAMLDVKPDADE

SEQ ID NO: 69664 - protein, 485 aa, Homo sapiens
MSYFVDSAGSSPVPYSAPRPAVVRQGPSNTYEDPRMNCGFQSNYHQQRPCYPFWDEMATQEVPTGLEHCVSDMECADVPLLTPSSKEMMSQALKATFSGFTKEQQRLGIPKDPRQWTETHVRDWVMWAVNEFSLKGVDFQKFCMNGAALCALGKDCFLELAPDFVGDILWEHLEILQKEDVKPYQVNGVNPAYPESRYTSDYFISYGIEHAQCVPPSEFSEPSFITESYQTLHPISSEELLSLKYENDYPSVILRDPLQTDTLQNDYFAIKQEVVTPDNMCMGRTSRGKLGGQDSFESIESYDSCDRLTQSWSSQSSFNSLQRVPSYDSFDSEDYPAALPNHKPKGTFKDYVRDRADLNKDKPVIPAAALAGYTGSGPIQLWQFLLELLTDKSCQSFISWTGDGWEFKLSDPDEVARRWGKRKNKPKMNYEKLSRGLRYYYDKNIIHKTAGKRYVYRFVCDLQSLLGYTPEELHAMLDVKPDADE

SEQ ID NO: 69665 - protein, 354 aa, Homo sapiens; identical to SEQ ID NO: 69663

SEQ ID NO: 69666 - protein, 272 aa, Homo sapiens
MKAAVDLKPTLTIIKTEKVDLELFPSPDMECADVPLLTPSSKEMMSQALKATFSGFTKEQQRLGIPKDPRQWTETHVRDWVMWAVNEFSLKGVDFQKFCMNGAALCALGKDCFLELAPDFVGDILWEHLEILQKEDVKPYQVNGVNPAYPESRYTSDYFISYGIEHAQCVPPSEFSEPSFITESYQTLHPISSEELLSLKYENDYPSVILRDPLQTDTLQNDYFAIKQEVVTPDNMCMGRTSRGKLGGQDSFESIESYDSCGQEMGKEEKQT

SEQ ID NO: 69667 - protein, 225 aa, Homo sapiens
MKAAVDLKPTLTIIKTEKVDLELFPSPGKLGGQDSFESIESYDSCDRLTQSWSSQSSFNSLQRVPSYDSFDSEDYPAALPNHKPKGTFKDYVRDRADLNKDKPVIPAAALAGYTGSGPIQLWQFLLELLTDKSCQSFISWTGDGWEFKLSDPDEVARRWGKRKNKPKMNYEKLSRGLRYYYDKNIIHKTAGKRYVYRFVCDLQSLLGYTPEELHAMLDVKPDADE

SEQ ID NO: 69668 - protein, 615 aa, Homo sapiens
MKALRLSASALFCLLLINGLGAAPPGRPEAQPPPLSSEHKEPVAGDAVPGPKDGSAPEVRGARNSEPQDEGELFQGVDPRALAAVLLQALDRPASPPAPSGSQQGPEEEAAEALLTETVRSQTHSLPAPESPEPAAPPRPQTPENGPEASDPSEELEALASLLQELRDFSPSSAKRQQETAAAETETRTHTLTRVNLESPGPERVWRASWGEFQARVPERAPLPPPAPSQFQARMPDSGPLPETHKFGEGVSSPKTHLGEALAPLSKAYQGVAAPFPKARRPESALLGGSEAGERLLQQGLAQVEAGRRQAEATRQAAAQEERLADLASDLLLQYLLQGGARQRGLGGRGLQEAAEERESAREEEEAEQERRGGEERVGEEDEEAAEAEAEAEEAERARQNALLFAEEEDGEAGAEDKRSQEETPGHRRKEAEGTEEGGEEEDDEEMDPQTIDSLIELSTKLHLPADDVVSIIEEVEEKRKRKKNAPPEPVPPPRAAPAPTHVRSPQPPPPAPAPARDELPDWNEVLPPWDREEDEVYPPGPYHPFPNYIRPRTLQPPSALRRRHYHHALPPSRHYPGREAQARRAQEEAEAEERRLQEQEELENYIEHVLLRRP

SEQ ID NO: 69669 - protein, 615 aa, Homo sapiens; identical to SEQ ID NO: 69668

SEQ ID NO: 69670 - protein, 377 aa, Homo sapiens
MKALRLSASALFCLLLINGLGAAPPGRPEAQPPPLSSEHKEPVAGDAVPGPKDGSAPEVRGARNSEPQDEGELFQGVDPRALAAVLLQALDRPASPPAPSGSQQGPEEEAAEALLTETVRSQTHSLPAPESPEPAAPPRPQTPENGPEASDPSEELEALASLLQELRDFSPSSAKRQQETAAAETETRTHTLTRVNLESPGPERVWRASWGEFQARVPERAPLPPPAPSQFQARMPDSGPLPETHKFGEGVSSPKTHLGEALAPLSKAYQGVAAPFPKARRPESALLGGSEAGERLLQQGLAQVEAGRRQAEATRQAAAQEERLADLASDLLLQFAAGRGPAARPCPLALPLSPGCVGTCQTPLPGPEPELPELTRG

SEQ ID NO: 69671 - protein, 827 aa, Homo sapiens
MTKLSAQVKGSLNITTPGLQIWRIEAMQMVPVPSSTFGSFFDGDCYIILAIHKTASSLSYDIHYWIGQDSSLDEQGAAAIYTTQMDDFLKGRAVQHREVQGNESEAFRGYFKQGLVIRKGGVASGMKHVETNSYDVQRLLHVKGKRNVVAGEVEMSWKSFNRGDVFLLDLGKLIIQWNGPESTRMERLRGMTLAKEIRDQERGGRTYVGVVDGENELASPKLMEVMNHVLGKRRELKAAVPDTVVEPALKAALKLYHVSDSEGNLVVREVATRPLTQDLLSHEDCYILDQGGLKIYVWKGKKANEQEKKGAMSHALNFIKAKQYPPSTQVEVQNDGAESAVFQQLFQKWTASNRTSGLGKTHTVGSVAKVEQVKFDATSMHVKPQVAAQQKMVDDGSGEVQVWRIENLELVPVDSKWLGHFYGGDCYLLLYTYLIGEKQHYLLYVWQGSQASQDEITASAYQAVILDQKYNGEPVQIRVPMGKEPPHLMSIFKGRMVVYQGGTSRTNNLETGPSTRLFQVQGTGANNTKAFEVPARANFLNSNDVFVLKTQSCCYLWCGKGCSGDEREMAKMVADTISRTEKQVVVEGQEPANFWMALGGKAPYANTKRLQEENLVITPRLFECSNKTGRFLATEIPDFNQDDLEEDDVFLLDVWDQVFFWIGKHANEEEKKAAATTAQEYLKTHPSGRDPETPIIVVKQGHEPPTFTGWFLAWDPFKWSNTKSYEDLKAELGNSRDWSQITAEVTSPKVDVFNANSNLSSGPLPIFPLEQLVNKPVEELPEGVDPSRKEEHLSIEDFTQAFGMTPAAFSALPRWKQQNLKKEKGLF

SEQ ID NO: 69672 - protein, 516 aa, Homo sapiens
MSHALNFIKAKQYPPSTQVEVQNDGAESAVFQQLFQKWTASNRTSGLGKTHTVGSVAKVEQVKFDATSMHVKPQVAAQQKMVDDGSGEVQVWRIENLELVPVDSKWLGHFYGGDCYLLLYTYLIGEKQHYLLYVWQGSQASQDEITASAYQAVILDQKYNGEPVQIRVPMGKEPPHLMSIFKGRMVVYQGGTSRTNNLETGPSTRLFQVQGTGANNTKAFEVPARANFLNSNDVFVLKTQSCCYLWCGKGCSGDEREMAKMVADTISRTEKQVVVEGQEPANFWMALGGKAPYANTKRLQEENLVITPRLFECSNKTGRFLATEIPDFNQDDLEEDDVFLLDVWDQVFFWIGKHANEEEKKAAATTAQEYLKTHPSGRDPETPIIVVKQGHEPPTFTGWFLAWDPFKWSNTKSYEDLKAELGNSRDWSQITAEVTSPKVDVFNANSNLSSGPLPIFPLEQLVNKPVEELPEGVDPSRKEEHLSIEDFTQAFGMTPAAFSALPRWKQQNLKKEKGLF

SEQ ID NO: 69673 - protein, 421 aa, Homo sapiens
MTKLSAQVKGSLNITTPGLQIWRIEAMQMVPVPSSTFGSFFDGDCYIILAIHKTASSLSYDIHYWIGQDSSLDEQGAAAIYTTQMDDFLKGRAVQHREVQGNESEAFRGYFKQGLVIRKGGVASGMKHVETNSYDVQRLLHVKGKRNVVAGEVEMSWKSFNRGDVFLLDLGKLIIQWNGPESTRMERLRGMTLAKEIRDQERGGRTYVGVVDGENELASPKLMEVMNHVLGKRRELKAAVPDTVVEPALKAALKLYHVSDSEGNLVVREVATRPLTQDLLSHEDCYILDQGGLKIYVWKGKKANEQEKKGAMSHALNFIKAKQYPPSTQVEVQNDGAESAVFQQLFQKWTASNRTSGLGKTHTVGSVGEGQAGAVREPGSRSWARRATWSTTHPPSLTCIFNEDFYAGSGLVLADGDVDKL

SEQ ID NO: 69674 - protein, 191 aa, Homo sapiens
MGKQNSKLAPEVMEDLVKSTEFNEHELKQWYKGFLKDCPSGRLNLEEFQQLYVKFFPYGDASKFAQHAFRTFDKNGDGTIDFREFICALSITSRGSFEQKLNWAFNMYDLDGDGKITRVEMLEIIEAIYKMVGTVIMMKMNEDGLTPEQRVDKIFSKMDKNKDDQITLDEFKEAAKSDPSIVLLLQCDIQK

SEQ ID NO: 69675 - protein, 191 aa, Homo sapiens; identical to SEQ ID NO: 69674

SEQ ID NO: 69676 - protein, 191 aa, Homo sapiens; identical to SEQ ID NO: 69674

SEQ ID NO: 69677 - protein, 104 aa, Homo sapiens
MGKQNSKLAPEVMEDLVKSTEFNEHELKQWYKGFLKDCPSGRLNLEEFQQLYVKFFPYGDASKFAQHAFRTFDKNGDGTIDFREFICALSITSRGSFEQKLNWA

SEQ ID NO: 69678 - protein, 118 aa, Homo sapiens
MGKQNSKLAPEVMEDLVKSTEFNEHELKQWYKGFLKDCPSGRLNLEEFQQLYVKFFPYGDASKFAQHAFRTFDKNGDGTIDFREFICALSITSRGSFEQKLNWAFNMYDLDGDGKITR

SEQ ID NO: 69679 - protein, 239 aa, Homo sapiens
MTGRDSLSDGRTSSRALVPGGSPRGSRPRGFAITDLLGLEAELPAPAGPGQGSGCEGPAVAPCPGPGLDGSSLARGALPLGLGLLCGFGTQPPAAARAPCLLLADVPFLPPRGPEPAAPLAPSRPPPALGRQKRSDSVSTSDEDSQSEDRNDLKASPTLGKRKKRRHRTVFTAHQLEELEKAFSEAHYPDVYAREMLAVKTELPEDRIQVSGVPFLRSKDTTENVSFPHSVSQSAVPSL

SEQ ID NO: 69680 - protein, 365 aa, Homo sapiens
MTGRDSLSDGRTSSRALVPGGSPRGSRPRGFAITDLLGLEAELPAPAGPGQGSGCEGPAVAPCPGPGLDGSSLARGALPLGLGLLCGFGTQPPAAARAPCLLLADVPFLPPRGPEPAAPLAPSRPPPALGRQKRSDSVSTSDEDSQSEDRNDLKASPTLGKRKKRRHRTVFTAHQLEELEKAFSEAHYPDVYAREMLAVKTELPEDRIQVWFQNRRAKWRKREKRWGGSSVMAEYGLYGAMVRHCIPLPDSVLNSAEGGLLGSCAPWLLGMHKKSMGMIRKPGSEDKLAGLWGSDHFKEGSSQSESGSQRGSDKVSPENGLEDVAIDLSSSARQETKKVHPGAGAQGGSNSTALEGPQPGKVGAT

SEQ ID NO: 69681 - protein, 143 aa, Homo sapiens
MTGRDSLSDGRTSSRALVPGGSPRGSRPRGFAITDLLGLEAELPAPAGPGQGSGCEGPAVAPCPGPGLDGSSLARGALPLGLGLLCGFGTQPPAAARAPCLLLADVPFLPPRGPEPAAPLAPSRPPPALGRQKRSDSVSTSAM

SEQ ID NO: 69682 - protein, 280 aa, Homo sapiens
MTGRDSLSDGRTSSRALVPGGSPRGSRPRGFAITDLLGLEAELPAPAGPGQGSGCEGPAVAPCPGPGLDGSSLARGALPLGLGLLCGFGTQPPAAARAPCLLLADVPFLPPRGPEPAAPLAPSRPPPALGRQKRSDSVSTSDEDSQSEDRNDLKASPTLGKRKKRRHRTVFTAHQLEELEKAFSEAHYPDVYAREMLAVKTELPEDRIQVWFQNRRAKWRKREKRWGGSSVMAEYGLYGAMVRHCIPLPDSVLNSAEGGLLGSCAPWLLEGETLGCREMK

SEQ ID NO: 69683 - protein, 218 aa, Homo sapiens
MTGRDSLSDGRTSSRALVPGGSPRGSRPRGFAITDLLGLEAELPAPAGPGQGSGCEGPAVAPCPGPGLDGSSLARGALPLGLGLLCGFGTQPPAAARAPCLLLADVPFLPPRGPEPAAPLAPSRPPPALGRQKRSDSVSTSDEDSQSEDRNDLKASPTLGKRKKRRHRTVFTAHQLEELEKAFSEAHYPDVYAREMLAVKTELPEDRIQRVRHWAAEK

SEQ ID NO: 69684 - protein, 301 aa, Homo sapiens
MTGRDSLSDGRTSSRALVPGGSPRGSRPRGFAITDLLGLEAELPAPAGPGQGSGCEGPAVAPCPGPGLDGSSLARGALPLGLGLLCGFGTQPPAAARAPCLLLADVPFLPPRGPEPAAPLAPSRPPPALGRQKRSDSVSTSDEDSQSEDRNDLKASPTLGKRKKRRHRTVFTAHQLEELEKAFSEAHYPDVYAREMLAVKTELPEDRIQVWFQNRRAKWRKREKRWGGSSVMAEYGLYGAMVRHCIPLPDSVLNSAEGGLLGSCAPWLLVQTSAPGGSRSLDFAGDTQAPQTPWWCLMTFS

SEQ ID NO: 69685 - protein, 236 aa, Homo sapiens
MTGRDSLSDGRTSSRALVPGGSPRGSRPRGFAITDLLGLEAELPAPAGPGQGSGCEGPAVAPCPGPGLDGSSLARGALPLGLGLLCGFGTQPPAAARAPCLLLADVPFLPPRGPEPAAPLAPSRPPPALGRQKRSDSVSTSDEDSQSEDRNDLKASPTLGKRKKRRHRTVFTAHQLEELEKAFSEAHYPDVYAREMLAVKTELPEDRIQCKLLLLEAPVHWTLQETHRLPRPRGGA

SEQ ID NO: 69686 - protein, 427 aa, Homo sapiens
MEAMAASTSLPDPGDFDRNVPRICGVCGDRATGFHFNAMTCEGCKGFFRRSMKRKALFTCPFNGDCRITKDNRRHCQACRLKRCVDIGMMKEFILTDEEVQRKREMILKRKEEEALKDSLRPKLSEEQQRIIAILLDAHHKTYDPTYSDFCQFRPPVRVNDGGGSHPSRPNSRHTPSFSGDSSSSCSDHCITSSDMMDSSSFSNLDLSEEDSDDPSVTLELSQLSMLPHLADLVSYSIQKVIGFAKMIPGFRDLTSEDQIVLLKSSAIEVIMLRSNESFTMDDMSWTCGNQDYKYRVSDVTKAGHSLELIEPLIKFQVGLKKLNLHEEEHVLLMAICIVSPDRPGVQDAALIEAIQDRLSNTLQTYIRCRHPPPGSHLLYAKMIQKLADLRSLNEEHSKQYRCLSFQPECSMKLTPLVLEVFGNEIS

SEQ ID NO: 69687 - protein, 427 aa, Homo sapiens; identical to SEQ ID NO: 69686

SEQ ID NO: 69688 - protein, 395 aa, Homo sapiens
MSMEHAALTATGAGGSWRSMKRKALFTCPFNGDCRITKDNRRHCQACRLKRCVDIGMMKEFILTDEEVQRKREMILKRKEEEALKDSLRPKLSEEQQRIIAILLDAHHKTYDPTYSDFCQFRPPVRVNDGGGSHPSRPNSRHTPSFSGDSSSSCSDHCITSSDMMDSSSFSNLDLSEEDSDDPSVTLELSQLSMLPHLADLVSYSIQKVIGFAKMIPGFRDLTSEDQIVLLKSSAIEVIMLRSNESFTMDDMSWTCGNQDYKYRVSDVTKAGHSLELIEPLIKFQVGLKKLNLHEEEHVLLMAICIVSPDRPGVQDAALIEAIQDRLSNTLQTYIRCRHPPPGSHLLYAKMIQKLADLRSLNEEHSKQYRCLSFQPECSMKLTPLVLEVFGNEIS

SEQ ID NO: 69689 - protein, 250 aa, Homo sapiens
MEAMAASTSLPDPGDFDRNVPRICGVCGDRATGFHFNAMTCEGCKGFFRRSMKRKALFTCPFNGDCRITKDNRRHCQACRLKRCVDIGMMKEFILTDEEVQRKREMILKRKEEEALKDSLRPKLSEEQQRIIAILLDAHHKTYDPTYSDFCQFRPPVRVNDGGGSHPSRPNSRHTPSFSGDSSSSCSDHCITSSDMMDSSSFSNLDLSEEDSDDPSVTLELSQLSMLPHLADLVSYSIQKVIGFAKMIPG

SEQ ID NO: 69690 - protein, 101 aa, Homo sapiens
MEAMAASTSLPDPGDFDRNVPRICGVCGDRATGFHFNAMTCEGCKGFFRRSMKRKALFTCPFNGDCRITKDNRRHCQACRLKRCVDIGMMKEFILTDEEVQ

SEQ ID NO: 69691 - protein, 427 aa, Homo sapiens; identical to SEQ ID NO: 69686

SEQ ID NO: 69692 - protein, 106 aa, Homo sapiens
MEAMAASTSLPDPGDFDRNVPRICGVCGDRATGFHFNAMTCEGCKGFFRRSMKRKALFTCPFNGDCRITKDNRRHCQACRLKRCVDIGMMKEFILTDEEVQRKREM

SEQ ID NO: 69693 - protein, 477 aa, Homo sapiens
MEWRNKKRSDWLSMVLRTAGVEEAFGSEVSVRPHRRAPLGSTYLPPAPSGMEAMAASTSLPDPGDFDRNVPRICGVCGDRATGFHFNAMTCEGCKGFFRRSMKRKALFTCPFNGDCRITKDNRRHCQACRLKRCVDIGMMKEFILTDEEVQRKREMILKRKEEEALKDSLRPKLSEEQQRIIAILLDAHHKTYDPTYSDFCQFRPPVRVNDGGGSHPSRPNSRHTPSFSGDSSSSCSDHCITSSDMMDSSSFSNLDLSEEDSDDPSVTLELSQLSMLPHLADLVSYSIQKVIGFAKMIPGFRDLTSEDQIVLLKSSAIEVIMLRSNESFTMDDMSWTCGNQDYKYRVSDVTKAGHSLELIEPLIKFQVGLKKLNLHEEEHVLLMAICIVSPDRPGVQDAALIEAIQDRLSNTLQTYIRCRHPPPGSHLLYAKMIQKLADLRSLNEEHSKQYRCLSFQPECSMKLTPLVLEVFGNEIS

SEQ ID NO: 69694 - protein, 92 aa, Homo sapiens
MGSTWGSPGWVRLALCLTGLVLSLYALHVKAARARDRDYRALCDVGTAISCSRVFSSRLPADTLGLCPDAAELPGVSRWFCLPGLDPVLRAL

SEQ ID NO: 69695 - protein, 163 aa, Homo sapiens
MGSTWGSPGWVRLALCLTGLVLSLYALHVKAARARDRDYRALCDVGTAISCSRVFSSRWGRGFGLVEHVLGQDSILNQSNSIFGCIFYTLQLLLGCLRTRWASVLMLLSSLVSLAGSVYLAWILFFVLYDFCIVCITTYAINVSLMWLSFRKVQEPQGKAKRH

SEQ ID NO: 69696 - protein, 478 aa, Homo sapiens
MAPLRPLLILALLAWVALADQESCKGRCTEGFNVDKKCQCDELCSYYQSCCTDYTAECKPQVTRGDVFTMPEDEYTVYDDGEEKNNATVHEQVGGPSLTSDLQAQSKGNPEQTPVLKPEEEAPAPEVGASKPEGIDSRPETLHPGRPQPPAEEELCSGKPFDAFTDLKNGSLFAFRGQYCYELDEKAVRPGYPKLIRDVWGIEGPIDAAFTRINCQGKTYLFKGSQYWRFEDGVLDPDYPRNISDGFDGIPDNVDAALALPAHSYSGRERVYFFKGKQYWEYQFQHQPSQEECEGSSLSAVFEHFAMMQRDSWEDIFELLFWGRTSAGTRQPQFISRDWHGVPGQVDAAMAGRIYISGMAPRPSLAKKQRFRHRNRKGYRSQRGHSRGRNQNSRRPSRATWLSLFSSEESNLGANNYDDYRMDWLVPATCEPIQSVFFFSGDKYYRVNLRTRRVDTVDPPYPRSIAQYWLGCPAPGHL

SEQ ID NO: 69697 - protein, 118 aa, Homo sapiens
MAPLRPLLILALLAWVALADQESCKGRCTEGFNVDKKCQCDELCSYYQSCCTDYTAECKPQVTRGDVFTMPEDEYTVYDDGEEKNNATVHEQVGGPSLTSDLQAQSKGNPEQTPVLKP

SEQ ID NO: 69698 - protein, 164 aa, Homo sapiens
MSVDPLSSKALKIKRELSENTPHLSDEALMGLSVRELNRHLRGLSAEEVTRLKQRRRTLKNRGYAASCRVKRVCQKEELQKQKSELEREVDKLARENAAMRLELDALRGKCEALQGFARSVAAARGPATLVAPASVITIVKSTPGSGSGPAHGPDPAHGPASCS

SEQ ID NO: 69699 - protein, 164 aa, Homo sapiens; identical to SEQ ID NO: 69698

SEQ ID NO: 69700 - protein, 126 aa, Homo sapiens
MSVDPLSSKALKIKRELSENTPHLSDEALMGLSVRELNRHLRGLSAEEVTRLKQRRRTLKNRGYAASCRVKRVCQKEELQKQKSELEREVDKLARENAAMRLELDALRGKCEALQGFARSVAAARG

SEQ ID NO: 69701 - protein, 164 aa, Homo sapiens; identical to SEQ ID NO: 69698

SEQ ID NO: 69702 - protein, 93 aa, Homo sapiens
MGLSVRELNRHLRGLSAEEVTRLKQRRRTLKNRGYAASCRVKRVCQKEELQKQKSELEREVDKLARENAAMRLELDALRGKCEALQGFARSVA

SEQ ID NO: 69703 - protein, 164 aa, Homo sapiens; identical to SEQ ID NO: 69698

SEQ ID NO: 69704 - protein, 135 aa, Homo sapiens
MGLSVRELNRHLRGLSAEEVTRLKQRRRTLKNRGYAASCRVKRVCQKEELQKQKSELEREVDKLARENAAMRLELDALRGKCEALQGFARSVAAARGPATLVAPASVITIVKSTPGSGSGPAHGPDPAHGPASCS

SEQ ID NO: 69705 - protein, 162 aa, Homo sapiens
MTTPNKGNKALKVKREPGENGTSLTDEELVTMSVRELNQHLRGLSKEEIVQLKQRRRTLKNRGYAASCRVKRVTQKEELEKQKAELQQEVEKLASENASMKLELDALRSKYEALQTFARTVARSPVAPARGPLAAGLGPLVPGKVAATSVITIVKSKTDARS

SEQ ID NO: 69706 - protein, 162 aa, Homo sapiens; identical to SEQ ID NO: 69705

SEQ ID NO: 69707 - protein, 156 aa, Homo sapiens
MTTNPKPNKALKVKKEAGENAPVLSDDELVSMSVRELNQHLRGLTKEEVTRLKQRRRTLKNRGYAASCRIKRVTQKEELERQRVELQQEVEKLARENSSMRLELDALRSKYEALQTFARTVARGPVAPSKVATTSVITIVKSTELSSTSVPFSAAS

SEQ ID NO: 69708 - protein, 156 aa, Homo sapiens; identical to SEQ ID NO: 69707

SEQ ID NO: 69709 - protein, 156 aa, Homo sapiens; identical to SEQ ID NO: 69707

SEQ ID NO: 69710 - protein, 346 aa, Homo sapiens
MPSPLALRPYLRSEFSPSVDARPCSSPSELPAKLLLGATLPRAPRLPRRLAWCSIDWEQVCLLQRLGAGGFGSVYKATYRGVPVAIKQVNKCTKNRLASRRSFWAELNVARLRHDNIVRVVAASTRTPAGSNSLGTIIMEFGGNVTLHQVIYGAAGHPEGDAGEPHCRTGGQLSLGKCLKYSLDVVNGLLFLHSQSIVHLDLKPANILISEQDVCKISDFGCSEKLEDLLCFQTPSYPLGGTYTHRAPELLKGEGVTPKADIYSFAITLWQMTTKQAPYSGERQHILYAVVAYDLRPSLSAAVFEDSLPGQRLGDVIQRCWRPSAAQRPSARLLLVDLTSLKAELG

SEQ ID NO: 69711 - protein, 612 aa, Homo sapiens
MARRPRHSIYSSDEDDEDFEMCDHDYDGLLPKSGKRHLGKTRWTREEDEKLKKLVEQNGTDDWKVIANYLPNRTDVQCQHRWQKVLNPELIKGPWTKEEDQRVIELVQKYGPKRWSVIAKHLKGRIGKQCRERWHNHLNPEVKKTSWTEEEDRIIYQAHKRLGNRWAEIAKLLPGRTDNAIKNHWNSTMRRKVEQEGYLQESSKASQPAVATSFQKNSHLMGFAQAPPTAQLPATGQPTVNNDYSYYHISEAQNVSSHVPYPVALHVNIVNVPQPAAAAIQRHYNDEDPEKEKRIKELELLLMSTENELKGQQVLPTQNHTCSYPGWHSTTIADHTRPHGDSAPVSCLGEHHSTPSLPADPGSLPEESASPARCMIVHQGTILDNVKNLLEFAETLQFIDSFLNTSSNHENSDLEMPSLTSTPLIGHKLTVTTPFHRDQTVKTQKENTVFRTPAIKRSILESSPRTPTPFKHALAAQEIKYGPLKMLPQTPSHLVEDLQDVIKQESDESGIVAEFQENGPPLLKKIKQEVESPTDKSGNFFCSHHWEGDSLNTQLFTQTSPVADAPNILTSSVLMAPASEDEDNVLKAFTVPKNRSLASPLQATKAQRLFQF

SEQ ID NO: 69712 - protein, 726 aa, Homo sapiens [sequence omitted]

SEQ ID NO: 69713 - protein, 761 aa, Homo sapiens
MARRPRHSIYSSDEDDEDFEMCDHDYDGLLPKSGKRHLGKTRWTREEDEKLKKLVEQNGTDDWKVIANYLPNRTDVQCQHRWQKVLNPELIKGPWTKEEDQRVIELVQKYGPKRWSVIAKHLKGRIGKQCRERWHNHLNPEVKKTSWTEEEDRIIYQAHKRLGNRWAEIAKLLPGRTDNAIKNHWNSTMRRKVEQEGYLQESSKASQPAVATSFQKNSHLMGFAQAPPTAQLPATGQPTVNNDYSYYHISEAQNVSSHVPYPVALHVNIVNVPQPAAAAIQRHYNDEDPEKEKRIKELELLLMSTENELKGQQVLPTQNHTCSYPGWHSTTIADHTRPHGDSAPVSCLGEHHSTPSLPADPGSLPEESASPARCMIVHQGTILDNVKNLLEFAETLQFIDSDSSSWCDLSSFEFFEEADFSPSQHHTGKALQLQQREGNGTKPAGEPSPRVNKRMLSESSLDPPKVLPPARHSTIPLVILRKKRGQASPLATGDCSSFIFADVSSSTPKRSPVKSLPFSPSQFLNTSSNHENSDLEMPSLTSTPLIGHKLTVTTPFHRDQTVKTQKENTVFRTPAIKRSILESSPRTPTPFKHALAAQEIKYGPLKMLPQTPSHLVEDLQDVIKQESDESGIVAEFQENGPPLLKKIKQEVESPTDKSGNFFCSHHWEGDSLNTQLFTQTSPVADAPNILTSSVLMAPASEDEDNVLKAFTVPKNRSLASPLQPCSSTWEPASCGKMEEQMTSSSQARKYVNAFSARTLVM

SEQ ID NO: 69714 - protein, 640 aa, Homo sapiens
MARRPRHSIYSSDEDDEDFEMCDHDYDGLLPKSGKRHLGKTRWTREEDEKLKKLVEQNGTDDWKVIANYLPNRTDVQCQHRWQKVLNPELIKGPWTKEEDQRVIELVQKYGPKRWSVIAKHLKGRIGKQCRERWHNHLNPEVKKTSWTEEEDRIIYQAHKRLGNRWAEIAKLLPGRTDNAIKNHWNSTMRRKVEQEGYLQESSKASQPAVATSFQKNSHLMGFAQAPPTAQLPATGQPTVNNDYSYYHISEAQNVSSHVPYPVALHVNIVNVPQPAAAAIQRHYNDEDPEKEKRIKELELLLMSTENELKGQQVLPTQNHTCSYPGWHSTTIADHTRPHGDSAPVSCLGEHHSTPSLPADPGSLPEESASPARCMIVHQGTILDNVKNLLEFAETLQFIDSFLNTSSNHENSDLEMPSLTSTPLIGHKLTVTTPFHRDQTVKTQKENTVFRTPAIKRSILESSPRTPTPFKHALAAQEIKYGPLKMLPQTPSHLVEDLQDVIKQESDESGIVAEFQENGPPLLKKIKQEVESPTDKSGNFFCSHHWEGDSLNTQLFTQTSPVADAPNILTSSVLMAPASEDEDNVLKAFTVPKNRSLASPLQPCSSTWEPASCGKMEEQMTSSSQARKYVNAFSARTLVM

SEQ ID NO: 69715 - protein, 637 aa, Homo sapiens
MARRPRHSIYSSDEDDEDFEMCDHDYDGLLPKSGKRHLGKTRWTREEDEKLKKLVEQNGTDDWKVIANYLPNRTDVQCQHRWQKVLNPELIKGPWTKEEDQRVIELVQKYGPKRWSVIAKHLKGRIGKQCRERWHNHLNPEVKKTSWTEEEDRIIYQAHKRLGNRWAEIAKLLPGRTDNAIKNHWNSTMRRKVEQEGYLQESSKASQPAVATSFQKNSHLMGFAQAPPTAQLPATGQPTVNNDYSYYHISEAQNVSSHVPYPVALHVNIVNVPQPAAAAIQRHYNDEDPEKEKRIKELELLLMSTENELKGQQTQNHTCSYPGWHSTTIADHTRPHGDSAPVSCLGEHHSTPSLPADPGSLPEESASPARCMIVHQGTILDNVKNLLEFAETLQFIDSFLNTSSNHENSDLEMPSLTSTPLIGHKLTVTTPFHRDQTVKTQKENTVFRTPAIKRSILESSPRTPTPFKHALAAQEIKYGPLKMLPQTPSHLVEDLQDVIKQESDESGIVAEFQENGPPLLKKIKQEVESPTDKSGNFFCSHHWEGDSLNTQLFTQTSPVADAPNILTSSVLMAPASEDEDNVLKAFTVPKNRSLASPLQPCSSTWEPASCGKMEEQMTSSSQARKYVNAFSARTLVM

SEQ ID NO: 69716 - protein, 79 aa, Homo sapiens
MARRPRHSIYSSDEDDEDFEMCDHDYDGLLPKSGKRHLGKTRWTREENRTDVQCQHRWQKVLNPELIKGPWTKEEDQRN

SEQ ID NO: 69717 - protein, 103 aa, Homo sapiens
MARRPRHSIYSSDEDDEDFEMCDHDYDGLLPKSGKRHLGKTRWTREEDEKLKKLVEQNGTDDWKVIANYLPNRTDVQCQHRWQKVLNPELIKGPWTKEEDQRN

SEQ ID NO: 69718 - protein, 605 aa, Homo sapiens
MARRPRHSIYSSDEDDEDFEMCDHDYDGLLPKSGKRHLGKTRWTREEDEKLKKLVEQNGTDDWKVIANYLPNRTDVQCQHRWQKVLNPELIKGPWTKEEDQRVIELVQKYGPKRWSVIAKHLKGRIGKQCRERWHNHLNPEVKKTSWTEEEDRIIYQAHKRLGNRWAEIAKLLPGRTDNAIKNHWNSTMRRKVEQEGYLQESSKASQPAVATSFQKNSHLMGFAQAPPTAQLPATGQPTVNNDYSYYHISEAQNVSSHVPYPVALHVNIVNVPQPAAAAIQTQNHTCSYPGWHSTTIADHTRPHGDSAPVSCLGEHHSTPSLPADPGSLPEESASPARCMIVHQGTILDNVKNLLEFAETLQFIDSFLNTSSNHENSDLEMPSLTSTPLIGHKLTVTTPFHRDQTVKTQKENTVFRTPAIKRSILESSPRTPTPFKHALAAQEIKYGPLKMLPQTPSHLVEDLQDVIKQESDESGIVAEFQENGPPLLKKIKQEVESPTDKSGNFFCSHHWEGDSLNTQLFTQTSPVADAPNILTSSVLMAPASEDEDNVLKAFTVPKNRSLASPLQPCSSTWEPASCGKMEEQMTSSSQARKYVNAFSARTLVM

SEQ ID NO: 69719 - protein, 700 aa, Homo sapiens
MSRRTRCEDLDELHYQDTDSDVPEQRDSKCKVKWTHEEDEQLRALVRQFGQQDWKFLASHFPNRTDQQCQYRWLRVLNPDLVKGPWTKEEDQKVIELVKKYGTKQWTLIAKHLKGRLGKQCRERWHNHLNPEVKKSCWTEEEDRIICEAHKVLGNRWAEIAKMLPGRTDNAVKNHWNSTIKRKVDTGGFLSESKDCKPPVYLLLELEDKDGLQSAQPTEGQGSLLTNWPSVPPTIKEEENSEEELAAATTSKEQEPIGTDLDAVRTPEPLEEFPKREDQEGSPPETSLPYKWVVEAANLLIPAVGSSLSEALDLIESDPDAWCDLSKFDLPEEPSAEDSINNSLVQLQASHQQQVLPPRQPSALVPSVTEYRLDGHTISDLSRSSRGELIPISPSTEVGGSGIGTPPSVLKRQRKRRVALSPVTENSTSLSFLDSCNSLTPKSTPVKTLPFSPSQFLNFWNKQDTLELESPSLTSTPVCSQKVVVTTPLHRDKTPLHQKHAAFVTPDQKYSMDNTPHTPTPFKNALEKYGPLKPLPQTPHLEEDLKEVLRSEAGIELIIEDDIRPEKQKRKPGLRRSPIKKVRKSLALDIVDEDVKLMMSTLPKSLSLPTTAPSNSSSLTLSGIKEDNSLLNQGFLQAKPEKAAVAQKPRSHFTTPAPMSSAWKTVACGGTRDQLFMQEKARQLLGRLKPSHTSRTLILS

SEQ ID NO: 69720 - protein, 676 aa, Homo sapiens
MSRRTRCEDLDELHYQDTDSDVPEQRDSKCKVKWTHEENRTDQQCQYRWLRVLNPDLVKGPWTKEEDQKVIELVKKYGTKQWTLIAKHLKGRLGKQCRERWHNHLNPEVKKSCWTEEEDRIICEAHKVLGNRWAEIAKMLPGRTDNAVKNHWNSTIKRKVDTGGFLSESKDCKPPVYLLLELEDKDGLQSAQPTEGQGSLLTNWPSVPPTIKEEENSEEELAAATTSKEQEPIGTDLDAVRTPEPLEEFPKREDQEGSPPETSLPYKWVVEAANLLIPAVGSSLSEALDLIESDPDAWCDLSKFDLPEEPSAEDSINNSLVQLQASHQQQVLPPRQPSALVPSVTEYRLDGHTISDLSRSSRGELIPISPSTEVGGSGIGTPPSVLKRQRKRRVALSPVTENSTSLSFLDSCNSLTPKSTPVKTLPFSPSQFLNFWNKQDTLELESPSLTSTPVCSQKVVVTTPLHRDKTPLHQKHAAFVTPDQKYSMDNTPHTPTPFKNALEKYGPLKPLPQTPHLEEDLKEVLRSEAGIELIIEDDIRPEKQKRKPGLRRSPIKKVRKSLALDIVDEDVKLMMSTLPKSLSLPTTAPSNSSSLTLSGIKEDNSLLNQGFLQAKPEKAAVAQKPRSHFTTPAPMSSAWKTVACGGTRDQLFMQEKARQLLGRLKPSHTSRTLILS

SEQ ID NO: 69721 - protein, 464 aa, Homo sapiens
MPSCSTSTMPGMICKNPDLEFDSLQPCFYPDEDDFYFGGPDSTPPGEDIWKKFELLPTPPLSPSRGFAEHSSEPPSWVTEMLLENELWGSPAEEDAFGLGGLGGLTPNPVILQDCMWSGFSAREKLERAVSEKLQHGRGPPTAGSTAQSPGAGAASPAGRGHGGAAGAGRAGAALPAELAHPAAECVDPAVVFPFPVNKREPAPVPAAPASAPAAGPAVASGAGIAAPAGAPGVAPPRPGGRQTSGGDHKALSTSGEDTLSDSDDEDDEEEDEEEEIDVVTVEKRRSSSNTKAVTTFTITVRPKNAALGPGRAQSSELILKRCLPIHQQHNYAAPSPYVESEDAPPQKKIKSEASPRPLKSVIPPKAKSLSPRNSDSEDSERRRNHNILERQRRNDLRSSFLTLRDHVPELVKNEKAAKVVILKKATEYVHSLQAEEHQLLLEKEKLQARQQQLLKKIEHARTC

SEQ ID NO: 69722 - protein, 382 aa, Homo sapiens
MPSCSTSTMPGMICKNPDLEFDSLQPCFYPDEDDFYFGGPDSTPPGEDIWKKFELLPTPPLSPSRGFAEHSSEPPSWVTEMLLENELWGSPAEEDAFGLGGLGGLTPNPVILQDCMWSGFSAREKLERAVSEKLQHGRGPPTAGSTAQSPGVAPPRPGGRQTSGGDHKALSTSGEDTLSDSDDEDDEEEDEEEEIDVVTVEKRRSSSNTKAVTTFTITVRPKNAALGPGRAQSSELILKRCLPIHQQHNYAAPSPYVESEDAPPQKKIKSEASPRPLKSVIPPKAKSLSPRNSDSEDSERRRNHNILERQRRNDLRSSFLTLRDHVPELVKNEKAAKVVILKKATEYVHSLQAEEHQLLLEKEKLQARQQQLLKKIEHARTC

SEQ ID NO: 69723 - protein, 283 aa, Homo sapiens
MAVPPTYADLGKSARDVFTKGYGFGLIKLDLKTKSENGLEFTSSGSANTETTKVTGSLETKYRWTEYGLTFTEKWNTDNTLGTEITVEDQLARGLKLTFDSSFSPNTGKKNAKIKTGYKREHINLGCDMDFDIAGPSIRGALVLGYEGWLAGYQMNFETAKSRVTQSNFAVGYKTDEFQLHTNVNDGTEFGGSIYQKVNKKLETAVNLAWTAGNSNTRFGIAAKYQIDPDACFSAKVNNSSLIGLGYTQTLKPGIKLTLSALLDGKNVNAGGHKLGLGLEFQA

SEQ ID NO: 69724 - protein, 283 aa, Homo sapiens; identical to SEQ ID NO: 69723

SEQ ID NO: 69725 - protein, 283 aa, Homo sapiens; identical to SEQ ID NO: 69723

SEQ ID NO: 69726 - protein, 282 aa, Homo sapiens
MATHGQTCARPMCIPPSYADLGKAARDIFNKGFGFGLVKLDVKTKSCSGVEFSTSGSSNTDTGKVTGTLETKYKWCEYGLTFTEKWNTDNTLGTEIAIEDQICQGLKLTFDTTFSPNTGKKSGKIKSSYKRECINLGCDVDFDFAGPAIHGSAVFGYEGWLAGYQMTFDSAKSKLTRNNFAVGYRTGDFQLHTNVNDGTEFGGSIYQKVCEDLDTSVNLAWTSGTNCTRFGIAAKYQLDPTASISAKVNNSSLIGVGYTQTLRPGVKLTLSALVDGKSINAG

SEQ ID NO: 69727 - protein, 309 aa, Homo sapiens
MSWCNELRLPALKQHSIGRGLESHITMCIPPSYADLGKAARDIFNKGFGFGLVKLDVKTKSCSGVEFSTSGSSNTDTGKVTGTLETKYKWCEYGLTFTEKWNTDNTLGTEIAIEDQICQGLKLTFDTTFSPNTGKKSGKIKSSYKRECINLGCDVDFDFAGPAIHGSAVFGYEGWLAGYQMTFDSAKSKLTRNNFAVGYRTGDFQLHTNVNDGTEFGGSIYQKVCEDLDTSVNLAWTSGTNCTRFGIAAKYQLDPTASISAKVNNSSLIGVGYTQTLRPGVKLTLSALVDGKSINAGGHKVGLALELEA

SEQ ID NO: 69728 - protein, 294 aa, Homo sapiens
MATHGQTCARPMCIPPSYADLGKAARDIFNKGFGFGLVKLDVKTKSCSGVEFSTSGSSNTDTGKVTGTLETKYKWCEYGLTFTEKWNTDNTLGTEIAIEDQICQGLKLTFDTTFSPNTGKKSGKIKSSYKRECINLGCDVDFDFAGPAIHGSAVFGYEGWLAGYQMTFDSAKSKLTRNNFAVGYRTGDFQLHTNVNDGTEFGGSIYQKVCEDLDTSVNLAWTSGTNCTRFGIAAKYQLDPTASISAKVNNSSLIGVGYTQTLRPGVKLTLSALVDGKSINAGGHKVGLALELEA

SEQ ID NO: 69729 - protein, 195 aa, Homo sapiens
MATHGQTCARPMCIPPSYADLGKAARDIFNKGFGFGLVKLDVKTKSCSGVEFSTSGSSNTDTGKVTGTLETKYKWCEYGLTFTEKWNTDNTLGTEIAIEDQICQGLKLTFDTTFSPNTGKKSGKIKSSYKRECINLGCDVDFDFAGPAIHGSAVFGYEGWLAGYQMTFDSAKSKLTRNNFAVGYRTGDFQLHTNV

SEQ ID NO: 69730 - protein, 109 aa, Homo sapiens
MSWCNELRLPALKQHSIGRGLESHITMCIPPSYADLGKAARDIFNKGFGFGLVKLDVKTKSCSGVEFSTSGSSNTDTGKVTGTLETKYKWCEYGLTFTEKWNTDNTLGT

SEQ ID NO: 69731 - protein, 204 aa, Homo sapiens
MATHGQTCARPMCIPPSYADLGKAARDIFNKGFGFGLVKLDVKTKSCSGVEFSTSGSSNTDTGKVTGTLETKYKWCEYGLTFTEKWNTDNTLGTEIAIEDQICQGLKLTFDTTFSPNTGKKSGKIKSSYKRECINLGCDVDFDFAGPAIHGSAVFGYEGWLAGYQMTFDSAKSKLTRNNFAVGYRTGDFQLHTNVNDGTEFGGS

SEQ ID NO: 69732 - protein, 255 aa, Homo sapiens
MLVIPATQEAEEFSTSGSSNTDTGKVTGTLETKYKWCEYGLTFTEKWNTDNTLGTEIAIEDQICQGLKLTFDTTFSPNTGKKSGKIKSSYKRECINLGCDVDFDFAGPAIHGSAVFGYEGWLAGYQMTFDSAKSKLTRNNFAVGYRTGDFQLHTNVNDGTEFGGSIYQKVCEDLDTSVNLAWTSGTNCTRFGIAAKYQLDPTASISAKVNNSSLIGVGYTQTLRPGVKLTLSALVDGKSINAGGHKVGLALELEA

SEQ ID NO: 69733 - protein, 294 aa, Homo sapiens; identical to SEQ ID NO: 69728

SEQ ID NO: 69734 - protein, 283 aa, Homo sapiens
MCNTPTYCDLGKAAKDVFNKGYGFGMVKIDLKTKSCSGVEFSTSGHAYTDTGKASGNLETKYKVCNYGLTFTQKWNTDNTLGTEISWENKLAEGLKLTLDTIFVPNTGKKSGKLKASYKRDCFSVGSNVDIDFSGPTIYGWAVLAFEGWLAGYQMSFDTAKSKLSQNNFALGYKAADFQLHTHVNDGTEFGGSIYQKVNEKIETSINLAWTAGSNNTRFGIAAKYMLDCRTSLSAKVNNASLIGLGYTQTLRPGVKLTLSALIDGKNFSAGGHKVGLGFELEA

SEQ ID NO: 69735 - protein, 284 aa, Homo sapiens
MCNTPTYCDLGKAAKDVFNKGYGFGMVKIDLKTKSCSGVVEFSTSGHAYTDTGKASGNLETKYKVCNYGLTFTQKWNTDNTLGTEISWENKLAEGLKLTLDTIFVPNTGKKSGKLKASYKRDCFSVGSNVDIDFSGPTIYGWAVLAFEGWLAGYQMSFDTAKSKLSQNNFALGYKAADFQLHTHVNDGTEFGGSIYQKVNEKIETSINLAWTAGSNNTRFGIAAKYMLDCRTSLSAKVNNASLIGLGYTQTLRPGVKLTLSALIDGKNFSAGGHKVGLGFELEA

SEQ ID NO: 69736 - protein, 165 aa, Homo sapiens
MCNTPTYCDLGKAAKDVFNKGYGFGMVKIDLKTKSCSGVEFSTSGHAYTDTGKASGNLETKYKVCNYGLTFTQKWNTDNTLGTEISWENKLAEGLKLTLDTIFVPNTGKKSGKLKASYKRDCFSVGSNVDIDFSGPTIYGWAVLAFEGWLAGYQMSFDTAKSKLS

SEQ ID NO: 69737 - protein, 284 aa, Homo sapiens
MCNTPTYCDLGKAAKDVFNKGYGFGMVKIDLKTKSCSGVMEFSTSGHAYTDTGKASGNLETKYKVCNYGLTFTQKWNTDNTLGTEISWENKLAEGLKLTLDTIFVPNTGKKSGKLKASYKRDCFSVGSNVDIDFSGPTIYGWAVLAFEGWLAGYQMSFDTAKSKLSQNNFALGYKAADFQLHTHVNDGTEFGGSIYQKVNEKIETSINLAWTAGSNNTRFGIAAKYMLDCRTSLSAKVNNASLIGLGYTQTLRPGVKLTLSALIDGKNFSAGGHKVGLGFELEA

SEQ ID NO: 69738 - protein, 159 aa, Homo sapiens
MCNTPTYCDLGKAAKDVFNKGYGFGMVKIDLKTKSCSGVEFSTSGHAYTDTGKASGNLETKYKVCNYGLTFTQKWNTDNTLGTEISWENKLAEGLKLTLDTIFVPNTGKKSGKLKASYKRDCFSVGSNVDIDFSGPTIYGWAVLAFEGWLAGYQMSFDT

SEQ ID NO: 69739 - protein, 353 aa, Homo sapiens
MVGDTLKLLSPLMTRYFFLLFYSTDSSDLNENQHPLDFDEMAFGKVKSGISFLIQTGVGILGNSFLLCFYNLILFTGHKLRPTDLILSQLALANSMVLFFKGIPQTMAAFGLKYLLNDTGCKFVFYYHRVGTRVSLSTICLLNGFQAIKLNPSICRWMEIKIRSPRFIDFCCLLCWAPHVLMNASVLLLVNGPLNSKNSSAKNNYGYCSYKASKRFSSLHAVLYFSPDFMSLGFMVWASGSMVFFLYRHKQQVQHNHSNRLSCRPSQEARATHTIMVLVSSFFVFYSVHSFLTIWTTVVANPGQWIVTNSVLVASCFPARSPFVLIMSDTHISQFCFACRTRKTLFPNLVVMP

SEQ ID NO: 69740 - protein, 197 aa, Homo sapiens [sequence omitted]

SEQ ID NO: 69741 - protein, 192 aa, Homo sapiens
MAPQPMIHTQQGLRTSSPSTPSPEHQEDVDSFMKQPGNETADTVLKKLDEQYQKYKFMELNLAQKKRRLKGQIPEIKQTLEILKYMQKKKESTNSMETRFLLADNLYCKASVPPTDKMCLWLGANVMLEYDIDEAQALLEKNLSTATKNLDSLEEDLDFLRDQFTTTEVNMARVYNWDVKRRNKDDSTKNKA

SEQ ID NO: 69742 - protein, 233 aa, Homo sapiens
MRPQQLHATEITSSGFRLAWPPLLTADSGYYVLELVPSAQPGAARRQQLPGNATDWIWAGLDPDTDYDVALVPESNVRLLRPQILRVRTRPGEAGPGASGPESGAGPAPTQLAALPAPEEAGPERIVISHARPRSLRVSWAPALGSAAALGYHVQFGPLRGGEAQRVEVPAGRNCTTLQGLAPGTAYLVTVTAAFRSGRESALSAKACTPDGPRPRPRPVPRAPTPGTASREP

SEQ ID NO: 69743 - protein, 445 aa, Homo sapiens
MLPWTALGLALSLRLALARSGAERGPPASAPRGDLMFLLDSSASVSHYEFSRVREFVGQLVAPLPLGTGALRASLVHVGSRPYTEFPFGQHSSGEAAQDAVRASAQRMGDTHTGLALVYAKEQLFAEASGARPGVPKVLVWVTDGGSSDPVGPPMQELKDLGVTVFIVSTGRGNFLELSAAASAPAEKHLHFVDVDDLHIIVQELRGSILDAMRPQQLHATEITSSGFRLAWPPLLTADSGYYVLELVPSAQPGAARRQQLPGNATDWIWAGLDPDTDYDVALVPESNVRLLRPQILRVRTRPGEAGPGASGPESGAGPAPTQLAALPAPEEAGPERIVISHARPRSLRVSWAPALGSAAALGYHVQFGPLRGGEAQRVEVPAGRNCTTLQGLAPGTAYLVTVTAAFRSGRESALSAKACTPDGPRPRPRPVPRAPTPGTASREP

SEQ ID NO: 69744 - protein, 64 aa, Homo sapiens
MLPWTALGLALSLRLALARSGAERGAQGPGRHRVHCQHRPRQLPGAVSRCLSPCREAPALCGRG

SEQ ID NO: 69745 - protein, 325 aa, Homo sapiens
MPSSTAMAVGALSSSLLVTCCLMVALCSPSIPLEKLAQAPEQPGQEKREHASRDGPGRVNELGRPARDEGGSGRDWKSKSGRGLAGREPWSKLKQAWVSQGGGAKAGDLQVRPRGDTPQAEALAAAAQDAIGPELAPTPEPPEEYVYPDYRGKGCVDESGFVYAIGEKFAPGPSACPCLCTEEGPLCAQPECPRLHPRCIHVDTSQCCPQCKERKNYCEFRGKTYQTLEEFVVSPCERCRCEANGEVLCTVSACPQTECVDPVYEPDQCCPICKNGPNCFAETAVIPAGREVKTDECTICHCTYEEGTWRIERQAMCTRHECRQM

SEQ ID NO: 69746 - protein, 249 aa, Homo sapiens
MTSETLWWLITLKKQLGDNEAITQEIVGCAHLENYALKMFLYADNEDRAGRFHKNMIKSFYTASLLIDVITVFGELTDENVKHRKYARWKATYIHNCLKNGETPQAGPVGIEEDNDIEENEDAGAASLPTQPTQPSSSSTYDPSNMPSGNYTGIQIPPGAHAPANTPAEVPHSTGVASNTIQPTPQTIPAIDPALFNTISQGDVRLTPEDFARAQKYCKYAGSALQYEDVSTAVQNLQKALKLLTTGRE

SEQ ID NO: 69747 - protein, 307 aa, Homo sapiens
MAALAPLPPLPAQFKSIQHHLRTAQEHDKRDPVVAYYCRLYAMQTGMKIDSKTPECRKFLSKLMDQLEALKKQLGDNEAITQEIVGCAHLENYALKMFLYADNEDRAGRFHKNMIKSFYTASLLIDVITVFGELTDENVKHRKYARWKATYIHNCLKNGETPQAGPVGIEEDNDIEENEDAGAASLPTQPTQPSSSSTYDPSNMPSGNYTGIQIPPGAHAPANTPAEVPHSTGVASNTIQPTPQTIPAIDPALFNTISQGDVRLTPEDFARAQKYCKYAGSALQYEDVSTAVQNLQKALKLLTTGRE

SEQ ID NO: 69748 - protein, 220 aa, Homo sapiens
EMAALAPLPPLPAQFKSIQHHLRTAQEHDKRDPVVAYYCRLYAMQTGMKIDSKTPECRKFLSKLMDQLEALKKQLGDNEAITQEIVGCAHLENYALKMFLYADNEDRAGRFHKNMIKSFYTASLLIDVITVFGELTDENVKHRKYARWKATYIHNCKEWGDSSSRPCWLKKIMILKKMKMLEQPLCPLSQLSHHHLQLMTQHAIRQLYWNTDSSGCTRSS

SEQ ID NO: 69749 - protein, 222 aa, Homo sapiens
MTSETLWWLITLKKQLGDNEAITQEIVGCAHLENYALKMFLYADNEDRAGRFHKNMIKSFYTASLLIDVITVFGELTDENVKHRKYARWKATYIHNCLKNGETPQAGPVGIEEDNDIEENEDAGAASLPTQPTQPSSSSTYDPSNMPSGNYTGIQIPPGAHAPANTPAEVPHSTGDVRLTPEDFARAQKYCKYAGSALQYEDVSTAVQNLQKALKLLTTGRE

SEQ ID NO: 69750 - protein, 206 aa, Homo sapiens
MAANKPKGQNSLALHKVIMVGSGGVGKSALTLQFMYDEFVEDYEPTKADSYRKKVVLDGEEVQIDILDTAGQEDYAAIRDNYFRSGEGFLCVFSITEMESFAATADFREQILRVKEDENVPFLLVGNKSDLEDKRQVSVEEAKNRAEQWNVNYVETSAKTRANVDKVFFDLMREIRARKMEDSKEKNGKKKRKSLAKRIRERCCIL

SEQ ID NO: 69751 - protein, 101 aa, Homo sapiens
MAANKPKGQNSLALHKVIMVGSGGVGKSALTLQFMYDEFVEDYEPTKADSYRKKVVLDGEEVQIDILDTAGQEDYAAIRDNYFRSGEGFLCVFSITEMESF

SEQ ID NO: 69752 - protein, 206 aa, Homo sapiens
MAANKSKGQSSLALHKVIMVGSGGVGKSALTLQFMYDEFVEDYEPTKADSYRKKVVLDGEEVQIDILDTAGQEDYAAIRDNYFRSGEGFLLVFSITEHESFTATAEFREQILRVKAEEDKIPLLVVGNKSDLEERRQVPVEEARSKAEEWGVQYVETSAKTRANVDKVFFDLMREIRTKKMSENKDKNGKKSSKNKKSFKERCCLL

SEQ ID NO: 69753 - protein, 227 aa, Homo sapiens
MAANKSKGQSSLALHKVIMVGSGGVGKSALTLQFMNVSKSLAYDKKKYTANKKVEGILEFVEDYEPTKADSYRKKVVLDGEEVQIDILDTAGQEDYAAIRDNYFRSGEGFLLVFSITEHESFTATAEFREQILRVKAEEDKIPLLVVGNKSDLEERRQVPVEEARSKAEEWGVQYVETSAKTRANVDKVFFDLMREIRTKKMSENKDKNGKKSSKNKKSFKERCCLL

SEQ ID NO: 69754 - protein, 167 aa, Homo sapiens
MAANKSKGQSSLALHKVIMVGSGGVGKSALTLQFMYDEFVEDYEPTKADSYRKKVVLDGEEVQIDILDTAGQEDYAAIRDNYFRSGEGFLLVFSITEHESFTATAEFREQILRVKAEEDKIPLLVVGNKSDLEERRQVPVEEARSKAEEWGVQYVETSAKTRANVDK

SEQ ID NO: 69755 - protein, 206 aa, Homo sapiens; identical to SEQ ID NO: 69752

SEQ ID NO: 69756 - protein, 228 aa, Homo sapiens
MKQRQSALQWVICVSQPQKTSEMAANKSKGQSSLALHKVIMVGSGGVGKSALTLQFMYDEFVEDYEPTKADSYRKKVVLDGEEVQIDILDTAGQEDYAAIRDNYFRSGEGFLLVFSITEHESFTATAEFREQILRVKAEEDKIPLLVVGNKSDLEERRQVPVEEARSKAEEWGVQYVETSAKTRANVDKVFFDLMREIRTKKMSENKDKNGKKSSKNKKSFKERCCLL

SEQ ID NO: 69757 - protein, 619 aa, Homo sapiens
MASGAYNPYIEIIEQPRQRGMRFRYKCEGRSAGSIPGEHSTDNNRTYPSIQIMNYYGKGKVRITLVTKNDPYKPHPHDLVGKDCRDGYYEAEFGQERRPLFFQNLGIRCVKKKEVKEAIITRIKAGINPFNVPEKQLNDIEDCDLNVVRLCFQVFLPDEHGNLTTALPPVVSNPIYDNRAPNTAELRICRVNKNCGSVRGGDEIFLLCDKVQKDDIEVRFVLNDWEAKGIFSQADVHRQVAIVFKTPPYCKAITEPVTVKMQLRRPSDQEVSESMDFRYLPDEKDTYGNKAKKQKTTLLFQKLCQDHVETGFRHVDQDGLELLTSGDPPTLASQSAGITVNFPERPRPGLLGSIGEGRYFKKEPNLFSHDAVVREMPTGVSSQAESYYPSPGPISSGLSHHASMAPLPSSSWSSVAHPTPRSGNTNPLSSFSTRTLPSNSQGIPPFLRIPVGNDLNASNACIYNNADDIVGMEASSMPSADLYGISDPNMLSNCSVNMMTTSSDSMGETDNPRLLSMNLENPSCNSVLDPRDLRQLHQMSSSSMSAGANSNTTVFVSQSDAFEGSDFSCADNSMINESGPSNSTNPNSHGFVQDSQYSGIGSMQNEQLSDSFPYEFFQV

SEQ ID NO: 69758 - protein, 587 aa, Homo sapiens
MASGAYNPYIEIIEQPRQRGMRFRYKCEGRSAGSIPGEHSTDNNRTYPSIQIMNYYGKGKVRITLVTKNDPYKPHPHDLVGKDCRDGYYEAEFGQERRPLFFQNLGIRCVKKKEVKEAIITRIKAGINPFNVPEKQLNDIEDCDLNVVRLCFQVFLPDEHGNLTTALPPVVSNPIYDNRAPNTAELRICRVNKNCGSVRGGDEIFLLCDKVQKDDIEVRFVLNDWEAKGIFSQADVHRQVAIVFKTPPYCKAITEPVTVKMQLRRPSDQEVSESMDFRYLPDEKDTYGNKAKKQKTTLLFQKLCQDHVNFPERPRPGLLGSIGEGRYFKKEPNLFSHDAVVREMPTGVSSQAESYYPSPGPISSGLSHHASMAPLPSSSWSSVAHPTPRSGNTNPLSSFSTRTLPSNSQGIPPFLRIPVGNDLNASNACIYNNADDIVGMEASSMPSADLYGISDPNMLSNCSVNMMTTSSDSMGETDNPRLLSMNLENPSCNSVLDPRDLRQLHQMSSSSMSAGANSNTTVFVSQSDAFEGSDFSCADNSMINESGPSNSTNPNSHGFVQDSQYSGIGSMQNEQLSDSFPYEFFQV

SEQ ID NO: 69759 - protein, 548 aa, Homo sapiens
MDELFPLIFPAEPAQASGPYVEIIEQPKQRGMRFRYKCEGRSAGSIPGERSTDTTKTHPTIKINGYTGPGTVRISLVTKDPPHRPHPHELVGKDCRDGFYEAELCPDRCIHSFQNLGIQCVKKRDLEQAISQRIQTNNNPFQEEQRGDYDLNAVRLCFQVTVRDPSGRPLRLPPVLSHPIFDNRAPNTAELKICRVNRNSGSCLGGDEIFLLCDKVQKEDIEVYFTGPGWEARGSFSQADVHRQVAIVFRTPPYADPSLQAPVRVSMQLRRPSDRELSEPMEFQYLPDTDDRHRIEEKRKRTYETFKSIMKKSPFSGPTDPRPPPRRIAVPSRSSASVPKPAPQPYPFTSSLSTINYDEFPTMVFPSGQISQASALAPAPPQVLPQAPAPAPAPAMVSALAQAPAPVPVLAPGPPQAVAPPAPKPTQAGEGTLSEALLQLQFDDEDLGALLGNSTDPAVFTDLASVDNSEFQQLLNQGIPVAPHTTEPMLMEYPEAITRLVTGAQRPPDPAPAPLGAPGLPNGLLSGDEDFSSIADMDFSALLSQISS

SEQ ID NO: 69760 - protein, 551 aa, Homo sapiens
MDELFPLIFPAEPAQASGPYVEIIEQPKQRGMRFRYKCEGRSAGSIPGERSTDTTKTHPTIKINGYTGPGTVRISLVTKDPPHRPHPHELVGKDCRDGFYEAELCPDRCIHSFQNLGIQCVKKRDLEQAISQRIQTNNNPFQVPIEEQRGDYDLNAVRLCFQVTVRDPSGRPLRLPPVLSHPIFDNRAPNTAELKICRVNRNSGSCLGGDEIFLLCDKVQKEDIEVYFTGPGWEARGSFSQADVHRQVAIVFRTPPYADPSLQAPVRVSMQLRRPSDRELSEPMEFQYLPDTDDRHRIEEKRKRTYETFKSIMKKSPFSGPTDPRPPPRRIAVPSRSSASVPKPAPQPYPFTSSLSTINYDEFPTMVFPSGQISQASALAPAPPQVLPQAPAPAPAPAMVSALAQAPAPVPVLAPGPPQAVAPPAPKPTQAGEGTLSEALLQLQFDDEDLGALLGNSTDPAVFTDLASVDNSEFQQLLNQGIPVAPHTTEPMLMEYPEAITRLVTGAQRPPDPAPAPLGAPGLPNGLLSGDEDFSSIADMDFSALLSQISS

SEQ ID NO: 69761 - protein, 246 aa, Homo sapiens
MDELFPLIFPAEPAQASGPYVEIIEQPKQRGMRFRYKCEGRSAGSIPGERSTDTTKTHPTIKINGYTGPGTVRISLVTKDPPHRPHPHELVGKDCRDGFYEAELCPDRCIHSFQNLGIQCVKKRDLEQAISQRIQTNNNPFQVPIEEQRGDYDLNAVRLCFQVTVRDPSGRPLRLPPVLSHPIFDNRAPNTAELKICRVNRNSGSCLGGDEIFLLCDKVQKEDIEVCPQASTPALSLYVIPEHHQL

SEQ ID NO: 69762 - protein, 377 aa, Homo sapiens
MDELFPLIFPAEPAQASGPYVEIIEQPKQRGMRFRYKCEGRSAGSIPGERSTDTTKTHPTIKINGYTGPGTVRISLVTKDPPHRPHPHELVGKDCRDGFYEAELCPDRCIHSFQNLGIQCVKKRDLEQAISQRIQTNNNPFQVPIEEQRGDYDLNAVRLCFQVTVRDPSGRPLRLPPVLSHPIFDNRAPNTAELKICRVNRNSGSCLGGDEIFLLCDKVQKEDIEVYFTGPGWEARGSFSQADVHRQVAIVFRTPPYADPSLQAPVRVSMQLRRPSDRELSEPMEFQYLPDTDDRHRIEEKRKRTYETFKSIMKKSPFSGPTDPRPPPRRIAVPSRSSASVPKPGKDFLLSHWNDRFSSVQLRSSGDEDSWAPLQTY

SEQ ID NO: 69763 - protein, 237 aa, Homo sapiens
MDELFPLIFPAEPAQASGPYVEIIEQPKQRGMRFRYKCEGRSAGSIPGERSTDTTKTHPTIKINGYTGPGTVRISLVTKDPPHRPHPHELVGKDCRDGFYEAELCPDRCIHSFQNLGIQCVKKRDLEQAISQRIQTNNNPFQVPIEEQRGDYDLNAVRLCFQVTVRDPSGRPLRLPPVLSHPIFDNRAPNTAELKICRVNRNSGSCLGGDEIFLLCDKVQKAHGIPVPARYRRSSPD

SEQ ID NO: 69764 - protein, 425 aa, Homo sapiens [sequence omitted]

SEQ ID NO: 69765 - protein, 579 aa, Homo sapiens
MLRSGPASGPSVPTGRAMPSRRVARPPAAPELGALGSPDLSSLSLAVSRSTDELEIIDEYIKENGFGLDGGQPGPGEGLPRLVSRGAASLSTVTLGPVAPPATPPPWGCPLGRLVSPAPGPGPQPHLVITEQPKQRGMRFRYECEGRSAGSILGESSTEASKTLPAIELRDCGGLREVEVTACLVWKDWPHRVHPHSLVGKDCTDGICRVRLRPHVSPRHSFNNLGIQCVRKKEIEAAIERKIQLGIDPYNAGSLKNHQEVDMNVVRICFQASYRDQQGQMRRMDPVLSEPVYDKKSTNTSELRICRINKESGPCTGGEELYLLCDKVQKEDISVVFSRASWEGRADFSQADVHRQIAIVFKTPPYEDLEIVEPVTVNVFLQRLTDGVCSEPLPFTYLPRDHDSYGVDKKRKRGMPDVLGELNSSDPHGIESKRRKKKPAILDHFLPNHGSGPFLPPSALLPDPDFFSGTVSLPGLEPPGGPDLLDDGFAYDPTAPTLFTMLDLLPPAPPHASAVVCSGGAGAVVGETPGPEPLTLDSYQAPGPGDGGTASLVGSNMFPNHYREAAFGGGLLSPGPEAT

SEQ ID NO: 69766 - protein, 576 aa, Homo sapiens
MLRSGPASGPSVPTGRAMPSRRVARPPAAPELGALGSPDLSSLSLAVSRSTEIIDEYIKENGFGLDGGQPGPGEGLPRLVSRGAASLSTVTLGPVAPPATPPPWGCPLGRLVSPAPGPGPQPHLVITEQPKQRGMRFRYECEGRSAGSILGESSTEASKTLPAIELRDCGGLREVEVTACLVWKDWPHRVHPHSLVGKDCTDGICRVRLRPHVSPRHSFNNLGIQCVRKKEIEAAIERKIQLGIDPYNAGSLKNHQEVDMNVVRICFQASYRDQQGQMRRMDPVLSEPVYDKKSTNTSELRICRINKESGPCTGGEELYLLCDKVQKEDISVVFSRASWEGRADFSQADVHRQIAIVFKTPPYEDLEIVEPVTVNVFLQRLTDGVCSEPLPFTYLPRDHDSYGVDKKRKRGMPDVLGELNSSDPHGIESKRRKKKPAILDHFLPNHGSGPFLPPSALLPDPDFFSGTVSLPGLEPPGGPDLLDDGFAYDPTAPTLFTMLDLLPPAPPHASAVVCSGGAGAVVGETPGPEPLTLDSYQAPGPGDGGTASLVGSNMFPNHYREAAFGGGLLSPGPEAT

SEQ ID NO: 69767 - protein, 579 aa, Homo sapiens; identical to SEQ ID NO: 69765

SEQ ID NO: 69768 - protein, 728 aa, Homo sapiens
MEAAAGGRGCFQPHPGLQKTLEQFHLSSMSSLGGPAAFSARWAQEAYKKESAKEAGAAAVPAPVPAATEPPPVLHLPAIQPPPPVLPGPFFMPSDRSTERCETVLEGETISCFVVGGEKRLCLPQILNSVLRDFSLQQINAVCDELHIYCSRCTADQLEILKVMGILPFSAPSCGLITKTDAERLCNALLYGGAYPPPCKKELAASLALGLELSERSVRVYHECFGKCKGLLVPELYSSPSAACIQCLDCRLMYPPHKFVVHSHKALENRTCHWGFDSANWRAYILLSQDYTGKEEQARLGRCLDDVKEKFDYGNKYKRRVPRVSSEPPASIRPKTDDTSSQSPAPSEKDKPSSWLRTLAGSSNKSLGCVHPRQRLSAFRPWSPAVSASEKELSPHLPALIRDSFYSYKSFETAVAPNVALAPPAQQKVVSSPPCAAAVSRAPEPLATCTQPRKRKLTVDTPGAPETLAPVAAPEEDKDSEAEVEVESREEFTSSLSSLSSPSFTSSSSAKDLGSPGARALPSAVPDAAAPADAPSGLEAELEHLRQALEGGLDTKEAKEKFLHEVVKMRVKQEEKLSAALQAKRSLHQELEFLRVAKKEKLREATEAKRNLRKEIERLRAENEKKMKEANESRLRLKRELEQARQARVCDKGCEAGRLRAKYSAQIEDLQVKLQHAEADREQLRADLLREREAREHLEKVVKELQEQLWPRARPEAAGSEGAAELEP

SEQ ID NO: 69769 - protein, 543 aa, Homo sapiens
MGCIKSKENKSPAIKYRPENTPEPVSTSVSHYGAEPTTVSPCPSSSAKGTAVNFSSLSMTPFGGSSGVTPFGGASSSFSVVPSSYPAGLTGGVTIFVALYDYEARTTEDLSFKKGERFQIINNTEGDWWEARSIATGKNGYIPSNYVAPADSIQAEEWYFGKMGRKDAERLLLNPGNQRGIFLVRESETTKGAYSLSIRDWDEIRGDNVKHYKIRKLDNGGYYITTRAQFDTLQKLVKHYTEHADGLCHKLTTVCPTVKPQTQGLAKDAWEIPRESLRLEVKLGQGCFGEVWMGTWNGTTKVAIKTLKPGTMMPEAFLQEAQIMKKLRHDKLVPLYAVVSEEPIYIVTEFMSKGSLLDFLKEGDGKYLKLPQLVDMAAQIADGMAYIERMNYIHRDLRAANILVGENLVCKIADFGLARLIEDNEYTARQGAKFPIKWTAPEAALYGRFTIKSDVWSFGILQTELVTKGRVPYPGMVNREVLEQVERGYRMPCPQGCPESLHELMNLCWKKDPDERPTFEYIQSFLEDYFTATEPQYQPGENL

SEQ ID NO: 69770 - protein, 543 aa, Homo sapiens; identical to SEQ ID NO: 69769

SEQ ID NO: 69771 - protein, 543 aa, Homo sapiens; identical to SEQ ID NO: 69769

SEQ ID NO: 69772 - protein, 512 aa, Homo sapiens
MGCIKSKGKDSLSDDGVDLKTQPVRNTERTIYVRDPTSNKQQRPVPESQLLPGQRFQTKDPEEQGDIVVALYPYDGIHPDDLSFKKGEKMKVLEEHGEWWKAKSLLTKKEGFIPSNYVAKLNTLETEEWFFKDITRKDAERQLLAPGNSAGAFLIRESETLKGSFSLSVRDFDPVHGDVIKHYKIRSLDNGGYYISPRITFPCISDMIKHYQKQADGLCRRLEKACISPKPQKPWDKDAWEIPRESIKLVKRLGAGQFGEVWMGYYNNSTKVAVKTLKPGTMSVQAFLEEANLMKTLQHDKLVRLYAVVTREEPIYIITEYMAKGSLLDFLKSDEGGKVLLPKLIDFSAQIAEGMAYIERKNYIHRDLRAANVLVSESLMCKIADFGLARVIEDNEYTAREGAKFPIKWTAPEAINFGCFTIKSDVWSFGILLYEIVTYGKIPYPGRTNADVMTALSQGYRMPRVENCPDELYDIMKMCWKEKAEERPTFDYLQSVLDDFYTATEGQYQQQP

SEQ ID NO: 69773 - protein, 150 aa, Homo sapiens
MGCIKSKGKDSLSDDGVDLKTQPVRNTERTIYVRDPTSNKQQRPVPESQLLPGQRFQTKDPEEQGDIVVALYPYDGIHPDDLSFKKGEKMKVLEEHGEWWKAKSLLTKKEGFIPSNYVAKLNTLETEEWFFKDITRKDAERQLLAPGNSA

SEQ ID NO: 69774 - protein, 491 aa, Homo sapiens
MGCIKSKGKDSLSDDGVDLKTQPVPESQLLPGQRFQTKDPEEQGDIVVALYPYDGIHPDDLSFKKGEKMKVLEEHGEWWKAKSLLTKKEGFIPSNYVAKLNTLETEEWFFKDITRKDAERQLLAPGNSAGAFLIRESETLKGSFSLSVRDFDPVHGDVIKHYKIRSLDNGGYYISPRITFPCISDMIKHYQKQADGLCRRLEKACISPKPQKPWDKDAWEIPRESIKLVKRLGAGQFGEVWMGYYNNSTKVAVKTLKPGTMSVQAFLEEANLMKTLQHDKLVRLYAVVTREEPIYIITEYMAKGSLLDFLKSDEGGKVLLPKLIDFSAQIAEGMAYIERKNYIHRDLRAANVLVSESLMCKIADFGLARVIEDNEYTAREGAKFPIKWTAPEAINFGCFTIKSDVWSFGILLYEIVTYGKIPYPGRTNADVMTALSQGYRMPRVENCPDELYDIMKMCWKEKAEERPTFDYLQSVLDDFYTATEGQYQQQP

SEQ ID NO: 69775 - protein, 220 aa, Homo sapiens
MPLTGVGPGSCRRQIIRALCLLLLLLHAGSAKNIWKRALPARLAEKSRAEEAGAPGGPRQPRADRCPPPPRTLPPGACQAARCQADSECPRHRRCCYNGCAYACLEAVPPPPVLDWLVQPKPRWLGGNGWLLDGPEEVLQAEACSTTEDGAEPLLCPSGYECHILSPGDVAEGIPNRGQCVKQRRQADGRILRHKLYKEYPEGDSKNVAEPGRGQQKHFQ

SEQ ID NO: 69776 - protein, 111 aa, Homo sapiens
MGSSSFLVLMVSLVLVTLVAVEGVKEGIEKAGVCPADNVRCFKSDPPQCHTDQDCLGERKCCYLHCGFKCVIPVKELEEGGNKDEDVSRPYPEPGWEAKCPGSSSTRCPQK

SEQ ID NO: 69777 - protein, 224 aa, Homo sapiens
MRTQSLLLLGALLAVGSQLPAVFGRKKGEKSGGCPPDDGPCLLSVPDQCVEDSQCPLTRKCCYRACFRQCVPRVSVKLGSCPEDQLRCLSPMNHLCHKDSDCSGKKRCCHSACGRDCRDPARGTAPGCPGQANSDLGSVALHLSWGPTERVHDGRPGALPAGQHYLYQRWFQPSDNHWPADTSLQPIHPWFLLLGVKVHSLSSEEGLCITPVLCTTAIRASHPS

SEQ ID NO: 69778 - protein, 123 aa, Homo sapiens
MRTQSLLLLGALLAVGSQLPAVFGRKKGEKSGGCPPDDGPCLLSVPDQCVEDSQCPLTRKCCYRACFRQCVPRVSVKLGSCPEDQLRCLSPMNHLCHKDSDCSGKKRCCHSACGRDCRDPARG

SEQ ID NO: 69779 - protein, 548 aa, Homo sapiens
MPALRPLLPLLLLLRLTSGAGLLPGLGSHPGVCPNQLSPNLWVDAQSTCERECSRDQDCAAAEKCCINVCGLHSCVAARFPGSPAAPTTAASCEGFVCPQQGSDCDIWDGQPVCRCRDRCEKEPSFTCASDGLTYYNRCYMDAEACLRGLHLHIVPCKHVLSWPPSSPGPPETTARPTPGAAPVPPALYSSPSPQAVQVGGTASLHCDVSGRPPPAVTWEKQSHQRENLIMRPDQMYGNVVVTSIGQLVLYNARPEDAGLYTCTARNAAGLLRADFPLSVVQREPARDAAPSIPAPAECLPDVQACTGPTSPHLVLWHYDPQRGGCMTFPARGCDGAARGFETYEACQQACARGPGDACVLPAVQGPCRGWEPRWAYSPLLQQCHPFVYGGCEGNGNNFHSRESCEDACPVPRTPPCRACRLRSKLALSLCRSDFAIVGRLTEVLEEPEAAGGIARVALEDVLKDDKMGLKFLGTKYLEVTLSGMDWACPCPNMTAGDGPLVIMGEVRDGVAVLDAGSYVRAASEKRVKKILELLEKQACELLNRFQD

SEQ ID NO: 69780 - protein, 576 aa, Homo sapiens
MWAPRCRRFWSRWEQVAALLLLLLLLGVPPRSLALPPIRYSHAGICPNDMNPNLWVDAQSTCRRECETDQECETYEKCCPNVCGTKSCVAARYMDVKGKKGPVGMPKEATCDHFMCLQQGSECDIWDGQPVCKCKDRCEKEPSFTCASDGLTYYNRCYMDAEACSKGITLAVVTCRYHFTWPNTSPPPPETTMHPTTASPETPELDMAAPALLNNPVHQSVTMGETVSFLCDVVGRPRPEITWEKQLEDRENVVMRPNHVRGNVVVTNIAQLVIYNAQLQDAGIYTCTARNVAGVLRADFPLSVVRGHQAAATSESSPNGTAFPAAECLKPPDSEDCGEEQTRWHFDAQANNCLTFTFGHCHRNLNHFETYEACMLACMSGPLAACSLPALQGPCKAYAPRWAYNSQTGQCQSFVYGGCEGNGNNFESREACEESCPFPRGNQRCRACKPRQKLVTSFCRSDFVILGRVSELTEEPDSGRALVTVDEVLKDEKMGLKFLGQEPLEVTLLHVDWACPCPNVTVSEMPLIIMGEVDGGMAMLRPDSFVGASSARRVRKLREVMHKKTCDVLKEFLGLH

SEQ ID NO: 69781 - protein, 282 aa, Homo sapiens
MDVKGKKGPVGMPKEATCDHFMCLQQGSECDIWDGQPVCKCKDRCEKEPSFTCAQANNCLTFTFGHCHRNLNHFETYEACMLACMSGPLAACSLPALQGPCKAYAPRWAYNSQTGQCQSFVYGGCEGNGNNFESREACEESCPFPRGNQRCRACKPRQKLVTSFCRSDFVILGRVSELTEEPDSGRALVTVDEVLKDEKMGLKFLGQEPLEVTLLHVDWACPCPNVTVSEMPLIIMGEVDGGMAMLRPDSFVGASSARRVRKLREVMHKKTCDVLKEFLGLH

SEQ ID NO: 69782 - protein, 502 aa, Homo sapiens
MPLVKRNIEPRHLCRGALPEGITSELECVTNSTLAAIIRQLSSLSKHAEDIFGELFNEANNFYIRANSLQDRIDRLAVKVTQLDSTVEEVSLQDINMKKAFKSSTVQDQQVVSKNSIPNPVADIYNQSDKPPPLNILTPYRDDKKDGLKFYTDPSYFFDLWKEKMLQDTEDKRKEKRRQKEQKRIDGTTREVKKVRKARNRRQEWNMMAYDKELRPDNRLSQSVYHGASSEGSLSPDTRSHASDVTDYSYPATPNHSLHPQPVTPSYAAGDVPPHGPASQAAEHEYRPPSASARHMALNRPQQPPPPPPPQAPEGSQASAPMAPADYGMLPAQIIEYYNPSGPPPPPPPPVIPSAQTAFVSPLQMPMQPPFPASASSTHAAPPHPPSTGLLVTAPPPPGPPPPPPGPPGPGSSLSSSPMHGPPVAEAKRQEPAQPPISDARSDLLAAIRMGIQLKKVQEQREQEAKREPVGNDVATILSRRIAVEYSDSDDDSEFDENDWSD

SEQ ID NO: 69783 - protein, 499 aa, Homo sapiens
MPLVKRNIEPRHLCRGALPEGITSELECVTNSTLAAIIRQLSSLSKHAEDIFGELFNEANNFYIRANSLQDRIDRLAVKVTQLDSTVEEVSLQDINMKKAFKSSTVQDQQVVSKNSIPNPVADIYNQSDKPPPLNILTPYRDDKKDGLKFYTDPSYFFDLWKEKMLQDTEDKRKEKRRQKREKHKLNPNRNQQVNVRKVRTRKEEWERRKMGIEFMSDAKKLEQAGSAKEDRVPSGSHASDVTDYSYPATPNHSLHPQPVTPSYAAGDVPPHGPASQAAEHEYRPPSASARHMALNRPQQPPPPPPPQAPEGSQASAPMAPADYGMLPAQIIEYYNPSGPPPPPPPPVIPSAQTAFVSPLQMPMQPPFPASASSTHAAPPHPPSTGLLVTAPPPPGPPPPPPGPPGPGSSLSSSPMHGPPVAEAKRQEPAQPPISDARSDLLAAIRMGIQLKKVQEQREQEAKREPVGNDVATILSRRIAVEYSDSDDDSEFDENDWSD

SEQ ID NO: 69784 - protein, 783 aa, Homo sapiens
MEDEQPDSLEGWVPVREGLFAEPERHRLRFLVAWNGAEGKFAVTCHDRTAQQRRLREGARLGPEPEPKPEAAVSPSSWAGLLSAAGLRGAHRQLAALWPPLERCFPRLPPELDVGGGGAWGLGLGLWALLWPTRAGPGEAALQELCGQLERYLGAAADGCGGATVRDALFPAEGGAADCESPREFRERALRARWVEADARLRQVIQGHGKANTMVALMNVYQEEDEAYQELVTVATMFFQYLLQPFRAMREVATLCKLDILKSLDEDDLGPRRVVALEKEAEEWTRRAEEAVVSIQDITVNYFKETVKALAGMQKEMEQDAKRFGQAAWATAIPRLEKLQLMLARETLQLMRAKELCLNHKRAEIQGKMEDLPEQEKNTNVVDELEIQFYEIQLELYEVKFEILKNEEILLTTQLDSLKRLIKEKQDEVVYYDPCENPEELKVIDCVVGLQDDKNLEVKELRRQCQQLESKRGRICAKRASLRSRKDQCKENHRFRLQQAEESIRYSRQHHSIQMKRDKIKEEEQKKKEWINQERQKTLQRLRSFKDKRLAQSVRNTSGSEPVAPNLPSDLSQQMCLPASHAVSVIHPSSRKTRGVPLSEAGNVKSPKCQNCHGNIPVQVFVPVGDQTHSKSSEELSLPPPPPPPPPPPPPPPPPPPPLRALSSSSQAATHQNLGFRAPVKDDQPRPLVCESPAERPRDSLESFSCPGSMDEVLASLRHGRAQGVKLKKVHPDLGPNPSSKPTSNRRTSDLERSIKAALQRIKRVSADSEEDSDEQDPGQWDG

SEQ ID NO: 69785 - protein, 809 aa, Homo sapiens
MEDEQPDSLEGWVPVREGLFAEPERHRLRFLVAWNGAEGKFAVTCHDRTAQQRRLREGARLGPEPEPKPEAAVSPSSWAGLLSAAGLRGAHRQLAALWPPLERCFPRLPPELDVGGGGAWGLGLGLWALLWPTRAGPGEAALQELCGQLERYLGAAADGCGGATVRDALFPAEGGAADCESPREFRERALRARWVEADARLRQVIQGHGKANTMVALMNVYQEEDEAYQELVTVATMFFQYLLQPFRAMREVATLCKLDILKSLDEDDLGPRRVVALEKEAEEWTRRAEEAVVSIQDITVNYFKETVKALAGMQKEMEQDAKRFGQAAWATAIPRLEKLQLMLARETLQLMRAKELCLNHKRAEIQGKMEDLPEQEKNTNVVDELEIQFYEIQLELYEVKFEILKNEEILLTTQLDSLKRLIKEKQDEVVYYDPCENPEELKVIDCVVGLQDDKNLEVKELRRQCQQLESKRGRICAKRASLRSRKDQCKENHRFRLQQAEESIRYSRQHHSIQMKRDKIKEEEQKKKEWINQERQKTLQRLRSFKDKRLAQSVRNTSGSEPVAPNLPSDLSQQMCLPASHAVSVIHPSSRKTRGVPLSEAGNVKSPKCQNCHGNIPVQVFVPVGDQTHSKSSEELSLPPPPPPPPPPPPPPPPPPPPLRALSSSSQAATHQNLGFRAPVKDDQPRPLVCESPAERPRDSLESFSCPGSMDEVLASLRHGRAPLRKVEVPAVRPPHASINEHILAAIRQGVKLKKVHPDLGPNPSSKPTSNRRTSDLERSIKAALQRIKRVSADSEEDSDEQDPGQWDG

SEQ ID NO: 69786 - protein, 483 aa, Homo sapiens
MPVPPPPPPPLPPPPPPLGAPPPPPPSAPPVSTDTSSLRRADPKGRSALLADIQQGTRLRKVTQINDRSAPQIESSKGTNKEGGGSANTRGASTPPTLGDLFAGGFPVLRPAGQRDVAGGKTGQGPGSRAPSPRLPNKTISGPLIPPASPRLGNTSEAHGAARTAPPRPNVPAPPPPTPPPPPPPLPPPLPSSSPIKTPLVSPPGPLTKGNLPVVAPPVPCAPPPPPPPPPPTPPPLPPASVLSDKAVKPQLAPLHLPPIPPPLPLLPPCGYPGLKAEPASPAQDAQEPPAPPPPLPPYASCSPRASLPAPPLPGVNSSSETPPPLPPKSPSFQAPPQKAGAQALPAPPAPPGSQPFLQKKRHGRPGAGGGKLNPPPAPPARSPTTELSSKSQQATAWTPTQQPGGQLRNGSLHIIDDFESKFTFHSVEDFPPPDEYKPCQKIYPSKIPRSRTPGPWLQAEAVGQSSDDIKGRNSQLSLKTLR

SEQ ID NO: 69787 - protein, 483 aa, Homo sapiens
MPVPPPPPPPLPPPPPPLGAPPPPPPSAPPVSTDTSSLRRADPKGRSALLADIQQGTRLRKVTQINDRSAPQIESSKGTNKEGGGSANTRGASTPPTLGDLFAGGFPVLRPAGQRDVAGGKTGQGPGSRAPSPRLPNKTISGPLIPPASPRLGNTSEAHGAARTAPPRPNVPAPPPPTPPPPPPPLPPPLPSSSPIKTPLVSPPGPLTKGNLPVVAPPVPCAPPPPPPPPPPTPPPLPPASVLSDKAVKPQLAPLHLPPIPPPLPLLPPCGYPGLKAEPASPAQDAQEPPAPPPPLPPYASCSPRASLPAPPLPGVNSSSETPPPLPPKSPSFQAPPQKAGAQALPAPPAPPGSQPFLQKKRHGRPGAGGGKLNPPPAPPARSPTTELSSKSQQATAWTPTQQPGGQLRNGSLHIIDDFESKFTFHSVEDFPPPDEYKPCQKIYPSKIPRSRTPGPWLQAEAVGQSSDDIKGRNSQVTQASCL

SEQ ID NO: 69788 - protein, 483 aa, Homo sapiens; identical to SEQ ID NO: 69787

SEQ ID NO: 69789 - protein, 309 aa, Homo sapiens
MAVNQSHTENRRGALIPNGESLLKRSPNVELSFPQRSEGSNVFSGRKTGTLFLTSYRVIFITSCSISDPMLSFMMPFDLMTNLTVEQPVFAANFIKGTIQAAPYGGWEGQATFKLVFRNGDAIEFAQLMVKAASAAARGFPLRTLNDWFSSMGIYVITGEGNMCTPQMPCSVIVYGAPPAGYGAPPPGYGAPPAGYGAQPVGNEGPPVGYRASPVRYGAPPLGYGAPPAGYGAPPLGYGAPPLGYGTPPLGYGAPPLGYGAPPAGNEGPPAGYRASPAGSGARPQESTAAQAPENEASLPSASSSQVHS

SEQ ID NO: 69790 - protein, 309 aa, Homo sapiens; identical to SEQ ID NO: 69789

SEQ ID NO: 69791 - protein, 309 aa, Homo sapiens; identical to SEQ ID NO: 69789

SEQ ID NO: 69792 - protein, 235 aa, Homo sapiens [sequence omitted]

SEQ ID NO: 69793 - protein, 466 aa, Homo sapiens
MPYEIKKVFASLPQVERGVSKIIGGDPKGNNFLYTNGKCVILRNIDDHSRFVNCVRFSPDGNRFATASADGQIYIYDGKTGEKVCALGGSKAHDGGIYAISWSPDSTHLLSASGDKTSKIWDVSVNSVVSTFPMGSTVLDQQLGCLWQKDHLLSVSLSGYINYLDRNNPSKPLHVIKGHSKSIQCLTVHKNGGKSYIYSGSHDGHINYWDSETGENDSFAGKGHTNQVSRMTVDESGQLISCSMDDTVRYTSLMLRDYSGQGVVKLDVQPKCVAVGPGGYAVVVCIGQIVLLKDQRKCFSIDNPGYEPEVVAVHPGGDTVAIGGVDGNVRLYSILGTTLKDEGKLLEAKGPVTDVAYSHDGAFLAVCDASKVVTVFSVADGYSENNVFYGHHAKIVCLAWSPDNEHFASGGMDMMVYVWTLSDPETRVKIQDAHRLHHVSSLAWLDEHTLVTTSHDASVKEWTITY

SEQ ID NO: 69794 - protein, 606 aa, Homo sapiens
MPYEIKKVFASLPQVERGVSKIIGGDPKGNNFLYTNGKCVILRNIDNPALADIYTEHAHQVVVAKYAPSGFYIASGDVSGKLRIWDTTQKEHLLKYEYQPFAGKIKDIAWTEDSKRIAVVGEGREKFGAVFLWDSGSSVGEITGHNKVINSVDIKQSRPYRLATGSDDNCAAFFEGPPFKFKFTIGDHSRFVNCVRFSPDGNRFATASADGQIYIYDGKTGEKVCALGGSKAHDGGIYAISWSPDSTHLLSASGDKTSKIWDVSVNSVVSTFPMGSTVLDQQLGCLWQKDHLLSVSLSGYINYLDRNNPSKPLHVIKGHSKSIQCLTVHKNGGKSYIYSGSHDGHINYWDSETGENDSFAGKGHTNQVSRMTVDESGQLISCSMDDTVRYTSLMLRDYSGQGVVKLDVQPKCVAVGPGGYAVVVCIGQIVLLKDQRKCFSIDNPGYEPEVVAVHPGGDTVAIGGVDGNVRLYSILGTTLKDEGKLLEAKGPVTDVAYSHDGAFLAVCDASKVVTVFSVADGYSENNVFYGHHAKIVCLAWSPDNEHFASGGMDMMVYVWTLSDPETRVKIQDAHRLHHVSSLAWLDEHTLVTTSHDASVKEWTITY

SEQ ID NO: 69795 - protein, 441 aa, Homo sapiens
MLTWVWYLIMTSVLQASVSSVDHSRFVNCVRFSPDGNRFATASADGQIYIYDGKTGEKVCALGGSKAHDGGIYAISWSPDSTHLLSASGDKTSKIWDVSVNSVVSTFPMGSTVLDQQLGCLWQKDHLLSVSLSGYINYLDRNNPSKPLHVIKGHSKSIQCLTVHKNGGKSYIYSGSHDGHINYWDSETGENDSFAGKGHTNQVSRMTVDESGQLISCSMDDTVRYTSLMLRDYSGQGVVKLDVQPKCVAVGPGGYAVVVCIGQIVLLKDQRKCFSIDNPGYEPEVVAVHPGGDTVAIGGVDGNVRLYSILGTTLKDEGKLLEAKGPVTDVAYSHDGAFLAVCDASKVVTVFSVADGYSENNVFYGHHAKIVCLAWSPDNEHFASGGMDMMVYVWTLSDPETRVKIQDAHRLHHVSSLAWLDEHTLVTTSHDASVKEWTITY

SEQ ID NO: 69796 - protein, 176 aa, Homo sapiens
PAETEKVFASLPQVERGVSKIIGGDPKGNNFLYTNGKCVILRNIDDHSRFVNCVRFSPDGNRFATASADGQCLPAPVTAQSRRLPNASPDMQNLDIALPTSADSSSEPKPQSMEKLPPWSAHFPWAPRFWTSSWAAYGRRTTCSVSPCPGTSTIWTETTPASPCTSSRVTVNRSSV

SEQ ID NO: 69797 - protein, 606 aa, Homo sapiens; identical to SEQ ID NO: 69794

SEQ ID NO: 69798 - protein, 466 aa, Homo sapiens; identical to SEQ ID NO: 69793

SEQ ID NO: 69799 - protein, 1224 aa, Homo sapiens
MLPYTVNFKVSARTLTGALNAHNKAAVDWGWQGLIAYGCHSLVVVIDSITAQTLQVLEKHKADVVKVKWARENYHHNIGSPYCLRLASADVNGKIIVWDVAAGVAQCEIQEHAKPIQDVQWLWNQDASRDLLLAIHPPNYIVLWNADTGTKLWKKSYADNILSFSFDPFDPSHLTLLTSEGIVFISDFSPSKPPSGPGKKVYISSPHSSPAHNKLATATGAKKALNKVKILITQEKPSAEFITLNDCLQLAYLPSKRNHMLLLYPREILILDLEVNQTVGVIAIERTGVPFLQVIPCFQRDGLFCLHENGCITLRVRRSYNNIFTTSNEEPDPDPVQELTYDLRSQCDAIRVTKTVRPFSMVCCPVNENAAALVVSDGRVMIWELKSAVCNRNSRNSSSGVSPLYSPVSFCGIPVGVLQNKLPDLSLDNMIGQSAIAGEEHPRGSILREVHLKFLLTGLLSGLPAPQFAIRMCPPLTTKNIKMYQPLLAVGTSNGSVLVYHLTSGLLHKELSIHSCEVKGIEWTSLTSFLSFATSTPNNMGLVRNELQLVDLPTGRSIAFRGERGNDESAIEMIKVSHLKQYLAVVFRDKPLELWDVRTCTLLREMSKNFPTITALEWSPSHNLKSLRKKQLATREAMARQTVVSDTELSIVESSVISLLQEAESKSELSQNISAREHFVFTDIDGQVYHLTVEGNSVKDSARIPPDGSMGSITCIAWKGDTLVLGDMDGNLNFWDLKGRVSRGIPTHRSWVRKIRFAPGKGNQKLIAMYNDGAEVWDTKEVQMVSSLRSGRNVTFRILDVDWCTSDKVILASDDGCIRVLEMSMKSACFRMDEQELTEPVWCPYLLVPRASLALKAFLLHQPWNGQYSLDISHVDYPENEEIKNLLQEQLNSLSNDIKKLLLDPEFTLLQRCLLVSRLYGDESELHFWTVAAHYLHSLSQEKSASTTAPKEAAPRDKLSNPLDICYDVLCENAYFQKFQLERVNLQEVKRSTYDHTRKCTDQLLLLGQTDRAVQLLLETSADNQHYYCDSLKACLVTTVTSSGPSQSTIKLVATNMIANGKLAEGVQLLCLIDKAADACRYLQTYGEWNRAAWLAKVRLNPEECADVLRRWVDHLCSPQVNQKSKALLVLLSLGCFFSVAETLHSMRYFDRAALFVEACLKYGAFEVTEDTEKLITAIYADYARSLKNLGFKQGAVLFASKAGAAGKDLLNELESPKEEPIEE

SEQ ID NO: 69800 - protein, 485 aa, Homo sapiens
MAAVWQQVLAVDARYNAYRTPTFPQFRTQYIRRRSQLLRENAKAGHPPALRRQYLRLRGQLLGQRYGPLSEPGSARAYSNSIVRSSRTTLDRMEDFEDDPRALGARGHRRSVSRGSYQLQAQMNRAVYEDRPPGSVVPTSAAEASRAMAGDTSLSENYAFAGMYHVFDQHVDEAVPRVRFANDDRHRLACCSLDGSISLCQLVPAPPTVLRVLRGHTRGVSDFAWSLSNDILVSTSLDATMRIWASEDGRCIREIPDPDSAELLCCTFQPVNNNLTVVGNAKHNVHVMNISTGKKVKGGSSKLTGRVLALSFDAPGRLLWAGDDHGSVFSFLFDMATGKLTKAKRLVVHEGSPVTSISARSWVSREARDPSLLINACLNKLLLYRVVDNEGTLQLKRSFPIEQSSHPVRSIFCPLMSFRQGACVVTGSEDMCVHFFDVERAAKAAVNKLQGHSAPVLDVSFNCDESLLASSDASGMVIVWRREQK

SEQ ID NO: 69801 - protein, 485 aa, Homo sapiens; identical to SEQ ID NO: 69800

SEQ ID NO: 69802 - protein, 630 aa, Homo sapiens
MEAVVLPWQIFGVRELPVERGVTMKGPRLFRAPGHVPTGLKCHPDQEHMIYPLGCTVLIQAINTKEQNFLQGHGNNVSCLAISRSGEYIASGQVTFMGFKADIILWDYKNRELLARLSLHKGKIEALAFSPNDLYLVSLGGPDDGSVVVWSIAKRDAICGSPAAGLNVGNATNVIFSRCRDEMFMTAGNGTIRVWELDLPNRKIWPTECQTGQLKRIVMSIGVDDDDSFFYLGTTTGDILKMNPRTKLLTDVGPAKDKFSLGVSAIRCLKMGGLLVGSGAGLLVFCKSPGYKPIKKIQLQGGITSITLRGEGHQFLVGTEESHIYRVSFTDFKETLIATCHFDAVEDIVFPFGTAELFATCAKKDIRVWHTSSNRELLRITVPNMTCHGIDFMRDGKSIISAWNDGKIRAFAPETGRLMYVINNAHRIGVTAIATTSDCKRVISGGGEGEVRVWQIGCQTQKLEEALKEHKSSVSCIRVKRNNEECVTASTDGTCIIWDLVRLRRNQMILANTLFQCVCYHPEEFQIITSGTDRKIAYWEVFDGTVIRELEGSLSGSINGMDITQEGVHFVTGGNDHLVKVWDYNEGEVTHVGVGHSGNITRIRISPGNQYIVSVSADGAILRWKYPYTS

SEQ ID NO: 69803 - protein, 620 aa, Homo sapiens
MDNKISPEAQVAELELDAVIGFNGHVPTGLKCHPDQEHMIYPLGCTVLIQAINTKEQNFLQGHGNNVSCLAISRSGEYIASGQVTFMGFKADIILWDYKNRELLARLSLHKGKIEALAFSPNDLYLVSLGGPDDGSVVVWSIAKRDAICGSPAAGLNVGNATNVIFSRCRDEMFMTAGNGTIRVWELDLPNRKIWPTECQTGQLKRIVMSIGVDDDDSFFYLGTTTGDILKMNPRTKLLTDVGPAKDKFSLGVSAIRCLKMGGLLVGSGAGLLVFCKSPGYKPIKKIQLQGGITSITLRGEGHQFLVGTEESHIYRVSFTDFKETLIATCHFDAVEDIVFPFGTAELFATCAKKDIRVWHTSSNRELLRITVPNMTCHGIDFMRDGKSIISAWNDGKIRAFAPETGRLMYVINNAHRIGVTAIATTSDCKRVISGGGEGEVRVWQIGCQTQKLEEALKEHKSSVSCIRVKRNNEECVTASTDGTCIIWDLVRLRRNQMILANTLFQCVCYHPEEFQIITSGTDRKIAYWEVFDGTVIRELEGSLSGSINGMDITQEGVHFVTGGNDHLVKVWDYNEGEVTHVGVGHSGNITRIRISPGNQYIVSVSADGAILRWKYPYTS

SEQ ID NO: 69804 - protein, 552 aa, Homo sapiens
MDNKISPEAQVAELELDAVIGFNDIILWDYKNRELLARLSLHKGKIEALAFSPNDLYLVSLGGPDDGSVVVWSIAKRDAICGSPAAGLNVGNATNVIFSRCRDEMFMTAGNGTIRVWELDLPNRKIWPTECQTGQLKRIVMSIGVDDDDSFFYLGTTTGDILKMNPRTKLLTDVGPAKDKFSLGVSAIRCLKMGGLLVGSGAGLLVFCKSPGYKPIKKIQLQGGITSITLRGEGHQFLVGTEESHIYRVSFTDFKETLIATCHFDAVEDIVFPFGTAELFATCAKKDIRVWHTSSNRELLRITVPNMTCHGIDFMRDGKSIISAWNDGKIRAFAPETGRLMYVINNAHRIGVTAIATTSDCKRVISGGGEGEVRVWQIGCQTQKLEEALKEHKSSVSCIRVKRNNEECVTASTDGTCIIWDLVRLRRNQMILANTLFQCVCYHPEEFQIITSGTDRKIAYWEVFDGTVIRELEGSLSGSINGMDITQEGVHFVTGGNDHLVKVWDYNEGEVTHVGVGHSGNITRIRISPGNQYIVSVSADGAILRWKYPYTS

SEQ ID NO: 69805 - protein, 1322 aa, Homo sapiens
MAWMTYISNWFEQDDWYEGLQRANMSQVRQVGLLAAGCQPWNKDVCAASGDRFAYCATLAIYIYQLDHRYNEFKLHAIMSEHKKTITAISWCPHNPDLFASGSTDNLVIIWNVAEQKVIAKLDSTKGIPASLSWCWNAEDVVAFVSHRGPLFIWTISGPDSGVIVHKDAHSFLSDICMFRWHTHQKGKVVFGHIDGSLSIFHPGNKNQKHVLRPESLEGTDEEDPVTALEWDPLSTDYLLVVNLHYGIRLVDSESLSCITTFNLPSAAASVQCLAWVPSAPGMFITGDSQVGVLRIWNVSRTTPIDNLKLKKTGFHCLHVLNSPPRKKFSVQSPTKNHYTSSTSEAVPPPTLTQNQAFSLPPGHAVCCFLDGGVGLYDMGAKKWDFLRDLGHVETIFDCKFKPDDPNLLATASFDGTIKVWDINTLTAVYTSPGNEGVIYSLSWAPGGLNCIAGGTSRNGAFIWNVQKGKIIQRFNEHGTNGIFCIAWSHKDSKRIATCSSDGFCIIRTIDGKVLHKYKHPAAVFGCDWSQNNKDMIATGCEDTNVRVYYVATSSDQPLKVFSGHTAKVFHVKWSPLREGILCSGSDDGTVRIWDYTQDACINILNGHTAPVRGLMWNTEIPYLLISGSWDYTIKVWDTREGTCVDTVYDHGADVYGLTCHPSRPFTMASCSRDSTVRLWSLTALVTPVQINILADRSWEEIIGNTDYAIEPGTPPLLCGKVSRDIRQEIEKLTANSQVKKLRWFSECLSPPGGSDNLWNLVAVIKGQDDSLLPQNYCKGIMHLKHLIKFRTSEAQELTTVKMSKFGGGIGVPAKEERLKEAAEIHLRLGQIQRYCELMVELGEWDKALSIAPGVSVKYWKKLMQRRADQLIQEDKDDVIPYCIAIGDVKKLVHFFMSRGQLKEALLVAQAACEGNMQPLHVSVPKGASYSDDIYKEDFNELLHKVSKELAEWYFQDGRAVLAACCHLAIDNIELAMAYLIRGNELELAVCVGTVLGESAAPATHYALELLARKCMMISVCFPCVGYSVPFCYVNRNLAADLLLMIPDNELHLIKLCAFYPGCTEEINDLHDKCKLPTVEECMQLAETARADDNIFETVKYYLLSQEPEKALPIGISFVKEYISSSDWTLDTIYPVLDLLSYIRTEKLLLHTCTEARNELLILCGYIGALLAIRRQYQSIVPALYEYTSQLLKRREVSVPLKIEYLSEELDAWRACTQSTNRSLEDSPYTPPSDSQRMIYATLLKRLKEESLKGIIGPDYVTGSNLPSHSDIHISCLTGLKIQGPVFFLEDGKSAISLNDALMWAKVNPFSPLGTGIRLNPF

SEQ ID NO: 69806 - protein, 130 aa, Homo sapiens
MSQVRQVGLLAAGCQPWNKDVCAASGDRFAYCATLAIYIYQLDHRYNEFKLHAIMSEHKKTITAISWCPHNPDLFASGSTDNLVIIWNVAEQKVIAKLDRARPPSPKIIYIKIINIIEENIHNSEMQWII

SEQ ID NO: 69807 - protein, 1298 aa, Homo sapiens
MSQVRQVGLLAAGCQPWNKDVCAASGDRFAYCATLAIYIYQLDHRYNEFKLHAIMSEHKKTITAISWCPHNPDLFASGSTDNLVIIWNVAEQKVIAKLDSTKGIPASLSWCWNAEDVVAFVSHRGPLFIWTISGPDSGVIVHKDAHSFLSDICMFRWHTHQKGKVVFGHIDGSLSIFHPGNKNQKHVLRPESLEGTDEEDPVTALEWDPLSTDYLLVVNLHYGIRLVDSESLSCITTFNLPSAAASVQCLAWVPSAPGMFITGDSQVGVLRIWNVSRTTPIDNLKLKKTGFHCLHVLNSPPRKKFSVQSPTKNHYTSSTSEAVPPPTLTQNQAFSLPPGHAVCCFLDGGVGLYDMGAKKWDFLRDLGHVETIFDCKFKPDDPNLLATASFDGTIKVWDINTLTAVYTSPGNEGVIYSLSWAPGGLNCIAGGTSRNGAFIWNVQKGKIIQRFNEHGTNGIFCIAWSHKDSKRIATCSSDGFCIIRTIDGKVLHKYKHPAAVFGCDWSQNNKDMIATGCEDTNVRVYYVATSSDQPLKVFSGHTAKVFHVKWSPLREGILCSGSDDGTVRIWDYTQDACINILNGHTAPVRGLMWNTEIPYLLISGSWDYTIKVWDTREGTCVDTVYDHGADVYGLTCHPSRPFTMASCSRDSTVRLWSLTALVTPVQINILADRSWEEIIGNTDYAIEPGTPPLLCGKVSRDIRQEIEKLTANSQVKKLRWFSECLSPPGGSDNLWNLVAVIKGQDDSLLPQNYCKGIMHLKHLIKFRTSEAQELTTVKMSKFGGGIGVPAKEERLKEAAEIHLRLGQIQRYCELMVELGEWDKALSIAPGVSVKYWKKLMQRRADQLIQEDKDDVIPYCIAIGDVKKLVHFFMSRGQLKEALLVAQAACEGNMQPLHVSVPKGASYSDDIYKEDFNELLHKVSKELAEWYFQDGRAVLAACCHLAIDNIELAMAYLIRGNELELAVCVGTVLGESAAPATHYALELLARKCMMISVCFPCVGYSVPFCYVNRNLAADLLLMIPDNELHLIKLCAFYPGCTEEINDLHDKCKLPTVEECMQLAETARADDNIFETVKYYLLSQEPEKALPIGISFVKEYISSSDWTLDTIYPVLDLLSYIRTEKLLLHTCTEARNELLILCGYIGALLAIRRQYQSIVPALYEYTSQLLKRREVSVPLKIEYLSEELDAWRACTQSTNRSLEDSPYTPPSDSQRMIYATLLKRLKEESLKGIIGPDYVTGSNLPSHSDIHISCLTGLKIQGPVFFLEDGKSAISLNDALMWAKVNPFSPLGTGIRLNPF

SEQ ID NO: 69808 - protein, 1283 aa, Homo sapiens
MSQVRQVGLLAAGCQPWNKDVCAASGDRFAYCATLAIYIYQLDHRYNEFKLHAIMSEHKKTITAISWCPHNPDLFASGSTDNLVIIWNVAEQKVIAKLDSTKGIPASLSWCWNAEDVVAFVSHRGPLFIWTISGPDSGVIVHKDAHSFLSDICMFRWHTHQKGKVVFGHIDGSLSIFHPGNKNQKHVLRPESLEGTDEEDPVTALEWDPLSTDYLLVVNLHYGIRLVDSESLSCITTFNLPSAAASVQCLAWVPSAPGMFITGDSQVGVLRIWNVSRTTPIDNLKLKKTGFHCLHVLNSPPRKKFSVQSPTKNHYTSSTSEAVPPPTLTQNQAFSLPPGHAVCCFLDGGVGLYDMGAKKWDFLRDLGHVETIFDCKFKPDDPNLLATASFDGTIKVWDINTLTAVYTSPGNEGVIYSLSWAPGGLNCIAGGTSRNGAFIWNVQKGKIIQRFNEHGTNGIFCIAWSHKDSKRIATCSSDGFCIIRTIDGKVLHKYKHPAAVFGCDWSQNNKDMIATGCEDTNVRVYYVATSSDQPLKVFSGHTAKVFHVKWSPLREGILCSGSDDGTVRIWDYTQDACINILNGHTAPVRGLMWNTEIPYLLISGSWDYTIKVWDTREGTCVDTVYDHGADVYGLTCHPSRPFTMASCSRDSTVRLWSLTALVTPVQINILADRSWEEIIGNTDYAIEPGTPPLLCGKVSRDIRQEIEKLTANSQVKKLRWFSECLSPPGGSDNLWNLVAVIKGQDDSLLPQNYCKGIMHLKHLIKFRTSEAQELTTVKMSKFGGGIGVPAKEERLKEAAEIHLRLGQIQRYCELMVELGEWDKALSIAPGVSVKYWKKLMQRRADQLIQEDKDDVIPYCIAIGDVKKLVHFFMSRGQLKEALLVAQAACEGNMQPLHVSVPKGASYSDDIYKEDFNELLHKVSKELAEWYFQDGRAVLAACCHLAIDNIELAMAYLIRGNELELAVCVGTVLGESAAPATHYALELLARKCMMISVWNLAADLLLMIPDNELHLIKLCAFYPGCTEEINDLHDKCKLPTVEECMQLAETARADDNIFETVKYYLLSQEPEKALPIGISFVKEYISSSDWTLDTIYPVLDLLSYIRTEKLLLHTCTEARNELLILCGYIGALLAIRRQYQSIVPALYEYTSQLLKRREVSVPLKIEYLSEELDAWRACTQSTNRSLEDSPYTPPSDSQRMIYATLLKRLKEESLKGIIGPDYVTGSNLPSHSDIHISCLTGLKIQGPVFFLEDGKSAISLNDALMWAKVNPFSPLGTGIRLNPF

SEQ ID NO: 69809 - protein, 1182 aa, Homo sapiens
MITVSNQEGDTIRQTQVRSEPSNMQFFLMKMDDRTSAAESMISVVLGKKTLFFLNLNEPDNPADLEFQQDFGNIVCYNWYGDGRIMIGFSCGHFVVISTHTGELGQEIFQARNHKDNLTSIAVSQTLNKVATCGDNCIKIQDLVDLKDMYVILNLDEENKGLGTLSWTDDGQLLALSTQRGSLHVFLTKLPILGDACSTRIAYLTSLLEVTVANPVEGELPITVSVDVEPNFVAVGLYHLAVGMNNRAWFYVLGENAVKKLKDMEYLGTVASICLHSDYAAALFEGKVQLHLIESEILDAQEERETRLFPAVDDKCRILCHALTSDFLIYGTDTGVVQYFYIEDWQFVNDYRHPVSVKKIFPDPNGTRLVFIDEKSDGFVYCPVNDATYEIPDFSPTIKGVLWENWPMDKGVFIAYDDDKVYTYVFHKDTIQGAKVILAGSTKVPFAHKPLLLYNGELTCQTQSGKVNNIYLSTHGFLSNLKDTGPDELRPMLAQNLMLKRFSDAWEMCRILNDEAAWNELARACLHHMEVEFAIRVYRRIGNVGIVMSLEQIKGIEDYNLLAGHLAMFTNDYNLAQDLYLASSCPIAALEMRRDLQHWDSALQLAKHLAPDQIPFISKEYAIQLEFAGDYVNALAHYEKGITGDNKEHDEACLAGVAQMSIRMGDIRRGVNQALKHPSRVLKRDCGAILENMKQFSEAAQLYEKGLYYDKAASVYIRSKNWAKVGDLLPHVSSPKIHLQYAKAKEADGRYKEAVVAYENAKQWQSVIRIYLDHLNNPEKAVNIVRETQSLDGAKMVARFFLQLGDYGSAIQFLVMSKCNNEAFTLAQQHNKMEIYADIIGSEDTTNEDYQSIALYFEGEKRYLQAGKFFLLCGQYSRALKHFLKCPSSEDNVAIEMAIETVGQAKDELLTNQLIDHLLGENDGMPKDAKYLFRLYMALKQYREAAQTAIIIAREEQSAGNYRNAHDVLFSMYAELKSQKIKIPSEMATNLMILHSYILVKIHVKNGDHMKGARMLIRVANNISKFPSHIVPILTSTVIECHRAGLKNSAFSFAAMLMRPEYRSKIDAKYKKKIEGMVRRPDISEIEEATTPCPFCKFLLPECELLCPGCKNSIPYCIATGRHMLKDDWTVCPHCDFPALYSELKIMLNTESTCPMCSERLNAAQLKKISDCTQYLRTEEEL

SEQ ID NO: 69810 - protein, 1342 aa, Homo sapiens
MKRIFSLLEKTWLGAPIQFAWQKTSGNYLAVTGADYIVKIFDRHGQKRSEINLPGNCVAMDWDKDGDVLAVIAEKSSCIYLWDANTNKTSQLDNGMRDQMSFLLWSKVGSFLAVGTVKGNLLIYNHQTSRKIPVLGKHTKRITCGCWNAENLLALGGEDKMITVSNQEGDTIRQTQVRSEPSNMQFFLMKMDDRTSAAESMISVVLGKKTLFFLNLNEPDNPADLEFQQDFGNIVCYNWYGDGRIMIGFSCGHFVVISTHTGELGQEIFQARNHKDNLTSIAVSQTLNKVATCGDNCIKIQDLVDLKDMYVILNLDEENKGLGTLSWTDDGQLLALSTQRGSLHVFLTKLPILGDACSTRIAYLTSLLEVTVANPVEGELPITVSVDVEPNFVAVGLYHLAVGMNNRAWFYVLGENAVKKLKDMEYLGTVASICLHSDYAAALFEGKVQLHLIESEILDAQEERETRLFPAVDDKCRILCHALTSDFLIYGTDTGVVQYFYIEDWQFVNDYRHPVSVKKIFPDPNGTRLVFIDEKSDGFVYCPVNDATYEIPDFSPTIKGVLWENWPMDKGVFIAYDDDKVYTYVFHKDTIQGAKVILAGSTKVPFAHKPLLLYNGELTCQTQSGKVNNIYLSTHGFLSNLKDTGPDELRPMLAQNLMLKRFSDAWEMCRILNDEAAWNELARACLHHMEVEFAIRVYRRIGNVGIVMSLEQIKGIEDYNLLAGHLAMFTNDYNLAQDLYLASSCPIAALEMRRDLQHWDSALQLAKHLAPDQIPFISKEYAIQLEFAGDYVNALAHYEKGITGDNKEHDEACLAGVAQMSIRMGDIRRGVNQALKHPSRVLKRDCGAILENMKQFSEAAQLYEKGLYYDKAASVYIRSKNWAKVGDLLPHVSSPKIHLQYAKAKEADGRYKEAVVAYENAKQWQSVIRIYLDHLNNPEKAVNIVRETQSLDGAKMVARFFLQLGDYGSAIQFLVMSKCNNEAFTLAQQHNKMEIYADIIGSEDTTNEDYQSIALYFEGEKRYLQAGKFFLLCGQYSRALKHFLKCPSSEDNVAIEMAIETVGQAKDELLTNQLIDHLLGENDGMPKDAKYLFRLYMALKQYREAAQTAIIIAREEQSAGNYRNAHDVLFSMYAELKSQKIKIPSEMATNLMILHSYILVKIHVKNGDHMKGARMLIRVANNISKFPSHIVPILTSTVIECHRAGLKNSAFSFAAMLMRPEYRSKIDAKYKKKIEGMVRRPDISEIEEATTPCPFCKFLLPECELLCPGCKNSIPYCIATGRHMLKDDWTVCPHCDFPALYSELKIMLNTESTCPMCSERLNAAQLKKISDCTQYLRTEEEL

SEQ ID NO: 69811 - protein, 480 aa, Homo sapiens
KRIFSLLEKTWLGAPIQFAWQKTSGNYLAVTGADYIVKIFDRHGQKRSEINLPGNCVAMDWDKDGDVLAVIAEKSSCIYLWDANTNKTSQLDNGMRDQMSFLLWSKVGSFLAVGTVKGNLLIYNHQTSRKIPVLGKHTKRITCGCWNAENLLALGGEDKMITVSNQEGDTIRQTQVRSEPSNMQFFLMKMDDRTSAAESMISVVLGKKTLFFLNLNEPDNPADLEFQQDFGNIVCYNWYGDGRIMIGFSCGHFVVISTHTGELGQEIFQARNHKDNLTSIAVSQTLNKVATCGDNCIKIQDLVDLKDMYVILNLDEENKGLGTLSWTDDGQLLALSTQRGSLHVFLTKLPILGDACSTRIAYLTSLLEVTVANPVEGELPITVSVDVEPNFVAVGLYHLAVGMNNRAWFYVLGENAVKKLKDMEYLGTVASICLHSDYAAALFEGKVQLHLKAKSWMLKKNVRLGFSQQWMISAVSYAMP

SEQ ID NO: 69812 - protein, 481 aa, Homo sapiens
MKRIFSLLEKTWLGAPIQFAWQKTSGNYLAVTGADYIVKIFDRHGQKRSEINLPGNCVAMDWDKDGDVLAVIAEKSSCIYLWDANTNKTSQLDNGMRDQMSFLLWSKVGSFLAVGTVKGNLLIYNHQTSRKIPVLGKHTKRITCGCWNAENLLALGGEDKMITVSNQEGDTIRQTQVRSEPSNMQFFLMKMDDRTSAAESMISVVLGKKTLFFLNLNEPDNPADLEFQQDFGNIVCYNWYGDGRIMIGFSCGHFVVISTHTGELGQEIFQARNHKDNLTSIAVSQTLNKVATCGDNCIKIQDLVDLKDMYVILNLDEENKGLGTLSWTDDGQLLALSTQRGSLHVFLTKLPILGDACSTRIAYLTSLLEVTVANPVEGELPITVSVDVEPNFVAVGLYHLAVGMNNRAWFYVLGENAVKKLKDMEYLGTVASICLHSDYAAALFEGKVQLHLKAKSWMLKKNVRLGFSQQWMISAVSYAMP

SEQ ID NO: 69813 - protein, 943 aa, Homo sapiens
MGLTKQYLRYVASAVFGVIGSQKGNIVFVTLRGEKGRYVAVPACEHVFIWDLRKGEKILILQGLKQEVTCLCPSPDGLHLAVGYEDGSIRIFSLLSGEGNVTFNGHKAAITTLKYDQLGGRLASGSKDTDIIVWDVINESGLYRLKGHKDAITQALFLREKNLLVTSGKDTMVKWWDLDTQHCFKTMVGHRTEVWGLVLLSEEKRLITGASDSELRVWDIAYLQEIEDPEEPDPKKIKGSSPGIQDTLEAEDGAFETDEAPEDRILSCRKAGSIMREGRDRVVNLAVDKTGRILACHGTDSVLELFCILSKKEIQKKMDKKMKKARKKAKLHSSKGEEEDPEVNVEMSLQDEIQRVTNIKTSAKIKSFDLIHSPHGELKAVFLLQNNLVELYSLNPSLPTPQPVRTSRITIGGHRSDVRTLSFSSDNIAVLSAAADSIKIWNRSTLQCIRTMTCEYALCSFFVPGDRQVVIGTKTGKLQLYDLASGNLLETIDAHDGALWSMSLSPDQRGFVTGGADKSVKFWDFELVKDENSTQKRLSVKQTRTLQLDEDVLCVSYSPNQKLLAVSLLDCTVKIFYVDTLKFFLSLYGHKLPVICMDISHDGALIATGSADRNVKIWGLDFGDCHKSLFAHDDSVMYLQFVPKSHLFFTAGKDHKIKQWDADKFEHIQTLEGHHQEIWCLAVSPSGDYVVSSSHDKSLRLWERTREPLILEEEREMEREAEYEESVAKEDQPAVPGETQGDSYFTGKKTIETVKAAERIMEAIELYREETAKMKEHKAICKAAGKEVPLPSNPILMAYGSISPSAYVLEIFKGIKSSELEESLLVLPFSYVPDILKLFNEFIQLGSDVELICRCLFFLLRIHFGQITSNQMLVPVIEKLRETTISKVSQVRDVIGFNMAGLDYLKRECEAKSEVMFFADATSHLEEKKRKRKKREKLILTLT

SEQ ID NO: 69814 - protein, 40 aa, Homo sapiens
MGLTKQYLRYVASAVFGVIGSQKGLASQASSSFVFFATEF

SEQ ID NO: 69815 - protein, 536 aa, Homo sapiens
MATRAQPGPLSQAGSAGVAALATVGVASGPGPGRPGPLQDETLGVASVPSQWRAVQGIRWETKSCQTASIATASASAQARNHVDAQVQTEAPVPVSVQPPSQYDIPRLAAFLRRVEAMVIRELNKNWQSHAFDGFEVNWTEQQQMVSCLYTLGYPPAQAQGLHVTSISWNSTGSVVACAYGRLDHGDWSTLKSFVCAWNLDRRDLRPQQPSAVVEVPSAVLCLAFHPTQPSHVAGGLYSGEVLVWDLSRLEDPLLWRTGLTDDTHTDPVSQVVWLPEPGHSHRFQVLSVATDGKVLLWQGIGVGQLQLTEGFALVMQQLPRSTKLKKHPRGETEVGATAVAFSSFDPRLFILGTEGGFPLKCSLAAGEAALTRMPSSVPLRAPAQFTFSPHGGPIYSVSCSPFHRNLFLSAGTDGHVHLYSMLQAPPLTSLQLSLKYLFAVRWSPVRPLVFAAASGKGDVQLFDLQKSSQKPTVLIKQTQDESPVYCLEFNSQQTQLLAAGDAQGTVKVWQLSTEFTEQGPREAEDLDCLAAEVAA

SEQ ID NO: 69816 - protein, 139 aa, Homo sapiens
AGVAALATVGVASGPGPGRPGPLQDETLGVASVPSQWRAVQGIRWETKSCQTASIATASASAQARNHVDAQVQTEAPVPVSVQPPSQYDIPRLAAFLRRVEAMVIRELNKNWQSHAFDGFEVNWTEQQQMAGPWGLEHA

SEQ ID NO: 69817 - protein, 272 aa, Homo sapiens
LSQAGSAGVAALATVGVASGPGPGRPGPLQDETLGVASVPSQWRAVQGIRWETKSCQTASIATASASAQARNHVDAQVQTEAPVPVSVQPPSQYDIPRLAAFLRRVEAMVIRELNKNWQSHAFDGFEVNWTEQQQMVSCLYTLGYPPAQAQGLHVTSISWNSTGSVVACAYGRLDHGDWSTLKSFVCAWNLDRRDLRPQQPSAVVEVPSAVLCLAFHPTQPSHVAGELPAVSASSPLRTQLPALQRAQGSFPWALWPGDRKAGPDPLSLEPR

SEQ ID NO: 69818 - protein, 1170 aa, Homo sapiens
MFFYLSKKISIPNNVKLQCVSWNKEQGFIACGGEDGLLKVLKLETQTDDAKLRGLAAPSNLSMNQTLEGHSGSVQVVTWNEQYQKLTTSDENGLIIVWMLYKGSWIEEMINNRNKSVVRSMSWNADGQKICIVYEDGAVIVGSVDGNRIWGKDLKGIQLSHVTWSADSKVLLFGMANGEIHIYDNQGNFMIKMKLSCLVNVTGAISIAGIHWYHGTEGYVEPDCPCLAVCFDNGRCQIMRHENDQNPVLIDTGMYVVGIQWNHMGSVLAVAGFQKAAMQDKDVNIVQFYTPFGEHLGTLKVPGKEISALSWEGGGLKIALAVDSFIYFANIRPNYKWGYCSNTVVYAYTRPDRPEYCVVFWDTKNNEKYVKYVKGLISITTCGDFCILATKADENHPQFVLVLCNSIGTPLDPKYIDIVPLFVAMTKTHVIAASKEAFYTWQYRVAKKLTALEINQITRSRKEGRERIYHVDDTPSGSMDGVLDYSKTIQGTRDPICAITASDKILIVGRESGTIQRYSLPNVGLIQKYSLNCRAYQLSLNCNSSRLAIIDISGVLTFFDLDARVTDSTGQQVVGELLKLERRDVWDMKWAKDNPDLFAMMEKTRMYVFRNLDPEEPIQTSGYICNFEDLEIKSVLLDEILKDPEHPNKDYLINFEIRSLRDSRALIEKVGIKDASQFIEDNPHPRLWRLLAEAALQKLDLYTAEQAFVRCKDYQGIKFVKRLGKLLSESMKQAEVVGYFGRFEEAERTYLEMDRRDLAIGLRLKLGDWFRVLQLLKTGSGDADDSLLEQANNAIGDYFADRQKWLNAVQYYVQGRNQERLAECYYMLEDYEGLENLAISLPENHKLLPEIAQMFVRVGMCEQAVTAFLKCSQPKAAVDTCVHLNQWNKAVELAKNHSMKEIGSLLARYASHLLEKNKTLDAIELYRKANYFFDAAKLMFKIADEEAKKGSKPLRVKKLYVLSALLIEQYHEQMKNAQRGKVKGKSSEATSALAGLLEEEVLSTTDRFTDNAWRGAEAYHFFILAQRQLYEGCVDTALKTALHLKDYEDIIPPVEIYSLLALCACASRAFGTCSKAFIKLKSLETLSSEQKQQYEDLALEIFTKHTSKDNRKPELDSLMEGGEGKLPTCVATGSPITEYQFWMCSVCKHGVLAQEISHYSFCPLCHSPVG

SEQ ID NO: 69819 - protein, 1181 aa, Homo sapiens
MFFYLSKKISIPNNVKLQCVSWNKEQGFIACGGEDGLLKVLKLETQTDDAKLRGLAAPSNLSMNQTLEGHSGSVQVVTWNEQYQKLTTSDENGLIIVWMLYKGSWIEEMINNRNKSVVRSMSWNADGQKICIVYEDGAVIVGSVDGNRIWGKDLKGIQLSHVTWSADSKVLLFGMANGEIHIYDNQGNFMIKMKLSCLVNVTGAISIAGIHWYHGTEGYVEPDCPCLAVCFDNGRCQIMRHENDQNPVLIDTGMYVVGIQWNHMGSVLAVAGFQKAAMQDKDVNIVQFYTPFGEHLGTLKVPGKEISALSWEGGGLKIALAVDSFIYFANIRPNYKWGYCSNTVVYAYTRPDRPEYCVVFWDTKNNEKYVKYVKGLISITTCGDFCILATKADENHPQEENEMETFGATFVLVLCNSIGTPLDPKYIDIVPLFVAMTKTHVIAASKEAFYTWQYRVAKKLTALEINQITRSRKEGRERIYHVDDTPSGSMDGVLDYSKTIQGTRDPICAITASDKILIVGRESGTIQRYSLPNVGLIQKYSLNCRAYQLSLNCNSSRLAIIDISGVLTFFDLDARVTDSTGQQVVGELLKLERRDVWDMKWAKDNPDLFAMMEKTRMYVFRNLDPEEPIQTSGYICNFEDLEIKSVLLDEILKDPEHPNKDYLINFEIRSLRDSRALIEKVGIKDASQFIEDNPHPRLWRLLAEAALQKLDLYTAEQAFVRCKDYQGIKFVKRLGKLLSESMKQAEVVGYFGRFEEAERTYLEMDRRDLAIGLRLKLGDWFRVLQLLKTGSGDADDSLLEQANNAIGDYFADRQKWLNAVQYYVQGRNQERLAECYYMLEDYEGLENLAISLPENHKLLPEIAQMFVRVGMCEQAVTAFLKCSQPKAAVDTCVHLNQWNKAVELAKNHSMKEIGSLLARYASHLLEKNKTLDAIELYRKANYFFDAAKLMFKIADEEAKKGSKPLRVKKLYVLSALLIEQYHEQMKNAQRGKVKGKSSEATSALAGLLEEEVLSTTDRFTDNAWRGAEAYHFFILAQRQLYEGCVDTALKTALHLKDYEDIIPPVEIYSLLALCACASRAFGTCSKAFIKLKSLETLSSEQKQQYEDLALEIFTKHTSKDNRKPELDSLMEGGEGKLPTCVATGSPITEYQFWMCSVCKHGVLAQEISHYSFCPLCHSPVG

SEQ ID NO: 69820 - protein, 559 aa, Homo sapiens
MTKTHVIAASKEAFYTWQYRVAKKLTALEINQITRSRKEGRERIYHVDDTPSGSMDGVLDYSKTIQGTRDPICAITASDKILIVGRESGTIQRYSLPNVGLIQKYSLNCRAYQLSLNCNSSRLAIIDISGVLTFFDLDARVTDSTGQQVVGELLKLERRDVWDMKWAKDNPDLFAMMEKTRMYVFRNLDPEEPIQTSGYICNFEDLEIKSVLLDEILKDPEHPNKDYLINFEIRSLRDSRALIEKVGIKDASQFIEDNPHPRLWRLLAEAALQKLDLYTAEQAFVRCKDYQGIKFVKRLGKLLSESMKQAEVVGYFGRFEEAERTYLEMDRRDLAIGLRLKLGDWFRVLQLLKTGSGDADDSLLEQANNAIGDYFADRQKWLNAVQYYVQGRNQERLAECYYMLEDYEGLENLAISLPENHKLLPIADEEAKKGSKPLRVKKLYVLSALLIEQYHEQMKNAQRGKVKGKSSEATSALAGLLEEEVLSTTDRFTDNAWRGAEAYHFFILAQRQLYEGCVDTALKTVEKGNCQHALPQEAQSLSINSGCAVYANTVSLLRK

SEQ ID NO: 69821 - protein, 951 aa, Homo sapiens
MCCTEGSLRKRDSQRAPEAVLCLQLWQRTVPLDTLKGLGTCFPSGPELRGAGIAAAMERASERRTASALFAGFRALGLFSNDIPHVVRFSALKRRFYVTTCVGKSFHTYDVQKLSLVAVSNSVPQDICCMAADGRLVFAAYGNVFSAFARNKEIVHTFKGHKAEIHFLQPFGDHIISVDTDGILIIWHIYSEEEYLQLTFDKSVFKISAILHPSTYLNKILLGSEQGSLQLWNVKSNKLLYTFPGWKVGVTALQQAPAVDVVAIGLMSGQVIIHNIKFNETLMKFRQDWGPITSISFRTDGHPVMAAGSPCGHIGLWDLEDKKLINQMRNAHSTAIAGLTFLHREPLLVTNGADNALRIWIFDGPTGEGRLLRFRMGHSAPLTNIRYYGQNGQQILSASQDGTLQSFSTVHEKFNKSLGHGLINKKRVKRKGLQNTMSVRLPPITKFAAEEARESDWDGIIACHQGKLSCSTWNYQKSTIGAYFLKPKELKKDDITATAVDITSCGNFAVIGLSSGTVDVYNMQSGIHRGSFGKDQAHKGSVRGVAVDGLNQLTVTTGSEGLLKFWNFKNKILIHSVSLSSSPNIMLLHRDSGILGLALDDFSISVLDIETRKIVREFSGHQGQINDMAFSPDGRWLISAAMDCSIRTWDLPSGCLIDCFLLDSAPLNVSMSPTGDFLATSHVDHLGIYLWSNISLYSVVSLRPLPADYVPSIVMLPGTCQTQDVEVSEETVEPSDELIEYDSPEQLNEQLVTLSLLPESRWKNLLNLDVIKKKNKPKEPPKVPKSAPFFIPTIPGLVPRYAAPEQNNDPQQSKVVNLGVLAQKSDFCLKLEEGLVNNKYDTALNLLKESGPSGIETELRSLSPDCGGSIEVMQSFLKMIGMMLDRKRDFELAQAYLALFLKLHLKMLPSEPVLLEEITNLSSQVEENWTHLQSLFNQSMCILNYLKSALL

SEQ ID NO: 69822 - protein, 951 aa, Homo sapiens; identical to SEQ ID NO: 69821

SEQ ID NO: 69823 - protein, 412 aa, Homo sapiens
MAGSVGLALCGQTLVVRGGSRFLATSIASSDDDSLFIYDCSAAEKKSQENKGEDAPLDQGSGAILASTFSKSGSYFALTDDSKRLILFRTKPWQCLSVRTVARRCTALTFIASEEKVLVADKSGDVYSFSVLEPHGCGRLELGHLSMLLDVAVSPDDRFILTADRDEKIRVSWAAAPHSIESFCLGHTEFVSRISVVPTQPGLLLSSSGDGTLRLWEYRSGRQLHCCHLASLQELVDPQAPQKFAASRIAFWCQENCVALLCDGTPVVYIFQLDARRQQLVYRQQLAFQHQVWDVAFEETQGLWVLQDCQEAPLVLYRPVGDQWQSVPESTVLKKVSGVLRGNWAMLEGSAGADASFSSLYKATFDNVTSYLKKKEERLQQQLEKKQRRRSPPPGPDGHAKKMRPGEATLSC

SEQ ID NO: 69824 - protein, 412 aa, Homo sapiens; identical to SEQ ID NO: 69823

SEQ ID NO: 69825 - protein, 677 aa, Homo sapiens
MAAHHRQNTAGRRKVQVSYVIRDEVEKYNRNGVNALQLDPALNRLFTAGRDSIIRIWSVNQHKQDPYIASMEHHTDWVNDIVLCCNGKTLISASSDTTVKVWNAHKGFCMSTLRTHKDYVKALAYAKDKELVASAGLDRQIFLWDVNTLTALTASNNTVTTSSLSGNKDSIYSLAMNQLGTIIVSGSTEKVLRVWDPRTCAKLMKLKGHTDNVKALLLNRDGTQCLSGSSDGTIRLWSLGQQRCIATYRVHDEGVWALQVNDAFTHVYSGGRDRKIYCTDLRNPDIRVLICEEKAPVLKMELDRSADPPPAIWVATTKSTVNKWTLKGIHNFRASGDYDNDCTNPITPLCTQPDQVIKGGASIIQCHILNDKRHILTKDTNNNVAYWDVLKACKVEDLGKVDFEDEIKKRFKMVYVPNWFSVDLKTGMLTITLDESDCFAAWVSAKDAGFSSPDGSDPKLNLGGLLLQALLEYWPRTHVNPMDEEENEVNHVNGEQENRVQKGNGYFQVPPHTPVIFGEAGGRTLFRLLCRDSGGETESMLLNETVPQWVIDITVDKNMPKFNKIPFYLQPHASSGAKTLKKDRLSASDMLQVRKVMEHVYEKIINLDNESQTTSSSNNEKPGEQEKEEDIAVLAEEKIELLCQDQVLDPNMDLRTVKHFIWKSGGDLTLHYRQKST

SEQ ID NO: 69826 - protein, 595 aa, Homo sapiens
MECQSAQVISASSDTTVKVWNAHKGFCMSTLRTHKDYVKALAYAKDKELVASAGLDRQIFLWDVNTLTALTASNNTVTTSSLSGNKDSIYSLAMNQLGTIIVSGSTEKVLRVWDPRTCAKLMKLKGHTDNVKALLLNRDGTQCLSGSSDGTIRLWSLGQQRCIATYRVHDEGVWALQVNDAFTHVYSGGRDRKIYCTDLRNPDIRVLICEEKAPVLKMELDRSADPPPAIWVATTKSTVNKWTLKGIHNFRASGDYDNDCTNPITPLCTQPDQVIKGGASIIQCHILNDKRHILTKDTNNNVAYWDVLKACKVEDLGKVDFEDEIKKRFKMVYVPNWFSVDLKTGMLTITLDESDCFAAWVSAKDAGFSSPDGSDPKLNLGGLLLQALLEYWPRTHVNPMDEEENEVNHVNGEQENRVQKGNGYFQVPPHTPVIFGEAGGRTLFRLLCRDSGGETESMLLNETVPQWVIDITVDKNMPKFNKIPFYLQPHASSGAKTLKKDRLSASDMLQVRKVMEHVYEKIINLDNESQTTSSSNNEKPGEQEKEEDIAVLAEEKIELLCQDQVLDPNMDLRTVKHFIWKSGGDLTLHYRQKST

SEQ ID NO: 69827 - protein, 121 aa, Homo sapiens
MPKFNKIPFYLQPHASSGAKTLKKDRLSASDMLQVRKVMEHVYEKIINLDNESQTTSSSNNEKPGEQEKEEDIAVLAEEKIELLCQDQVRVLDPNMDLRTVKHFIWKSGGDLTLHYRQKST

SEQ ID NO: 69828 - protein, 402 aa, Homo sapiens
MAAHHRQNTAGRRKVQCLSGSSDGTIRLWSLGQQRCIATYRVHDEGVWALQVNDAFTHVYSGGRDRKIYCTDLRNPDIRVLICEEKAPVLKMELDRSADPPPAIWVATTKSTVNKWACKVEDLGKVDFEDEIKKRFKMVYVPNWFSVDLKTGMLTITLDESDCFAAWVSAKDAGFSSPDGSDPKLNLGGLLLQALLEYWPRTHVNPMDEEENEVNHVNGEQENRVQKGNGYFQVPPHTPVIFGEAGGRTLFRLLCRDSGGETESMLLNETVPQWVIDITVDKNMPKFNKIPFYLQPHASSGAKTLKKDRLSASDMLQVRKVMEHVYEKIINLDNESQTTSSSNNEKPGEQEKEEDIAVLAEEKIELLCQDQVLDPNMDLRTVKHFIWKSGGDLTLHYRQKST

SEQ ID NO: 69829 - protein, 216 aa, Homo sapiens
MDALEDYVWPRATSELILLPVTGLECVGDRLLAGEGPDVLVYSLDFGGHLRMIKRVQNLLGHYLIHGFRVRPEPNGDLDLEAMVAVFGSKGLRVVKISWGQGHFWELWRSGLWNMSDWIWDARWLEGNIALALGHNSVVLYDPVVGCILQEVPCTDRCTLSSACLIGDAWKELTIVAGAVSNQLLVWYPATAFTLYLSARPTPFCCVLTPRMCTRL

SEQ ID NO: 69830 - protein, 1151 aa, Homo sapiens
MGSAARWEGSFSREFSSLLSRGCLSTSRIDMDALEDYVWPRATSELILLPVTGLECVGDRLLAGEGPDVLVYSLDFGGHLRMIKRVQNLLGHYLIHGFRVRPEPNGDLDLEAMVAVFGSKGLRVVKISWGQGHFWELWRSGLWNMSDWIWDARWLEGNIALALGHNSVVLYDPVVGCILQEVPCTDRCTLSSACLIGDAWKELTIVAGAVSNQLLVWYPATALADNKPVAPDRRISGHVGIIFSMSYLESKGLLATASEDRSVRIWKVGDLRVPGGRVQNIGHCFGHSARVWQVKLLENYLISAGEDCVCLVWSHEGEILQAFRGHQGRGIRAIAAHERQAWVITGGDDSGIRLWHLVGRGYRGLGVSALCFKSRSRPGTLKAVTLAGSWRLLAVTDTGALYLYDVEVKCWEQLLEDKHFQSYCLLEAAPGPEGFGLCAMANGEGRVKVVPINTPTAAVDQTLFPGKVHSLSWALRGYEELLLLASGPGGVVACLEISAAPSGKAIFVKERCRYLLPPSKQRWHTCSAFLPPGDFLVCGDRRGSVLLFPSRPGLLKDPGVGGKARAGAGAPVVGSGSSGGGNAFTGLGPVSTLPSLHGKQGVTSVTCHGGYVYTTGRDGAYYQLFVRDGQLQPVLRQKSCRGMNWLAGLRIVPDGSMVILGFHANEFVVWNPRSHEKLHIVNCGGGHRSWAFSDTEAAMAFAYLKDGDVMLYRALGGCTRPHVILREGLHGREITCVKRVGTITLGPEYGVPSFMQPDDLEPGSEGPDLTDIVITCSEDTTVCVLALPTTTGSAHALTAVCNHISSVRAVAVWGIGTPGGPQDPQPGLTAHVVSAGGRAEMHCFSIMVTPDPSTPSRLACHVMHLSSHRLDEYWDRQRNRHRMVKVDPETRYMSLAVCELDQPGLGPLVAAACSDGAVRLFLLQDSGRILQLLAETFHHKRCVLKVHSFTHEAPNQRRRLLLCSAATDGSLAFWDLTTMLDHDSTVLEPPVDPGLPYRLGTPSLTLQAHSCGINSLHTLPTREGHHLVASGSEDGSLHVFVLAVEMLQLEEAVGEAGLVPQLRVLEEYSVPCAHAAHVTGLKILSPSIMVSASIDQRLTFWRLGHGEPTFMNSTVFHVPDVADMDCWPVSPEFGHRCALGGQGLEVYNWYD

SEQ ID NO: 69831 - protein, 1070 aa, Homo sapiens
MIKRVQNLLGHYLIHGFRVRPEPNGDLDLEAMVAVFGSKGLRVVKISWGQGHFWELWRSGLWNMSDWIWDARWLEGNIALALGHNSVVLYDPVVGCILQEVPCTDRCTLSSACLIGDAWKELTIVAGAVSNQLLVWYPATALADNKPVAPDRRISGHVGIIFSMSYLESKGLLATASEDRSVRIWKVGDLRVPGGRVQNIGHCFGHSARVWQVKLLENYLISAGEDCVCLVWSHEGEILQAFRGHQGRGIRAIAAHERQAWVITGGDDSGIRLWHLVGRGYRGLGVSALCFKSRSRPGTLKAVTLAGSWRLLAVTDTGALYLYDVEVKCWEQLLEDKHFQSYCLLEAAPGPEGFGLCAMANGEGRVKVVPINTPTAAVDQTLFPGKVHSLSWALRGYEELLLLASGPGGVVACLEISAAPSGKAIFVKERCRYLLPPSKQRWHTCSAFLPPGDFLVCGDRRGSVLLFPSRPGLLKDPGVGGKARAGAGAPVVGSGSSGGGNAFTGLGPVSTLPSLHGKQGVTSVTCHGGYVYTTGRDGAYYQLFVRDGQLQPVLRQKSCRGMNWLAGLRIVPDGSMVILGFHANEFVVWNPRSHEKLHIVNCGGGHRSWAFSDTEAAMAFAYLKDGDVMLYRALGGCTRPHVILREGLHGREITCVKRVGTITLGPEYGVPSFMQPDDLEPGSEGPDLTDIVITCSEDTTVCVLALPTTTGSAHALTAVCNHISSVRAVAVWGIGTPGGPQDPQPGLTAHVVSAGGRAEMHCFSIMVTPDPSTPSRLACHVMHLSSHRLDEYWDRQRNRHRMVKVDPETRYMSLAVCELDQPGLGPLVAAACSDGAVRLFLLQDSGRILQLLAETFHHKRCVLKVHSFTHEAPNQRRRLLLCSAATDGSLAFWDLTTMLDHDSTVLEPPVDPGLPYRLGTPSLTLQAHSCGINSLHTLPTREGHHLVASGSEDGSLHVFVLAVEMLQLEEAVGEAGLVPQLRVLEEYSVPCAHAAHVTGLKILSPSIMVSASIDQRLTFWRLGHGEPTFMNSTVFHVPDVADMDCWPVSPEFGHRCALGGQGLEVYNWYD

SEQ ID NO: 69832 - protein, 1518 aa, Homo sapiens
MAAVGSGGYARNDAGEKLPSVMAGVPARRGQSSPPPAPPICLRRRTRLSTASEETVQNRVSLEKVLGITAQNSSGLTCDPGTGHVAYLAGCVVVILDPKENKQQHIFNTARKSLSALAFSPDGKYIVTGENGHRPAVRIWDVEEKNQVAEMLGHKYGVACVAFSPNMKHIVSMGYQHDMVLNVWDWKKDIVVASNKVSCRVIALSFSEDSSYFVTVGNRHVRFWFLEVSTETKVTSTVPLVGRSGILGELHNNIFCGVACGRGRMAGSTFCVSYSGLLCQFNEKRVLEKWINLKVSLSSCLCVSQELIFCGCTDGIVRIFQAHSLHYLANLPKPHYLGVDVAQGLEPSFLFHRKAEAVYPDTVALTFDPIHQWLSCVYKDHSIYIWDVKDINRVGKVWSELFHSSYVWNVEVYPEFEDQRACLPSGSFLTCSSDNTIRFWNLDSSPDSHWQKNIFSNTLLKVVYVENDIQHLQDMSHFPDRGSENGTPMDVKAGVRVMQVSPDGQHLASGDRSGNLRIHELHFMDELVKVEAHDAEVLCLEYSKPETGLTLLASASRDRLIHVLNVEKNYNLEQTLDDHSSSITAIKFAGNRDIQMISCGADKSIYFRSAQQGSDGLHFVRTHHVAEKTTLYDMDIDITQKYVAVACQDRNVRVYNTVNGKQKKCYKGSQGDEGSLLKVHVDPSGTFLATSCSDKSISVIDFYSGECIAKMFGHSEIITSMKFTYDCHHLITVSGDSCVFIWHLGPEITNCMKQHLLEIDHRQQQQHTNDKKRSGHPRQDTYVSTPSEIHSLSPGEQTEDDLEEECEPEEMLKTPSKDSLDPDPRCLLTNGKLPLWAKRLLGDDDVADGLAFHAKRSYQPHGRWAERAGQEPLKTILDAQDLDCYFTPMKPESLENSILDSLEPQSLASLLSESESPQEAGRGHPSFLPQQKESSEASELILYSLEAEVTVTGTDSQYCRKEVEAGPGDQQGDSYLRVSSDSPKDQSPPEDSGESEADLECSFAAIHSPAPPPDPAPRFATSLPHFPGCAGPTEDELSLPEGPSVPSSSLPQTPEQEKFLRHHFETLTESPCRALGDVEASEAEDHFFNPRLSISTQFLSSLQKASRFTHTFPPRATQCLVKSPEVKLMDRGGSQPRAGTGYASPDRTHVLAAGKAEETLEAWRPPPPCLTSLASCVPASSVLPTDRNLPTPTSAPTPGLAQGVHAPSTCSYMEATASSRARISRSISLGDSEGPIVATLAQPLRRPSSVGELASLGQELQAITTATTPSLDSEGQEPALRSWGNHEARANLRLTLSSACDGLLQPPVDTQPGVTVPAVSFPAPSPVEESALRLHGSAFRPSLPAPESPGLPAHPSNPQLPEARPGIPGGTASLLEPTSGALGLLQGSPARWSEPWVPVEALPPSPLELSRVGNILHRLQTTFQEALDLYRVLVSSGQVDTGQQQARTELVSTFLWIHSQLEAECLVGTSVAPAQALPSPGPPSPPTLYPLASPDLQALLEHYSELLVQAVRRKARGH

SEQ ID NO: 69833 - protein, 414 aa, Homo sapiens
MAAVGSGGYARNDAGEKLPSVMAGVPARRGQSSPPPAPPICLRRRTRLSTASEETVQNRVSLEKVLGITAQNSSGLTCDPGTGHVAYLAGCVVVILDPKENKQQHIFNTARKSLSALAFSPDGKYIVTGENGHRPAVRIWDVEEKNQVAEMLGHKYGVACVAFSPNMKHIVSMGYQHDMVLNVWDWKKDIVVASNKVSCRVIALSFSEDSSYFVTVGNRHVRFWFLEVSTETKVTSTVPLVGRSGILGELHNNIFCGVACGRGRMAGSTFCVSYSGLLCQFNEKRVLEKWINLKVSLSSCLCVSQELIFCGCTDGIVRIFQAHSLHYLANLPKPHYLGVDVAQGLEPSFLFHRKAEAVYPDTVALTFDPIHQWLSCVYKDHSIYIWDVKDINRVGKVWSELFHSSYVWNVEALS

SEQ ID NO: 69834 - protein, 483 aa, Homo sapiens
MAAVGSGGYARNDAGEKLPSVMAGVPARRGQSSPPPAPPICLRRRTRLSTASEETVQNRVSLEKVLGITAQNSSGLTCDPGTGHVAYLAGCVVVILDPKENKQQHIFNTARKSLSALAFSPDGKYIVTGENGHRPAVRIWDVEEKNQVAEMLGHKYGVACVAFSPNMKHIVSMGYQHDMVLNVWDWKKDIVVASNKVSCRVIALSFSEDSSYFVTVGNRHVRFWFLEVSTETKVTSTVPLVGRSGILGELHNNIFCGVACGRGRMAGSTFCVSYSGLLCQFNEKRVLEKWINLKVSLSSCLCVSQELIFCGCTDGIVRIFQAHSLHYLANLPKPHYLGVDVAQGLEPSFLFHRKAEAVYPDTVALTFDPIHQWLSCVYKDHSIYIWDVKDINRVGKVWSELFHSSYVWNVEVYPEFEDQRACLPSGSFLTCSSDNTIRFWNLDSSPDSHWQKNIFSNLAPALQMCGRGHSRQPNTPSPGEIAS

SEQ ID NO: 69835 - protein, 1523 aa, Homo sapiens
MAAVGSGGYARNDAGEKLPSVMAGVPARRGQSSPPPAPPICLRRRTRLSTASEETVQNRVSLEKVLGITAQNSSGLTCDPGTGHVAYLAGCVVVILDPKENKQQHIFNTARKSLSALAFSPDGKYIVTGENGHRPAVRIWDVEEKNQVAEMLGHKYGVACVAFSPNMKHIVSMGYQHDMVLNVWDWKKDIVVASNKVSCRVIALSFSEDSSYFVTVGNRHVRFWFLEVSTETKVTSTVPLVGRSGILGELHNNIFCGVACGRGRMAGSTFCVSYSGLLCQFNEKRVLEKWINLKVSLSSCLCVSQELIFCGCTDGIVRIFQAHSLHYLANLPKPHYLGVDVAQGLEPSFLFHRKAEAVYPDTVALTFDPIHQWLSCVYKDHSIYIWDVKDINRVGKVWSELFHSSYVWNVEVYPEFEDQRACLPSGSFLTCSSDNTIRFWNLDSSPDSHWQKNIFSNTLLKVVYVENDIQHLQDMSHFPDRGSENGTPMDVKAGVRVMQVSPDGQHLASGDRSGNLRIHELHFMDELVKVEAHDAEVLCLEYSKPETGLTLLASASRDRLIHVLNVEKNYNLEQTLDDHSSSITAIKFAGNRDIQMISCGADKSIYFRSAQQGSDGLHFVRTHHVAEKTTLYDMDIDITQKYVAVACQDRNVRVYNTVNGKQKKCYKGSQGDEGSLLKVHVDPSGTFLATSCSDKSISVIDFYSGECIAKMFGHSEIITSMKFTYDCHHLITVSGDSCVFIWHLGPEITNCMKQHLLEIDHRQQQQHTNDKKRSGHPRQDTYVSTPSEIHSLSPGEQTEDDLEEECEPEEMLKTPSKDSLDPDPRCLLTNGKLPLWAKRLLGDDDVADGLAFHAKRSYQPHGRWAERAGQEPLKTILDAQDLDCYFTPMKPESLENSILDSLEPQSLASLLSESESPQEAGRGHPSFLPQQKESSEASELILYSLEAEVTVTGTDSQYCRKEVEAGPGDQQGDSYLRVSSDSPKDQSPPEDSGESEADLECSFAAIHSPAPPPDPAPRFATSLPHFPGCAGPTEDELSLPEGPSVPSSSLPQTPEQEKFLRHHFETLTESPCRELFPAALGDVEASEAEDHFFNPRLSISTQFLSSLQKASRFTHTFPPRATQCLVKSPEVKLMDRGGSQPRAGTGYASPDRTHVLAAGKAEETLEAWRPPPPCLTSLASCVPASSVLPTDRNLPTPTSAPTPGLAQGVHAPSTCSYMEATASSRARISRSISLGDSEGPIVATLAQPLRRPSSVGELASLGQELQAITTATTPSLDSEGQEPALRSWGNHEARANLRLTLSSACDGLLQPPVDTQPGVTVPAVSFPAPSPVEESALRLHGSAFRPSLPAPESPGLPAHPSNPQLPEARPGIPGGTASLLEPTSGALGLLQGSPARWSEPWVPVEALPPSPLELSRVGNILHRLQTTFQEALDLYRVLVSSGQVDTGQQQARTELVSTFLWIHSQLEAECLVGTSVAPAQALPSPGPPSPPTLYPLASPDLQALLEHYSELLVQAVRRKARGH

SEQ ID NO: 69836 - protein, 433 aa, Homo sapiens
GGYARNDAGEKLPSVMAGVPARRGQSSPPPAPPICLRRRTRLSTASEETVQNRVSLEKVLGITAQNSSGLTCDPGTGHVAYLAGMWRMGPASESCGEDSIAPSLSRTVPGMYCVVVILDPKENKQQHIFNTARKSLSALAFSPDGKYIVTGENGHRPAVRIWDVEEKNQVAEMLGHKYGVACVAFSPNMKHIVSMGYQHDMVLNVWDWKKDIVVASNKVSCRVIALSFSEDSSYFVTVGNRHVRFWFLEVSTETKVTSTVPLVGRSGILGELHNNIFCGVACGRGRMAGSTFCVSYSGLLCQFNEKRVLEKWINLKVSLSSCLCVSQELIFCGCTDGIVRIFQAHSLHYLANLPKPHYLGVDVAQGLEPSFLFHRKAEAVYPDTVALTFDPIHQWLSCVYKDHSIYIWDVKDINRVGKVWSELFHSSYVWNVE

SEQ ID NO: 69837 - protein, 698 aa, Homo sapiens
MSAVVAQTLHVFGLRSHVANNIFYFDEQIIIFPSGNHCVKYNVDQKWQKFIPGSEKSQGMLALSISPNRRYLAISETVQEKPAITIYELSSIPCRKRKVLNNFDFQVQKFISMAFSPDSKYLLAQTSPPESNLVYWLWEKQKVMAIVRIDTQNNPVYQVSFSPQDNTQVCVTGNGMFKLLRFAEGTLKQTSFQRGEPQNYLAHTWVADDKIVVGTDTGKLFLFESGDQRWETSIMVKEPTNGSKSLDVIQESESLIEFPPVSSPLPSYEQMVAASSHSQMSMPQVFAIAAYSKGFACSAGPGRVLLFEKMEEKDFYRESREIRIPVDPQSNDPSQSDKQDVLCLCFSPSEETLVASTSKNQLYSITMSLTEISKGEPAHFEYLMYPLHSAPITGLATCIRKPLIATCSLDRSIRLWNYETNTLELFKEYQEEAYSISLHPSGHFIVVGFADKLRLMNLLIDDIRSFKEYSVRGCGECSFSNGGHLFAAVNGNVIHVYTTTSLENISSLKGHTGKIRSIVWNADDSKLISGGTDGAVYEWNLSTGKRETECVLKSCSYNCVTVSPDAKIIFAVGSDHTLKEIADSLILREISAFDVTYTAIVISHSGRMMFVGTSVGTIRAMKYPLPLQKEFNEYQAHAGPITKVSRALSPGTQSHTCLLRALFIPSTSQCLFSLLLLSYLFIHHSLNHHLLTMNILFV

SEQ ID NO: 69838 - protein, 166 aa, Homo sapiens
MSAVVAQTLHVFGLRSHVANNIFYFDEQIIIFPSGNHCVKYNVDQKWQKFIPGSEKSQGMLALSISPNRRYLAISETVQEKPAITIYELSSIPCRKRKVLNNFDFQVQKFISMAFSPDSKYLLAQTSPPESNLVYWLWEKQKVMAIVRIDTQNNPVYQVSFSPQDN

SEQ ID NO: 69839 - protein, 1490 aa, Homo sapiens
MAGNSLVLPIVLWGRKAPTHCISAVLLTDDGATIVTGCHDGQICLWDLSVELQINPRALLFGHTASITCLSKACASSDKQYIVSASESGEMCLWDVSDGRCIEFTKLACTHTGIQFYQFSVGNQREGRLLCHGHYPEILVVDATSLEVLYSLVSKISPDWISSMSIIRSHRTQEDTVVALSVTGILKVWIVTSEISDMQDTEPIFEEESKPIYCQNCQSISFCAFTQRSLLVVCSKYWRVFDAGDYSLLCSGPSENGQTWTGGDFVSSDKVIIWTENGQSYIYKLPASCLPASDSFRSDVGKAVENLIPPVQHILLDRKDKELLICPPVTRFFYGCREYFHKLLIQGDSSGRLNIWNISDTADKQGSEEGLAMTTSISLQEAFDKLNPCPAGIIDQLSVIPNSNEPLKVTASVYIPAHGRLVCGREDGSIVIVPATQTAIVQLLQGEHMLRRGWPPHRTLRGHRNKVTCLLYPHQVSARYDQRYLISGGVDFSVIIWDIFSGEMKHIFCVHGGEITQLLVPPENCSARVQHCICSVASDHSVGLLSLREKKCIMLASRHLFPIQVIKWRPSDDYLVVGCSDGSVYVWQMDTGALDRCVMGITAVEILNACDEAVPAAVDSLSHPAVNLKQAMTRRSLAALKNMAHHKLQTLATNLLASEASDKGNLPKYSHNSLMVQAIKTNLTDPDIHVLFFDVEALIIQLLTEEASRPNTALISPENLQKASGSSDKGGSFLTGKRAAVLFQQVKETIKENIKEHLLDDEEEDEEIMRQRREESDPEYRSSKSKPLTLLEYNLTMDTAKLFMSCLHAWGLNEVLDEVCLDRLGMLKPHCTVSFGLLSRGGHMSLMLPGYNQPACKLSHGKTEVGRKLPASEGVGKGTYGVSRAVTTQHLLSIISLANTLMSMTNATFIGDHMKKGPTRPPRPSTPDLSKARGSPPTSSNIVQGQIKQVAAPVVSARSDADHSGSDPPSAPALHTCFLVNEGWSQLAAMHCVMLPDLLGLDKFRPPLLEMLARRWQDRCLEVREAAQALLLAELRRIEQAGRKEAIDAWAPYLPQYIDHVISPGVTSEAAQTITTAPDASGPEAKVQEEEHDLVDDDITTGCLSSVPQMKKISTSYEERRKQATAIVLLGVIGAEFGAEIEPPKLLTRPRSSSQIPEGFGLTSGGSNYSLARHTCKALTFLLLQPPSPKLPPHSTIRRTAIDLIGRGFTVWEPYMDVSAVLMGLLELCADAEKQLANITMGLPLSPAADSARSARHALSLIATARPPAFITTIAKEVHRHTALAANTQSQQNMHTTTLARAKGEILRVIEILIEKMPTDVVDLLVEVMDIIMYCLEGSLVKKKGLQECFPAICRFYMVSYYERNHRIAVGARHGSVALYDIRTGKCQTIHGHKGPITAVAFAPDGRYLATYSNTDSHISFWQMNTSLLGSIGMLNSAPQLRCIKTYQVPPVQPASPGSHNALKLARLIWTSNRNVILMAHDGKEHRFMV

SEQ ID NO: 69840 - protein, 1457 aa, Homo sapiens
MAGNSLVLPIVLWGRKAPTHCISAVLLTDDGATIVTGCHDGQICLWDLSVELQINPRALLFGHTASITCLSKACASSDKQYIVSASESGEMCLWDVSDGRCIEFTKLACTHTGIQFYQFSVGNQREGRLLCHGHYPEILVVDATSLEVLYSLVSKISPDWISSMSIIRSHRTQEDTVVALSVTGILKVWIVTSEISDMQDTEPIFEEESKPIYCQNCQSISFCAFTQRSLLVVCSKYWRVFDAGDYSLLCSGPSENGQTWTGGDFVSSDKVIIWTENGQSYIYKLPASCLPASDSFRSDVGKAVENLIPPVQHILLDRKDKELLICPPVTRFFYGCREYFHKLLIQGDSSGRLNIWNISDTADKQGSEEGLAMTTSISLQEAFDKLNPCPAGIIDQLSVIPNSNEPLKVTASVYIPAHGRLVCGREDGSIVIVPATQTAIVQLLQGEHMLRRGWPPHRTLRGHRNKVTCLLYPHQVSARYDQRYLISGGVDFSVIIWDIFSGEMKHIFCVHGGEITQLLVPPENCSARVQHCICSVASDHSVGLLSLREKKCIMLASRHLFPIQVIKWRPSDDYLVVGCSDGSVYVWQMDTGALDRCVMGITAVEILNACDEAVPAAVDSLSHPAVNLKQAMTRRSLAALKNMAHHKLQTLATNLLASEASDKGNLPKYSHNSLMVQAIKTNLTDPDIHVLFFDVEALIIQLLTEEASRPNTALISPENLQKASGSSDKGGSFLTGKRAAVLFQQVKETIKENIKEHLLDDEEEDEEIMRQRREESDPEYRSSKSKPLTLLEYNLTMDTAKLFMSCLHAWGLNEVLDEVCLDRLGMLKPHCTVSFGLLSRGGHMSLMLPGYNQPACKLSHGKTEVGRKLPASEGVGKGTYGVSRAVTTQHLLSIISLANTLMSMTNATFIGDHMKKGPTRPPRPSTPDLSKARGSPPTSSNIVQGQIKQGWSQLAAMHCVMLPDLLGLDKFRPPLLEMLARRWQDRCLEVREAAQALLLAELRRIEQAGRKEAIDAWAPYLPQYIDHVISPGVTSEAAQTITTAPDASGPEAKVQEEEHDLVDDDITTGCLSSVPQMKKISTSYEERRKQATAIVLLGVIGAEFGAEIEPPKLLTRPRSSSQIPEGFGLTSGGSNYSLARHTCKALTFLLLQPPSPKLPPHSTIRRTAIDLIGRGFTVWEPYMDVSAVLMGLLELCADAEKQLANITMGLPLSPAADSARSARHALSLIATARPPAFITTIAKEVHRHTALAANTQSQQNMHTTTLARAKGEILRVIEILIEKMPTDVVDLLVEVMDIIMYCLEGSLVKKKGLQECFPAICRFYMVSYYERNHRIAVGARHGSVALYDIRTGKCQTIHGHKGPITAVAFAPDGRYLATYSNTDSHISFWQMNTSLLGSIGMLNSAPQLRCIKTYQVPPVQPASPGSHNALKLARLIWTSNRNVILMAHDGKEHRFMV

SEQ ID NO: 69841 - protein, 1457 aa, Homo sapiens; identical to SEQ ID NO: 69840

SEQ ID NO: 69842 - protein, 815 aa, Homo sapiens
MAGNSLVLPIVLWGRKAPTHCISAVLLTDDGATIVTGCHDGQICLWDLSVELQINPRALLFGHTAVLFQQVKETIKENIKEHLLDDEEEDEEIMRQRREESDPEYRSSKSKPLTLLEYNLTMDTAKLFMSCLHAWGLNEVLDEVCLDRLGMLKPHCTVSFGLLSRGGHMSLMLPGYNQPACKLSHGKTEVGRKLPASEGVGKGTYGVSRAVTTQHLLSIISLANTLMSMTNATFIGDHMKKGPTRPPRPSTPDLSKARGSPPTSSNIVQGQIKQVAAPVVSARSDADHSGSDPPSAPALHTCFLVNEGWSQLAAMHCVMLPDLLGLDKFRPPLLEMLARRWQDRCLEVREAAQALLLAELRRIEQAGRKEAIDAWAPYLPQYIDHVISPGVTSEAAQTITTAPDASGPEAKVQEEEHDLVDDDITTGCLSSVPQMKKISTSYEERRKQATAIVLLGVIGAEFGAEIEPPKLLTRPRSSSQIPEGFGLTSGGSNYSLARHTCKALTFLLLQPPSPKLPPHSTIRRTAIDLIGRGFTVWEPYMDVSAVLMGLLELCADAEKQLANITMGLPLSPAADSARSARHALSLIATARPPAFITTIAKEVHRHTALAANTQSQQNMHTTTLARAKGEILRVIEILIEKMPTDVVDLLVEVMDIIMYCLEGSLVKKKGLQECFPAICRFYMVSYYERNHRIAVGARHGSVALYDIRTGKCQTIHGHKGPITAVAFAPDGRYLATYSNTDSHISFWQMNTSLLGSIGMLNSAPQLRCIKTYQVPPVQPASPGSHNALKLARLIWTSNRNVILMAHDGKEHRFMV

SEQ ID NO: 69843 - protein, 1102 aa, Homo sapiens
MRTSLQAVALWGQKAPPHSITAIMITDDQRTIVTGSQEGQLCLWNLSHELKISAKELLFGHSASVTCLARARDFSKQPYIVSAAENGEMCVWNVTNGQCMEKATLPYRHTAICYYHCSFRMTGEGWLLCCGEYQDVLIIDAKTLAVVHSFRSSQFPDWINCMCIVHSMRIQEDSLLVVSVAGELKVWDLSSSINSIQEKQDVYEKESKFLESLNCQTIRFCTYTERLLLVVFSKCWKVYDYCDFSLLLTEVSRNGQFFAGGEVIAAHRILIWTEDGHSYIYQLLNSGLSKSIYPADGRVLKETIYPHLLCSTSVQENKEQSRPFVMGYMNERKEPFYKVLFSGEVSGRITLWHIPDVPVSKFDGSPREIPVTATWTLQDNFDKHDTMSQSIIDYFSGLKDGAGTAVVTSSEYIPSLDKLICGCEDGTIIITQALNAAKARLLEGGSLVKDSPPHKVLKGHHQSVTSLLYPHGLSSKLDQSWMLSGDLDSCVILWDIFTEEILHKFFLEAGPVTSLLMSPEKFKLRGEQIICCVCGDHSVALLHLEGKSCLLHARKHLFPVRMIKWHPVENFLIVGCADDSVYIWEIETGTLERHETGERARIILNCCDDSQLVKSVLPIASETLKHKSIEQRSSSPYQLGPLPCPGLQVESSCKVTDAKFCPRPFNVLPVKTKWSNVGFHILLFDLENLVELLLPTPLSDVDSSSSFYGGEVLRRAKSTVEKKTLTLRKSKTACGPLSAEALAKPITESLAQGDNTIKFSEENDGIKRQKKMKISKKMQPKPSRKVDASLTIDTAKLFLSCLLPWGVDKDLDYLCIKHLNILKLQGPISLGISLNEDNFSLMLPGWDLCNSGMIKDYSGVNLFSRKVLDLSDKYTATLPNQVGIPRGLENNCDSLRESDTIVYLLSRLFLVNKLVNMPLELACRVGSSFRMESIHNKMRGAGNDILNMSSFYSCLRNGKNESHVPEADLSLLKLISCWRDQSVQVTEAIQAVLLAEVQQHMKSLGKIPVNSQPVSMAENGNCEMKQMLPKLEWTEELELQCVRNTLPLQTPVSPVKHDSNSNSANFQDVEDMPDRCALEESESPGEPRHHSWIAKVCPCKVS

SEQ ID NO: 69844 - protein, 1102 aa, Homo sapiens; identical to SEQ ID NO: 69843

SEQ ID NO: 69845 - protein, 1099 aa, Homo sapiens
MRTSLQAVALWGQKAPPHSITAIMITDDQRTIVTGSQEGQLCLWNLSHELKISAKELLFGHSASVTCLARARDFSKQPYIVSAAENGEMCVWNVTNGQCMEKATLPYRHTAICYYHCSFRMTGEGWLLCCGEYQDVLIIDAKTLAVVHSFRSSQFPDWINCMCIVHSMRIQDSLLVVSVAGELKVWDLSSSINSIQEKQDVYEKESKFLESLNCQTIRFCTYTERLLLVVFSKCWKVYDYCDFSLLLTEVSRNGQFFAGGEVIAAHRILIWTEDGHSYIYQLLNSGLSKSIYPADGRVLKETIYPHLLCSTSVQENKSRPFVMGYMNERKEPFYKVLFSGEVSGRITLWHIPDVPVSKFDGSPREIPVTATWTLQDNFDKHDTMSQSIIDYFSGLKDGAGTAVVTSSEYIPSLDKLICGCEDGTIIITQALNAAKARLLEGGSLVKDSPPHKVLKGHHQSVTSLLYPHGLSSKLDQSWMLSGDLDSCVILWDIFTEEILHKFFLEAGPVTSLLMSPEKFKLRGEQIICCVCGDHSVALLHLEGKSCLLHARKHLFPVRMIKWHPVENFLIVGCADDSVYIWEIETGTLERHETGERARIILNCCDDSQLVKSVLPIASETLKHKSIEQRSSSPYQLGPLPCPGLQVESSCKVTDAKFCPRPFNVLPVKTKWSNVGFHILLFDLENLVELLLPTPLSDVDSSSSFYGGEVLRRAKSTVEKKTLTLRKSKTACGPLSAEALAKPITESLAQGDNTIKFSEENDGIKRQKKMKISKKMQPKPSRKVDASLTIDTAKLFLSCLLPWGVDKDLDYLCIKHLNILKLQGPISLGISLNEDNFSLMLPGWDLCNSGMIKDYSGVNLFSRKVLDLSDKYTATLPNQVGIPRGLENNCDSLRESDTIVYLLSRLFLVNKLVNMPLELACRVGSSFRMESIHNKMRGAGNDILNMSSFYSCLRNGKNESHVPEADLSLLKLISCWRDQSVQVTEAIQAVLLAEVQQHMKSLGKIPVNSQPVSMAENGNCEMKQMLPKLEWTEELELQCVRNTLPLQTPVSPVKHDSNSNSANFQDVEDMPDRCALEESESPGEPRHHSWIAKVCPCKVS

SEQ ID NO: 69846 - protein, 775 aa, Homo sapiens
MRTSLQAVALWGQKAPPHSITAIMITDDQRTIVTGSQEGQLCLWNLSHELKISAKELLFGHSASVTCLARARDFSKQPYIVSAAENGEMCVWNVTNGQCMEKATLPYRHTAICYYHCSFRMTGEGWLLCCGEYQDVLIIDAKTLAVVHSFRSSQFPDWINCMCIVHSMRIQEDSLLVVSVAGELKVWDLSSSINSIQEKQDVYEKESKFLESLNCQTIRFCTYTERLLLVVFSKCWKVYDYCDFSLLLTEVSRNGQFFAGGEVIAAHRILIWTEDGHSYIYQLLNSGLSKSIYPADGRVLKETIYPHLLCSTSVQENKEQSRPFVMGYMNERKEPFYKVLFSGEVSGRITLWHIPDVPVSKFDGSPREIPVTATWTLQDNFDKHDTMSQSIIDYFSGLKDGAGTAVVTSSEYIPSLDKLICGCEDGTIIITQALNAAKARLLEGGSLVKDSPPHKVLKGHHQSVTSLLYPHGLSSKLDQSWMLSGDLDSCVILWDIFTEEILHKFFLEAGPVTSLLMSPEKFKLRGEQIICCVCGDHSVALLHLEGKSCLLHARKHLFPVRMIKWHPVENFLIVGCADDSVYIWEIETGTLERHETGERARIILNCCDDSQLVKSVLPIASETLKHKSIEQRSSSPYQLGPLPCPGLQVESSCKVTDAKFCPRPFNVLPVKTKWSNVGFHILLFDLENLVELLLPTPLSDVDSSSSFYGGEVLRRAKSTVEKKTLTLRKSKTACGPLSAEALAKPITESLAQGDNTIKFSEENDGIKRQKKMKIS

SEQ ID NO: 69847 - protein, 342 aa, Homo sapiens
MRKETPPPLVPPAAREWNLPPNAPACMERQLEAARYRSDGALLLGASSLSGRCWAGSLWLFKDPCAAPNEGFCSAGVQTEAGVADLTWVGERGILVASDSGAVELWELDENETLIVSKFCKYEHDDIVSTVSVLSSGTQAVSGSKDICIKVWDLAQQVVLSSYRAHAAQVTCVAASPHKDSVFLSCSEDNRILLWDTRCPKPASQIGCSAPGYLPTSLAWHPQQSEVFVFGDENGTVSLVDTKSTSCVLSSAVHSQCVTGLVFSPHSVPFLASLSEDCSLAVLDSSLSELFRSQAHRDFVRDATWSPLNHSLLTTVGWDHQVVHHVVPTEPLPAPGPASVTE

SEQ ID NO: 69848 - protein, 278 aa, Homo sapiens
MRKETPPPLVPPAAREWNLPPNAPACMERQLEAARYRSDGALLLGASSLSGRCWAGSLWLFKDPCAAPNEGFCSAGVQTEAGVADLTWVGERGILVASDSAHAAQVTCVAASPHKDSVFLSCSEDNRILLWDTRCPKPASQIGCSAPGYLPTSLAWHPQQSEVFVFGDENGTVSLVDTKSTSCVLSSAVHSQCVTGLVFSPHSVPFLASLSEDCSLAVLDSSLSELFRSQAHRDFVRDATWSPLNHSLLTTVGWDHQVVHHVVPTEPLPAPGPASVTE

SEQ ID NO: 69849 - protein, 291 aa, Homo sapiens
  VARIANT 1: note = MOD_RES - Any amino acid
XCAAPNEGFCSAGVQTEAGVADLTWVGERGILVASDSGAVELWELDENETLIVSKFCKYEHDDIVSTVSVLSSGTQAVSGSKDICIKVWDLAQQVVLSSYRAHAAQVTCVAASPHKDSVFLSCSEDNRILLWDTRCPKPASQIGCSAPGYLPTSLAWHPQQSEVFVFGDENGTVSLVDTKSTSCVLSSAVHSQCVTGLVFSPHRLDLSQPSPPSDSVPFLASLSEDCSLAVLDSSLSELFRSQAHRDFVRDATWSPLNHSLLTTVGWDHQVVHHVVPTEPLPAPGPASVTE

SEQ ID NO: 69850 - protein, 313 aa, Homo sapiens
MKLTDSVLRSFRVAKVFRENSDKINCFDFSPNGETVISSSDDDSIVLYDCQEGKPKRTLYSKKYGVDLIRYTHAANTVVYSSNKIDDTIRYLSLHDNKYIRYFPGHSKRVVALSMSPVDDTFISGSLDKTIRLWDLRSPNCQGLMHLQGKPVCSFDPEGLIFAAGVNSEMVKLYDLRSFDKGPFATFKMQYDRTCEWTGLKFSNDGKLILISTNGSFIRLIDAFKGVVMHTFGGYANSKAVTLEASFTPDSQFIMIGSEDGKIHVWNGESGIKVAVLDGKHTGPITCLQFNPKFMTFASACSNMAFWLPTIDD

SEQ ID NO: 69851 - protein, 452 aa, Homo sapiens
MMGCFALQTVDTELTADSVEWCPLQGCRHLLACGTYQLRRPEDRPAGPQNKGGMEVKEPQVRLGRLFLYSFNDNNSIHPLVEVQRKDTSAILDMKWCHIPVAGHALLGLADASGSIQLLRLVESEKSHVLEPLSSLALEEQCLALSLDWSTGKTGRAGDQPLKIISSDSTGQLHLLMVNETRPRLQKVASWQAHQFEAWIAAFNYWHPEIVYSGGDDGLLRGWDTRVPGKFLFTSKRHTMGVCSIQSSPHREHILATGSYDEHILLWDTRNMKQPLADTPVQGGVWRIKWHPFHHHLLLAACMHSGFKILNCQKAMEERQEATVLTSHTLPDSLVYGADWSWLLFRSLQRAPSWSFPSNLGTKTADLKGASELPTPCHECREDNDGEGHARPQSGMKPLTEGMRKNGTWLQATAATTRDCGVNPEEADSAFSLLATCSFYDHALHLWEWEGN

SEQ ID NO: 69852 - protein, 357 aa, Homo sapiens
MSAFEKPQIIAHIQKGFNYTVFDCKWVPCSAKFVTMGNFARGTGVIQLYEIQHGDLKLLREIEKAKPIKCGTFGATSLQQRYLATGDFGGNLHIWNLEAPEMPVYSVKGHKEIINAIDGIGGLGIGEGAPEIVTGSRDGTVKVWDPRQKDDPVANMEPVQGENKRDCWTVAFGNAYNQEERVVCAGYDNGDIKLFDLRNMALRWETNIKNGVCSLEFDRKDISMNKLVATSLEGKFHVFDMRTQHPTKGFASVSEKAHKSTVWQVRHLPQNRELFLTAGGAGGLHLWKYEYPIQRSKKDSEGIEMGVAGSVSLLQNVTLSTQPISSLDWSPDKRGLCVCSSFDQTVRVLIVTKLNKI

SEQ ID NO: 69853 - protein, 288 aa, Homo sapiens
MSAFEKPQIIAHIQKGFNYTVFDCKWVPCSAKFVTMGNFARGTGVIQLYEIQHGDLKLLREIEKAKPIKCGTFGATSLQQRYLATGDFGGNLHIWNLEAPEMPVYSVKGHKEIINAIDGIGGLGIGEGAPEIVTGSRDGTVKVWDPRQKDDPVANMEPVQGENKRDCWTVAFGNAYNQEERVVCAGYDNGDIKLFDLRNMALRWETNIKNGVCSLEFDRKDISMNKLVATSLEGKFHVFDMRTQHPTKGFASVSEKAHKSTVWQVRHLPQNRELFLTAGGAGGLHLWK

SEQ ID NO: 69854 - protein, 1271 aa, Homo sapiens
  VARIANT 1: note = MOD_RES - Any amino acid
XRDFQSEVLLSAMELFHMTSGGDAAMFRDGKEPQPSAEAAAAPSLANISCFTQKLVEKLYSGMFSADPRHILLFILEHIMVVIETASSQRDTVLSTLYSSLNKVILYCLSKPQQSLSECLGLLSILGFLQEHWDVVFATYNSNISFLLCLMHCLLLLNERSYPEGFGLEPKPRMSTYHQVFLSPNEDVKEKREDLPSLSDVQHNIQKTVQTLWQQLVAQRQQTLEDAFKIDLSVKPGEREVKIEEVTPLWEETMLKAWQHYLASEKKSLASRSNVAHHSKVTLWSGSLSSAMKLMPGRQAKDPECKTEDFVSCIENYRRRGQELYASLYKDHVQRRKCGNIKAANAWARIQEQLFGELGLWSQGEETKPCSPWELDWREGPARMRKRIKRLSPLEALSSGRHKESQDKNDHISQTNAENQDELTLREAEGEPDEVGVDCTQLTFFPALHESLHSEDFLELCRERQVILQELLDKEKVTQKFSLVIVQGHLVSEGVLLFGHQHFYICENFTLSPTGDVYCTRHCLSNISDPFIFNLCSKDRSTDHYSCQCHSYADMRELRQARFLLQDIALEIFFHNGYSKFLVFYNNDRSKAFKSFCSFQPSLKGKATSEDTLSLRRYPGSDRIMLQKWQKRDISNFEYLMYLNTAAGRTCNDYMQYPVFPWVLADYTSETLNLANPKIFRDLSKPMGAQTKERKLKFIQRFKEVEKTEGDMTVQCHYYTHYSSAIIVASYLVRMPPFTQAFCALQGGSFDVADRMFHSVKSTWESASRENMSDVRELTPEFFYLPEFLTNCNGVEFGCMQDGTVLGDVQLPPWADGDPRKFISLHRKALESDFVSANLHHWIDLIFGYKQQGPAAVDAVNIFHPYFYGDRMDLSSITDPLIKSTILGFVSNFGQVPKQLFTKPHPARTAAGKPLPGKDVSTPVSLPGHPQPFFYSLQSLRPSQVTVKDMYLFSLGSESPKGAIGHIVSTEKTILAVERNKVLLPPLWNRTFSWGFDDFSCCLGSYGSDKVLMTFENLAAWGRCLCAVCPSPTTIVTSGTSTVVCVWELSMTKGRPRGLRLRQALYGHTQAVTCLAASVTFSLLVSGSQDCTCILWDLDHLTHVTRLPAHREGISAITISDVSGTIVSCAGAHLSLWNVNGQPLASITTAWGPEGAITCCCLMEGPAWDTSQIIITGSQDGMVRVWKTEDVKMSVPGRPAGEEPPAQPPSPRGHKWEKNLALSRELDVSIALTGKPSKTSPAVTALAVSRNHTKLLVGDERGRIFCWSADG

SEQ ID NO: 69855 - protein, 2267 aa, Homo sapiens
  VARIANT 1: note = MOD_RES - Any amino acid
XKLASQAIEPDVLRQFLGLGIPSSLSATTKILDSSHTHRGNPGCSGSQTAQGLAEGPWPAAPDAGLHPGVTQAPQPLGESQDSTTALQTALSLISMTSPRNLQPQRAALAPSFVEFDMSVEGYGCLFIPTLSTVMGTSTEYSVSGGIGTGATRPFPPPGGLTFSCWFLISRHGAATEGHPLRFLTLVRHLARTEQPFVCFSVSLCPDDLSLVVSTEEKEFQPLDVMEPEDDSEPSAGCQLQVRCGQLLACGQWHHLAVVVTKEMKRHCTVSTCLDGQVIGSAKMLYIQALPGPFLSMDPSAFVDVYGYIATPRVWKQKSSLIWRLGPTYLFEEAISMETLEVINKLGPRYCGNFQAVHVQGEDLDSEATPFVAEERVSFGLHIASSSITSVADIRNAYNEVDSRLIAKEMNISSRDNAMPVFLLRNCAGHLSGSLRTIGAVAVGQLGVRVFHSSPAASSLDFIGGPAILLGLISLATDDHTMYAAVKVLHSVLTSNAMCDFLMQHICGYQIMAFLLRKKASLLNHRIFQLILSVAGTVELGFRSSAITNTGVFQHILCNFELWMNTADNLELSLFSHLLEILQSPREGPRNAEAAHQAQLIPKLIFLFNEPSLIPSKISTIIGILACQLRGHFSTQDLLRIGLFVVYTLKPSSVNERQICMDGALDPSLPAGSQTSGKTIWLRNQLLEMLLSVISSPQLHLSSESKEEMFLKLGPDWFLLLLQGHLHASTTVLALKLLLYFLASPSLRTRFRDGLCAGSWVERSTEGVDIVMDNLKSQSPLPEQSPCLLPGFRVLNDFLAHHVHIPEVYLIVSTFFLQTPLTELMDGPKDSLDAMLQWLLQRHHQEEVLQAGLCTEGALLLLEMLKATMSQPLAGSEDGAWAQTFPASVLQFLSLVHRTYPQDPAWRAPEFLQTLAIAAFPLGAQKGVGAESTRNTSSPEAAAEGDSTVEGLQAPTKAHPARRKLREFTQLLLRELLLGASSPKQWLPLEVLLEASPDHATSQQKRDFQSEVLLSAMELFHMTSGGDAAMFRDGKEPQPSAEAAAAPSLANISCFTQKLVEKLYSGMFSADPRHILLFILEHIMVVIETASSQRDTVLSTLYSSLNKVILYCLSKPQQSLSECLGLLSILGFLQEHWDVVFATYNSNISFLLCLMHCLLLLNERSYPEGFGLEPKPRMSTYHQVFLSPNEDVKEKREDLPSLSDVQHNIQKTVQTLWQQLVAQRQQTLEDAFKIDLSVKPGEREVKIEEVTPLWEETMLKAWQHYLASEKKSLASRSNVAHHSKVTLWSGSLSSAMKLMPGRQAKDPECKTEDFVSCIENYRRRGQELYASLYKDHVQRRKCGNIKAANAWARIQEQLFGELGLWSQGEETKPCSPWELDWREGPARMRKRIKRLSPLEALSSGRHKESQDKNDHISQTNAENQDELTLREAEGEPDEVGVDCTQLTFFPALHESLHSEDFLELCRERQVILQELLDKEKVTQKFSLVIVQGHLVSEGVLLFGHQHFYICENFTLSPTGDVYCTRHCLSNISDPFIFNLCSKDRSTDHYSCQCHSYADMRELRQARFLLQDIALEIFFHNGYSKFLVFYNNDRSKAFKSFCSFQPSLKGKATSEDTLSLRRYPGSDRIMLQKWQKRDISNFEYLMYLNTAAGRTCNDYMQYPVFPWVLADYTSETLNLANPKIFRDLSKPMGAQTKERKLKFIQRFKEVEKTEGDMTVQCHYYTHYSSAIIVASYLVRMPPFTQAFCALQGGSFDVADRMFHSVKSTWESASRENMSDVRELTPEFFYLPEFLTNCNGVEFGCMQDGTVLGDVQLPPWADGDPRKFISLHRKALESDFVSANLHHWIDLIFGYKQQGPAAVDAVNIFHPYFYGDRMDLSSITDPLIKSTILGFVSNFGQVPKQLFTKPHPARTAAGKPLPGKDVSTPVSLPGHPQPFFYSLQSLRPSQVTVKDMYLFSLGSESPKGAIGHIVSTEKTILAVERNKVLLPPLWNRTFSWGFDDFSCCLGSYGSDKVLMTFENLAAWGRCLCAVCPSPTTIVTSGTSTVVCVWELSMTKGRPRGLRLRQALYGHTQAVTCLAASVTFSLLVSGSQDCTCILWDLDHLTHVTRLPAHREGISAITISDVSGTIVSCAGAHLSLWNVNGQPLASITTAWGPEGAITCCCLMEGPAWDTSQIIITGSQDGMVRVWKTEDVKMSVPGLQMGRKREAAEALAQQCQAEGGRGDWGLSSAYRRNPQGLLPHSSQGRASGNHSSAAQPSPWPMGLL

SEQ ID NO: 69856 - protein, 3184 aa, Homo sapiens
MEAEDLSKAEDRNEDPGSKNEGQLAAVQPDVPHGGQSSSPTALWDMLERKFLEYQQLTHKSPIERQKSLLSLLPLFLKAWEHSVGIICFPSLQRLAEDVSDQLAQQLQKALVGKPAEQARLAAGQLLWWKGDVDQDGYLLLKSVYVLTGTDSETLGRVAESGLPALLLQCLYLFFVFPLDKDELLESDLQVQKMFVQMLLNICSDSQGLEGLLSGSELQSLLIATTCLREHSCCFWKEPTFCVLRAISKAQNLSIIQYLQATDCVRLSLQNLSRLTDTLPAPEVSEAVSLILGFVKDSYPVSSALFLEFENSEGYPLLLKVLLRYDGLTQSEVDPHLEELLGLVVWLTTCGRSELKVFDSITYPQLEGFKFHHEASGVTVKNLQAFQVLQNVFHKASDSVLCIQVLSVIRTMWAWNARNFFLLEWTLQPISQFVEIMPLKPAPVQEHFFQLLEALVFELHYVPHEILRKVQHLIKESPGPSCTLMALQSILSIAGGDPLFTDIFRDSGLLGLLLAQLRKQAKIMRKSGNKVSTPGVQDPERELTCVMLRIVVTLLKGSVRNAVVLKDHGMVPFIKIFLDDECYREASLSILEQLSAINAEEYMSIIVGALCSSTQGELQLKLDLLKSLLRILVTPKGRAAFRVSSGFNGLLSLLSDLEGSLQEPPLQAWGAVSPRQTLELVLYTLCAVSAALHWDPVNGYFFRRNGLFEKLAEDLCLLGCFGALEEEGNLLRSWVDTKARPFADLLGTAFSSSGSLPPRIQSCLQILGFLDSMASGTLHLRGDLKESLRTKQGPVVDVQKGETGSDPQRNFKQWPDLEERMDEGDAAIMHPGVVCIMVRLLPRLYHEDHPQLSEEIQCSLASHIQSLVKSEKNRQVMCEAGLLGTLMASCHRALVTSGSPLHSRLIRIFEKLASQAIEPDVLRQFLGLGIPSSLSATTKILDSSHTHRGNPGCSGSQTAQGLAEGPWPAAPDAGLHPGVTQAPQPLGESQDSTTALQTALSLISMTSPRNLQPQRAALAPSFVEFDMSVEGYGCLFIPTLSTVMGTSTEYSVSGGIGTGATRPFPPPGGLTFSCWFLISRHGAATEGHPLRFLTLVRHLARTEQPFVCFSVSLCPDDLSLVVSTEEKEFQPLDVMEPEDDSEPSAGCQLQVRCGQLLACGQWHHLAVVVTKEMKRHCTVSTCLDGQVIGSAKMLYIQALPGPFLSMDPSAFVDVYGYIATPRVWKQKSSLIWRLGPTYLFEEAISMETLEVINKLGPRYCGNFQAVHVQGEDLDSEATPFVAEERVSFGLHIASSSITSVADIRNAYNEVDSRLIAKEMNISSRDNAMPVFLLRNCAGHLSGSLRTIGAVAVGQLGVRVFHSSPAASSLDFIGGPAILLGLISLATDDHTMYAAVKVLHSVLTSNAMCDFLMQHICGYQIMAFLLRKKASLLNHRIFQLILSVAGTVELGFRSSAITNTGVFQHILCNFELWMNTADNLELSLFSHLLEILQSPREGPRNAEAAHQAQLIPKLIFLFNEPSLIPSKISTIIGILACQLRGHFSTQDLLRIGLFVVYTLKPSSVNERQICMDGALDPSLPAGSQTSGKTIWLRNQLLEMLLSVISSPQLHLSSESKEEMFLKLGPDWFLLLLQGHLHASTTVLALKLLLYFLASPSLRTRFRDGLCAGSWVERSTEGVDIVMDNLKSQSPLPEQSPCLLPGFRVLNDFLAHHVHIPEVYLIVSTFFLQTPLTELMDGPKDSLDAMLQWLLQRHHQEEVLQAGLCTEGALLLLEMLKATMSQPLAGSEDGAWAQTFPASVLQFLSLVHRTYPQDPAWRAPEFLQTLAIAAFPLGAQKGVGAESTRNTSSPEAAAEGDSTVEGLQAPTKAHPARRKLREFTQLLLRELLLGASSPKQWLPLEVLLEASPDHATSQQKRDFQSEVLLSAMELFHMTSGGDAAMFRDGKEPQPSAEAAAAPSLANISCFTQKLVEKLYSGMFSADPRHILLFILEHIMVVIETASSQRDTVLSTLYSSLNKVILYCLSKPQQSLSECLGLLSILGFLQEHWDVVFATYNSNISFLLCLMHCLLLLNERSYPEGFGLEPKPRMSTYHQVFLSPNEDVKEKREDLPSLSDVQHNIQKTVQTLWQQLVAQRQQTLEDAFKIDLSVKPGEREVKIEEVTPLWEETMLKAWQHYLASEKKSLASRSNVAHHSKVTLWSGSLSSAMKLMPGRQAKDPECKTEDFVSCIENYRRRGQELYASLYKDHVQRRKCGNIKAANAWARIQEQLFGELGLWSQGEETKPCSPWELDWREGPARMRKRIKRLSPLEALSSGRHKESQDKNDHISQTNAENQDELTLREAEGEPDEVGVDCTQLTFFPALHESLHSEDFLELCRERQVILQELLDKEKVTQKFSLVIVQGHLVSEGVLLFGHQHFYICENFTLSPTGDVYCTRHCLSNISDPFIFNLCSKDRSTDHYSCQCHSYADMRELRQARFLLQDIALEIFFHNGYSKFLVFYNNDRSKAFKSFCSFQPSLKGKATSEDTLSLRRYPGSDRIMLQKWQKRDISNFEYLMYLNTAAGRTCNDYMQYPVFPWVLADYTSETLNLANPKIFRDLSKPMGAQTKERKLKFIQRFKEVEKTEGDMTVQCHYYTHYSSAIIVASYLVRMPPFTQAFCALQGGSFDVADRMFHSVKSTWESASRENMSDVRELTPEFFYLPEFLTNCNGVEFGCMQDGTVLGDVQLPPWADGDPRKFISLHRKALESDFVSANLHHWIDLIFGYKQQGPAAVDAVNIFHPYFYGDRMDLSSITDPLIKSTILGFVSNFGQVPKQLFTKPHPARTAAGKPLPGKDVSTPVSLPGHPQPFFYSLQSLRPSQVTVKDMYLFSLGSESPKGAIGHIVSTEKTILAVERNKVLLPPLWNRTFSWGFDDFSCCLGSYGSDKVLMTFENLAAWGRCLCAVCPSPTTIVTSGTSTVVCVWELSMTKGRPRGLRLRQALYGHTQAVTCLAASVTFSLLVSGSQDCTCILWDLDHLTHVTRLPAHREGISAITISDVSGTIVSCAGAHLSLWNVNGQPLASITTAWGPEGAITCCCLMEGPAWDTSQIIITGSQDGMVRVWKTEDVKMSVPGRPAGEEPPAQPPSPRGHKWEKNLALSRELDVSIALTGKPSKTSPAVTALAVSRNHTKLLVGDERGRIFCWSADG

SEQ ID NO: 69857 - protein, 654 aa, Homo sapiens
MEAEDLSKAEDRNEDPGSKNEGQLAAVQPDVPHGGQSSSPTALWDMLERKFLEYQQLTHKSPIERQKSLLSLLPLFLKAWEHSVGIICFPSLQRLAEDVSDQLAQQLQKALVGKPAEQARLAAGQLLWWKGDVDQDGYLLLKSVYVLTGTDSETLGRVAESGLPALLLQCLYLFFVFPLDKDELLESDLQVQKMFVQMLLNICSDSQGLEGLLSGSELQSLLIATTCLREHSCCFWKEPTFCVLRAISKAQNLSIIQYLQATDCVRLSLQNLSRLTDTLPAPEVSEAVSLILGFVKDSYPVSSALFLEFENSEGYPLLLKVLLRYDGLTQSEVDPHLEELLGLVVWLTTCGRSELKVFDSITYPQLEGFKFHHEASGVTVKNLQAFQVLQNVFHKASDSVLCIQVLSVIRTMWAWNARNFFLLEWTLQPISQFVEIMPLKPAPVQEHFFQLLEALVFELHYVPHEILRKVQHLIKESPGPSCTLMALQSILSIAGGDPLFTDIFRDSGLLGLLLAQLRKQAKIMRKSGNKVSTPGVQDPERELTCVMLRIVVTLLKGSVRNAVVLKDHGMVPFIKIFLDDECYREASLSILEQLSAINAEEYMSIIVGALCSSTQGELQLKLDLLKVISSPPLRLASLWICTKRSTFAQAFVFM

SEQ ID NO: 69858 - protein, 552 aa, Homo sapiens
  VARIANT 1: note = MOD_RES - Any amino acid
XDDTVVWAEECVACANWLWMNTADNLELSLFSHLLEILQSPREGPRNAEAAHQAQLIPKLIFLFNEPSLIPSKISTIIGILACQLRGHFSTQDLLRIGLFVVYTLKPSSVNERQICMDGALDPSLPAGSQTSGKTIWLRNQLLEMLLSVISSPQLHLSSESKEEMFLKLGPDWFLLLLQGHLHASTTVLALKLLLYFLASPSLRTRFRDGLCAGSWVERSTEGVDIVMDNLKSQSPLPEQSPCLLPGFRVLNDFLAHHVHIPEVYLIVSTFFLQTPLTELMDGPKDSLDAMLQWLLQRHHQEEVLQAGLCTEGALLLLEMLKATMSQPLAGSEDGAWAQTFPASVLQFLSLVHRTYPQDPAWRAPEFLQTLAIAAFPLGAQKGVGAESTRNTSSPEAAAEGDSTVEGLQAPTKAHPARRKLREFTQLLLRELLLGASSPKQWLPLEVLLEASPDHATSQQKRDFQSEVLLSAMELFHMTSGGDAAMFRDGKEPQPSAEAAAAPSLANISCFTQKLVEKLYSGMFSADPRHILLFILEHIMVISAPLQARDFS

SEQ ID NO: 69859 - protein, 1042 aa, Homo sapiens
MEAEDLSKAEDRNEDPGSKNEGQLAAVQPDVPHGGQSSSPTALWDMLERKFLEYQQLTHKSPIERQKSLLSLLPLFLKAWEHSVGIICFPSLQRLAEDVSDQLAQQLQKALVGKPAEQARLAAGQLLWWKGDVDQDGYLLLKSVYVLTGTDSETLGRVAESGLPALLLQCLYLFFVFPLDKDELLESDLQVQKMFVQMLLNICSDSQGLEGLLSGSELQSLLIATTCLREHSCCFWKEPTFCVLRAISKAQNLSIIQYLQATDCVRLSLQNLSRLTDTLPAPEVSEAVSLILGFVKDSYPVSSALFLEFENSEGYPLLLKVLLRYDGLTQSEVDPHLEELLGLVVWLTTCGRSELKVFDSITYPQLEGFKFHHEASGVTVKNLQAFQVLQNVFHKASDSVLCIQVLSVIRTMWAWNARNFFLLEWTLQPISQFVEIMPLKPAPVQEHFFQLLEALVFELHYVPHEILRKVQHLIKESPGPSCTLMALQSILSIAGGDPLFTDIFRDSGLLGLLLAQLRKQAKIMRKSGNKVSTPGVQDPERELTCVMLRIVVTLLKGSVRNAVVLKDHGMVPFIKIFLDDECYREASLSILEQLSAINAEEYMSIIVGALCSSTQGELQLKLDLLKSLLRILVTPKGRAAFRVSSGFNGLLSLLSDLEGSLQEPPLQAWGAVSPRQTLELVLYTLCAVSAALHWDPVNGYFFRRNGLFEKLAEDLCLLGCFGALEEEGNLLRSWVDTKARPFADLLGTAFSSSGSLPPRIQSCLQILGFLDSMASGTLHLRGDLKESLRTKQGPVVDVQKGETGSDPQRNFKQWPDLEERMDEGDAAIMHPGVVCIMVRLLPRLYHEDHPQLSEEIQCSLASHIQSLVKSEKNRQVMCEAGLLGTLMASCHRALVTSGSPLHSRLIRIFEKLASQAIEPDVLRQFLGLGIPSSLSATTKILDSSHTHRGNPGCSGSQTAQGLAEGPWPAAPDAGLHPGVTQAPQPLGESQDSTTALQTALSLISMTSPHIWKPNIWKDNLAQKPVAGDAAQCNIFPPASSVL

SEQ ID NO: 69860 - protein, 3176 aa, Homo sapiens
MEAEDLSKAEDRNEDPGSKNEGQLAAVQPDVPHGGQSSSPTALWDMLERKFLEYQQLTHKSPIERQKSLLSLLPLFLKAWEHSVGIICFPSLQRLAEDVSDQLAQQLQKALVGKPAEQARLAAGQLLWWKGDVDQDGYLLLKSVYVLTGTDSETLGRVAESGLPALLLQCLYLFFVFPLDKDELLESDLQVQKMFVQMLLNICSDSQGLEGLLSGSELQSLLIATTCLREHSCCFWKEPTFCVLRAISKAQNLSIIQYLQATDCVRLSLQNLSRLTDTLPAPEVSEAVSLILGFVKDSYPVSSALFLEFENSEGYPLLLKVLLRYDGLTQSEVDPHLEELLGLVVWLTTCGRSELKVFDSITYPQLEGFKFHHEASGVTVKNLQAFQVLQNVFHKASDSVLCIQVLSVIRTMWAWNARNFFLLEWTLQPISQFVEIMPLKPAPVQEHFFQLLEALVFELHYVPHEILRKVQHLIKESPGPSCTLMALQSILSIAGGDPLFTDIFRDSGLLGLLLAQLRKQAKIMRKSGNKVSTPGVQDPERELTCVMLRIVVTLLKGSVRNAVVLKDHGMVPFIKIFLDDECYREASLSILEQLSAINAEEYMSIIVGALCSSTQGELQLKLDLLKSLLRILVTPKGRAAFRVSSGFNGLLSLLSDLEGSLQEPPLQAWGAVSPRQTLELVLYTLCAVSAALHWDPVNGYFFRRNGLFEKLAEDLCLLGCFGALEEEGNLLRSWVDTKARPFADLLGTAFSSSGSLPPRIQSCLQILGFLDSMASGTLHLRGDLKESLRTKQGPVVDVQKGETGSDPQRNFKQWPDLEERMDEGDAAIMHPGVVCIMVRLLPRLYHEDHPQLSEEIQCSLASHIQSLVKSEKNRQVMCEAGLLGTLMASCHRALVTSGSPLHSRLIRIFEKLASQAIEPDVLRQFLGLGIPSSLSATTKILDSSHTHRGNPGCSGSQTAQGLAEGPWPAAPDAGLHPGVTQAPQPLGESQDSTTALQTALSLISMTSPRNLQPQRAALAPSFVEFDMSVEGYGCLFIPTLSTVMGTSTEYSVSGGIGTGATRPFPPPGGLTFSCWFLISRHGAATEGHPLRFLTLVRHLARTEQPFVCFSVSLCPDDLSLVVSTEEKEFQPLDVMEPEDDSEPSAGCQLQVRCGQLLACGQWHHLAVVVTKEMKRHCTVSTCLDGQVIGSAKMLYIQALPGPFLSMDPSAFVDVYGYIATPRVWKQKSSLIWRLGPTYLFEEAISMETLEVINKLGPRYCGNFQAVHVQGEDLDSEATPFVAEERVSFGLHIASSSITSVADIRNAYNEVDSRLIAKEMNISSRDNAMPVFLLRNCAGHLSGSLRTIGAVAVGQLGVRVFHSSPAASSLDFIGGPAILLGLISLATDDHTMYAAVKVLHSVLTSNAMCDFLMQHICGYQIMAFLLRKKASLLNHRIFQLILSVAGTVELGFRSSAITNTGVFQHILCNFELWMNTADNLELSLFSHLLEILQSPREGPRNAEAAHQAQLIPKLIFLFNEPSLIPSKISTIIGILACQLRGHFSTQDLLRIGLFVVYTLKPSSVNERQICMDGALDPSLPAGSQTSGKTIWLRNQLLEMLLSVISSPQLHLSSESKEEMFLKLGPDWFLLLLQGHLHASTTVLALKLLLYFLASPSLRTRFRDGLCAGSWVERSTEGVDIVMDNLKSQSPLPEQSPCLLPGFRVLNDFLAHHVHIPEVYLIVSTFFLQTPLTELMDGPKDSLDAMLQWLLQRHHQEEVLQAGLCTEGALLLLEMLKATMSQPLAGSEDGAWAQTFPASVLQFLSLVHRTYPQDPAWRAPEFLQTLAIAAFPLGAQKGVGAESTRNTSSPEAAAEGDSTVEGLQAPTKAHPARRKLREFTQLLLRELLLGASSPKQWLPLEVLLEASPDHATSQQKRDFQSEVLLSAMELFHMTSGGDAAMFRDGKEPQPSAEAAAAPSLANISCFTQKLVEKLYSGMFSADPRHILLFILEHIMVVIETASSQRDTVLSTLYSSLNKVILYCLSKPQQSLSECLGLLSILGFLQEHWDVVFATYNSNISFLLCLMHCLLLLNERSYPEGFGLEPKPRMSTYHQVFLSPNEDVKEKREDLPSLSDVQHNIQKTVQTLWQQLVAQRQQTLEDAFKIDLSVKPGEREVKIEEVTPLWEETMLKAWQHYLASEKKSLASRSNVAHHSKVTLWSGSLSSAMKLMPGRQAKDPECKTEDFVSCIENYRRRGQELYASLYKDHVQRRKCGNIKAANAWARIQEQLFGELGLWSQGEETKPCSPWELDWREGPARMRKRIKRLSPLEALSSGRHKESQDKNDHISQTNAENQDELTLREAEGEPDEVGVDCTQLTFFPALHESLHSEDFLELCRERQVILQELLDKEKVTQKFSLVIVQGHLVSEGVLLFGHQHFYICENFTLSPTGDVYCTRHCLSNISDPFIFNLCSKDRSTDHYSCQCHSYADMRELRQARFLLQDIALEIFFHNGYSKFLVFYNNDRSKAFKSFCSFQPSLKGKATSEDTLSLRRYPGSDRIMLQKWQKRDISNFEYLMYLNTAAGRTCNDYMQYPVFPWVLADYTSETLNLANPKIFRDLSKPMGAQTKERKLKFIQRFKEVEKTEGDMTVQCHYYTHYSSAIIVASYLVRMPPFTQAFCALQGGSFDVADRMFHSVKSTWESASRENMSDVRELTPEFFYLPEFLTNCNGVEFGCMQDGTVLGDVQLPPWADGDPRKFISLHRKALESDFVSANLHHWIDLIFGYKQQGPAAVDAVNIFHPYFYGDRMDLSSITDPLIKSTILGFVSNFGQVPKQLFTKPHPARTAAGKPLPGKDVSTPVSLPGHPQPFFYSLQSLRPSQVTVKDMYLFSLGSESPKGAIGHIVSTEKTILAVERNKVLLPPLWNRTFSWGFDDFSCCLGSYGSDKVLMTFENLAAWGRCLCAVCPSPTTIVTSGTSTVVCVWELSMTKGRPRGLRLRQALYGHTQAVTCLAASVTFSLLVSGSQDCTCILWDLDHLTHVTRLPAHREGISAITISDVSGTIVSCAGAHLSLWNVNGQPLASITTAWGPEGAITCCCLMEGPAWDTSQIIITGSQDGMVRVWKTEDVKMSVPGLQMGRKREAAEALAQQCQAEGGRGDWGLSSAYRRNPQGLLPHSSQGRASGNHSSAAQPSPWPMGLL

SEQ ID NO: 69861 - protein, 1052 aa, Homo sapiens
LNSDLLCHGMEAEDLSKAEDRNEDPGSKNEGQLAAVQPDVPHGGQSSSPTALWDMLERKFLEYQQLTHKSPIERQKSLLSLLPLFLKAWEHSVGIICFPSLQRLAEDVSDQLAQQLQKALVGKPAEQARLAAGQLLWWKGDVDQDGYLLLKSVYVLTGTDSETLGRVAESGLPALLLQCLYLFFVFPLDKDELLESDLQVQKMFVQMLLNICSDSQGLEGLLSGSELQSLLIATTCLREHSCCFWKEPTFCVLRAISKAQNLSIIQYLQATDCVRLSLQNLSRLTDTLPAPEVSEAVSLILGFVKDSYPVSSALFLEFENSEGYPLLLKVLLRYDGLTQSEVDPHLEELLGLVVWLTTCGRSELKVFDSITYPQLEGFKFHHEASGVTVKNLQAFQVLQNVFHKASDSVLCIQVLSVIRTMWAWNARNFFLLEWTLQPISQFVEIMPLKPAPVQEHFFQLLEALVFELHYVPHEILRKVQHLIKESPGPSCTLMALQSILSIAGGDPLFTDIFRDSGLLGLLLAQLRKQAKIMRKSGNKVSTPGVQDPERELTCVMLRIVVTLLKGSVRNAVVLKDHGMVPFIKIFLDDECYREASLSILEQLSAINAEEYMSIIVGALCSSTQGELQLKLDLLKSLLRILVTPKGRAAFRVSSGFNGLLSLLSDLEGSLQEPPLQAWGAVSPRQTLELVLYTLCAVSAALHWDPVNGYFFRRNGLFEKLAEDLCLLGCFGALEEEGNLLRSWVDTKARPFADLLGTAFSSSGSLPPRIQSCLQILGFLDSMASGTLHLRGDLKESLRTKQGPVVDVQKGETGSDPQRNFKQWPDLEERMDEGDAAIMHPGVVCIMVRLLPRLYHEDHPQLSEEIQCSLASHIQSLVKSEKNRQVMCEAGLLGTLMASCHRALVTSGSPLHSRLIRIFEKLASQAIEPDVLRQFLGLGIPSSLSATTKILDSSHTHRGNPGCSGSQTAQGLAEGPWPAAPDAGLHPGVTQAPQPLGESQDSTTALQTALSLISMTSPVAGSQTSGKTIWLRNQLLEMLLSVISSPQLHLSSE

SEQ ID NO: 69862 - protein, 624 aa, Homo sapiens
MLQKWQKRDISNFEYLMYLNTAAGRTCNDYMQYPVFPWVLADYTSETLNLANPKIFRDLSKPMGAQTKERKLKFIQRFKEVEKTEGDMTVQCHYYTHYSSAIIVASYLVRMPPFTQAFCALQGGSFDVADRMFHSVKSTWESASRENMSDVRELTPEFFYLPEFLTNCNGVEFGCMQDGTVLGDVQLPPWADGDPRKFISLHRKALESDFVSANLHHWIDLIFGYKQQGPAAVDAVNIFHPYFYGDRMDLSSITDPLIKSTILGFVSNFGQVPKQLFTKPHPARTAAGKPLPGKDVSTPVSLPGHPQPFFYSLQSLRPSQVTVKDMYLFSLGSESPKGAIGHIVSTEKTILAVERNKVLLPPLWNRTFSWGFDDFSCCLGSYGSDKVLMTFENLAAWGRCLCAVCPSPTTIVTSGTSTVVCVWELSMTKGRPRGLRLRQALYGHTQAVTCLAASVTFSLLVSGSQDCTCILWDLDHLTHVTRLPAHREGISAITISDVSGTIVSCAGAHLSLWNVNGQPLASITTAWGPEGAITCCCLMEGPAWDTSQIIITGSQDGMVRVWKTEDVKMSVPGRPAGEEPPAQPPTLSMADGTSMKRMSTHTRRAEQHAGNCDLVMPSCTRNYT

SEQ ID NO: 69863 - protein, 567 aa, Homo sapiens
MDDKDIDKELRQKLNFSYCEETEIEGQKKVEESREASSQTPEKGEVQDSEAKGTPPWTPLSNVHELDTSSEKDKESPDQILRTPVSHPLKCPETPAQPDSRSKLLPSDSPSTPKTMLSRLVISPTGKLPSRGPKHLKLTPAPLKDEMTSLALVNINPFTPESYKKLFLQSGGKRKIRGDLEEAGPEEGKGGLPAKRCVLRETNMASRYEKEFLEVEKIGVGEFGTVYKCIKRLDGCVYAIKRSMKTFTELSNENSALHEVYAHAVLGHHPHVVRYYSSWAEDDHMIIQNEYCNGGSLQAAISENTKSGNHFEEPKLKDILLQISLGLNYIHNSSMVHLDIKPSNIFICHKMQSESSGVIEEVENEADWFLSANVMYKIGDLGHATSINKPKVEEGDSRFLANEILQEDYRHLPKADIFALGLTIAVAAGAESLPTNGAAWHHIRKGNFPDVPQELSESFSSLLKNMIQPDAEQRPSAAALARNTVLRPSLGKTEELQQQLNLEKFKTATLERELREAQQAQSPQGYTHHGDTGVSGTHTGSRSTKRLVGGKSARSSSFTSGEREPLH

SEQ ID NO: 69864 - protein, 281 aa, Homo sapiens
MVTILMRAINSLGIHVLDSSRPTDPLSHSSNSSSEPAMFIEDKAVDTLAYLSDGDARAGLNGLQLAVLARLSSRKMFCKKSGQSYSPSRVLITENDVKEGLQRSHILYDRAGEEHYNCISALHKSMRGSDQNASLYWLARMLEGGEDPLYVARRLVRFASEDIGLADPSALTQAVAAYQGCHFIGMPECEVLLAQCVVYFARAPKSIEVYSAYNNVKACLRNHQGPLPPVPLHLRNAPTRLMKDLGYGKGYKYNPMYSEPVDQEYLPEELRGVDFFKQRRC

SEQ ID NO: 69865 - protein, 445 aa, Homo sapiens
MLQGKPLADTMRPDTLQDYFGQSKAVGQDTLLRSLLETNEIPSLILWGPPGCGKTTLAHIIASNSKKHSIRFVTLSATNAKTNDVRDVIKQAQNEKSFFKRKTILFIDEIHRFNKSQQDTFLPHVECGTITLIGATTENPSFQVNAALLSRCRVIVLEKLPVEAMVTILMRAINSLGIHVLDSSRPTDPLSHSSNSSSEPAMFIEDKAVDTLAYLSDGDARAGLNGLQLAVLARLSSRKMFCKKSGQSYSPSRVLITENDVKEGLQRSHILYDRAGEEHYNCISALHKSMRGSDQNASLYWLARMLEGGEDPLYVARRLVRFASEDIGLADPSALTQAVAAYQGCHFIGMPECEVLLAQCVVYFARAPKSIEVYSAYNNVKACLRNHQGPLPPVPLHLRNAPTRLMKDLGYGKGYKYNPMYSEPVDQEYLPEELRGVDFFKQRRC

SEQ ID NO: 69866 - protein, 640 aa, Homo sapiens
MEVSGPEDDPFLSQLHQVQCPVCQQMMPAAHINSHLDRCLLLHPAGHAEPAAGSHRAGERAKGPSPPGAKRRRLSESSALKQPATPTAAESSEGEGEEGDDGGETESRESYDAPPTPSGARLIPDFPVARSSSPGRKGSGKRPAAAAAAGSASPRSWDEAEAQEEEEAVGDGDGDGDADADGEDDPGHWDADAAEAATAFGASGGGRPHPRALAAEEIRQMLQGKPLADTMRPDTLQDYFGQSKAVGQDTLLRSLLETNEIPSLILWGPPGCGKTTLAHIIASNSKKHSIRFVTLSATNAKTNDVRDVIKQAQNEKSFFKRKTILFIDEIHRFNKSQQVNAALLSRCRVIVLEKLPVEAMVTILMRAINSLGIHVLDSSRPTDPLSHSSNSSSEPAMFIEDKAVDTLAYLSDGDARAGLNGLQLAVLARLSSRKMFCKKSGQSYSPSRVLITENDVKEGLQRSHILYDRAGEEHYNCISALHKSMRGSDQNASLYWLARMLEGGEDPLYVARRLVRFASEDIGLADPSALTQAVAAYQGCHFIGMPECEVLLAQCVVYFARAPKSIEVYSAYNNVKACLRNHQGPLPPVPLHLRNAPTRLMKDLGYGKGYKYNPMYSEPVDQEYLPEELRGVDFFKQRRC

SEQ ID NO: 69867 - protein, 665 aa, Homo sapiens
MEVSGPEDDPFLSQLHQVQCPVCQQMMPAAHINSHLDRCLLLHPAGHAEPAAGSHRAGERAKGPSPPGAKRRRLSESSALKQPATPTAAESSEGEGEEGDDGGETESRESYDAPPTPSGARLIPDFPVARSSSPGRKGSGKRPAAAAAAGSASPRSWDEAEAQEEEEAVGDGDGDGDADADGEDDPGHWDADAAEAATAFGASGGGRPHPRALAAEEIRQMLQGKPLADTMRPDTLQDYFGQSKAVGQDTLLRSLLETNEIPSLILWGPPGCGKTTLAHIIASNSKKHSIRFVTLSATNAKTNDVRDVIKQAQNEKSFFKRKTILFIDEIHRFNKSQQDTFLPHVECGTITLIGATTENPSFQVNAALLSRCRVIVLEKLPVEAMVTILMRAINSLGIHVLDSSRPTDPLSHSSNSSSEPAMFIEDKAVDTLAYLSDGDARAGLNGLQLAVLARLSSRKMFCKKSGQSYSPSRVLITENDVKEGLQRSHILYDRAGEEHYNCISALHKSMRGSDQNASLYWLARMLEGGEDPLYVARRLVRFASEDIGLADPSALTQAVAAYQGCHFIGMPECEVLLAQCVVYFARAPKSIEVYSAYNNVKACLRNHQGPLPPVPLHLRNAPTRLMKDLGYGKGYKYNPMYSEPVDQEYLPEELRGVDFFKQRRC

SEQ ID NO: 69868 - protein, 1432 aa, Homo sapiens
MSEKKLETTAQQRKCPEWMNVQNKRCAVEERKACVRKSVFEDDLPFLEFTGSIVYSYDASDCSFLSEDISMSLSDGDVVGFDMEWPPLYNRGKLGKVALIQLCVSESKCYLFHVSSMSVFPQGLKMLLENKAVKKAGVGIEGDQWKLLRDFDIKLKNFVELTDVANKKLKCTETWSLNSLVKHLLGKQLLKDKSIRCSNWSKFPLTEDQKLYAATDAYAGFIIYRNLEILDDTVQRFAINKEEEILLSDMNKQLTSISEEVMDLAKHLPHAFSKLENPRRVSILLKDISENLYSLRRMIIGSTNIETELRPSNNLNLLSFEDSTTGGVQQKQIREHEVLIHVEDETWDPTLDHLAKHDGEDVLGNKVERKEDGFEDGVEDNKLKENMERACLMSLDITEHELQILEQQSQEEYLSDIAYKSTEHLSPNDNENDTSYVIESDEDLEMEMLKHLSPNDNENDTSYVIESDEDLEMEMLKSLENLNSGTVEPTHSKCLKMERNLGLPTKEEEEDDENEANEGEEDDDKDFLWPAPNEEQVTCLKMYFGHSSFKPVQWKVIHSVLEERRDNVAVMATGYGKSLCFQYPPVYVGKIGLVISPLISLMEDQVLQLKMSNIPACFLGSAQSENVLTDIKLGKYRIVYVTPEYCSGNMGLLQQLEADIGITLIAVDEAHCISEWGHDFRDSFRKLGSLKTALPMVPIVALTATASSSIREDIVRCLNLRNPQITCTGFDRPNLYLEVRRKTGNILQDLQPFLVKTSSHWEFEGPTIIYCPSRKMTQQVTGELRKLNLSCGTYHAGMSFSTRKDIHHRFVRDEIQCVIATIAFGMGINKADIRQVIHYGAPKDMESYYQEIGRAGRDGLQSSCHVLWAPADINLNRHLLTEIRNEKFRLYKLKMMAKMEKYLHSSRCRRQIILSHFEDKQVQKASLGIMGTEKCCDNCRSRLDHCYSMDDSEDTSWDFGPQAFKLLSAVDILGEKFGIGLPILFLRGSNSQRLADQYRRHSLFGTGKDQTESWWKAFSRQLITEGFLVEVSRYNKFMKICALTKKGRNWLHKANTESQSLILQANEELCPKKLLLPSSKTVSSGTKEHCYNQVPVELSTEKKSNLEKLYSYKPCDKISSGSNISKKSIMVQSPEKAYSSSQPVISAQEQETQIVLYGKLVEARQKHANKMDVPPAILATNKILVDMAKMRPTTVENVKRIDGVSEGKAAMLAPLLEVIKHFCQTNSVQTDLFSSTKPQEEQKTSLVAKNKICTLSQSMAITYSLFQEKKMPLKSIAESRILPLMTIGMHLSQAVKAGCPLDLERAGLTPEVQKIIADVIRNPPVNSDMSKISLIRMLVPENIDTYLIHMAIEILKHGPDSGLQPSCDVNKRRCFPGSEEICSSSKRSKEEVGINTETSSAERKRRLPVWFAKGSDTSKKLMDKTKRGGLFS

SEQ ID NO: 69869 - protein, 245 aa, Homo sapiens
MAQEEGGSLPEVRARVRAAHGIPDLAQKLHFYDRWAPDYDQDVATLLYRAPRLAVDCLTQALPGPPHSALILDVACGTGLVAAELRAPGFLQLHGVDGSPGMLEQAQAPGLYQRLSLCTLGQEPLPSPEGTFDAVLIVGALSDGQVPCNAIPELHVTKPGGLVCLTTRTNSSNLQYKEALEATLDRLEQAGMWEGLVAWPVDRLWTAGSWLPPSWRWYPASLPRMASSPALSTCTESGRRPRLRK

SEQ ID NO: 69870 - protein, 265 aa, Homo sapiens
MEALPPVRSSLLGILLQVTRLSVLLVQNRDHLYNFLLLKINLFNHWVSGLAQEARGSCNWQAHLPLGAAACPLGQALWAGLALIQVPVWLVLQGPRLMWAGMWGSTKGLGLALLSAWEQLGLSVAIWTDLFLSCLHGLMLVALLLVVVTWRVCQKSHCFRLGRQLSKALQVNCVVRKLLVQLRRLYWWVETMTALTSWHLAYLITWTTCLASHLLQAAFEHTTQLAEAQEVEPQEVSGSSLLPSLSASSDSESGTVLPEQETPRE

SEQ ID NO: 69871 - protein, 151 aa, Homo sapiens
MTNEEPLPKKVRLSETDFKVMARDELILRWKQYEAYVQALEGKYTDLNSNDVTGLRESEEKLKQQQQESARRENILVMRLATKEQEMQECTTQIQYLKQVQQPSVAQLRSTMVDPAINLFFLKMKGELEQTKDKLEQAQNELSAWKFTPDR

SEQ ID NO: 69872 - protein, 396 aa, Homo sapiens
MTNEEPLPKKVRLSETDFKVMARDELILRWKQYEAYVQALEGKYTDLNSNDVTGLRESEEKLKQQQQESARRENILVMRLATKEQEMQECTTQIQYLKQVQQPSVAQLRSTMVDPAINLFFLKMKGELEQTKDKLEQAQNELSAWKFTPDSQTGKKLMAKCRMLIQENQELGRQLSQGRIAQLEAELALQKKYSEELKSSQDELNDFIIQLDEEVEGMQSTILVLQQQLKETRQQLAQYQQQQSQASAPSTSRTTASEPVEQSEATSKDCSRLTNGPSNGSSSRQRTSGSGFHREGNTTEDDFPSSPGNGNKSSNSSEERTGRGGSGYVNQLSAGYESVDSPTGSENSLTHQSNDTDSSHDPQEEKAVSGKGNRTVGSRHVQNGLDSSVNVQGSVL

SEQ ID NO: 69873 - protein, 360 aa, Homo sapiens
MNAPLGGIWLWLPLLLTWLTPEVNSSWWYMRATGGSSRVMCDNVPGLVSSQRQLCHRHPDVMRAISQGVAEWTAECQHQFRQHRWNCNTLDRDHSLFGRVLLRSSRESAFVYAISSAGVVFAITRACSQGEVKSCSCDPKKMGSAKDSKGIFDWGGCSDNIDYGIKFARAFVDAKERKGKDARALMNLHNNRAGRKAVKRFLKQECKCHGVSGSCTLRTCWLAMADFRKTGDYLWRKYNGAIQVVMNQDGTGFTVANERFKKPTKNDLVYFENSPDYCIRDREAGSLGTAGRVCNLTSRGMDSCEVMCCGRGYDTSHVTRMTKCGCKFHWCCAVRCQDCLEALDVHTCKAPKNADWTTAT

SEQ ID NO: 69874 - protein, 370 aa, Homo sapiens
MGLWALLPGWVSATLLLALAALPAALAANSSGRWWGIVNVASSTNLLTDSKSLQLVLEPSLQLLSRKQRRLIRQNPGILHSVSGGLQSAVRECKWQFRNRRWNCPTAPGPHLFGKIVNRGCRETAFIFAITSAGVTHSVARSCSEGSIESCTCDYRRRGPGGPDWHWGGCSDNIDFGRLFGREFVDSGEKGRDLRFLMNLHNNEAGRTTVFSEMRQECKCHGMSGSCTVRTCWMRLPTLRAVGDVLRDRFDGASRVLYGNRGSNRASRAELLRLEPEDPAHKPPSPHDLVYFEKSPNFCTYSGRLGTAGTAGRACNSSSPALDGCELLCCGRGHRTRTQRVTERCNCTFHWCCHVSCRNCTHTRVLHECL

SEQ ID NO: 69875 - protein, 195 aa, Homo sapiens
WHWGGCSDNIDFGRLFGREFVDSGEKGRDLRFLMNLHNNEAGRTTVFSEMRQECKCHGMSGSCTVRTCWMRLPTLRAVGDVLRDRFDGASRVLYGNRGSNRASRAELLRLEPDLVYFEKSPNFCTYSGRLGTAGTAGRACNSSSPALDGCELLCCGRGHRTRTQRVTERCNCTFHWCCHVSCRNCTHTRVLHECL

SEQ ID NO: 69876 - protein, 417 aa, Homo sapiens
MGSAHPRPWLRLRPQPQPRPALWVLLFFLLLLAAAMPRSAPNDILDLRLPPEPVLNANTVCLTLPGLSRRQMEVCVRHPDVAASAIQGIQIAIHECQHQFRDQRWNCSSLETRNKIPYESPIFSRGFRESAFAYAIAAAGVVHAVSNACALGKLKACGCDASRRGDEEAFRRKLHRLQLDALQRGKGLSHGVPEHPALPTASPGLQDSWEWGGCSPDMGFGERFSKDFLDSREPHRDIHARMRLHNNRVGRQAVMENMRRKCKCHGTSGSCQLKTCWQVTPEFRTVGALLRSRFHRATLIRPHNRNGGQLEPGPAGAPSPAPGAPGPRRRASPADLVYFEKSPDFCEREPRLDSAGTVGRLCNKSSAGSDGCGSMCCGRGHNILRQTRSERCHCRFHWCCFVVCEECRITEWVSVCK

SEQ ID NO: 69877 - protein, 389 aa, Homo sapiens
MLEEPRPRPPPSGLAGLLFLALCSRALSNEILGLKLPGEPPLTANTVCLTLSGLSKRQLGLCLRNPDVTASALQGLHIAVHECQHQLRDQRWNCSALEGGGRLPHHSAILKRGFRESAFSFSMLAAGVMHAVATACSLGKLVSCGCGWKGSGEQDRLRAKLLQLQALSRGKSFPHSLPSPGPGSSPSPGPQDTWEWGGCNHDMDFGEKFSRDFLDSREAPRDIQARMRIHNNRVGRQVVTENLKRKCKCHGTSGSCQFKTCWRAAPEFRAVGAALRERLGRAIFIDTHNRNSGAFQPRLRPRRLSGELVYFEKSPDFCERDPTMGSPGTRGRACNKTSRLLDGCGSLCCGRGHNVLRQTRVERCHCRFHWCCYVLCDECKVTEWVNVCK

SEQ ID NO: 69878 - protein, 191 aa, Homo sapiens
MLEEPRPRPPPSGLAGLLFLALCSRALSNEILGLKLPGEPPLTANTVCLTLSGLSKRQLGLCLRNPDVTASALQGLHIAVHECQHQLRDQRWNCSALEGGGRLPHHSAILKRGFRESAFSFSMLAAGVMHAVATACSLGKLVSCGCGWKGSGEQDRLRAKLLQLQALSRGKLPGTSRHECESTTTGWGARW

SEQ ID NO: 69879 - protein, 102 aa, Homo sapiens
MLEEPRPRPPPSGLAGLLFLALCSRALSNEILGLKLPGEPPLTANTVCLTLSGLSKRQLGLCLRNPDVTASALQGLHIAVHECQHQLRDQRWNCSALEGGGR

SEQ ID NO: 69880 - protein, 355 aa, Homo sapiens
MEPHLLGLLLGLLLGGTRVLAGYPIWWSLALGQQYTSLGSQPLLCGSIPGLVPKQLRFCRNYIEIMPSVAEGVKLGIQECQHQFRGRRWNCTTIDDSLAIFGPVLDKATRESAFVHAIASAGVAFAVTRSCAEGTSTICGCDSHHKGPPGEGWKWGGCSEDADFGVLVSREFADARENRPDARSAMNKHNNEAGRTTILDHMHLKCKCHGLSGSCEVKTCWWAQPDFRAIGDFLKDKYDSASEMVVEKHRESRGWVETLRAKYSLFKPPTERDLVYYENSPNFCEPNPETGSFGTRDRTCNVTSHGIDGCDLLCCGRGHNTRTEKRKEKCHCIFHWCCYVSCQECIRIYDVHTCK

SEQ ID NO: 69881 - protein, 352 aa, Homo sapiens
MAPLGYFLLLCSLKQALGSYPIWWSLAVGPQYSSLGSQPILCASIPGLVPKQLRFCRNYVEIMPSVAEGIKIGIQECQHQFRGRRWNCTTVHDSLAIFGPVLDKATRESAFVHAIASAGVAFAVTRSCAEGTAAICGCSSRHQGSPGKGWKWGGCSEDIEFGGMVSREFADARENRPDARSAMNRHNNEAGRQAIASHMHLKCKCHGLSGSCEVKTCWWSQPDFRAIGDFLKDKYDSASEMVVEKHRESRGWVETLRPRYTYFKVPTERDLVYYEASPNFCEPNPETGSFGTRDRTCNVSSHGIDGCDLLCCGRGHNARAERRREKCRCVFHWCCYVSCQECTRVYDVHTCK

SEQ ID NO: 69882 - protein, 385 aa, Homo sapiens
MAPLGYFLLLCSLKQALGSYPIWWSLAVGPQYSSLGSQPILCASIPGLVPKQLRFCRNYVEIMPSVAEGIKIGIQECQHQFRGRRWNCTTVHDSLAIFGPVLDKATRESAFVHAIASAGVAFAVTRSCAEGTAAICGCSSRHQGSPGKGWKWGGCSEDIEFGGMVSREFADARENRPDARSAMNRHNNEAGRQAIASHMHLKCKCHGLSGSCEVKTCWWSQPDFRAIGDFLKDKYDSASEMVVEKHRESRGWVETLRPRYTYFKVPTERDLVYYEASPNFCEPNPETGSFGTRDRTCNVSSHGIDGCDLLCCGRGHNARAERRREKCRCVFHWCCYVSCQECTRVYDVHTCKNPGSRAGNSAHQPPHPQPPVRFHPPLRRAGKVP

SEQ ID NO: 69883 - protein, 351 aa, Homo sapiens
MSPRSCLRSLRLLVFAVFSAAASNWLYLAKLSSVGSISEEETCEKLKGLIQRQVQMCKRNLEVMDSVRRGAQLAIEECQYQFRNRRWNCSTLDSLPVFGKVVTQGTREAAFVYAISSAGVAFAVTRACSSGELEKCGCDRTVHGVSPQGFQWSGCSDNIAYGVAFSQSFVDVRERSKGASSSRALMNLHNNEAGRKAILTHMRVECKCHGVSGSCEVKTCWRAVPPFRQVGHALKEKFDGATEVEPRRVGSSRALVPRNAQFKPHTDEDLVYLEPSPDFCEQDMRSGVLGTRGRTCNKTSKAIDGCELLCCGRGFHTAQVELAERCSCKFHWCCFVKCRQCQRLVELHTCR

SEQ ID NO: 69884 - protein, 175 aa, Homo sapiens
MSPRSCLRSLRLLVFAVFSAAASNWLYLAKLSSVGSISEEETCEKLKGLIQRQVQMCKRNLEVMDSVRRGAQLAIEECQYQFRNRRWNCSTLDSLPVFGKVVTQGGKAWHGGDSGCHLLTESRSGERTQRRKEGGSLGQCWPEAIVGTQDPMRSPPYLWGRNQGGTHTGSASEGH

SEQ ID NO: 69885 - protein, 150 aa, Homo sapiens
  VARIANT 1: note = MOD_RES - Any amino acid
XYLAKLSSVGSISEEETCEKLKGLIQRQVQMCKRNLEVMDSVRRGAQLAIEECQYQFRNRRWNCSTLDSLPVFGKVVTQGGKAWHGGDSGCHLLTESRSGERTQRRKEGGSLGQCWPEAIVGTQDPMRSPPYLWGRNQGGTHTGSASEGH

SEQ ID NO: 69886 - protein, 52 aa, Homo sapiens
MCKRNLEVMDSVRRGAQLAIEECQYQFRNRRWNCSTLDSLPVFGKVVTQGGK

SEQ ID NO: 69887 - protein, 296 aa, Homo sapiens
MCKRNLEVMDSVRRGAQLAIEECQYQFRNRRWNCSTLDSLPVFGKVVTQGTREAAFVYAISSAGVAFAVTRACSSGELEKCGCDRTVHGVSPQGFQWSGCSDNIAYGVAFSQSFVDVRERSKGASSSRALMNLHNNEAGRKAILTHMRVECKCHGVSGSCEVKTCWRAVPPFRQVGHALKEKFDGATEVEPRRVGSSRALVPRNAQFKPHTDEDLVYLEPSPDFCEQDMRSGVLGTRGRTCNKTSKAIDGCELLCCGRGFHTAQVELAERCSCKFHWCCFVKCRQCQRLVELHTCR

SEQ ID NO: 69888 - protein, 365 aa, Homo sapiens
MLPPLPSRLGLLLLLLLCPAHVGGLWWAVGSPLVMDPTSICRKARRLAGRQAELCQAEPEVVAELARGARLGVRECQFQFRFRRWNCSSHSKAFGRILQQDIRETAFVFAITAAGASHAVTQACSMGELLQCGCQAPRGRAPPRPSGLPGTPGPPGPAGSPEGSAAWEWGGCGDDVDFGDEKSRLFMDARHKRGRGDIRALVQLHNNEAGRLAVRSHTRTECKCHGLSGSCALRTCWQKLPPFREVGARLLERFHGASRVMGTNDGKALLPAVRTLKPPGRADLLYAADSPDFCAPNRRTGSPGTRGRACNSSAPDLSGCDLLCCGRGHRQESVQLEENCLCRFHWCCVVQCHRCRVRKELSLCL

SEQ ID NO: 69889 - protein, 349 aa, Homo sapiens
MNRKARRCLGHLFLSLGMVYLRIGGFSSVVALGASIICNKIPGLAPRQRAICQSRPDAIIVIGEGSQMGLDECQFQFRNGRWNCSALGERTVFGKELKVGSREAAFTYAIIAAGVAHAITAACTQGNLSDCGCDKEKQGQYHRDEGWKWGGCSADIRYGIGFAKVFVDAREIKQNARTLMNLHNNEAGRKILEENMKLECKCHGVSGSCTTKTCWTTLPQFRELGYVLKDKYNEAVHVEPVRASRNKRPTFLKIKKPLSYRKPMDTDLVYIEKSPNYCEEDPVTGSVGTQGRACNKTAPQASGCDLMCCGRGYNTHQYARVWQCNCKFHWCCYVKCNTCSERTEMYTCK

SEQ ID NO: 69890 - protein, 349 aa, Homo sapiens
MHRNFRKWIFYVFLCFGVLYVKLGALSSVVALGANIICNKIPGLAPRQRAICQSRPDAIIVIGEGAQMGINECQYQFRFGRWNCSALGEKTVFGQELRVGSREAAFTYAITAAGVAHAVTAACSQGNLSNCGCDREKQGYYNQAEGWKWGGCSADVRYGIDFSRRFVDAREIKKNARRLMNLHNNEAGRKVLEDRMQLECKCHGVSGSCTTKTCWTTLPKFREVGHLLKEKYNAAVQVEVVRASRLRQPTFLRIKQLRSYQKPMETDLVYIEKSPNYCEEDAATGSVGTQGRLCNRTSPGADGCDTMCCGRGYNTHQYTKVWQCNCKFHWCCFVKCNTCSERTEVFTCK

SEQ ID NO: 69891 - protein, 353 aa, Homo sapiens
MLLLSPRSALVSVYCPQIFLLLSSGSYLALSSVVALGANIICNKIPGLAPRQRAICQSRPDAIIVIGEGAQMGINECQYQFRFGRWNCSALGEKTVFGQELRVGSREAAFTYAITAAGVAHAVTAACSQGNLSNCGCDREKQGYYNQAEGWKWGGCSADVRYGIDFSRRFVDAREIKKNARRLMNLHNNEAGRKVLEDRMQLECKCHGVSGSCTTKTCWTTLPKFREVGHLLKEKYNAAVQVEVVRASRLRQPTFLRIKQLRSYQKPMETDLVYIEKSPNYCEEDAATGSVGTQGRLCNRTSPGADGCDTMCCGRGYNTHQYTKVWQCNCKFHWCCFVKCNTCSERTEVFTCK

SEQ ID NO: 69892 - protein, 205 aa, Homo sapiens
MHRNFRKWIFYVFLCFGVLYVKLGALSSVVALGANIICNKIPGLAPRQRAICQSRPDAIIVIGEGAQMGINECQYQFRFGRWNCSALGEKTVFGQELRVGSREAAFTYAITAAGVAHAVTAACSQGNLSNCGCDREKQGYYNQAEGWKWGGCSADVRYGIDFSRRFVDAREIKKNARRLMNLHNNEAGRKGLLGQPRVTSSPLFP

SEQ ID NO: 69893 - protein, 333 aa, Homo sapiens
MSAPPFYRALSSVVALGANIICNKIPGLAPRQRAICQSRPDAIIVIGEGAQMGINECQYQFRFGRWNCSALGEKTVFGQELRVGSREAAFTYAITAAGVAHAVTAACSQGNLSNCGCDREKQGYYNQAEGWKWGGCSADVRYGIDFSRRFVDAREIKKNARRLMNLHNNEAGRKVLEDRMQLECKCHGVSGSCTTKTCWTTLPKFREVGHLLKEKYNAAVQVEVVRASRLRQPTFLRIKQLRSYQKPMETDLVYIEKSPNYCEEDAATGSVGTQGRLCNRTSPGADGCDTMCCGRGYNTHQYTKVWQCNCKFHWCCFVKCNTCSERTEVFTCK

SEQ ID NO: 69894 - protein, 57 aa, Homo sapiens
MGINECQYQFRFGRWNCSALGEKTVFGQELRVGSREAAFTYAITAAGVAHAVTAACS

SEQ ID NO: 69895 - protein, 351 aa, Homo sapiens
MFLSKPSVYICLFTCVLQLSHSWSVNNFLMTGPKAYLIYSSSVAAGAQSGIEECKYQFAWDRWNCPERALQLSSHGGLRSANRETAFVHAISSAGVMYTLTRNCSLGDFDNCGCDDSRNGQLGGQGWLWGGCSDNVGFGEAISKQFVDALETGQDARAAMNLHNNEAGRKAVKGTMKRTCKCHGVSGSCTTQTCWLQLPEFREVGAHLKEKYHAALKVDLLQGAGNSAAGRGAIADTFRSISTRELVHLEDSPDYCLENKTLGLLGTEGRECLRRGRALGRWERRSCRRLCGDCGLAVEERRAETVSSCNCKFHWCCAVRCEQCRRRVTKYFCSRAERPRGGAAHKPGRKP

SEQ ID NO: 69896 - protein, 402 aa, Homo sapiens
MDLDRASLDLMIRLLELEQDASSAKLLNEKDMNKIKEKIRRLCETVHNKHLDLENITTGHLAMETLLSLTSKRAGDWFKEELRLLGGLDHIVDKVKECVDHLSRDEDEEKLVASLWGAERCLRVLESVTVHNPENQSYLIAYKDSQLIVSSAKALQHCEELIQQYNRAEDSICLADSKPLPHQNVTNHVGKAVEDCMRAIIGVLLNLTNDNEWGSTKTGEQDGLIGTALNCVLQVPKYLPQEQRFDIRVLLFLERERAAQLAESKTDELIKDAPTTQHDKSGEWQETSGEIQWVSTEKTDGTEEKHKKEEEDEELDLNKALQHAGKHMEDCIVASYTALLLGCLCQESPINVTTVREYLPEGDFSIMTEMLKKFLSFMNLTCAVGTTGQKSISRVIEYLEHC

SEQ ID NO: 69897 - protein, 1190 aa, Homo sapiens
MTSRFGKTYSRKGGNGSSKFDEVFSNKRTTLSTKWGETTFMAKLGQKRPNFKPDIQEIPKKPKVEEESTGDPFGFDSDDESLPVSSKNLAQVKCSSYSESSEAAQLEEVTSVLEANSKISHVVVEDTVVSDKCFPLEDTLLGKEKSTNRIVEDDASISSCNKLITSDKVENFHEEHEKNSHHIHKNADDSTKKPNAETTVASEIKETNDTWNSQFGKRPESPSEISPIKGSVRTGLFEWDNDFEDIRSEDCILSLDSDPLLEMKDDDFKNRLENLNEAIEEDIVQSVLRPTNCRTYCRANKTKSSQGASNFDKLMDGTSQALAKANSESSKDGLNQAKKGGVSCGTSFRGTVGRTRDYTVLHPSCLSVCNVTIQDTMERSMDEFTASTPADLGEAGRLRKKADIATSKTTTRFRPSNTKSKKDVKLEFFGFEDHETGGDEGGSGSSNYKIKYFGFDDLSESEDDEDDDCQVERKTSKKRTKTAPSPSLQPPPESNDNSQDSQSGTNNAENLDFTEDLPGVPESVKKPINKQGDKSKENTRKIFSGPKRSPTKAVYNARHWNHPDSEELPGPPVVKPQSVTVRLSSKEPNQKDDGVFKAPAPPSKVIKTVTIPTQPYQDIVTALKCRREDKELYTVVQHVKHFNDVVEFGENQEFTDDIEYLLSGLKSTQPLNTRCLSVISLATKCAMPSFRMHLRAHGMVAMVFKTLDDSQHHQNLSLCTAALMYILSRDRLNMDLDRASLDLMIRLLELEQDASSAKLLNEKDMNKIKEKIRRLCETVHNKHLDLENITTGHLAMETLLSLTSKRAGDWFKEELRLLGGLDHIVDKVKECVDHLSRDEDEEKLVASLWGAERCLRVLESVTVHNPENQSYLIAYKDSQLIVSSAKALQHCEELIQQYNRAEDSICLADSKPLPHQNVTNHVGKAVEDCMRAIIGVLLNLTNDNEWGSTKTGEQDGLIGTALNCVLQVPKYLPQEQRFDIRVLGLGLLINLVEYSARNRHCLVNMETSCSFDSSICSGEGDDSLRIGGQVHAVQALVQLFLERERAAQLAESKTDELIKDAPTTQHDKSGEWQETSGEIQWVSTEKTDGTEEKHKKEEEDEELDLNKALQHAGKHMEDCIVASYTALLLGCLCQESPINVTTVREYLPEGDFSIMTEMLKKFLSFMNLTCAVGTTGQKSISRVIEYLEHC

SEQ ID NO: 69898 - protein, 1275 aa, Homo sapiens
MVQGPVQTPALTIHRRKRRRSCPPNRASYLPKAESLASLGSHLPALLSRARVPRPPAGRRERERRRRPVAKAPARLRGEYETGVKMTSRFGKTYSRKGGNGSSKFDEVFSNKRTTLSTKWGETTFMAKLGQKRPNFKPDIQEIPKKPKVEEESTGDPFGFDSDDESLPVSSKNLAQVKCSSYSESSEAAQLEEVTSVLEANSKISHVVVEDTVVSDKCFPLEDTLLGKEKSTNRIVEDDASISSCNKLITSDKVENFHEEHEKNSHHIHKNADDSTKKPNAETTVASEIKETNDTWNSQFGKRPESPSEISPIKGSVRTGLFEWDNDFEDIRSEDCILSLDSDPLLEMKDDDFKNRLENLNEAIEEDIVQSVLRPTNCRTYCRANKTKSSQGASNFDKLMDGTSQALAKANSESSKDGLNQAKKGGVSCGTSFRGTVGRTRDYTVLHPSCLSVCNVTIQDTMERSMDEFTASTPADLGEAGRLRKKADIATSKTTTRFRPSNTKSKKDVKLEFFGFEDHETGGDEGGSGSSNYKIKYFGFDDLSESEDDEDDDCQVERKTSKKRTKTAPSPSLQPPPESNDNSQDSQSGTNNAENLDFTEDLPGVPESVKKPINKQGDKSKENTRKIFSGPKRSPTKAVYNARHWNHPDSEELPGPPVVKPQSVTVRLSSKEPNQKDDGVFKAPAPPSKVIKTVTIPTQPYQDIVTALKCRREDKELYTVVQHVKHFNDVVEFGENQEFTDDIEYLLSGLKSTQPLNTRCLSVISLATKCAMPSFRMHLRAHGMVAMVFKTLDDSQHHQNLSLCTAALMYILSRDRLNMDLDRASLDLMIRLLELEQDASSAKLLNEKDMNKIKEKIRRLCETVHNKHLDLENITTGHLAMETLLSLTSKRAGDWFKEELRLLGGLDHIVDKVKECVDHLSRDEDEEKLVASLWGAERCLRVLESVTVHNPENQSYLIAYKDSQLIVSSAKALQHCEELIQQYNRAEDSICLADSKPLPHQNVTNHVGKAVEDCMRAIIGVLLNLTNDNEWGSTKTGEQDGLIGTALNCVLQVPKYLPQEQRFDIRVLGLGLLINLVEYSARNRHCLVNMETSCSFDSSICSGEGDDSLRIGGQVHAVQALVQLFLERERAAQLAESKTDELIKDAPTTQHDKSGEWQETSGEIQWVSTEKTDGTEEKHKKEEEDEELDLNKALQHAGKHMEDCIVASYTALLLGCLCQESPINVTTVREYLPEGDFSIMTEMLKKFLSFMNLTCAVGTTGQKSISRVIEYLEHC

SEQ ID NO: 69899 - protein, 402 aa, Homo sapiens; identical to SEQ ID NO: 69896

SEQ ID NO: 69900 - protein, 1275 aa, Homo sapiens; identical to SEQ ID NO: 69898

SEQ ID NO: 69901 - protein, 502 aa, Homo sapiens
MSGGPMGGRPGGRGAPAVQQNIPSTLLQDHENQRLFEMLGRKCLTLATAVVQLYLALPPGAEHWTKEHCGAVCFVKDNPQKSYFIRLYGLQAGRLLWEQELYSQLVYSTPTPFFHTFAGDDCQAGLNFADEDEAQAFRALVQEKIQKRNQRQSGDRRQLPPPPTPANEERRGGLPPLPLHPGGDQGGPPVGPLSLGLATVDIQNPDITSSRYRGLPAPGPSPADKKRSGKKKISKADIGAPSGFKHVSHVGWDPQNGFDVNNLDPDLRSLFSRAGISEAQLTDAETSKLIYDFIEDQGGLEAVRQEMRRQEPLPPPPPPSRGGNQLPRPPIVGGNKGRSGPLPPVPLGIAPPPPTPRGPPPPGRGGPPPPPPPATGRSGPLPPPPPGAGGPPMPPPPPPPPPPPSSGNGPAPPPLPPALVPAGGLAPGGGRGALLDQIRQGIQLNKTPGAPESSALQPPPQSSEGLVGALMHVMQKRSRAIHSSDEGEDQAGDEDEDDEWDD

SEQ ID NO: 69902 - protein, 217 aa, Homo sapiens
MSGGPMGGRPGGRGAPAVQQNIPSTLLQDHENQRLFEMLGRKCLTLATAVVQLYLALPPGAEHWTKEHCGAVCFVKDNPQKSYFIRLYGLQAGRLLWEQELYSQLVYSTPTPFFHTFAGDDCQAGLNFADEDEAQAFRALVQEKIQKRNQRQSGDRRQLPPPPTPANEERRGGLPPLPLHPGGDQGGPPVGPLSLGLATVDIQNPDITSSRYRGLPA

SEQ ID NO: 69903 - protein, 1555 aa, Homo sapiens
MAKAIKDRVSLIKRKREQRQLVREEQEKKKQEESSLKQQVEQSSASQTGIKQLPSASTGIPTASTTSASVSTQVEPEEPEADQHQQLQYQQPSISVLSDGTVDSGQGSSVFTESRVSSQQTVSYGSQHEQAHSTGTVPGHIPSTVQAQSQPHGVYPPSSVQQGIQQTAPPQQTVQYSLSQTSTSSEATTAQPVSQPQAPQVLPQVSAGKQSTQGVSQVAPAEPVAVAQTQATQPTTLASSVDSAHSDVASGMSDGNENVPSSSGRHEGRTTKRHYRKSVRSRSRHEKTSRPKLRILNVSNKGDRVVECQLETHNRKMVTFKFDLDGDNPEEIATIMVNNDFILAIERESFVDQVREIIEKADEMLSEDVSVEPEGDQGLESLQGKDDYGFSGSQKLEGEFKQPIPASSMPQQIGIPTSSLTQVVHSAGRRFIVSPVPESRLRESKVFPSEITDTVAASTAQSPGMNLSHSASSLSLQQAFSELRRAQMTEGPNTAPPNFSHTGPTFPVVPPFLSSIAGVPTTAAATAPVPATSSPPNDISTSVIQSEVTVPTEEGIAGVATSTGVVTSGGLPIPPVSESPVLSSVVSSITIPAVVSISTTSPSLQVPTSTSEIVVSSTALYPSVTVSATSASAGGSTATPGPKPPAVVSQQAAGSTTVGATLTSVSTTTSFPSTASQLCIQLSSSTSTPTLAETVVVSAHSLDKTSHSSTTGLAFSLSAPSSSSSPGAGVSSYISQPGGLHPLVIPSVIASTPILPQAAGPTSTPLLPQVPSIPPLVQPVANVPAVQQTLIHSQPQPALLPNQPHTHCPEVDSDTQPKAPGIDDIKTLEEKLRSLFSEHSSSGAQHASVSLETSLVIESTVTPGIPTTAVAPSKLLTSTTSTCLPPTNLPLGTVALPVTPVVTPGQVSTPVSTTTSGVKPGTAPSKPPLTKAPVLPVGTELPAGTLPSEQLPPFPGPSLTQSQQPLEDLDAQLRRTLSPEMITVTSAVGPVSMAAPTAITEAGTQPQKGVSQVKEGPVLATSSGAGVFKMGRFQVSVAADGAQKEGKNKSEDAKSVHFESSTSESSVLSSSSPESTLVKPEPNGITIPGISSDVPESAHKTTASEAKSDTGQPTKVGRFQVTTTANKVGRFSVSKTEDKITDTKKEGPVASPPFMDLEQAVLPAVIPKKEKPELSEPSHLNGPSSDPEAAFLSRDVDDGSGSPHSPHQLSSKSLPSQNLSQSLSNSFNSSYMSSDNESDIEDEDLKLELRRLRDKHLKEIQDLQSRQKHEIESLYTKLGKVPPAVIIPPAAPLSGRRRRPTKSKGSKSSRSSSLGNKSPQLSGNLSGQSAASVLHPQQTLHPPGNIPESGQNQLLQPLKPSPSSDNLYSAFTSDGAISVPSLSAPGQGTSSTNTVGATVNSQAAQAQPPAMTSSRKGTFTDDLHKLVDNWARDAMNLSGRRGSKGHMNYEGPGMARKFSAPGQLCISMTSNLGGSAPISAASATSLGHFTKSMCPPQQYGFPATPFGAQWSGTGGPAPQPLGQFQPVGTASLQNFNISNLQKSISNPPGSNLRTT

SEQ ID NO: 69904 - protein, 2382 aa, Homo sapiens
MSGGAAEKQSSTPGSLFLSPPAPAPKNGSSSDSSVGEKLGAAAADAVTGRTEEYRRRRHTMDKDSRGAAATTTTTEHRFFRRSVICDSNATALELPGLPLSLPQPSIPAAVPQSAPPEPHREETVTATATSQVAQQPPAAAAPGEQAVAGPAPSTVPSSTSKDRPVSQPSLVGSKEEPPPARSGSGGGSAKEPQEERSQQQDDIEELETKAVGMSNDGRFLKFDIEIGRGSFKTVYKGLDTETTVEVAWCELQDRKLTKSERQRFKEEAEMLKGLQHPNIVRFYDSWESTVKGKKCIVLVTELMTSGTLKTYLKRFKVMKIKVLRSWCRQILKGLQFLHTRTPPIIHRDLKCDNIFITGPTGSVKIGDLGLATLKRASFAKSVIGTPEFMAPEMYEEKYDESVDVYAFGMCMLEMATSEYPYSECQNAAQIYRRVTSGVKPASFDKVAIPEVKEIIEGCIRQNKDERYSIKDLLNHAFFQEETGVRVELAEEDDGEKIAIKLWLRIEDIKKLKGKYKDNEAIEFSFDLERDVPEDVAQEMVESGYVCEGDHKTMAKAIKDRVSLIKRKREQRQLVREEQEKKKQEESSLKQQVEQSSASQTGIKQLPSASTGIPTASTTSASVSTQVEPEEPEADQHQQLQYQQPSISVLSDGTVDSGQGSSVFTESRVSSQQTVSYGSQHEQAHSTGTVPGHIPSTVQAQSQPHGVYPPSSVAQGQSQGQPSSSSLTGVSSSQPIQHPQQQQGIQQTAPPQQTVQYSLSQTSTSSEATTAQPVSQPQAPQVLPQVSAGKQLPVSQPVPTIQGEPQIPVATQPSVVPVHSGAHFLPVGQPLPTPLLPQYPVSQIPISTPHVSTAQTGFSSLPITMAAGITQPLLTLASSATTAAIPGVSTVVPSQLPTLLQPVTQLPSQVHPQLLQPAVQSMGIPANLGQAAEVPLSSGDVLYQGFPPRLPPQYPGDSNIAPSSNVASVCIHSTVLSPPMPTEVLATPGYFPTVVQPYVESNLLVPMGGVGGQVQVSQPGGSLAQAPTTSSQQAVLESTQGVSQVAPAEPVAVAQTQATQPTTLASSVDSAHSDVASGMSDGNENVPSSSGRHEGRTTKRHYRKSVRSRSRHEKTSRPKLRILNVSNKGDRVVECQLETHNRKMVTFKFDLDGDNPEEIATIMVNNDFILAIERESFVDQVREIIEKADEMLSEDVSVEPEGDQGLESLQGKDDYGFSGSQKLEGEFKQPIPASSMPQQIGIPTSSLTQVVHSAGRRFIVSPVPESRLRESKVFPSEITDTVAASTAQSPGMNLSHSASSLSLQQAFSELRRAQMTEGPNTAPPNFSHTGPTFPVVPPFLSSIAGVPTTAAATAPVPATSSPPNDISTSVIQSEVTVPTEEGIAGVATSTGVVTSGGLPIPPVSESPVLSSVVSSITIPAVVSISTTSPSLQVPTSTSEIVVSSTALYPSVTVSATSASAGGSTATPGPKPPAVVSQQAAGSTTVGATLTSVSTTTSFPSTASQLCIQLSSSTSTPTLAETVVVSAHSLDKTSHSSTTGLAFSLSAPSSSSSPGAGVSSYISQPGGLHPLVIPSVIASTPILPQAAGPTSTPLLPQVPSIPPLVQPVANVPAVQQTLIHSQPQPALLPNQPHTHCPEVDSDTQPKAPGIDDIKTLEEKLRSLFSEHSSSGAQHASVSLETSLVIESTVTPGIPTTAVAPSKLLTSTTSTCLPPTNLPLGTVALPVTPVVTPGQVSTPVSTTTSGVKPGTAPSKPPLTKAPVLPVGTELPAGTLPSEQLPPFPGPSLTQSQQPLEDLDAQLRRTLSPEMITVTSAVGPVSMAAPTAITEAGTQPQKGVSQVKEGPVLATSSGAGVFKMGRFQVSVAADGAQKEGKNKSEDAKSVHFESSTSESSVLSSSSPESTLVKPEPNGITIPGISSDVPESAHKTTASEAKSDTGQPTKVGRFQVTTTANKVGRFSVSKTEDKITDTKKEGPVASPPFMDLEQAVLPAVIPKKEKPELSEPSHLNGPSSDPEAAFLSRDVDDGSGSPHSPHQLSSKSLPSQNLSQSLSNSFNSSYMSSDNESDIEDEDLKLELRRLRDKHLKEIQDLQSRQKHEIESLYTKLGKVPPAVIIPPAAPLSGRRRRPTKSKGSKSSRSSSLGNKSPQLSGNLSGQSAASVLHPQQTLHPPGNIPESGQNQLLQPLKPSPSSDNLYSAFTSDGAISVPSLSAPGQGTSSTNTVGATVNSQAAQAQPPAMTSSRKGTFTDDLHKLVDNWARDAMNLSGRRGSKGHMNYEGPGMARKFSAPGQLCISMTSNLGGSAPISAASATSLGHFTKSMCPPQQYGFPATPFGAQWSGTGGPAPQPLGQFQPVGTASLQNFNISNLQKSISNPPGSNLRTT

SEQ ID NO: 69905 - protein, 1975 aa, Homo sapiens
MDIKKKDFCSVFVIINSHCCCCPQKDCINEGVKPASFDKVAIPEVKEIIEGCIRQNKDERYSIKDLLNHAFFQEETGVRVELAEEDDGEKIAIKLWLRIEDIKKLKGKYKDNEAIEFSFDLERDVPEDVAQEMVESGYVCEGDHKTMAKAIKDRVSLIKRKREQRQLVREEQEKKKQEESSLKQQVEQSSASQTGIKQLPSASTGIPTASTTSASVSTQVEPEEPEADQHQQLQYQQPSISVLSDGTVDSGQGSSVFTESRVSSQQTVSYGSQHEQAHSTGTVPGHIPSTVQAQSQPHGVYPPSSVAQGQSQGQPSSSSLTGVSSSQPIQHPQQQQGIQQTAPPQQTVQYSLSQTSTSSEATTAQPVSQPQAPQVLPQVSAGKQLPVSQPVPTIQGEPQIPVATQPSVVPVHSGAHFLPVGQPLPTPLLPQYPVSQIPISTPHVSTAQTGFSSLPITMAAGITQPLLTLASSATTAAIPGVSTVVPSQLPTLLQPVTQLPSQVHPQLLQPAVQSMGIPANLGQAAEVPLSSGDVLYQGFPPRLPPQYPGDSNIAPSSNVASVCIHSTVLSPPMPTEVLATPGYFPTVVQPYVESNLLVPMGGVGGQVQVSQPGGSLAQAPTTSSQQAVLESTQGVSQVAPAEPVAVAQTQATQPTTLASSVDSAHSDVASGMSDGNENVPSSSGRHEGRTTKRHYRKSVRSRSRHEKTSRPKLRILNVSNKGDRVVECQLETHNRKMVTFKFDLDGDNPEEIATIMVNNDFILAIERESFVDQVREIIEKADEMLSEDVSVEPEGDQGLESLQGKDDYGFSGSQKLEGEFKQPIPASSMPQQIGIPTSSLTQVVHSAGRRFIVSPVPESRLRESKVFPSEITDTVAASTAQSPGMNLSHSASSLSLQQAFSELRRAQMTEGPNTAPPNFSHTGPTFPVVPPFLSSIAGVPTTAAATAPVPATSSPPNDISTSVIQSEVTVPTEEGIAGVATSTGVVTSGGLPIPPVSESPVLSSVVSSITIPAVVSISTTSPSLQVPTSTSEIVVSSTALYPSVTVSATSASAGGSTATPGPKPPAVVSQQAAGSTTVGATLTSVSTTTSFPSTASQLCIQLSSSTSTPTLAETVVVSAHSLDKTSHSSTTGLAFSLSAPSSSSSPGAGVSSYISQPGGLHPLVIPSVIASTPILPQAAGPTSTPLLPQVPSIPPLVQPVANVPAVQQTLIHSQPQPALLPNQPHTHCPEVDSDTQPKAPGIDDIKTLEEKLRSLFSEHSSSGAQHASVSLETSLVIESTVTPGIPTTAVAPSKLLTSTTSTCLPPTNLPLGTVALPVTPVVTPGQVSTPVSTTTSGVKPGTAPSKPPLTKAPVLPVGTELPAGTLPSEQLPPFPGPSLTQSQQPLEDLDAQLRRTLSPEMITVTSAVGPVSMAAPTAITEAGTQPQKGVSQVKEGPVLATSSGAGVFKMGRFQVSVAADGAQKEGKNKSEDAKSVHFESSTSESSVLSSSSPESTLVKPEPNGITIPGISSDVPESAHKTTASEAKSDTGQPTKVGRFQVTTTANKVGRFSVSKTEDKITDTKKEGPVASPPFMDLEQAVLPAVIPKKEKPELSEPSHLNGPSSDPEAAFLSRDVDDGSGSPHSPHQLSSKSLPSQNLSQSLSNSFNSSYMSSDNESDIEDEDLKLELRRLRDKHLKEIQDLQSRQKHEIESLYTKLGKVPPAVIIPPAAPLSGRRRRPTKSKGSKSSRSSSLGNKSPQLSGNLSGQSAASVLHPQQTLHPPGNIPESGQNQLLQPLKPSPSSDNLYSAFTSDGAISVPSLSAPGQGTSSTNTVGATVNSQAAQAQPPAMTSSRKGTFTDDLHKLVDNWARDAMNLSGRRGSKGHMNYEGPGMARKFSAPGQLCISMTSNLGGSAPISAASATSLGHFTKSMCPPQQYGFPATPFGAQWSGTGGPAPQPLGQFQPVGTASLQNFNISNLQKSISNPPGSNLRTT

SEQ ID NO: 69906 - protein, 393 aa, Homo sapiens
MSGGAAEKQSSTPGSLFLSPPAPAPKNGSSSDSSVGEKLGAAAADAVTGRTEEYRRRRHTMDKDSRGAAATTTTTEHRFFRRSVICDSNATALELPGLPLSLPQPSIPAAVPQSAPPEPHREETVTATATSQVAQQPPAAAAPGEQAVAGPAPSTVPSSTSKDRPVSQPSLVGSKEEPPPARSGSGGGSAKEPQEERSQQQDDIEELETKAVGMSNDGRFLKFDIEIGRGSFKTVYKGLDTETTVEVAWCELQDRKLTKSERQRFKEEAEMLKGLQHPNIVRFYDSWESTVKGKKCIVLVTELMTSGTLKTYLKRFKVMKIKVLRSWCRQILKGLQFLHTRTPPIIHRDLKCDNIFITGPTGSVKIGDLGLATLKRASFAKSVIGMFQVYLGA

SEQ ID NO: 69907 - protein, 2880 aa, Homo sapiens
MSGGAAEKQSSTPGSLFLSPPAPAPKNGSSSDSSVGEKLGAAAADAVTGRTEEYRRRRHTMDKDSRGAAATTTTTEHRFFRRSVICDSNATALELPGLPLSLPQPSIPAAVPQSAPPEPHREETVTATATSQVAQQPPAAAAPGEQAVAGPAPSTVPSSTSKDRPVSQPSLVGSKEEPPPARSGSGGGSAKEPQEERSQQQDDIEELETKAVGMSNDGRFLKFDIEIGRGSFKTVYKGLDTETTVEVAWCELQDRKLTKSERQRFKEEAEMLKGLQHPNIVRFYDSWESTVKGKKCIVLVTELMTSGTLKTYLKRFKVMKIKVLRSWCRQILKGLQFLHTRTPPIIHRDLKCDNIFITGPTGSVKIGDLGLATLKRASFAKSVIGTPEFMAPEMYEEKYDESVDVYAFGMCMLEMATSEYPYSECQNAAQIYRRVTSGVKPASFDKVAIPEVKEIIEGCIRQNKDERYSIKDLLNHAFFQEETGVRVELAEEDDGEKIAIKLWLRIEDIKKLKGKYKDNEAIEFSFDLERDVPEDVAQEMVESGYVCEGDHKTMAKAIKDRVSLIKRKREQRQLVREEQEKKKQEESSLKQQVEQSSASQTGIKQLPSASTGIPTASTTSASVSTQVEPEEPEADQHQQLQYQQPSISVLSDGTVDSGQGSSVFTESRVSSQQTVSYGSQHEQAHSTGTVPGHIPSTVQAQSQPHGVYPPSSVPRRGRSMSVCVPIFLLLPLCPASLPVLFHPTASTVCTSFSFPPPDCPEETFAEKLSKALESVLPMHSASQRKHRRSSLPSLFVSTPQSMAHPCGGTPTYPESQIFFPTIHERPVSFSPPPTCPPKVAISQRRKSTSFLEAQTHHFQPLLRTVGQSLLPPGGSPTNWTPEAVVMLGTTASRVTGESCEIQVHPMFEPSQVYSDYRPGLVLPEEAHYFIPQEAVYVAGVHYQARVAEQYEGIPYNSSVLSSPMKQIPEQKPVQGGPTSSSVFEFPSGQAFLVGHLQNLRLDSGLGPGSPLSSISAPISTDATRLKFHPVFVPHSAPAVLTHNNESRSNCVFEFHVHTPSSSSGEGGGILPQRVYRNRQVAVDLNQEELPPQSVGLHGYLQPVTEEKHNYHAPELTVSVVEPIGQNWPIGSPEYSSDSSQITSSDPSDFQSPPPTGGAAAPFGSDVSMPFIHLPQTVLQESPLFFCFPQGTTSQQVLTASFSSGGSALHPQAQGQSQGQPSSSSLTGVSSSQPIQHPQQQQGIQQTAPPQQTVQYSLSQTSTSSEATTAQPVSQPQAPQVLPQVSAGKQLPVSQPVPTIQGEPQIPVATQPSVVPVHSGAHFLPVGQPLPTPLLPQYPVSQIPISTPHVSTAQTGFSSLPITMAAGITQPLLTLASSATTAAIPGVSTVVPSQLPTLLQPVTQLPSQVHPQLLQPAVQSMGIPANLGQAAEVPLSSGDVLYQGFPPRLPPQYPGDSNIAPSSNVASVCIHSTVLSPPMPTEVLATPGYFPTVVQPYVESNLLVPMGGVGGQVQVSQPGGSLAQAPTTSSQQAVLESTQGVSQVAPAEPVAVAQTQATQPTTLASSVDSAHSDVASGMSDGNENVPSSSGRHEGRTTKRHYRKSVRSRSRHEKTSRPKLRILNVSNKGDRVVECQLETHNRKMVTFKFDLDGDNPEEIATIMVNNDFILAIERESFVDQVREIIEKADEMLSEDVSVEPEGDQGLESLQGKDDYGFSGSQKLEGEFKQPIPASSMPQQIGIPTSSLTQVVHSAGRRFIVSPVPESRLRESKVFPSEITDTVAASTAQSPGMNLSHSASSLSLQQAFSELRRAQMTEGPNTAPPNFSHTGPTFPVVPPFLSSIAGVPTTAAATAPVPATSSPPNDISTSVIQSEVTVPTEEGIAGVATSTGVVTSGGLPIPPVSESPVLSSVVSSITIPAVVSISTTSPSLQVPTSTSEIVVSSTALYPSVTVSATSASAGGSTATPGPKPPAVVSQQAAGSTTVGATLTSVSTTTSFPSTASQLCIQLSSSTSTPTLAETVVVSAHSLDKTSHSSTTGLAFSLSAPSSSSSPGAGVSSYISQPGGLHPLVIPSVIASTPILPQAAGPTSTPLLPQVPSIPPLVQPVANVPAVQQTLIHSQPQPALLPNQPHTHCPEVDSDTQPKAPGIDDIKTLEEKLRSLFSEHSSSGAQHASVSLETSLVIESTVTPGIPTTAVAPSKLLTSTTSTCLPPTNLPLGTVALPVTPVVTPGQVSTPVSTTTSGVKPGTAPSKPPLTKAPVLPVGTELPAGTLPSEQLPPFPGPSLTQSQQPLEDLDAQLRRTLSPEMITVTSAVGPVSMAAPTAITEAGTQPQKGVSQVKEGPVLATSSGAGVFKMGRFQVSVAADGAQKEGKNKSEDAKSVHFESSTSESSVLSSSSPESTLVKPEPNGITIPGISSDVPESAHKTTASEAKSDTGQPTKVGRFQVTTTANKVGRFSVSKTEDKITDTKKEGPVASPPFMDLEQAVLPAVIPKKEKPELSEPSHLNGPSSDPEAAFLSRDVDDGSGSPHSPHQLSSKSLPSQNLSQSLSNSFNSSYMSSDNESDIEDEDLKLELRRLRDKHLKEIQDLQSRQKHEIESLYTKLGKVPPAVIIPPAAPLSGRRRRPTKSKGSKSSRSSSLGNKSPQLSGNLSGQSAASVLHPQQTLHPPGNIPESGQNQLLQPLKPSPSSDNLYSAFTSDGAISVPSLSAPGQGTSSTNTVGATVNSQAAQAQPPAMTSSRKGTFTDDLHKLVDNWARDAMNLSGRRGSKGHMNYEGPGMARKFSAPGQLCISMTSNLGGSAPISAASATSLGHFTKSMCPPQQYGFPATPFGAQWSGTGGPAPQPLGQFQPVGTASLQNFNISNLQKSISNPPGSNLRTT

SEQ ID NO: 69908 - protein, 2134 aa, Homo sapiens
MSGGAAEKQSSTPGSLFLSPPAPAPKNGSSSDSSVGEKLGAAAADAVTGRTEEYRRRRHTMDKDSRGAAATTTTTEHRFFRRSVICDSNATALELPGLPLSLPQPSIPAAVPQSAPPEPHREETVTATATSQVAQQPPAAAAPGEQAVAGPAPSTVPSSTSKDRPVSQPSLVGSKEEPPPARSGSGGGSAKEPQEERSQQQDDIEELETKAVGMSNDGRFLKFDIEIGRGSFKTVYKGLDTETTVEVAWCELQDRKLTKSERQRFKEEAEMLKGLQHPNIVRFYDSWESTVKGKKCIVLVTELMTSGTLKTYLKRFKVMKIKVLRSWCRQILKGLQFLHTRTPPIIHRDLKCDNIFITGPTGSVKIGDLGLATLKRASFAKSVIGTPEFMAPEMYEEKYDESVDVYAFGMCMLEMATSEYPYSECQNAAQIYRRVTSGVKPASFDKVAIPEVKEIIEGCIRQNKDERYSIKDLLNHAFFQEETGVRVELAEEDDGEKIAIKLWLRIEDIKKLKGKYKDNEAIEFSFDLERDVPEDVAQEMVESGYVCEGDHKTMAKAIKDRVSLIKRKREQRQLVREEQEKKKQEESSLKQQVEQSSASQTGIKQLPSASTGIPTASTTSASVSTQVEPEEPEADQHQQLQYQQPSISVLSDGTVDSGQGSSVFTESRVSSQQTVSYGSQHEQAHSTGTVPGHIPSTVQAQSQPHGVYPPSSVAQGQSQGQPSSSSLTGVSSSQPIQHPQQQGIQQTAPPQQTVQYSLSQTSTSSEATTAQPVSQPQAPQVLPQVSAGKQSTQGVSQVAPAEPVAVAQTQATQPTTLASSVDSAHSDVASGMSDGNENVPSSSGRHEGRTTKRHYRKSVRSRSRHEKTSRPKLRILNVSNKGDRVVECQLETHNRKMVTFKFDLDGDNPEEIATIMVNNDFILAIERESFVDQVREIIEKADEMLSEDVSVEPEGDQGLESLQGKDDYGFSGSQKLEGEFKQPIPASSMPQQIGIPTSSLTQVVHSAGRRFIVSPVPESRLRESKVFPSEITDTVAASTAQSPGMNLSHSASSLSLQQAFSELRRAQMTEGPNTAPPNFSHTGPTFPVVPPFLSSIAGVPTTAAATAPVPATSSPPNDISTSVIQSEVTVPTEEGIAGVATSTGVVTSGGLPIPPVSESPVLSSVVSSITIPAVVSISTTSPSLQVPTSTSEIVVSSTALYPSVTVSATSASAGGSTATPGPKPPAVVSQQAAGSTTVGATLTSVSTTTSFPSTASQLCIQLSSSTSTPTLAETVVVSAHSLDKTSHSSTTGLAFSLSAPSSSSSPGAGVSSYISQPGGLHPLVIPSVIASTPILPQAAGPTSTPLLPQVPSIPPLVQPVANVPAVQQTLIHSQPQPALLPNQPHTHCPEVDSDTQPKAPGIDDIKTLEEKLRSLFSEHSSSGAQHASVSLETSLVIESTVTPGIPTTAVAPSKLLTSTTSTCLPPTNLPLGTVALPVTPVVTPGQVSTPVSTTTSGVKPGTAPSKPPLTKAPVLPVGTELPAGTLPSEQLPPFPGPSLTQSQQPLEDLDAQLRRTLSPEMITVTSAVGPVSMAAPTAITEAGTQPQKVSQVKEGPVLATSSGAGVFKMGRFQVSVAADGAQKEGKNKSEDAKSVHFESSTSESSVLSSSSPESTLVKPEPNGITIPGISSDVPESAHKTTASEAKSDTGQPTKVGRFQVTTTANKVGRFSVSKTEDKITDTKKEGPVASPPFMDLEQAVLPAVIPKKEKPELSEPSHLNGPSSDPEAAFLSRDVDDGSGSPHSPHQLSSKSLPSQNLSQSLSNSFNSSYMSSDNESDIEDEDLKLELRRLRDKHLKEIQDLQSRQKHEIESLYTKLGKVPPAVIIPPAAPLSGRRRRPTKSKGSKSSRSSSLGNKSPQLSGNLSGQSAASVLHPQQTLHPPGNIPESGQNQLLQPLKPSPSSDNLYSAFTSDGAISVPSLSAPGQGTSSTNTVGATVNSQAAQAQPPAMTSSRKGTFTDDLHKLVDNWARDAMNLSGRRGSKGHMNYEGPGMARKFSAPGQLCISMTSNLGGSAPISAASATSLGHFTKSMCPPQQYGFPATPFGAQWSGTGGPAPQPLGQFQPVGTASLQNFNISNLQKSISNPPGSNLRTT

SEQ ID NO: 69909 - protein, 324 aa, Homo sapiens [sequence omitted]

SEQ ID NO: 69910 - protein, 2642 aa, Homo sapiens
MSGGAAEKQSSTPGSLFLSPPAPAPKNGSSSDSSVGEKLGAAAADAVTGRTEEYRRRRHTMDKDSRGAAATTTTTEHRFFRRSVICDSNATALELPGLPLSLPQPSIPAAVPQSAPPEPHREETVTATATSQVAQQPPAAAAPGEQAVAGPAPSTVPSSTSKDRPVSQPSLVGSKEEPPPARSGSGGGSAKEPQEERSQQQDDIEELETKAVGMSNDGRFLKFDIEIGRGSFKTVYKGLDTETTVEVAWCELQDRKLTKSERQRFKEEAEMLKGLQHPNIVRFYDSWESTVKGKKCIVLVTELMTSGTLKTYLKRFKVMKIKVLRSWCRQILKGLQFLHTRTPPIIHRDLKCDNIFITGPTGSVKIGDLGLATLKRASFAKSVIGTPEFMAPEMYEEKYDESVDVYAFGMCMLEMATSEYPYSECQNAAQIYRRVTSGVKPASFDKVAIPEVKEIIEGCIRQNKDERYSIKDLLNHAFFQEETGVRVELAEEDDGEKIAIKLWLRIEDIKKLKGKYKDNEAIEFSFDLERDVPEDVAQEMVESGYVCEGDHKTMAKAIKDRVSLIKRKREQRQLVREEQEKKKQEESSLKQQVEQSSASQTGIKQLPSASTGIPTASTTSASVSTQVEPEEPEADQHQQLQYQQPSISVLSDGTVDSGQGSSVFTESRVSSQQTVSYGSQHEQAHSTGTVPGHIPSTVQAQSQPHGVYPPSSVPQSMAHPCGGTPTYPESQIFFPTIHERPVSFSPPPTCPPKVAISQRRKSTSFLEAQTHHFQPLLRTVGQSLLPPGGSPTNWTPEAVVMLGTTASRVTGESCEIQVHPMFEPSQVYSDYRPGLVLPEEAHYFIPQEAVYVAGVHYQARVAEQYEGIPYNSSVLSSPMKQIPEQKPVQGGPTSSSVFEFPSGQAFLVGHLQNLRLDSGLGPGSPLSSISAPISTDATRLKFHPVFVPHSAPAVLTHNNESRSNCVFEFHVHTPSSSSGEGGGILPQRVYRNRQVAVDLNQEELPPQSVGLHGYLQPVTEEKHNYHAPELTVSVVEPIGQNWPIGSPEYSSDSSQITSSDPSDFQSPPPTGGAAAPFGSDVSMPFIHLPQTVLQESPLFFCFPQGTTSQQVLTASFSSGGSALHPQAQGQSQGQPSSSSLTGVSSSQPIQHPQQQQGIQQTAPPQQTVQYSLSQTSTSSEATTAQPVSQPQAPQVLPQVSAGKQGFPPRLPPQYPGDSNIAPSSNVASVCIHSTVLSPPMPTEVLATPGYFPTVVQPYVESNLLVPMGGVGGQVQVSQPGGSLAQAPTTSSQQAVLESTQGVSQVAPAEPVAVAQTQATQPTTLASSVDSAHSDVASGMSDGNENVPSSSGRHEGRTTKRHYRKSVRSRSRHEKTSRPKLRILNVSNKGDRVVECQLETHNRKMVTFKFDLDGDNPEEIATIMVNNDFILAIERESFVDQVREIIEKADEMLSEDVSVEPEGDQGLESLQGKDDYGFSGSQKLEGEFKQPIPASSMPQQIGIPTSSLTQVVHSAGRRFIVSPVPESRLRESKVFPSEITDTVAASTAQSPGMNLSHSASSLSLQQAFSELRRAQMTEGPNTAPPNFSHTGPTFPVVPPFLSSIAGVPTTAAATAPVPATSSPPNDISTSVIQSEVTVPTEEGIAGVATSTGVVTSGGLPIPPVSESPVLSSVVSSITIPAVVSISTTSPSLQVPTSTSEIVVSSTALYPSVTVSATSASAGGSTATPGPKPPAVVSQQAAGSTTVGATLTSVSTTTSFPSTASQLCIQLSSSTSTPTLAETVVVSAHSLDKTSHSSTTGLAFSLSAPSSSSSPGAGVSSYISQPGGLHPLVIPSVIASTPILPQAAGPTSTPLLPQVPSIPPLVQPVANVPAVQQTLIHSQPQPALLPNQPHTHCPEVDSDTQPKAPGIDDIKTLEEKLRSLFSEHSSSGAQHASVSLETSLVIESTVTPGIPTTAVAPSKLLTSTTSTCLPPTNLPLGTVALPVTPVVTPGQVSTPVSTTTSGVKPGTAPSKPPLTKAPVLPVGTELPAGTLPSEQLPPFPGPSLTQSQQPLEDLDAQLRRTLSPEMITVTSAVGPVSMAAPTAITEAGTQPQKGVSQVKEGPVLATSSGAGVFKMGRFQVSVAADGAQKEGKNKSEDAKSVHFESSTSESSVLSSSSPESTLVKPEPNGITIPGISSDVPESAHKTTASEAKSDTGQPTKVGRFQVTTTANKVGRFSVSKTEDKITDTKKEGPVASPPFMDLEQAVLPAVIPKKEKPELSEPSHLNGPSSDPEAAFLSRDVDDGSGSPHSPHQLSSKSLPSQNLSQSLSNSFNSSYMSSDNESDIEDEDLKLELRRLRDKHLKEIQDLQSRQKHEIESLYTKLGKVPPAVIIPPAAPLSGRRRRPTKSKGSKSSRSSSLGNKSPQLSGNLSGQSAASVLHPQQTLHPPGNIPESGQNQLLQPLKPSPSSDNLYSAFTSDGAISVPSLSAPGQGTSSTNTVGATVNSQAAQAQPPAMTSSRKGTFTDDLHKLVDNWARDAMNLSGRRGSKGHMNYEGPGMARKFSAPGQLCISMTSNLGGSAPISAASATSLGHFTKSMCPPQQYGFPATPFGAQWSGTGGPAPQPLGQFQPVGTASLQNFNISNLQKSISNPPGSNLRTT

SEQ ID NO: 69911 - protein, 2297 aa, Homo sapiens
MDGDGGRRDVPGTLMEPGRGAGPAGMAEPRAKAARPGPQRFLRRSVVESDQEEPPGLEAAEAPGPQPPQPLQRRVLLLCKTRRLIAERARGRPAAPAPAALVAQPGAPGAPADAGPEPVGTQEPGPDPIAAAVETAPAPDGGPREEAAATVRKEDEGAAEAKPEPGRTRRDEPEEEEDDEDDLKAVATSLDGRFLKFDIELGRGSFKTVYKGLDTETWVEVAWCELQDRKLTKLERQRFKEEAEMLKGLQHPNIVRFYDFWESSAKGKRCIVLVTELMTSGTLKTYLKRFKVMKPKVLRSWCRQILKGLLFLHTRTPPIIHRDLKCDNIFITGPTGSVKIGDLGLATLKRASFAKSVIGTPEFMAPEMYEEHYDESVDVYAFGMCMLEMATSEYPYSECQNAAQIYRKVTCGIKPASFEKVHDPEIKEIIGECICKNKEERYEIKDLLSHAFFAEDTGVRVELAEEDHGRKSTIALRLWVEDPKKLKGKPKDNGAIEFTFDLEKETPDEVAQEMIESGFFHESDVKIVAKSIRDRVALIQWRRERIWPALQPKEQQDVGSPDKARGPPVPLQVQVTYHAQAGQPGPPEPEEPEADQHLLPPTLPTSATSLASDSTFDSGQGSTVYSDSQSSQQSVMLGSLADAAPSPAQCVCSPPVSEGPVLPQSLPSLGAYQQPTAAPGLPVGSVPAPACPPSLQQHFPDPAMSFAPVLPPPSTPMPTGPGQPAPPGQQPPPLAQPTPLPQVLAPQPVVPLQPVPPHLPPYLAPASQVGAPAQLKPLQMPQAPLQPLAQVPPQMPPIPVVPPITPLAGIDGLPPALPDLPTATVPPVPPPQYFSPAVILPSLAAPLPPASPALPLQAVKLPHPPGAPLAMPCRTIVPNAPATIPLLAVAPPGVAALSIHSAVAQLPGQPVYPAAFPQMAPTDVPPSPHHTVQNMRATPPQPALPPQPTLPPQPVLPPQPTLPPQPVLPPQPTRPPQPVLPPQPMLPPQPVLPPQPALPVRPEPLQPHLPEQAAPAATPGSQILLGHPAPYAVDVAAQVPTVPVPPAAVLSPPLPEVLLPAAPELLPQFPSSLATVSASVQSVPTQTATLLPPANPPLPGGPGIASPCPTVQLTVEPVQEEQASQDKPPGLPQSCESYGGSDVTSGKELSDSCEGAFGGGRLEGRAARKHHRRSTRARSRQERASRPRLTILNVCNTGDKMVECQLETHNHKMVTFKFDLDGDAPDEIATYMVEHDFILQAERETFIEQMKDVMDKAEDMLSEDTDADRGSDPGTSPPHLSTCGLGTGEESRQSQANAPVYQQNVLHTGKRWFIICPVAEHPAPEAPESSPPLPLSSLPPEASQGPCRGLTLPCLPWRRAACGAVFLSLFSAESAQSKQPPDSAPYKDQLSSKEQPSFLASQQLLSQAGPSNPPGAPPAPLAPSSPPVTALPQDGAAPATSTMPEPASGTASQAGGPGTPQGLTSELETSQPLAETHEAPLAVQPLVVGLAPCTPAPEAASTRDASAPREPLPPPAPEPSPHSGTPQPALGQPAPLLPAAVGAVSLATSQLPSPPLGPTVPPQPPSALESDGEGPPPRVGFVDSTIKSLDEKLRTLLYQEHVPTSSASAGTPVEVGDRDFTLEPLRGDQPRSEVCGGDLALPPVPKEAVSGRVQLPQPLVEKSELAPTRGAVMEQGTSSSMTAESSPRSMLGYDRDGRQVASDSHVVPSVPQDVPAFVRPARVEPTDRDGGEAGESSAEPPPSDMGTVGGQASHPQTLGARALGSPRKRPEQQDVSSPAKTVGRFSVVSTQDEWTLASPHSLRYSAPPDVYLDEAPSSPDVKLAVRRAQTASSIEVGVGEPVSSDSGDEGPRARPPVQKQASLPVSGSVAGDFVKKATAFLQRPSRAGSLGPETPSRVGMKVPTISVTSFHSQSSYISSDNDSELEDADIKKELQSLREKHLKEISELQSQQKQEIEALYRRLGKPLPPNVGFFHTAPPTGRRRKTSKSKLKAGKLLNPLVRQLKVVASSTGHLADSSRGPPAKDPAQASVGLTADSTGLSGKAVQTQQPCSVRASLSSDICSGLASDGGGARGQGWTVYHPTSERVTYKSSSKPRARFLSGPVSVSIWSALKRLCLGKEHSSRSSTSSLAPGPEPGPQPALHVQAQVNNSNNKKGTFTDDLHKLVDEWTSKTVGAAQLKPTLNQLKQTQKLQDMEAQAGWAAPGEARAMTAPRAGVGMPRLPPAPGPLSTTVIPGAAPTLSVPTPDGALGTARRNQVWFGLRVPPTACCGHSTQPRGGQRVGSKTASFAASDPVRS

SEQ ID NO: 69912 - protein, 1866 aa, Homo sapiens
MATSEYPYSECQNAAQIYRKVTCGIKPASFEKVHDPEIKEIIGECICKNKEERYEIKDLLSHAFFAEDTGVRVELAEEDHGRKSTIALRLWVEDPKKLKGKPKDNGAIEFTFDLEKETPDEVAQEMIESGFFHESDVKIVAKSIRDRVALIQWRRERIWPALQPKEQQDVGSPDKARGPPVPLQVQVTYHAQAGQPGPPEPEEPEADQHLLPPTLPTSATSLASDSTFDSGQGSTVYSDSQSSQQSVMLGSLADAAPSPAQCVCSPPVSEGPVLPQSLPSLGAYQQPTAAPGLPVGSVPAPACPPSLQQHFPDPAMSFAPVLPPPSTPMPTGPGQPAPPGQQPPPLAQPTPLPQVLAPQPVVPLQPVPPHLPPYLAPASQVGAPAQLKPLQMPQAPLQPLAQVPPQMPPIPVVPPITPLAGIDGLPPALPDLPTATVPPVPPPQYFSPAVILPSLAAPLPPASPALPLQAVKLPHPPGAPLAMPCRTIVPNAPATIPLLAVAPPGVAALSIHSAVAQLPGQPVYPAAFPQMAPTDVPPSPHHTVQNMRATPPQPALPPQPTLPPQPVLPPQPTLPPQPVLPPQPTRPPQPVLPPQPMLPPQPVLPPQPALPVRPEPLQPHLPEQAAPAATPGSQILLGHPAPYAVDVAAQVPTVPVPPAAVLSPPLPEVLLPAAPELLPQFPSSLATVSASVQSVPTQTATLLPPANPPLPGGPGIASPCPTVQLTVEPVQEEQASQDKPPGLPQSCESYGGSDVTSGKELSDSCEGAFGGGRLEGRAARKHHRRSTRARSRQERASRPRLTILNVCNTGDKMVECQLETHNHKMVTFKFDLDGDAPDEIATYMVEHDFILQAERETFIEQMKDVMDKAEDMLSEDTDADRGSDPGTSPPHLSTCGLGTGEESRQSQANAPVYQQNVLHTGKRWFIICPVAEHPAPEAPESSPPLPLSSLPPEASQGPCRGLTLPCLPWRRAACGAVFLSLFSAESAQSKQPPDSAPYKDQLSSKEQPSFLASQQLLSQAGPSNPPGAPPAPLAPSSPPVTALPQDGAAPATSTMPEPASGTASQAGGPGTPQGLTSELETSQPLAETHEAPLAVQPLVVGLAPCTPAPEAASTRDASAPREPLPPPAPEPSPHSGTPQPALGQPAPLLPAAVGAVSLATSQLPSPPLGPTVPPQPPSALESDGEGPPPRVGFVDSTIKSLDEKLRTLLYQEHVPTSSASAGTPVEVGDRDFTLEPLRGDQPRSEVCGGDLALPPVPKEAVSGRVQLPQPLVEKSELAPTRGAVMEQGTSSSMTAESSPRSMLGYDRDGRQVASDSHVVPSVPQDVPAFVRPARVEPTDRDGGEAGESSAEPPPSDMGTVGGQASHPQTLGARALGSPRKRPEQQDVSSPAKTVGRFSVVSTQDEWTLASPHSLRYSAPPDVYLDEAPSSPDVKLAVRRAQTASSIEVGVGEPVSSDSGDEGPRARPPVQKQASLPVSGSVAGDFVKKATAFLQRPSRAGSLGPETPSRVGMKVPTISVTSFHSQSSYISSDNDSELEDADIKKELQSLREKHLKEISELQSQQKQEIEALYRRLGKPLPPNVGFFHTAPPTGRRRKTSKSKLKAGKLLNPLVRQLKVVASSTGHLADSSRGPPAKDPAQASVGLTADSTGLSGKAVQTQQPCSVRASLSSDICSGLASDGGGARGQGWTVYHPTSERVTYKSSSKPRARFLSGPVSVSIWSALKRLCLGKEHSSRSSTSSLAPGPEPGPQPALHVQAQVNNSNNKKGTFTDDLHKLVDEWTSKTVGAAQLKPTLNQLKQTQKLQDMEAQAGWAAPGEARAMTAPRAGVGMPRLPPAPGPLSTTVIPGAAPTLSVPTPDPESEKPD

SEQ ID NO: 69913 - protein, 363 aa, Homo sapiens
MEQGTSSSMTESSPRSMLGYDRDGRQVASDSHVVPSVPQDVPAFVRPARVEPTDRDGGEAGESSAEPPPSDMGTVGGQASHPQTLGARALGSPRKRPEQQDVSSPAKTVGRFSVVSTQDEWTLASPHSLRYSAPPDVYLDEAPSSPDVKLAVRRAQTASSIEVGVGEPVSSDSGDEGPRARPPVQKQASLPVSGSVAGDFVKKATSCRGLLGPSLGPETPSRVGMKVPTISVTSFHSQSSYISSDNDSELEDADIKKELQSLREKHLKEISELQSQQKQEIEALYRRLGKPLPPNVGFFHTAPPTGRRRKTSKSKLKAGKLLNPLVRQLKVVASSTGHLADSSRGPPAKDPKPVWGSLQTARA

SEQ ID NO: 69914 - protein, 779 aa, Homo sapiens
MEPGRGAGPAGMAEPRAKAARPGPQRFLRRSVVESDQEEPPGLEAAEAPGPQPPQPLQRRVLLLCKTRRLIAERARGRPAAPAPAALVAQPGAPGAPADAGPEPVGTQEPGPDPIAAAVETAPAPDGGPREEAAATVRKEDEGAAEAKPEPGRTRRDEPEEEEDDEDDLKAVATSLDGRFLKFDIELGRGSFKTVYKGLDTETWVEVAWCELQDRKLTKLERQRFKEEAEMLKGLQHPNIVRFYDFWESSAKGKRCIVLVTELMTSGTLKTYLKRFKVMKPKVLRSWCRQILKGLLFLHTRTPPIIHRDLKCDNIFITGPTGSVKIGDLGLATLKRASFAKSVIGTPEFMAPEMYEEHYDESVDVYAFGMCMLEMATSEYPYSECQNAAQIYRKVTCGIKPASFEKVHDPEIKEIIGECICKNKEERYEIKDLLSHAFFAEDTGVRVELAEEDHGRKSTIALRLWVEDPKKLKGKPKDNGAIEFTFDLEKETPDEVAQEMIESGFFHESDVKIVAKSIRDRVALIQWRRERIWPALQPKEQQDVGSPDKARGPPVPLQVQVTYHAQAGQPGPPEPEEPEADQHLLPPTLPTSATSLASDSTFDSGQGSTVYSDSQSSQQSVMLGSLADAAPSPAQCVCSPPVSEGPVLPQSLPSLGAYQQPTAAPPPLAQPTPLPQVLAPQPVVPLQPVPPHLPPYLAPASQVGAPAQLKPLQMPQAPLQPLAQVPPQMPPIPVVPPITPLAGIDGLPPALPDLPTATVPPVPPPQYFSPAVILPSLAA

SEQ ID NO: 69915 - protein, 2217 aa, Homo sapiens
MDGDGGRRDVPGTLMEPGRGAGPAGMAEPRAKAARPGPQRFLRRSVVESDQEEPPGLEAAEAPGPQPPQPLQRRVLLLCKTRRLIAERARGRPAAPAPAALVAQPGAPGAPADAGPEPVGTQEPGPDPIAAAVETAPAPDGGPREEAAATVRKEDEGAAEAKPEPGRTRRDEPEEEEDDEDDLKAVATSLDGRFLKFDIELGRGSFKTVYKGLDTETWVEVAWCELQDRKLTKLERQRFKEEAEMLKGLQHPNIVRFYDFWESSAKGKRCIVLVTELMTSGTLKTYLKRFKVMKPKVLRSWCRQILKGLLFLHTRTPPIIHRDLKCDNIFITGPTGSVKIGDLGLATLKRASFAKSVIGTPEFMAPEMYEEHYDESVDVYAFGMCMLEMATSEYPYSECQNAAQIYRKVTCGIKPASFEKVHDPEIKEIIGECICKNKEERYEIKDLLSHAFFAEDTGVRVELAEEDHGRKSTIALRLWVEDPKKLKGKPKDNGAIEFTFDLEKETPDEVAQEMIESGFFHESDVKIVAKSIRDRVALIQWRRERIWPALQPKEQQDVGSPDKARGPPVPLQVQVTYHAQAGQPGPPEPEEPEADQHLLPPTLPTSATSLASDSTFDSGQGSTVYSDSQSSQQSVMLGSLADAAPSPAQCVCSPPVSEGPVLPQSLPSLGAYQQPTAAPGLPVGSVPAPACPPSLQQHFPDPAMSFAPVLPPPSTPMPTGPGQPAPPGQQPPPLAQPTPLPQVLAPQPVVPLQPVPPHLPPYLAPASQVGAPAQLKPLQMPQAPLQPLAQVPPQMPPIPVVPPITPLAGIDGLPPALPDLPTATVPPVPPPQYFSPAVILPSLAAPLPPASPALPLQAVKLPHPPGAPLAMPCRTIVPNAPATIPLLAVAPPGVAALSIHSAVAQLPGQPVYPAAFPQMAPTDVPPSPHHTVQNMRATPPQPALPPQPTLPPQPVLPPQPTLPPQPVLPPQPTRPPQPVLPPQPMLPPQPVLPPQPALPVRPEPLQPHLPEQAAPAATPGSQILLGHPAPYAVDVAAQVPTVPVPPAAVLSPPLPEVLLPAAPELLPQFPSSLATVSASVQSVPTQTATLLPPANPPLPGGPGIASPCPTVQLTVEPVQEEQASQDKPPGLPQSCESYGGSDVTSGKELSDSCEGAFGGGRLEGRAARKHHRRSTRARSRQERASRPRLTILNVCNTGDKMVECQLETHNHKMVTFKFDLDGDAPDEIATYMVEHDFILQAERETFIEQMKDVMDKAEDMLSEDTDADRGSDPGTSPPHLSTCGLGTGEESRQSQANAPVYQQNVLHTGKRWFIICPVAEHPAPEAPESSPPLPLSSLPPEASQDSAPYKDQLSSKEQPSFLASQQLLSQAGPSNPPGAPPAPLAPSSPPVTALPQDGAAPATSTMPEPASGTASQAGGPGTPQGLTSELETSQPLAETHEAPLAVQPLVVGLAPCTPAPEAASTRDASAPREPLPPPAPEPSPHSGTPQPALGQPAPLLPAAVGAVSLATSQLPSPPLGPTVPPQPPSALESDGEGPPPRVGFVDSTIKSLDEKLRTLLYQEHVPTSSASAGTPVEVGDRDFTLEPLRGDQPRSEVCGGDLALPPVPKEAVSGRVQLPQPLVEKSELAPTRGAVMEQGTSSSMTAESSPRSMLGYDRDGRQVASDSHVVPSVPQDVPAFVRPARVEPTDRDGGEAGESSAEPPPSDMGTVGGQASHPQTLGARALGSPRKRPEQQDVSSPAKTVGRFSVVSTQDEWTLASPHSLRYSAPPDVYLDEAPSSPDVKLAVRRAQTASSIEVGVGEPVSSDSGDEGPRARPPVQKQASLPVSGSVAGDFVKKATAFLQRPSRAGSLGPETPSRVGMKVPTISVTSFHSQSSYISSDNDSELEDADIKKELQSLREKHLKEISELQSQQKQEIEALYRRLGKPLPPNVGFFHTAPPTGRRRKTSKSKLKAGKLLNPLVRQLKVVASSTGHLADSSRGPPAKDPAQASVGLTADSTGLSGKAVQTQQPCSVRASLSSDICSGLASDGGGARGQGWTVYHPTSERVTYKSSSKPRARFLSGPVSVSIWSALKRLCLGKEHSSRSSTSSLAPGPEPGPQPALHVQAQVNNSNNKKGTFTDDLHKLVDEWTSKTVGAAQLKPTLNQLKQTQKLQDMEAQAGWAAPGEARAMTAPRAGVGMPRLPPAPGPLSTTVIPGAAPTLSVPTPDPESEKPD

SEQ ID NO: 69916 - protein, 1836 aa, Homo sapiens
MATSEYPYSECQNAAQIYRKVTCGIKPASFEKVHDPEIKEIIGECICKNKEERYEIKDLLSHAFFAEDTGVRVELAEEDHGRKSTIALRLWVEDPKKLKGKPKDNGAIEFTFDLEKETPDEVAQEMIESGFFHESDVKIVAKSIRDRVALIQWRRERIWPALQPKEQQDVGSPDKARGPPVPLQVQVTYHAQAGQPGPPEPEEPEADQHLLPPTLPTSATSLASDSTFDSGQGSTVYSDSQSSQQSVMLGSLADAAPSPAQCVCSPPVSEGPVLPQSLPSLGAYQQPTAAPGLPVGSVPAPACPPSLQQHFPDPAMSFAPVLPPPSTPMPTGPGQPAPPGQQPPPLAQPTPLPQVLAPQPVVPLQPVPPHLPPYLAPASQVGAPAQLKPLQMPQAPLQPLAQVPPQMPPIPVVPPITPLAGIDGLPPALPDLPTATVPPVPPPQYFSPAVILPSLAAPLPPASPALPLQAVKLPHPPGAPLAMPCRTIVPNAPATIPLLAVAPPGVAALSIHSAVAQLPGQPVYPAAFPQMAPTDVPPSPHHTVQNMRATPPQPALPPQPTLPPQPVLPPQPTLPPQPVLPPQPTRPPQPVLPPQPMLPPQPVLPPQPALPVRPEPLQPHLPEQAAPAATPGSQILLGHPAPYAVDVAAQVPTVPVPPAAVLSPPLPEVLLPAAPELLPQFPSSLATVSASVQSVPTQTATLLPPANPPLPGGPGIASPCPTVQLTVEPVQEEQASQDKPPGLPQSCESYGGSDVTSGKELSDSCEGAFGGGRLEGRAARKHHRRSTRARSRQERASRPRLTILNVCNTGDKMVECQLETHNHKMVTFKFDLDGDAPDEIATYMVEHDFILQAERETFIEQMKDVMDKAEDMLSEDTDADRGSDPGTSPPHLSTCGLGTGEESRQSQANAPVYQQNVLHTGKRWFIICPVAEHPAPEAPESSPPLPLSSLPPEASQDSAPYKDQLSSKEQPSFLASQQLLSQAGPSNPPGAPPAPLAPSSPPVTALPQDGAAPATSTMPEPASGTASQAGGPGTPQGLTSELETSQPLAETHEAPLAVQPLVVGLAPCTPAPEAASTRDASAPREPLPPPAPEPSPHSGTPQPALGQPAPLLPAAVGAVSLATSQLPSPPLGPTVPPQPPSALESDGEGPPPRVGFVDSTIKSLDEKLRTLLYQEHVPTSSASAGTPVEVGDRDFTLEPLRGDQPRSEVCGGDLALPPVPKEAVSGRVQLPQPLVEKSELAPTRGAVMEQGTSSSMTAESSPRSMLGYDRDGRQVASDSHVVPSVPQDVPAFVRPARVEPTDRDGGEAGESSAEPPPSDMGTVGGQASHPQTLGARALGSPRKRPEQQDVSSPAKTVGRFSVVSTQDEWTLASPHSLRYSAPPDVYLDEAPSSPDVKLAVRRAQTASSIEVGVGEPVSSDSGDEGPRARPPVQKQASLPVSGSVAGDFVKKATAFLQRPSRAGSLGPETPSRVGMKVPTISVTSFHSQSSYISSDNDSELEDADIKKELQSLREKHLKEISELQSQQKQEIEALYRRLGKPLPPNVGFFHTAPPTGRRRKTSKSKLKAGKLLNPLVRQLKVVASSTGHLADSSRGPPAKDPAQASVGLTADSTGLSGKAVQTQQPCSVRASLSSDICSGLASDGGGARGQGWTVYHPTSERVTYKSSSKPRARFLSGPVSVSIWSALKRLCLGKEHSSRSSTSSLAPGPEPGPQPALHVQAQVNNSNNKKGTFTDDLHKLVDEWTSKTVGAAQLKPTLNQLKQTQKLQDMEAQAGWAAPGEARAMTAPRAGVGMPRLPPAPGPLSTTVIPGAAPTLSVPTPGSCGPRAVSTPTSYT

SEQ ID NO: 69917 - protein, 1800 aa, Homo sapiens
MATDSGDPASTEDSEKPDGISFENRVPQVAATLTVEARLKEKNSTFSASGETVERKRFFRKSVEMTEDDKVAESSPKDERIKAAMNIPRVDKLPSNVLRGGQEVKYEQCSKSTSEISKDCFKEKNEKEMEEEAEMKAVATSPSGRFLKFDIELGRGAFKTVYKGLDTETWVEVAWCELQDRKLTKAEQQRFKEEAEMLKGLQHPNIVRFYDSWESILKGKKCIVLVTELMTSGTLKTYLKRFKVMKPKVLRSWCRQILKGLQFLHTRTPPIIHRDLKCDNIFITGPTGSVKIGDLGLATLMRTSFAKSVIGTPEFMAPEMYEEHYDESVDVYAFGMCMLEMATSEYPYSECQNAAQIYRKVTSGIKPASFNKVTDPEVKEIIEGCIRQNKSERLSIRDLLNHAFFAEDTGLRVELAEEDDCSNSSLALRLWVEDPKKLKGKHKDNEAIEFSFNLETDTPEEVAYEMVKSGFFHESDSKAVAKSIRDRVTPIKKTREKKPAGCLEERRDSQCKSMGNVFPQPQNTTLPLAPAQQTGAECEETEVDQHVRQQLLQRKPQQHCSSVTGDNLSEAGAASVIHSDTSSQPSVAYSSNQTMGSQMVSNIPQAEVNVPGQIYSSQQLVGHYQQVSGLQKHSKLTQPQILPLVQGQSTVLPVHVLGPTVVSQPQVSPLTVQKVPQIKPVSQPVGAEQQAALLKPDLVRSLNQDVATTKENVSSPDNPSGNGKQDRIKQRRASCPRPEKGTKFQLTVLQVSTSGDNMVECQLETHNNKMVTFKFDVDGDAPEDIADYMVEDNFVLESEKEKFVEELRAIVGQAQEILHVHFATERATGVDSITVDSNSSQTGSSEQVQINSTSTQTSNESAPQSSPVGRWRFCINQTIRNRETQSPPSLQHSMSAVPGRHPLPSPKNTSNKEISRDTLLTIENNPCHRALFTSKSEHKDVVDGKISECASVETKQPAILYQVEDNRQIMAPVTNSSSYSTTSVRAVPAECEGLTKQASIFIPVYPCHQTASQADALMSHPGESTQTSGNSLTTLAFDQKPQTLSVQQPAMDAEFISQEGETTVNTEASSPKTVIPTQTPGLEPTTLQPTTVLESDGERPPKLEFADNRIKTLDEKLRNLLYQEHSISSIYPESQKDTQSIDSPFSSSAEDTLSCPVTEVIAISHCGIKDSPVQSPNFQQTGSKLLSNVAASQPANISVFKRDLNVITSVPSELCLHEMSSDASLPGDPEAYPAAVSSGGAIHLQTGGGYFGLSFTCPSLKNPISKKSWTRKLKSWAYRLRQSTSFFKRSKVRQVETEEMRSAIAPDPIPLTRESTADTRALNRCKAMSGSFQRGRFQVITIPQQQSAKMTSFGIEHISVFSETNHSSEEAFIKTAKSQLVEIEPATQNPKTSFSYEKLQALQETCKENKGVPKQGDNFLSFSAACETDVSSVTPEKEFEETSATGSSMQSGSELLLKEREILTAGKQPSSDSEFSASLAGSGKSVAKTGPESNQCLPHHEEQAYAQTQSSLFYSPSSPMSSDDESEIEDEDLKVELQRLREKHIQEVVNLQTQQNKELQELYERLRSIKDSKTQSTEIPLPPASPRRPRSFKSKLRSRPQSLTHVDNGIVATGKSCLINELENPLCVESNAASCQQSPASKKGMFTDDLHKLVDDWTKEAVGNSLIKPSLNQLKQSQHKLETENWNKVSENTPSTMGYTSTWISSLSQIRGAVPTSLPQGLSLPSFPGPLSSYGMPHVCQYNAVAGAGYPVQWVGISGTTQQSVVIPAQSGGPFQPGMNMQAFPTSSVQNPATIPPGPK

SEQ ID NO: 69918 - protein, 1800 aa, Homo sapiens; identical to SEQ ID NO: 69917

SEQ ID NO: 69919 - protein, 1743 aa, Homo sapiens
MATDSGDPASTEDSEKPDGISFENRVPQVAATLTVEARLKEKNSTFSASGETVERKRFFRKSVEMTEDDKVAESSPKDERIKAAMNIPRVDKLPSNVLRGGQEVKYEQCSKSTSEISKDCFKEKNEKEMEEEAEMKAVATSPSGRFLKFDIELGRGAFKTVYKGLDTETWVEVAWCELQDRKLTKAEQQRFKEEAEMLKGLQHPNIVRFYDSWESILKGKKCIVLVTELMTSGTLKTYLKRFKVMKPKVLRSWCRQILKGLQFLHTRTPPIIHRDLKCDNIFITGPTGSVKIGDLGLATLMRTSFAKSVIGTPEFMAPEMYEEHYDESVDVYAFGMCMLEMATSEYPYSECQNAAQIYRKVTSGIKPASFNKVTDPEVKEIIEGCIRQNKSERLSIRDLLNHAFFAEDTGLRVELAEEDDCSNSSLALRLWVEDPKKLKGKHKDNEAIEFSFNLETDTPEEVAYEMVKSGFFHESDSKAVAKSIRDRVTPIKKTREKKPAGCLEERRDSQCKSMGNVFPQPQNTTLPLAPAQQTGAECEETEVDQHVRQQLLQRKPQQHCSSVTGDNLSEAGAASVIHSDTSSQPSVAYSSNQTMGSQMVSNIPQAEVNVPGQIYSSQQLVGHYQQVSGLQKHSKLTQPQILPLVQGQSTVLPVHVLGPTVVSQPQVSPLTVQKVPQIKPVSQPVGAEQQAALLKPDLVRSLNQDVATTKENVSSPDNPSGNGKQDRIKQRRASCPRPEKGTKFQLTVLQVSTSGDNMVECQLETHNNKMVTFKFDVDGDAPEDIADYMVEDNFVLESEKEKFVEELRAIVGQAQEILHVHFATERATGVDSITVDSNSSQTGSSEQVQINSTSTQTSNESAPQSSPVGRWRFCINQTIRNRETQSPPSLQHSMSAVPGRHPLPSPKNTSNKEISRDTLLTIENNPCHRALFTSKSEHKDVVDGKISECASVETKQPAILYQVEDNRQIMAPVTNSSSYSTTSVRAVPAECEGLTKQASIFIPVYPCHQTASQADALMSHPGESTQTSGNSLTTLAFDQKPQTLSVQQPAMDAEFISQEGETTVNTEASSPKTVIPTQTPGLEPTTLQPTTVLESDGERPPKLEFADNRIKTLDEKLRNLLYQEHSISSIYPESQKDTQSIDSPFSSSAEDTLSCPVTEVIAISHCGIKDSPVQSPNFQQTGSKLLSNVAASQPANISVFKRDLNVITSVPSELCLHEMSSDASLPGDPEAYPAAVSSGGAIHLQTGVETEEMRSAIAPDPIPLTRESTADTRALNRCKAMSGSFQRGRFQVITIPQQQSAKMTSFGIEHISVFSETNHSSEEAFIKTAKSQLVEIEPATQNPKTSFSYEKLQALQETCKENKGVPKQGDNFLSFSAACETDVSSVTPEKEFEETSATGSSMQSGSELLLKEREILTAGKQPSSDSEFSASLAGSGKSVAKTGPESNQCLPHHEEQAYAQTQSSLFYSPSSPMSSDDESEIEDEDLKVELQRLREKHIQEVVNLQTQQNKELQELYERLRSIKDSKTQSTEIPLPPASPRRPRSFKSKLRSRPQSLTHVDNGIVATDPLCVESNAASCQQSPASKKGMFTDDLHKLVDDWTKEAVGNSLIKPSLNQLKQSQHKLETENWNKVSENTPSTMGYTSTWISSLSQIRGAVPTSLPQGLSLPSFPGPLSSYGMPHVCQYNAVAGAGYPVQWVGISGTTQQSVVIPAQSGGPFQPGMNMQAFPTSSVQNPATIPPGPK

SEQ ID NO: 69920 - protein, 165 aa, Homo sapiens
MATDSGDPASTEDSEKPDGISFENRVPQVAATLTVEARLKEKNSTFSASGETVERKRFFRKSVEMTEDDKVAESSPKDERIKAAMNIPRVDKLPSNVLRGGQEVKYEQCSKSTSEISKDCFKEKNEKEMEEEAEMKAVATSPSGRFLKFDIELGRGAFKTVYKGL

SEQ ID NO: 69921 - protein, 1243 aa, Homo sapiens
MLASPATETTVLMSQTEADLALRPPPPLGTAGQPRLGPPPRRARRFSGKAEPRPRSSRLSRRSSVDLGLLSSWSLPASPAPDPPDPPDSAGPGPARSPPPSSKEPPEGTWTEGAPVKAAEDSARPELPDSAVGPGSREPLRVPEAVALERRREQEEKEDMETQAVATSPDGRYLKFDIEIGRGSFKTVYRGLDTDTTVEVAWCELQTRKLSRAERQRFSEEVEMLKGLQHPNIVRFYDSWKSVLRGQVCIVLVTELMTSGTLKTYLRRFREMKPRVLQRWSRQILRGLHFLHSRVPPILHRDLKCDNVFITGPTGSVKIGDLGLATLKRASFAKSVIGTPEFMAPEMYEEKYDEAVDVYAFGMCMLEMATSEYPYSECQNAAQIYRKVTSGRKPNSFHKVKIPEVKEIIEGCIRTDKNERFTIQDLLAHAFFREERGVHVELAEEDDGEKPGLKLWLRMEDARRGGRPRDNQAIEFLFQLGRDAAEEVAQEMVALGLVCEADYQPVARAVRERVAAIQRKREKLRKARELEALPPEPGPPPATVPMAPGPPSVFPPEPEEPEADQHQPFLFRHASYSSTTSDCETDGYLSSSGFLDASDPALQPPGGVPSSLAESHLCLPSAFALSIPRSGPGSDFSPGDSYASDAASGLSDVGEGMGQMRRPPGRNLRRRPRSRLRVTSVSDQNDRVVECQLQTHNSKMVTFRFDLDGDSPEEIAAAMVYNEFILPSERDGFLRRIREIIQRVETLLKRDTGPMEAAEDTLSPQEEPAPLPALPVPLPDPSNEELQSSTSLEHRSWTAFSTSSSSPGTPLSPGNPFSPGTPISPGPIFPITSPPCHPSPSPFSPISSQVSSNPSPHPTSSPLPFSSSTPEFPVPLSQCPWSSLPTTSPPTFSPTCSQVTLSSPFFPPCPSTSSFPSTTAAPLLSLASAFSLAVMTVAQSLLSPSPGLLSQSPPAPPSPLPSLPLPPPVAPGGQESPSPHTAEVESEASPPPARPLPGEARLAPISEEGKPQLVGRFQVTSSKEPAEPLPLQPTSPTLSGSPKPSTPQLTSESSDTEDSAGGGPETREALAESDRAAEGLGAGVEEEGDDGKEPQVGGSPQPLSHPSPVWMNYSYSSLCLSSEESESSGEDEEFWAELQSLRQKHLSEVETLQTLQKKEIEDLYSRLGKQPPPGIVAPAAMLSSRQRRLSKGSFPTSRRNSLQRSEPPGPGIMRRNSLSGSSTGSQEQRASKGVTFAGDVGRM

SEQ ID NO: 69922 - protein, 663 aa, Homo sapiens
MRRRQQGAAGGNFPVGGSFPEDVSPHQDSGYAPSPRYLRRFREMKPRVLQRWSRQILRGLHFLHSRVPPILHRDLKCDNVFITGPTGSVKIGDLGLATLKRASFAKSVIGTPEFMAPEMYEEKYDEAVDVYAFGMCMLEMATSEYPYSECQNAAQIYRKVTSGRKPNSFHKVKIPEVKEIIEGCIRTDKNERFTIQDLLAHAFFREERGVHVELAEEDDGEKPGLKLWLRMEDARRGGRPRDNQAIEFLFQLGRDAAEEVAQEMVALGLVCEADYQPVARAVRERVAAIQRKREKLRKARELEALPPEPGPPPATVPMAPGPPSVFPPEPEEPEADQHQPFLFRHASYSSTTSDCETDGYLSSSGFLDASDPALQPPGGVPSSLAESHLCLPSAFALSIPRSGPGSDFSPGDSYASDAASGLSDVGEGMGQMRRPPGRNLRRRPRSRLRVTSVSDQNDRVVECQLQTHNSKMVTFRFDLDGDSPEEIAAAMVYNEFILPSERDGFLRRIREIIQRVETLLKRDTGPMEAAEDTLSPQEEPAPLPALPVPLPDPSNEELQSSTSLEHRSWTAFSTSSSSPGTPLSPGNPFSPGTPISPGPIALQRESRSFSLQRAQIQRTVLEAGQRPGKLWLRATVQLRVWGLELRRKEMMGRNPKLGAAPNP

SEQ ID NO: 69923 - protein, 156 aa, Homo sapiens
MGQMRRPPGRNLRRRPRSRLRVTSVSDQNDRVVECQLQTHNSKMVTFRFDLDGDSPEEIAAAMVYNEFILPSERDGFLRRIREIIQRVETLLKRDTGPMEAAEDTLSPQVRPLGGHFQGKWTLCSRVYYSLPSAVPLDLTPLHLWDPKTVALFFFF

SEQ ID NO: 69924 - protein, 280 aa, Homo sapiens
MRWFLPWTLAAVTAAAASTVLATALSPAPTTMDFTPAPLEDTSSRPQFCKWPCECPPSPPRCPLGVSLITDGCECCKMCAQQLGDNCTEAAICDPHRGLYCDYSGDRPRYAIGVCAHAVGEVEAWHRNCIAYTSPWSPCSTSCGLGVSTRISNVNAQCWPEQESRLCNLRPCDVDIHTLIKAGKKCLAVYQPEASMNFTLAGCISTRSYQPKYCGVCMDNRCCIPYKSKTIDVSFQCPDGLGFSRQVLWINACFCNLSCRNPNDIFADLESYPDFSEIAN

SEQ ID NO: 69925 - protein, 367 aa, Homo sapiens
MRWFLPWTLAAVTAAAASTVLATALSPAPTTMDFTPAPLEDTSSRPQFCKWPCECPPSPPRCPLGVSLITDGCECCKMCAQQLGDNCTEAAICDPHRGLYCDYSGDRPRYAIGVCAQVVGVGCVLDGVRYNNGQSFQPNCKYNCTCIDGAVGCTPLCLRVRPPRLWCPHPRRVSIPGHCCEQWVCEDDAKRPRKTAPRDTGAFDAVGEVEAWHRNCIAYTSPWSPCSTSCGLGVSTRISNVNAQCWPEQESRLCNLRPCDVDIHTLIKAGKKCLAVYQPEASMNFTLAGCISTRSYQPKYCGVCMDNRCCIPYKSKTIDVSFQCPDGLGFSRQVLWINACFCNLSCRNPNDIFADLESYPDFSEIAN

SEQ ID NO: 69926 - protein, 195 aa, Homo sapiens
MPVPLTSRHEVVPALDAGSSDSSSRQHRPGHDAVGEVEAWHRNCIAYTSPWSPCSTSCGLGVSTRISNVNAQCWPEQESRLCNLRPCDVDIHTLIKAGKKCLAVYQPEASMNFTLAGCISTRSYQPKYCGVCMDNRCCIPYKSKTIDVSFQCPDGLGFSRQVLWINACFCNLSCRNPNDIFADLESYPDFSEIAN

SEQ ID NO: 69927 - protein, 155 aa, Homo sapiens
MRWFLPWTLAAVTAAAASTVLATALSPAPTTMDFTPAPLEDTSSRPQFCKWPCECPPSPPRCPLGVSLITDGCECCKMCAQQLGDNCTEAAICDPHRGLYCDYSGDRPRYAIGVCARREEVSGCVPARGIHELHTCGLHQHTLLSTQVLWSLHGQ

SEQ ID NO: 69928 - protein, 122 aa, Homo sapiens
MRWFLPWTLAAVTAAAASTVLATAGKKCLAVYQPEASMNFTLAGCISTRSYQPKYCGVCMDNRCCIPYKSKTIDVSFQCPDGLGFSRQVLWINACFCNLSCRNPNDIFADLESYPDFSEIAN

SEQ ID NO: 69929 - protein, 250 aa, Homo sapiens
MRGTPKTHLLAFSLLCLLSKVRTQLCPTPCTCPWPPPRCPLGVPLVLDGCGCCRVCARRLGEPCDQLHVCDASQGLVCQPGAGPGGRGALCLLAEDDSSCEVNGRLYREGETFQPHCSIRCRCEDGGFTCVPLCSEDVRLPSWDCPHPRRVEVLGKCCPEWVCGQGGGLGTQPLPAQGPQFSGLVSSLPPGVPCPEWSTAWGPCSTTCGLGMATRVSNQNRFCRLETQRRLCLSRPCPPSRGRSPQNSAF

SEQ ID NO: 69930 - protein, 218 aa, Homo sapiens
MRGTPKTHLLAFSLLCLLSKVRTQLCPTPCTCPWPPPRCPLGVPLVLDGCGCCRVCARRLGEPCDQLHVCDASQGLVCQPGAGPGGRGALCLCKQDPSFLALSLPCPLVSPAQNGARPGDPARPPVGWAWPPGCPTRTASADWRPSAACACPGPAHPPGVAVHKTVPSRAGLGMGTRCPPSPAGGPVPGPWADGRWSVPRPLAAGNTLAWVHHAEHQY

SEQ ID NO: 69931 - protein, 250 aa, Homo sapiens; identical to SEQ ID NO: 69929

SEQ ID NO: 69932 - protein, 354 aa, Homo sapiens
MQGLLFSTLLLAGLAQFCCRVQGTGPLDTTPEGRPGEVSDAPQRKQFCHWPCKCPQQKPRCPPGVSLVRDGCGCCKICAKQPGEICNEADLCDPHKGLYCDYSVDRPRYETGVCAYLVAVGCEFNQVHYHNGQVFQPNPLFSCLCVSGAIGCTPLFIPKLAGSHCSGAKGGKKSDQSNCSLEPLLQQLSTSYKTMPAYRNLPLIWKKKCLVQATKWTPCSRTCGMGISNRVTNENSNCEMRKEKRLCYIQPCDSNILKTIKIPKGKTCQPTFQLSKAEKFVFSGCSSTQSYKPTFCGICLDKRCCIPNKSKMITIQFDCPNEGSFKWKMLWITSCVCQRNCREPGDIFSELKIL

SEQ ID NO: 69933 - protein, 372 aa, Homo sapiens
MNKRRLLYPSGWLHGPSDMQGLLFSTLLLAGLAQFCCRVQGTGPLDTTPEGRPGEVSDAPQRKQFCHWPCKCPQQKPRCPPGVSLVRDGCGCCKICAKQPGEICNEADLCDPHKGLYCDYSVDRPRYETGVCAYLVAVGCEFNQVHYHNGQVFQPNPLFSCLCVSGAIGCTPLFIPKLAGSHCSGAKGGKKSDQSNCSLEPLLQQLSTSYKTMPAYRNLPLIWKKKCLVQATKWTPCSRTCGMGISNRVTNENSNCEMRKEKRLCYIQPCDSNILKTIKIPKGKTCQPTFQLSKAEKFVFSGCSSTQSYKPTFCGICLDKRCCIPNKSKMITIQFDCPNEGSFKWKMLWITSCVCQRNCREPGDIFSELKIL

SEQ ID NO: 69934 - protein, 331 aa, Homo sapiens
MKISRGRVCLESENKDAGVAGRKQFCHWPCKCPQQKPRCPPGVSLVRDGCGCCKICAKQPGEICNEADLCDPHKGLYCDYSVDRPRYETGVCACKSVGCEFNQVHYHNGQVFQPNPLFSCLCVSGAIGCTPLFIPKLAGSHCSGAKGGKKSDQSNCSLEPLLQQLSTSYKTMPAYRNLPLIWKKKCLVQATKWTPCSRTCGMGISNRVTNENSNCEMRKEKRLCYIQPCDSNILKTIKIPKGKTCQPTFQLSKAEKFVFSGCSSTQSYKPTFCGICLDKRCCIPNKSKMITIQFDCPNEGSFKWKMLWITSCVCQRNCREPGDIFSELKIL

SEQ ID NO: 69935 - protein, 354 aa, Homo sapiens; identical to SEQ ID NO: 69932

SEQ ID NO: 69936 - protein, 230 aa, Homo sapiens
MQGLLFSTLLLAGLAQFCCRVQGTGPLDTTPEGRPGEVSDAPQRKQFCHWPCKCPQQKPRCPPGVSLVRDGCGCCKICAKQPGEICNEADLCDPHKGLYCDYSVDRPRYETGVCAYLVAVGCEFNQVHYHNGQVFQPNPLFSCLCVSGAIGCTPLFIPKLAGSHCSGAKGGKKSDQSNCSLEPLLQQLSTSYKTMPAYRNLPLIWKKNVLCKQQNGLPAPEHVGWEYLTG

SEQ ID NO: 69937 - protein, 130 aa, Homo sapiens
MGISNRVTNENSNCEMRKEKRLCYIQPCDSNILKTIKIPKGKTCQPTFQLSKAEKFVFSGCSSTQSYKPTFCGICLDKRCCIPNKSKMITIQFDCPNEGSFKWKMLWITSCVCQRNCREPGDIFSELKIL

SEQ ID NO: 69938 - protein, 541 aa, Homo sapiens
MAGAIIENMSTKKLCIVGGILLVFQIIAFLVGGLIAPGPTTAVSYMSVKCVDARKNHHKTKWFVPWGPNHCDKIRDIEEAIPREIEANDIVFSVHIPLPHMEMSPWFQFMLFILQLDIAFKLNNQIRENAEVSMDVSLAYRDDAFAEWTEMAHERVPRKLKCTFTSPKTPEHEGRYYECDVLPFMEIGSVAHKFYLLNIRLPVNEKKKINVGIGEIKDIRLVGIHQNGGFTKVWFAMKTFLTPSIFIIMVWYWRRITMMSRPPVLLEKVIFALGISMTFINIPVEWFSIGFDWTWMLLFGDIRQGIFYAMLLSFWIIFCGEHMMDQHERNHIAGYWKQVGPIAVGSFCLFIFDMCERGVQLTNPFYSIWTTDIGTELAMAFIIVAGICLCLYFLFLCFMVFQVFRNISGKQSSLPAMSKVRRLHYEGLIFRFKFLMLITLACAAMTVIFFIVSQVTEGHWKWGGVTVQVNSAFFTGIYGMWNLYVFALMFLYAPSHKNYGEDQSNGDLGVHSGEELQLTTTITHVDGPTEIYKLTRKEAQE

SEQ ID NO: 69939 - protein, 543 aa, Homo sapiens
MAGAIIENMSTKKLCIVGGILLVFQIIAFLVGGLIGPTTAVSYMSVKCVDARKNHHKTKWFVPWGPNHCDKIRDIEEAIPREIEANDIVFSVHIPLPHMEMSPWFQFMLFILQLDIAFKLNNQIRENAEVSMDVSLAYRDDAFAEWTEMAHERVPRKLKCTFTSPKTPEHEGRYYECDVLPFMEIGSVAHKFYLLNIRLPVNEKKKINVGIGEIKDIRLVGIHQNGGFTKVWFAMKTFLTPSIFIIMVWYWRRITMMSRPPVLLEKVIFALGISMTFINIPVEWFSIGFDWTWMLLFGDIRQGIFYAMLLSFWIIFCGEHMMDQHERNHIAGYWKQVGPIAVGSFCLFIFDMCERGVQLTNPFYSIWTTDIGTELAMAFIIVAGICLCLYFLFLCFMVFQVFRNISGKQSSLPAMSKVRRLHYEGLIFRFKFLMLITLACAAMTVIFFIVSQVTEGHWKWGGVTVQVNSAFFTGIYGMWNLYVFALMFLYAPSHKNYGEDQSNGMQLPCKSREDCALFVSELYQELFSASKYSFINDNAASGI

SEQ ID NO: 69940 - protein, 450 aa, Homo sapiens
MAGAIIENMSTKKLCIVGGILLVFQIIAFLVGGLIGENAEVSMDVSLAYRDDAFAEWTEMAHERVPRKLKCTFTSPKTPEHEGRYYECDVLPFMEIGSVAHKFYLLNIRLPVNEKKKINVGIGEIKDIRLVGIHQNGGFTKVWFAMKTFLTPSIFIIMVWYWRRITMMSRPPVLLEKVIFALGISMTFINIPVEWFSIGFDWTWMLLFGDIRQGIFYAMLLSFWIIFCGEHMMDQHERNHIAGYWKQVGPIAVGSFCLFIFDMCERGVQLTNPFYSIWTTDIGTELAMAFIIVAGICLCLYFLFLCFMVFQVFRNISGKQSSLPAMSKVRRLHYEGLIFRFKFLMLITLACAAMTVIFFIVSQVTEGHWKWGGVTVQVNSAFFTGIYGMWNLYVFALMFLYAPSHKNYGEDQSNGDLGVHSGEELQLTTTITHVDGPTEIYKLTRKEAQE

SEQ ID NO: 69941 - protein, 545 aa, Homo sapiens
MAGAIIENMSTKKLCIVGGILLVFQIIAFLVGGLIAPGPTTAVSYMSVKCVDARKNHHKTKWFVPWGPNHCDKIRDIEEAIPREIEANDIVFSVHIPLPHMEMSPWFQFMLFILQLDIAFKLNNQIRENAEVSMDVSLAYRDDAFAEWTEMAHERVPRKLKCTFTSPKTPEHEGRYYECDVLPFMEIGSVAHKFYLLNIRLPVNEKKKINVGIGEIKDIRLVGIHQNGGFTKVWFAMKTFLTPSIFIIMVWYWRRITMMSRPPVLLEKVIFALGISMTFINIPVEWFSIGFDWTWMLLFGDIRQGIFYAMLLSFWIIFCGEHMMDQHERNHIAGYWKQVGPIAVGSFCLFIFDMCERGVQLTNPFYSIWTTDIGTELAMAFIIVAGICLCLYFLFLCFMVFQVFRNISGKQSSLPAMSKVRRLHYEGLIFRFKFLMLITLACAAMTVIFFIVSQVTEGHWKWGGVTVQVNSAFFTGIYGMWNLYVFALMFLYAPSHKNYGEDQSNGMQLPCKSREDCALFVSELYQELFSASKYSFINDNAASGI

SEQ ID NO: 69942 - protein, 713 aa, Homo sapiens
MAGSFCWRMLGLVSKVGNRARCFSSMAASEEELLDFSGSELQFNSCSLHLSLHPFFNFLLGIHSCFVCKESKTDVKRCVVTQCGKFYHEACVKKYPLTVFESRGFRCPLHSCVSCHASNPSNPRPSKGKMMRCVRCPVAYHSGDACLAAGCSVIASNSIICTAHFTARKGKRHHAHVNVSWCFVCSKGGSLLCCESCPAAFHPDCLNIEMPDGSWFCNDCRAGKKLHFQDIIWVKLGNYRWWPAEVCHPKNVPPNIQKMKHEIGEFPVFFFGSKDYYWTHQARVFPYMEGDRGSRYQGVRGIGRVFKNALQEAEARFREIKLQREARETQESERKPPPYKHIKVNKPYGKVQIYTADISEIPKCNCKPTDENPCGFDSECLNRMLMFECHPQVCPAGEFCQNQCFTKRQYPETKIIKTDGKGWGLVAKRDIRKGEFVNEYVGELIDEEECMARIKHAHENDITHFYMLTIDKDRIIDAGPKGNYSRFMNHSCQPNCETLKWTVNGDTRVGLFAVCDIPAGTELTFNYNLDCLGNEKTVCRCGASNCSGFLGDRPKTSTTLSSEEKGKKTKKKTRRRRAKGEGKRQSEDECFRCGDGGQLVLCDRKFCTKAYHLSCLGLGKRPFGKWECPWHHCDVCGKPSTSFCHLCPNSFCKEHQDGTAFSCTPDGRSYCCEHDLGAASVRSTKTEKPPPEPGKPKGKRRRRRGWRRVTEGK

SEQ ID NO: 69943 - protein, 1365 aa, Homo sapiens
MEFSIKQSPLSVQSVVKCIKMKQAPEILGSANGKTPSCEVNRECSVFLSKAQLSSSLQEGVMQKFNGHDALPFIPADKLKDLTSRVFNGEPGAHDAKLRFESQEMKGIGTPPNTTPIKNGSPEIKLKITKTYMNGKPLFESSICGDSAADVSQSEENGQKPENKARRNRKRSIKYDSLLEQGLVEAALVSKISSPSDKKIPAKKESCPNTGRDKDHLLKYNVGDLVWSKVSGYPWWPCMVSADPLLHSYTKLKGQKKSARQYHVQFFGDAPERAWIFEKSLVAFEGEGQFEKLCQESAKQAPTKAEKIKLLKPISGKLRAQWEMGIVQAEEAASMSVEERKAKFTFLYVGDQLHLNPQVAKEAGIAAESLGEMAESSGVSEEAAENPKSVREECIPMKRRRRAKLCSSAETLESHPDIGKSTPQKTAEADPRRGVGSPPGRKKTTVSMPRSRKGDAASQFLVFCQKHRDEVVAEHPDASGEEIEELLRSQWSLLSEKQRARYNTKFALVAPVQAEEDSGNVNGKKRNHTKRIQDPTEDAEAEDTPRKRLRTDKHSLRKRDTITDKTARTSSYKAMEAASSLKSQAATKNLSDACKPLKKRNRASTAASSALGFSKSSSPSASLTENEVSDSPGDEPSESPYESADETQTEVSVSSKKSERGVTAKKEYVCQLCEKPGSLLLCEGPCCGAFHLACLGLSRRPEGRFTCSECASGIHSCFVCKESKTDVKRCVVTQCGKFYHEACVKKYPLTVFESRGFRCPLHSCVSCHASNPSNPRPSKGKMMRCVRCPVAYHSGDACLAAGCSVIASNSIICTAHFTARKGKRHHAHVNVSWCFVCSKGGSLLCCESCPAAFHPDCLNIEMPDGSWFCNDCRAGKKLHFQDIIWVKLGNYRWWPAEVCHPKNVPPNIQKMKHEIGEFPVFFFGSKDYYWTHQARVFPYMEGDRGSRYQGVRGIGRVFKNALQEAEARFREIKLQREARETQESERKPPPYKHIKVNKPYGKVQIYTADISEIPKCNCKPTDENPCGFDSECLNRMLMFECHPQVCPAGEFCQNQCFTKRQYPETKIIKTDGKGWGLVAKRDIRKGEFVNEYVGELIDEEECMARIKHAHENDITHFYMLTIDKDRIIDAGPKGNYSRFMNHSCQPNCETLKWTVNGDTRVGLFAVCDIPAGTELTFNYNLDCLGNEKTVCRCGASNCSGFLGDRPKTSTTLSSEEKGKKTKKKTRRRRAKGEGKRQSEDECFRCGDGGQLVLCDRKFCTKAYHLSCLGLGKRPFGKWECPWHHCDVCGKPSTSFCHLCPNSFCKEHQDGTAFSCTPDGRSYCCEHDLGAASVRSTKTEKPPPEPGKPKGKRRRRRGWRRVTEGK

SEQ ID NO: 69944 - protein, 1365 aa, Homo sapiens; identical to SEQ ID NO: 69943

SEQ ID NO: 69945 - protein, 1365 aa, Homo sapiens; identical to SEQ ID NO: 69943

SEQ ID NO: 69946 - protein, 647 aa, Homo sapiens
MEFSIKQSPLSVQSVVKCIKMKQAPEILGSANGKTPSCEVNRECSVFLSKAQLSSSLQEGVMQKFNGHDALPFIPADKLKDLTSRVFNGEPGAHDAKLRFESQEMKGIGTPPNTTPIKNGSPEIKLKITKTYMNGKPLFESSICGDSAADVSQSEENGQKPENKARRNRKRSIKYDSLLEQGLVEAALVSKISSPSDKKIPAKKESCPNTGRDKDHLLKYNVGDLVWSKVSGYPWWPCMVSADPLLHSYTKLKGQKKSARQYHVQFFGDAPERAWIFEKSLVAFEGEGQFEKLCQESAKQAPTKAEKIKLLKPISGKLRAQWEMGIVQAEEAASMSVEERKAKFTFLYVGDQLHLNPQVAKEAGIAAESLGEMAESSGVSEEAAENPKSVREECIPMKRRRRAKLCSSAETLESHPDIGKSTPQKTAEADPRRGVGSPPGRKKTTVSMPRSRKGDAASQFLVFCQKHRDEVVAEHPDASGEEIEELLRSQWSLLSEKQRARYNTKFALVAPVQAEEDSGNVNGKKRNHTKRIQDPTEDAEAEDTPRKRLRTDKHSLRKRDTITDKTARTSSYKAMEAASSLKSQAATKNLSDACKPLKKRNRASTAASSALGFSKSSSPSASLTENELLWEPTPVKLDLNPAALYCT

SEQ ID NO: 69947 - protein, 629 aa, Homo sapiens
MEFSIKQSPLSVQSVVKCIKMKQAPEILGSANGKTPSCEVNRECSVFLSKAQLSSSLQEGVMQKFNGHDALPFIPADKLKDLTSRVFNGEPGAHDAKLRFESQEMKGIGTPPNTTPIKNGSPEIKLKITKTYMNGKPLFESSICGDSAADVSQSEENGQKPENKARRNRKRSIKYDSLLEQGLVEAALVSKISSPSDKKIPAKKESCPNTGRDKDHLLKYNVGDLVWSKVSGYPWWPCMVSADPLLHSYTKLKGQKKSARQYHVQFFGDAPERAWIFEKSLVAFEGEGQFEKLCQESAKQAPTKAEKIKLLKPISGKLRAQWEMGIVQAEEAASMSVEERKAKFTFLYVGDQLHLNPQVAKEAGIAAESLGEMAESSGVSEEAAENPKSVREECIPMKRRRRAKLCSSAETLESHPDIGKSTPQKTAEADPRRGVGSPPGRKKTTVSMPRSRKGDAASQFLVFCQKHRDEVVAEHPDASGEEIEELLRSQWSLLSEKQRARYNTKFALVAPVQAEEDSGNVNGKKRNHTKRIQDPTEDAEAEDTPRKRLRTDKHSLRKRDTITDKTARTSSYKAMEAASSLKSQAATKNLSDACKPLKKRNRASTAASSALGFSKSSSPSASLTENEVK

SEQ ID NO: 69948 - protein, 273 aa, Homo sapiens
MEFSIKQSPLSVQSVVKCIKMKQAPEILGSANGKTPSCEVNRECSVFLSKAQLSSSLQEGVMQKFNGHDALPFIPADKLKDLTSRVFNGEPGAHDAKLRFESQEMKGIGTPPNTTPIKNGSPEIKLKITKTYMNGKPLFESSICGDSAADVSQSEENGQKPENKARRNRKRSIKYDSLLEQGLVEAALVSKISSPSDKKIPAKKESCPNTGRDKDHLLKYNVGDLVWSKVSGYPWWPCMVSADPLLHSYTKLKGIFKSKKFEHLKTSQIVLKD

SEQ ID NO: 69949 - protein, 647 aa, Homo sapiens; identical to SEQ ID NO: 69946

SEQ ID NO: 69950 - protein, 37 aa, Homo sapiens
MEFSIKQSPLSVQSVVKCIKMKQAPEILGSANGKTPS

SEQ ID NO: 69951 - protein, 1365 aa, Homo sapiens; identical to SEQ ID NO: 69943

SEQ ID NO: 69952 - protein, 392 aa, Homo sapiens
MEFSIKQSPLSVQSVVKCIKMKQAPEILGSANGKTPSCEVNRECSVFLSKAQLSSSLQEGVMQKFNGHDALPFIPADKLKDLTSRVFNGEPGAHDAKLRFESQEMKGIGTPPNTTPIKNGSPEIKLKITKTYMNGKPLFESSICGDSAADVSQSEENGQKPENKARRNRKRSIKYDSLLEQGLVEAALVSKISSPSDKKIPAKKESCPNTGRDKDHLLKYNVGDLVWSKVSGYPWWPCMVSADPLLHSYTKLKGQKKSARQYHVQFFGDAPERAWIFEKSLVAFEGEGQFEKLCQESAKQAPTKAEKIKLLKPISGKLRAQWEMGIVQAEEAASMSVEERKAKFTFLYVGDQLHLNPQVAKEAGIAAESLGEMAESSGVSEEAAENPKSVRE

SEQ ID NO: 69953 - protein, 629 aa, Homo sapiens; identical to SEQ ID NO: 69947

SEQ ID NO: 69954 - protein, 199 aa, Homo sapiens
MEFSIKQSPLSVQSVVKCIKMKQAPEILGSANGKTPSCEVNRECSVFLSKAQLSSSLQEGVMQKFNGHDALPFIPADKLKDLTSRVFNGEPGAHDAKLRFESQEMKGIGTPPNTTPIKNGSPEIKLKITKTYMNGKPLFESSICGDSAADVSQSEENGQKPENKARRNRKRSIKYDSLLEQGLVEAALVSKISSPSDKK

SEQ ID NO: 69955 - protein, 645 aa, Homo sapiens
MDFSFSFMQGIMGNTIQQPPQLIDSANIRQEDAFDNNSDIAEDGGQTPYEATLQQGFQYPATTEDLPPLTNGYPSSISVYETQTKYQSYNQYPNGSANGFGAVRNFSPTDYYHSEIPNTRPHEILEKPSPPQPPPPPSVPQTVIPKKTGSPEIKLKITKTIQNGRELFESSLCGDLLNEVQASEHTKSKHESRKEKRKKSNKHDSSRSEERKSHKIPKLEPEEQNRPNERVDTVSEKPREEPVLKEEAPVQPILSSVPTTEVSTGVKFQVGDLVWSKVGTYPWWPCMVSSDPQLEVHTKINTRGAREYHVQFFSNQPERAWVHEKRVREYKGHKQYEELLAEATKQASNHSEKQKIRKPRPQRERAQWDIGIAHAEKALKMTREERIEQYTFIYIDKQPEEALSQAKKSVASKTEVKKTRRPRSVLNTQPEQTNAGEVASSLSSTEIRRHSQRRHTSAEEEEPPPVKIAWKTAAARKSLPASITMHKGSLDLQKCNMSPVVKIEQVFALQNATGDGKFIDQFVYSTKGIGNKTEISVRGQDRLIISTPNQRNEKPTQSVSSPEATSGSTGSVEKKQQRRSIRTRSESEKSTEVVPKKKIKKEQVETVPQATVKTGLQKGSADRGVQGSVRFSDSSVSAAIEETVD

SEQ ID NO: 69956 - protein, 1437 aa, Homo sapiens
MDFSFSFMQGIMGNTIQQPPQLIDSANIRQEDAFDNNSDIAEDGGQTPYEATLQQGFQYPATTEDLPPLTNGYPSSISVYETQTKYQSYNQYPNGSANGFGAVRNFSPTDYYHSEIPNTRPHEILEKPSPPQPPPPPSVPQTVIPKKTGSPEIKLKITKTIQNGRELFESSLCGDLLNEVQASEHTKSKHESRKEKRKKSNKHDSSRSEERKSHKIPKLEPEEQNRPNERVDTVSEKPREEPVLKEEAPVQPILSSVPTTEVSTGVKFQVGDLVWSKVGTYPWWPCMVSSDPQLEVHTKINTRGAREYHVQFFSNQPERAWVHEKRVREYKGHKQYEELLAEATKQASNHSEKQKIRKPRPQRERAQWDIGIAHAEKALKMTREERIEQYTFIYIDKQPEEALSQAKKSVASKTEVKKTRRPRSVLNTQPEQTNAGEVASSLSSTEIRRHSQRRHTSAEEEEPPPVKIAWKTAAARKSLPASITMHKGSLDLQKCNMSPVVKIEQVFALQNATGDGKFIDQFVYSTKGIGNKTEISVRGQDRLIISTPNQRNEKPTQSVSSPEATSGSTGSVEKKQQRRSIRTRSESEKSTEVVPKKKIKKEQVETVPQATVKTGLQKGASEISDSCKPLKKRSRASTDVEMTSSAYRDTSDSDSRGLSDLQVGFGKQVDSPSATADADVSDVQSMDSSLSRRGTGMSKKDTVCQICESSGDSLIPCEGECCKHFHLECLGLASLPDSKFICMECKTGQHPCFSCKVSGKDVKRCSVGACGKFYHEACVRKFPTAIFESKGFRCPQHCCSACSMEKDIHKASKGRMMRCLRCPVAYHSGDACIAAGSMLVSSYILICSNHSKRSSNSSAVNVGFCFVCARGLIVQDHSDPMFSSYAYKSHYLLNESNRAELMKLPMIPSSSASKKKCEKGGRLLCCESCPASFHPECLSIEMPEGCWNCNDCKAGKKLHYKQIVWVKLGNYRWWPAEICNPRSVPLNIQGLKHDLGDFPVFFFGSHDYYWVHQGRVFPYVEGDKSFAEGQTSINKTFKKALEEAAKRFQELKAQRESKEALEIEKNSRKPPPYKHIKANKVIGKVQIQVADLSEIPRCNCKPADENPCGLESECLNRMLQYECHPQVCPAGDRCQNQCFTKRLYPDAEIIKTERRGWGLRTKRSIKKGEFVNEYVGELIDEEECRLRIKRAHENSVTNFYMLTVTKDRIIDAGPKGNYSRFMNHSCNPNCETQKWTVNGDVRVGLFALCDIPAGMELTFNYNLDCLGNGRTECHCGADNCSGFLGVRPKSACASTNEEKAKNAKLKQKRRKIKTEPKQMHEDYCFQCGDGGELVMCDKKDCPKAYHLLCLNLTQPPYGKWECPWHQCDECSSAAVSFCEFCPHSFCKDHEKGALVPSALEGRLCCSEHDPMAPVSPEYWSKIKCKWESQDHGEEVKE

SEQ ID NO: 69957 - protein, 1388 aa, Homo sapiens
MDFSFSFMQGIMGNTIQQPPQLIDSANIRQEDAFDNNSDIAEDGGQTPYEATLQQGFQYPATTEDLPPLTNGYPSSISVYETQTKYQSYNQYPNGSANGFGAVRNFSPTDYYHSEIPNTRPHEILEKPSPPQPPPPPSVPQTVIPKKTGSPEIKLKITKTIQNGRELFESSLCGDLLNEVQASEHTKSKHESRKEKRKKSNKHDSSRSEERKSHKIPKLEPEEQNRPNERVDTVSEKPREEPVLKEEAPVQPILSSVPTTEVSTGVKFQVGDLVWSKVGTYPWWPCMVSSDPQLEVHTKINTRGAREYHVQFFSNQPERAWVHEKRVREYKGHKQYEELLAEATKQASNHSEKQKIRKPRPQRERAQWDIGIAHAEKALKMTREERIEQYTFIYIDKQPEEALSQAKKSVASKTEVKKTRRPRSVLNTQPEQTNAGEVASSLSSTEIRRHSQRRHTSAEEEEPPPVKIAWKTAAARKSLPASITMHKGSLDLQKCNMSPVVKIEQVFALQNATGDGKFIDQFVYSTKGIGNKTEISVRGQDRLIISTPNQRNEKPTQSVSSPEATSGSTGSVEKKQQRRSIRTRSESEKSTEVVPKKKIKKEQVETVPQATVKTGLQKGASEISDSCKPLKKRSRASTDVEMTSSAYRDTSDSDSRGLSDLQVGFGKQVDSPSATADADVSDVQSMDSSLSRRGTGMSKKDTVCQICESSGDSLIPCEGECCKHFHLECLGLASLPDSKFICMECKTGQHPCFSCKVSGKDVKRCSVGACGKFYHEACVRKFPTAIFESKGFRCPQHCCSACSMEKDIHKASKGRMMRCLRCPVAYHSGDACIAAGSMLVSSYILICSNHSKRSSNSSAVNVGFCFVCARGGRLLCCESCPASFHPECLSIEMPEGCWNCNDCKAGKKLHYKQIVWVKLGNYRWWPAEICNPRSVPLNIQGLKHDLGDFPVFFFGSHDYYWVHQGRVFPYVEGDKSFAEGQTSINKTFKKALEEAAKRFQELKAQRESKEALEIEKNSRKPPPYKHIKANKVIGKVQIQVADLSEIPRCNCKPADENPCGLESECLNRMLQYECHPQVCPAGDRCQNQCFTKRLYPDAEIIKTERRGWGLRTKRSIKKGEFVNEYVGELIDEEECRLRIKRAHENSVTNFYMLTVTKDRIIDAGPKGNYSRFMNHSCNPNCETQKWTVNGDVRVGLFALCDIPAGMELTFNYNLDCLGNGRTECHCGADNCSGFLGVRPKSACASTNEEKAKNAKLKQKRRKIKTEPKQMHEDYCFQCGDGGELVMCDKKDCPKAYHLLCLNLTQPPYGKWECPWHQCDECSSAAVSFCEFCPHSFCKDHEKGALVPSALEGRLCCSEHDPMAPVSPEYWSKIKCKWESQDHGEEVKE

SEQ ID NO: 69958 - protein, 1374 aa, Homo sapiens
MDFSFSFMQGIMGNTIQQPPQLIDSANIRQEDAFDNNSDIAEDGGQTPYEATLQQGFQYPATTEDLPPLPPPPPSVPQTVIPKKTGSPEIKLKITKTIQNGRELFESSLCGDLLNEVQASEHTKSKHESRKEKRKKSNKHDSSRSEERKSHKIPKLEPEEQNRPNERVDTVSEKPREEPVLKEEAPVQPILSSVPTTEVSTGVKFQVGDLVWSKVGTYPWWPCMVSSDPQLEVHTKINTRGAREYHVQFFSNQPERAWVHEKRVREYKGHKQYEELLAEATKQASNHSEKQKIRKPRPQRERAQWDIGIAHAEKALKMTREERIEQYTFIYIDKQPEEALSQAKKSVASKTEVKKTRRPRSVLNTQPEQTNAGEVASSLSSTEIRRHSQRRHTSAEEEEPPPVKIAWKTAAARKSLPASITMHKGSLDLQKCNMSPVVKIEQVFALQNATGDGKFIDQFVYSTKGIGNKTEISVRGQDRLIISTPNQRNEKPTQSVSSPEATSGSTGSVEKKQQRRSIRTRSESEKSTEVVPKKKIKKEQVETVPQATVKTGLQKGASEISDSCKPLKKRSRASTDVEMTSSAYRDTSDSDSRGLSDLQVGFGKQVDSPSATADADVSDVQSMDSSLSRRGTGMSKKDTVCQICESSGDSLIPCEGECCKHFHLECLGLASLPDSKFICMECKTGQHPCFSCKVSGKDVKRCSVGACGKFYHEACVRKFPTAIFESKGFRCPQHCCSACSMEKDIHKASKGRMMRCLRCPVAYHSGDACIAAGSMLVSSYILICSNHSKRSSNSSAVNVGFCFVCARGLIVQDHSDPMFSSYAYKSHYLLNESNRAELMKLPMIPSSSASKKKCEKGGRLLCCESCPASFHPECLSIEMPEGCWNCNDCKAGKKLHYKQIVWVKLGNYRWWPAEICNPRSVPLNIQGLKHDLGDFPVFFFGSHDYYWVHQGRVFPYVEGDKSFAEGQTSINKTFKKALEEAAKRFQELKAQRESKEALEIEKNSRKPPPYKHIKANKVIGKVQIQVADLSEIPRCNCKPADENPCGLESECLNRMLQYECHPQVCPAGDRCQNQCFTKRLYPDAEIIKTERRGWGLRTKRSIKKGEFVNEYVGELIDEEECRLRIKRAHENSVTNFYMLTVTKDRIIDAGPKGNYSRFMNHSCNPNCETQKWTVNGDVRVGLFALCDIPAGMELTFNYNLDCLGNGRTECHCGADNCSGFLGVRPKSACASTNEEKAKNAKLKQKRRKIKTEPKQMHEDYCFQCGDGGELVMCDKKDCPKAYHLLCLNLTQPPYGKWECPWHQCDECSSAAVSFCEFCPHSFCKDHEKGALVPSALEGRLCCSEHDPMAPVSPEYWSKIKCKWESQDHGEEVKE

SEQ ID NO: 69959 - protein, 1426 aa, Homo sapiens
MDFSFSFMQGIMGNTIQQPPQLIDSANIRQEDAFDNNSDIAEDGGQTPYEATLQQGFQYPATTEDLPPLTNGYPSSISVYETQTKYQSYNQYPNGSANGFGAVRNFSPTDYYHSEIPNTRPHEILEKPSPPQPPPPPSVPQTVIPKKTGSPEIKLKITKTIQNGRELFESSLCGDLLNEVQASEHTKSKHESRKEKRKKSNKHDSSRSEERKSHKIPKLEPEEQNRPNERVDTVSEKPREEPVLKEEAPVQPILSSVPTTEVSTGVKFQVGDLVWSKVGTYPWWPCMVSSDPQLEVHTKINTRGAREYHVQFFSNQPERAWVHEKRVREYKGHKQYEELLAEATKQASNHSEKQKIRKPRPQRERAQWDIGIAHAEKALKMTREERIEQYTFIYIDKQPEEALSQAKKSVASKTEVKKTRRPRSVLNTQPEQTNAGEVASSLSSTEIRRHSQRRHTSAEEEEPPPVKIAWKTAAARKSLPASITMHKGSLDLQKCNMSPVVKIEQVFALQNATGDGKFIDQFVYSTKGIGNKTEISVRGQDRLIISTPNQRNEKPTQSVSSPEATSGSTGSVEKKQQRRSIRTRSESEKSTEVVPKKKIKKEQVETVPQATVKTGLQKGASEISDSCKPLKKRSRASTDVEMTSSAYRDTSDSDSRGLSDLQVGFGKQVDSPSATADADVSDVQSMDSSLSRRGTGMSKKDTVCQICESSGDSLIPCEGECCKHFHLECLGLASLPDSKFICMECKTGQHPCFSCKVSGKDVKRCSVGACGKFYHEACVRKFPTAIFESKGFRCPQHCCSACSMEKDIHKASKGRMMRCLRCPVAYHSGDACIAAGSMLVSSYILICSNHSKRSSNSSAVNVGFCFVCARGLIVQDHSDPMFSSYAYKSHYLLNESNRAELMKLPMIPSSSASKKKCEKGGRLLCCESCPASFHPECLSIEMPEGCWNCNDCKAGKKLHYKQIVWVKLGNYRWWPAEICNPRSVPLNIQGLKHDLGDFPVFFFGSHDYYWVHQGRVFPYVEGDKSFAEGQTSINKTFKKALEEAAKRFQELKAQRESKEALEIEKNSRKPPPYKHIKANKVIGKVQIQVADLSEIPRCNCKPADENPCGLESECLNRMLQYECHPQVCPAGDRCQNQCFTKRLYPDAEIIKTERRGWGLRTKRSIKKGEFVNEYVGELIDEEECRLRIKRAHENSDRIIDAGPKGNYSRFMNHSCNPNCETQKWTVNGDVRVGLFALCDIPAGMELTFNYNLDCLGNGRTECHCGADNCSGFLGVRPKSACASTNEEKAKNAKLKQKRRKIKTEPKQMHEDYCFQCGDGGELVMCDKKDCPKAYHLLCLNLTQPPYGKWECPWHQCDECSSAAVSFCEFCPHSFCKDHEKGALVPSALEGRLCCSEHDPMAPVSPEYWSKIKCKWESQDHGEEVKE

SEQ ID NO: 69960 - protein, 282 aa, Homo sapiens
MDFSFSFMQGIMGNTIQQPPQLIDSANIRQEDAFDNNSDIAEDGGQTPYEATLQQGFQYPATTEDLPPLTNGYPSSISVYETQTKYQSYNQYPNGSANGFGAVRNFSPTDYYHSEIPNTRPHEILEKPSPPQPPPPPSVPQTVIPKKTGSPEIKLKITKTIQNGRELFESSLCGDLLNEVQASEHTKSKHESRKEKRKKSNKHDSSRSEERKSHKIPKLEPEEQNRPNERVDTVSEKPREEPVLKEEAPVQPILSSVPTTEVSTGVKFQVGDLVWSKVGTYP

SEQ ID NO: 69961 - protein, 25 aa, Homo sapiens
MDFSFSFMQGIMGNTIQQPPQLIDS

SEQ ID NO: 69962 - protein, 15 aa, Homo sapiens
MDFSFSFMQGIMGNT

SEQ ID NO: 69963 - protein, 539 aa, Homo sapiens
MPGQRRALSPKMASMRESDTGLWLHNKLGATDELWAPPSIASLLTAAVIDNIRLCFHGLSSAVKLKLLLGTLHLPRRTVDEMKGALMEIIQLASLDSDPWVLMVADILKSFPDTGSLNLELEEQNPNVQDILGELREKVGECEASAMLPLECQYLNKNALTTLAGPLTPPVKHFQLKRKPKSATLRAELLQKSTETAQQLKRSAGVPFHAKGRGLLRKMDTTTPLKGIPKQAPFRSPTAPSVFSPTGNRTPIPPSRTLLRKERGVKLLDISELDMVGAGREAKRRRKTLDAEVVEKPAKEETVVENATPDYAAGLVSTQKLGSLNNEPALPSTSYLPSTPSVVPASSYIPSSETPPAPSSREASRPPEEPSAPSPTLPAQFKQRAPMYNSGLSPATPTPAAPTSPLTPTTPPAVAPTTQTPPVAMVAPQTQAPAQQQPKKNLSLTREQMFAAQEMFKTANKVTRPEKALILGFMAGSRENPCQEQGDVIQIKLSEHTEDLPKADGQGSTTMLVDTVFEMNYATGQWTRFKKYKPMTNVS

SEQ ID NO: 69964 - protein, 528 aa, Homo sapiens
MASMRESDTGLWLHNKLGATDELWAPPSIASLLTAAVIDNIRLCFHGLSSAVKLKLLLGTLHLPRRTVDEMKGALMEIIQLASLDSDPWVLMVADILKSFPDTGSLNLELEEQNPNVQDILGELREKVGECEASAMLPLECQYLNKNALTTLAGPLTPPVKHFQLKRKPKSATLRAELLQKSTETAQQLKRSAGVPFHAKGRGLLRKMDTTTPLKGIPKQAPFRSPTAPSVFSPTGNRTPIPPSRTLLRKERGVKLLDISELDMVGAGREAKRRRKTLDAEVVEKPAKEETVVENATPDYAAGLVSTQKLGSLNNEPALPSTSYLPSTPSVVPASSYIPSSETPPAPSSREASRPPEEPSAPSPTLPAQFKQRAPMYNSGLSPATPTPAAPTSPLTPTTPPAVAPTTQTPPVAMVAPQTQAPAQQQPKKNLSLTREQMFAAQEMFKTANKVTRPEKALILGFMAGSRENPCQEQGDVIQIKLSEHTEDLPKADGQGSTTMLVDTVFEMNYATGQWTRFKKYKPMTNVS

SEQ ID NO: 69965 - protein, 393 aa, Homo sapiens
MLPLECQYLNKNALTTLAGPLTPPVKHFQLKRKPKSATLRAELLQKSTETAQQLKRSAGVPFHAKGRGLLRKMDTTTPLKGIPKQAPFRSPTAPSVFSPTGNRTPIPPSRTLLRKERGVKLLDISELDMVGAGREAKRRRKTLDAEVVEKPAKEETVVENATPDYAAGLVSTQKLGSLNNEPALPSTSYLPSTPSVVPASSYIPSSETPPAPSSREASRPPEEPSAPSPTLPAQFKQRAPMYNSGLSPATPTPAAPTSPLTPTTPPAVAPTTQTPPVAMVAPQTQAPAQQQPKKNLSLTREQMFAAQEMFKTANKVTRPEKALILGFMAGSRENPCQEQGDVIQIKLSEHTEDLPKADGQGSTTMLVDTVFEMNYATGQWTRFKKYKPMTNVS

SEQ ID NO: 69966 - protein, 890 aa, Homo sapiens
MDSNTAPLGPSCPQPPPAPQPQARSRLNATASLEQERSERPRAPGPQAGPGPGVRDAAAPAEPQAQHTRSRERADGTGPTKGDMEIPFEEVLERAKAGDPKAQTEVGKHYLQLAGDTDEELNSCTAVDWLVLAAKQGRREAVKLLRRCLADRRGITSENEREVRQLSSETDLERAVRKAALVMYWKLNPKKKKQVAVAELLENVGQVNEHDGGAQPGPVPKSLQKQRRMLERLVSSESKNYIALDDFVEITKKYAKGVIPSSLFLQDDEDDDELAGKSPEDLPLRLKVVKYPLHAIMEIKEYLIDMASRAGMHWLSTIIPTHHINALIFFFIVSNLTIDFFAFFIPLVIFYLSFISMVICTLKVFQDSKAWENFRTLTDLLLRFEPNLDVEQAEVNFGWNHLEPYAHFLLSVFFVIFSFPIASKDCIPCSELAVITGFFTVTSYLSLSTHAEPYTRRALATEVTAGLLSLLPSMPLNWPYLKVLGQTFITVPVGHLVVLNVSVPCLLYVYLLYLFFRMAQLRNFKGTYCYLVPYLVCFMWCELSVVILLESTGLGLLRASIGYFLFLFALPILVAGLALVGVLQFARWFTSLELTKIAVTVAVCSVPLLLRWWTKASFSVVGMVKSLTRSSMVKLILVWLTAIVLFCWFYVYRSEGMKVYNSTLTWQQYGALCGPRAWKETNMARTQILCSHLEGHRVTWTGRFKYVRVTDIDNSAESAINMLPFFIGDWMRCLYGEAYPACSPGNTSTAEEELCRLKLLAKHPCHIKKFDRYKFEITVGMPFSSGADGSRSREEDDVTKDIVLRASSEFKSVLLSLRQGSLIEFSTILEGRLGSKWPVFELKAISCLNCMAQLSPTRRHVKIEHDWRSTVHGAVKFAFDFFFFPFLSAA

SEQ ID NO: 69967 - protein, 890 aa, Homo sapiens; identical to SEQ ID NO: 69966

SEQ ID NO: 69968 - protein, 268 aa, Homo sapiens
MVKSLTRSSMVKLILVWLTAIVLFCWFYVYRSEGMKVYNSTLTWQQYGALCGPRAWKETNMARTQILCSHLEGHRVTWTGRFKYVRVTDIDNSAESAINMLPFFIGDWMRCLYGEAYPACSPGNTSTAEEELCRLKLLAKHPCHIKKFDRYKFEITVGMPFSSGADGSRSREEDDVTKDIVLRASSEFKSVLLSLRQGSLIEFSTILEGRLGSKWPVFELKAISCLNCMAQLSPTRRHVKIEHDWRSTVHGAVKFAFDFFFFPFLSAA

SEQ ID NO: 69969 - protein, 1113 aa, Homo sapiens
MPRPELPLPEGWEEARDFDGKVYYIDHTNRTTSWIDPRDRYTKPLTFADCISDELPLGWEEAYDPQVGDYFIDHNTKTTQIEDPRVQWRREQEHMLKDYLVVAQEALSAQKEIYQVKQQRLELAQQEYQQLHAVWEHKLGSQVSLVSGSSSSSKYDPEILKAEIATAKSRVNKLKREMVHLQHELQFKERGFQTLKKIDKKMSDAQGSYKLDEAQAVLRETKAIKKAITCGEKEKQDLIKSLAMLKDGFRTDRGSHSDLWSSSSSLESSSFPLPKQYLDVSSQTDISGSFGINSNNQLAEKVRLRLRYEEAKRRIANLKIQLAKLDSEAWPGVLDSERDRLILINEKEELLKEMRFISPRKWTQGEVEQLEMARKRLEKDLQAARDTQSKALTERLKLNSKRNQLVRELEEATRQVATLHSQLKSLSSSMQSLSSGSSPGSLTSSRGSLVASSLDSSTSASFTDLYYDPFEQLDSELQSKVEFLLLEGATGFRPSGCITTIHEDEVAKTQKAEGGGRLQALRSLSGTPKSMTSLSPRSSLSSPSPPCSPLMADPLLAGDAFLNSLEFEDPELSATLCELSLGNSAQERYRLEEPGTEGKQLGQAVNTAQGCGLKVACVSAAVSDESVAGDSGVYEASVQRLGASEAAAFDSDESEAVGATRIQIALKYDEKNKQFAILIIQLSNLSALLQQQDQKVNIRVAVLPCSESTTCLFRTRPLDASDTLVFNEVFWVSMSYPALHQKTLRVDVCTTDRSHLEECLGGAQISLAEVCRSGERSTRWYNLLSYKYLKKQSRELKPVGVMAPASGPASTDAVSALLEQTAVELEKRQEGRSSTQTLEDSWRYEETSENEAVAEEEEEEVEEEEGEEDVFTEKASPDMDGYPALKVDKETNTETPAPSPTVVRPKDRRVGTPSQGPFLRGSTIIRSKTFSPGPQSQYVCRLNRSDSDSSTLSKKPPFVRNSLERRSVRMKRPSSVKSLRSERLIRTSLDLELDLQATRTWHSQLTQEISVLKELKEQLEQAKSHGEKELPQWLREDERFRLLLRMLEKRQMDRAEHKGELQTDKMMRAAAKDVHRLRGQSCKEPPEVQSFREKMAFFTRPRMNIPALSADDV

SEQ ID NO: 69970 - protein, 1119 aa, Homo sapiens
MPRPELPLPEGWEEARDFDGKVYYIDHTNRTTSWIDPRDRYTKPLTFADCISDELPLGWEEAYDPQVGDYFIDHNTKTTQIEDPRVQWRREQEHMLKDYLVVAQEALSAQKEIYQVKQQRLELAQQEYQQLHAVWEHKLGSQVSLVSGSSSSSKYDPEILKAEIATAKSRVNKLKREMVHLQHELQFKERGFQTLKKIDKKMSDAQGSYKLDEAQAVLRETKAIKKAITCGEKEKQDLIKSLAMLKDGFRTDRGSHSDLWSSSSSLESSSFPLPKQYLDVSSQTDISGSFGINSNNQLAEKVRLRLRYEEAKRRIANLKIQLAKLDSEAWPGVLDSERDRLILINEKEELLKEMRFISPRKWTQGEVEQLEMARKRLEKDLQAARDTQSKALTERLKLNSKRNQLVRELEEATRQVATLHSQLKSLSSSMQSLSSGSSPGSLTSSRGSLVASSLDSSTSASFTDLYYDPFEQLDSELQSKVEFLLLEGATGFRPSGCITTIHEDEVAKTQKAEGGGRLQALRSLSGTPKSMTSLSPRSSLSSPSPPCSPLMADPLLAGDAFLNSLEFEDPELSATLCELSLGNSAQERYRLEEPGTEGKQLGQAVNTAQGCGLKVACVSAAVSDESVAGDSGVYEASVQRLGASEAAAFDSDESEAVGATRIQIALKYDEKNKQFAILIIQLSNLSALLQQQDQKVNIRVAVLPCSESTTCLFRTRPLDASDTLVFNEVFWVSMSYPALHQKTLRVDVCTTDRSHLEECLGGAQISLAEVCRSGERSTRWYNLLSYKYLKKQSRELKPVGVMAPASGPASTDAVSALLEQTAVELEKRQEGRSSTQTLEDSWRYEETSENEAVAEEEEEEVEEEEGEEDVFTEKASPDMDGYPALKVDKETNTETPAPSPTVVRPKDRRVGTPSQGPFLRGSTIIRSKTFSPGPQSQYVCRLNRSDSDSSTLSKKPPFVRNSLERRSVRMKRPSPPPQPSSVKSLRSERLIRTSLDLELDLQATRTWHSQLTQEISVLKELKEQLEQAKSHGEKELPQWLREDERFRLLLRMLEKRQMDRAEHKGELQTDKMMRAAAKDVHRLRGQSCKEPPEVQSFREKMAFFTRPRMNIPALSADDV

SEQ ID NO: 69971 - protein, 269 aa, Homo sapiens
MARASSGNGSEEAWGALRAPQQQLRELCPGVNNQPYLCESGHCCGETGCCTYYYELWWFWLLWTVLILFSCCCAFRHRRAKLRLQQQQRQREINLLAYHGACHGAGPFPTGSLLDLRFLSTFKPPAYEDVVHRPGTPPPPYTVAPGRPLTASSEQTCCSSSSSCPAHFEGTNVEGVSSHQSAPPHQEGEPGAGVTPASTPPSCRYRRLTGDSGIELCPCPASGEGEPVKEVRVSATLPDLEDYSPCALPPESVPQIFPMGLSSSEGDIP

SEQ ID NO: 69972 - protein, 261 aa, Homo sapiens
MALNKNHSEGGGVIVNNTESILMSYDHVELTFNDMKNVPEAFKGTKKGTVYLTPYRVIFLSKGKDAMQSFMMPFYLMKDCEIKQPVFGANYIKGTVKAEAGGGWEGSASYKLTFTAGGAIEFGQRMLQVASQASRGEVPSGAYGYSYMPSGAYVYPPPVANGMYPCPPGYPYPPPPPEFYPGPPMMDGAMGYVQPPPPPYPGPMEPPVSGPDVPSTPAAEAKAAEAAASAYYNPGNPHNVYMPTSQPPPPPYYPPEDKKTQ

SEQ ID NO: 69973 - protein, 239 aa, Homo sapiens
MSYDHVELTFNDMKNVPEAFKGTKKGTVYLTPYRVIFLSKGKDAMQSFMMPFYLMKDCEIKQPVFGANYIKGTVKAEAGGGWEGSASYKLTFTAGGAIEFGQRMLQVASQASRGEVPSGAYGYSYMPSGAYVYPPPVANGMYPCPPGYPYPPPPPEFYPGPPMMDGAMGYVQPPPPPYPGPMEPPVSGPDVPSTPAAEAKAAEAAASAYYNPGNPHNVYMPTSQPPPPPYYPPEDKKTQ

SEQ ID NO: 69974 - protein, 217 aa, Homo sapiens
MALNKNHSEGGGVIVNNTESILMSYDHVELTFNDMKNVPEAFKGTKKGTVYLTPYRVIFLSKGKDAMQSFMMPFYLMKDCEIKQPVFGANYIKGTVKAEAGASRGEVPSGAYGYSYMPSGAYVYPPPVANGMYPCPPGYPYPPPPPEFYPGPPMMDGAMGYVQPPPPPYPGPMEPPVSGPDVPSTPAGEGPWVLAALRDQPSPPRCRTESLRMARDC

SEQ ID NO: 69975 - protein, 209 aa, Homo sapiens
MALNKNHSEGGGVIVNNTESILMSYDHVELTFNDMKNVPEAFKGTKKGTVYLTPYRVIFLSKGKDAMQSFMMPFYLMKDCEIKQPVFGANYIKGTVKAEAGGGWEGSASYKLTFTAPMSPPLLQPKPRPQKQPPAPITTQAIASRRHLPTTHRKIEDPVGPPASLPPTLISLPYPSHRGCAGAWGGEGAPCSPSRSDHKQLPGTSIVGH

SEQ ID NO: 69976 - protein, 216 aa, Homo sapiens
MALNKNHSEGGGVIVNNTESILMSYDHVELTFNDMKNVPEAFKGTKKGTVYLTPYRVIFLSKGKDAMQSFMMPFYLMKDCEIKQPVFGANYIKGTVKAEAGGGWEGSASYKLTFTAGGAIEFGQRMLQVASQEFYPGPPMMDGAMGYVQPPPPPYPGPMEPPVSGPDVPSTPAAEAKAAEAAASAYYNPGNPHNVYMPTSQPPPPPYYPPEDKKTQ

SEQ ID NO: 69977 - protein, 922 aa, Homo sapiens
MATASPRSDTSNNHSGRLQLQVTVSSAKLKRKKNWFGTAIYTEVVVDGEITKTAKSSSSSNPKWDEQLTVNVTPQTTLEFQVWSHRTLKADALLGKATIDLKQALLIHNRKLERVKEQLKLSLENKNGIAQTGELTVVLDGLVIEQENITNCSSSPTIEIQENGDALHENGEPSARTTARLAVEGTNGIDNHVPTSTLVQNSCCSYVVNGDNTPSSPSQVAARPKNTPAPKPLASEPADDTVNGESSSFAPTDNASVTGTPVVSEENALSPNCTSTTVEDPPVQEILTSSENNECIPSTSAELESEARSILEPDTSNSRSSSAFEAAKSRQPDGCMDPVRQQSGNANTETLPSGWEQRKDPHGRTYYVDHNTRTTTWERPQPLPPGWERRVDDRRRVYYVDHNTRTTTWQRPTMESVRNFEQWQSQRNQLQGAMQQFNQRYLYSASMLAAENDPYGPLPPGWEKRVDSTDRVYFVNHNTKTTQWEDPRTQGLQNEEPLPEGWEIRYTREGVRYFVDHNTRTTTFKDPRNGKSSVTKGGPQIAYERGFRWKLAHFRYLCQSNALPSHVKINVSRQTLFEDSFQQIMALKPYDLRRRLYVIFRGEEGLDYGGLAREWFFLLSHEVLNPMYCLFEYAGKNNYCLQINPASTINPDHLSYFCFIGRFIAMALFHGKFIDTGFSLPFYKRMLSKKLTIKDLESIDTEFYNSLIWIRDNNIEECGLEMYFSVDMEILGKVTSHDLKLGGSNILVTEENKDEYIGLMTEWRFSRGVQEQTKAFLDGFNEVVPLQWLQYFDEKELEVMLCGMQEVDLADWQRNTVYRHYTRNSKQIIWFWQFVKETDNEVRMRLLQFVTGTCRLPLGGFAELMGSNGPQKFCIEKVGKDTWLPRSHTCFNRLDLPPYKSYEQLKEKLLFAIEETEGFGQE

SEQ ID NO: 69978 - protein, 792 aa, Homo sapiens
MATASPRSDTSNNHSGRLQLQVTVSSAKLKRKKNWFGTAIYTEVVVDGEITKTAKSSSSSNPKWDEQLTVNVTPQTTLEFQVWSHRTLKADALLGKATIDLKQALLIHNRKFNGESSSFAPTDNASVTGTPVVSEENALSPNCTSTTVEDPPVQEILTSSENNECIPSTSAELESEARSILEPDTSNSRSSSAFEAAKSRQPDGCMDPVRQQSGNANTETLPSGWEQRKDPHGRTYYVDHNTRTTTWERPQPLPPGWERRVDDRRRVYYVDHNTRTTTWQRPTMESVRNFEQWQSQRNQLQGAMQQFNQRYLYSASMLAAENDPYGPLPPGWEKRVDSTDRVYFVNHNTKTTQWEDPRTQGLQNEEPLPEGWEIRYTREGVRYFVDHNTRTTTFKDPRNGKSSVTKGGPQIAYERGFRWKLAHFRYLCQSNALPSHVKINVSRQTLFEDSFQQIMALKPYDLRRRLYVIFRGEEGLDYGGLAREWFFLLSHEVLNPMYCLFEYAGKNNYCLQINPASTINPDHLSYFCFIGRFIAMALFHGKFIDTGFSLPFYKRMLSKKLTIKDLESIDTEFYNSLIWIRDNNIEECGLEMYFSVDMEILGKVTSHDLKLGGSNILVTEENKDEYIGLMTEWRFSRGVQEQTKAFLDGFNEVVPLQWLQYFDEKELEVMLCGMQEVDLADWQRNTVYRHYTRNSKQIIWFWQFVKETDNEVRMRLLQFVTGTCRLPLGGFAELMGSNGPQKFCIEKVGKDTWLPRSHTCFNRLDLPPYKSYEQLKEKLLFAIEETEGFGQE

SEQ ID NO: 69979 - protein, 704 aa, Homo sapiens
MATASPRSDTSNNHSGRLQLQVTVNGESSSFAPTDNASVTGTPVVSEENALSPNCTSTTVEDPPVQEILTSSENNECIPSTSAELESEARSILEPDTSNSRSSSAFEAAKSRQPDGCMDPVRQQSGNANTETLPSGWEQRKDPHGRTYYVDHNTRTTTWERPQPLPPGWERRVDDRRRVYYVDHNTRTTTWQRPTMESVRNFEQWQSQRNQLQGAMQQFNQRYLYSASMLAAENDPYGPLPPGWEKRVDSTDRVYFVNHNTKTTQWEDPRTQGLQNEEPLPEGWEIRYTREGVRYFVDHNTRTTTFKDPRNGKSSVTKGGPQIAYERGFRWKLAHFRYLCQSNALPSHVKINVSRQTLFEDSFQQIMALKPYDLRRRLYVIFRGEEGLDYGGLAREWFFLLSHEVLNPMYCLFEYAGKNNYCLQINPASTINPDHLSYFCFIGRFIAMALFHGKFIDTGFSLPFYKRMLSKKLTIKDLESIDTEFYNSLIWIRDNNIEECGLEMYFSVDMEILGKVTSHDLKLGGSNILVTEENKDEYIGLMTEWRFSRGVQEQTKAFLDGFNEVVPLQWLQYFDEKELEVMLCGMQEVDLADWQRNTVYRHYTRNSKQIIWFWQFVKETDNEVRMRLLQFVTGTCRLPLGGFAELMGSNGPQKFCIEKVGKDTWLPRSHTCFNRLDLPPYKSYEQLKEKLLFAIEETEGFGQE

SEQ ID NO: 69980 - protein, 111 aa, Homo sapiens
MATASPRSDTSNNHSGRLQLQVTVSSAKLKRKKNWFGTAIYTEVVVDGEITKTAKSSSSSNPKWDEQLTVNVTPQTTLEFQVWSHRTLKADALLGKATIDLKQALLIHNRK

SEQ ID NO: 69981 - protein, 922 aa, Homo sapiens; identical to SEQ ID NO: 69977

SEQ ID NO: 69982 - protein, 870 aa, Homo sapiens
MASASSSRAGVALPFEKSQLTLKVVSAKPKVHNRQPRINSYVEVAVDGLPSETKKTGKRIGSSELLWNEIIILNVTAQSHLDLKVWSCHTLRNELLGTASVNLSNVLKNNGGKMENMQLTLNLQTENKGSVVSGGELTIFLDGPTVDLGNVPNGSALTDGSQLPSRDSSGTAVAPENRHQPPSTNCFGGRSRTHRHSGASARTTPATGEQSPGARSRHRQPVKNSGHSGLANGTVNDEPTTATDPEEPSVVGVTSPPAAPLSVTPNPNTTSLPAPATPAEGEEPSTSGTQQLPAAAQAPDALPAGWEQRELPNGRVYYVDHNTKTTTWERPLPPGWEKRTDPRGRFYYVDHNTRTTTWQRPTAEYVRNYEQWQSQRNQLQGAMQHFSQRFLYQSSSASTDHDPLGPLPPGWEKRQDNGRVYYVNHNTRTTQWEDPRTQGMIQEPALPPGWEMKYTSEGVRYFVDHNTRTTTFKDPRPGFESGTKQGSPGAYDRSFRWKYHQFRFLCHSNALPSHVKISVSRQTLFEDSFQQIMNMKPYDLRRRLYIIMRGEEGLDYGGIAREWFFLLSHEVLNPMYCLFEYAGKNNYCLQINPASSINPDHLTYFRFIGRFIAMALYHGKFIDTGFTLPFYKRMLNKRPTLKDLESIDPEFYNSIVWIKENNLEECGLELYFIQDMEILGKVTTHELKEGGESIRVTEENKEEYIMLLTDWRFTRGVEEQTKAFLDGFNEVAPLEWLRYFDEKELELMLCGMQEIDMSDWQKSTIYRHYTKNSKQIQWFWQVVKEMDNEKRIRLLQFVTGTCRLPVGGFAELIGSNGPQKFCIDKVGKETWLPRSHTCFNRLDLPPYKSYEQLREKLLYAIEETEGFGQE

SEQ ID NO: 69983 - protein, 870 aa, Homo sapiens; identical to SEQ ID NO: 69982

SEQ ID NO: 69984 - protein, 870 aa, Homo sapiens; identical to SEQ ID NO: 69982

SEQ ID NO: 69985 - protein, 754 aa, Homo sapiens
MQLTLNLQTENKGSVVSGGELTIFLDGPTVDLGNVPNGSALTDGSQLPSRDSSGTAVAPENRHQPPSTNCFGGRSRTHRHSGASARTTPATGEQSPGARSRHRQPVKNSGHSGLANGTVNDEPTTATDPEEPSVVGVTSPPAAPLSVTPNPNTTSLPAPATPAEGEEPSTSGTQQLPAAAQAPDALPAGWEQRELPNGRVYYVDHNTKTTTWERPLPPGWEKRTDPRGRFYYVDHNTRTTTWQRPTAEYVRNYEQWQSQRNQLQGAMQHFSQRFLYQSSSASTDHDPLGPLPPGWEKRQDNGRVYYVNHNTRTTQWEDPRTQGMIQEPALPPGWEMKYTSEGVRYFVDHNTRTTTFKDPRPGFESGTKQGSPGAYDRSFRWKYHQFRFLCHSNALPSHVKISVSRQTLFEDSFQQIMNMKPYDLRRRLYIIMRGEEGLDYGGIAREWFFLLSHEVLNPMYCLFEYAGKNNYCLQINPASSINPDHLTYFRFIGRFIAMALYHGKFIDTGFTLPFYKRMLNKRPTLKDLESIDPEFYNSIVWIKENNLEECGLELYFIQDMEILGKVTTHELKEGGESIRVTEENKEEYIMLLTDWRFTRGVEEQTKAFLDGFNEVAPLEWLRYFDEKELELMLCGMQEIDMSDWQKSTIYRHYTKNSKQIQWFWQVVKEMDNEKRIRLLQFVTGTCRLPVGGFAELIGSNGPQKFCIDKVGKETWLPRSHTCFNRLDLPPYKSYEQLREKLLYAIEETEGFGQE

SEQ ID NO: 69986 - protein, 757 aa, Homo sapiens
MENMQLTLNLQTENKGSVVSGGELTIFLDGPTVDLGNVPNGSALTDGSQLPSRDSSGTAVAPENRHQPPSTNCFGGRSRTHRHSGASARTTPATGEQSPGARSRHRQPVKNSGHSGLANGTVNDEPTTATDPEEPSVVGVTSPPAAPLSVTPNPNTTSLPAPATPAEGEEPSTSGTQQLPAAAQAPDALPAGWEQRELPNGRVYYVDHNTKTTTWERPLPPGWEKRTDPRGRFYYVDHNTRTTTWQRPTAEYVRNYEQWQSQRNQLQGAMQHFSQRFLYQSSSASTDHDPLGPLPPGWEKRQDNGRVYYVNHNTRTTQWEDPRTQGMIQEPALPPGWEMKYTSEGVRYFVDHNTRTTTFKDPRPGFESGTKQGSPGAYDRSFRWKYHQFRFLCHSNALPSHVKISVSRQTLFEDSFQQIMNMKPYDLRRRLYIIMRGEEGLDYGGIAREWFFLLSHEVLNPMYCLFEYAGKNNYCLQINPASSINPDHLTYFRFIGRFIAMALYHGKFIDTGFTLPFYKRMLNKRPTLKDLESIDPEFYNSIVWIKENNLEECGLELYFIQDMEILGKVTTHELKEGGESIRVTEENKEEYIMLLTDWRFTRGVEEQTKAFLDGFNEVAPLEWLRYFDEKELELMLCGMQEIDMSDWQKSTIYRHYTKNSKQIQWFWQVVKEMDNEKRIRLLQFVTGTCRLPVGGFAELIGSNGPQKFCIDKVGKETWLPRSHTCFNRLDLPPYKSYEQLREKLLYAIEETEGFGQE

SEQ ID NO: 69987 - protein, 342 aa, Homo sapiens
MIQEPALPPGWEMKYTSEGVRYFVDHNTRTTTFKDPRPGFESGTKQGSPGAYDRSFRWKYHQFRFLCHSNALPSHVKISVSRQTLFEDSFQQIMNMKPYDLRRRLYIIMRGEEGLDYGGIAREWFFLLSHEVLNPMYCLFEYAGKNNYCLQINPASSINPDHLTYFRFIGRFIAMALYHGKFIDTGFTLPFYKRMLNKRPTLKDLESIDPEFYNSIVWIKENNLEECGLELYFIQDMEILGKVTTHELKEGGESIRVTEENKEEYIMLLTDWRFTRGVEEQTKAFLDGFNEVAPLEWLRYFDEKELELMLCGMQEIDATGRRAPSTGTTPRTASRSSGSGRW

SEQ ID NO: 69988 - protein, 431 aa, Homo sapiens
MIQEPALPPGWEMKYTSEGVRYFVDHNTRTTTFKDPRPGFESGTKQGSPGAYDRSFRWKYHQFRFLCHSNALPSHVKISVSRQTLFEDSFQQIMNMKPYDLRRRLYIIMRGEEGLDYGGIAREWFFLLSHEVLNPMYCLFEYAGKNNYCLQINPASSINPDHLTYFRFIGRFIAMALYHGKFIDTGFTLPFYKRMLNKRPTLKDLESIDPEFYNSIVWIKENNLEECGLELYFIQDMEILGKVTTHELKEGGESIRVTEENKEEYIMLLTDWRFTRGVEEQTKAFLDGFNEVAPLEWLRYFDEKELELMLCGMQEIDMSDWQKSTIYRHYTKNSKQIQWFWQVVKEMDNEKRIRLLQFVTGTCRLPVGGFAELIGSNGPQKFCIDKVGKETWLPRSHTCFNRLDLPPYKSYEQLREKLLYAIEETEGFGQE

SEQ ID NO: 69989 - protein, 335 aa, Homo sapiens
MASASSSRAGVALPFEKSQLTLKVVSAKPKVHNRQPRINSYVEVAVDGLPSETKKTGKRIGSSELLWNEIIILNVTAQSHLDLKVWSCHTLRNELLGTASVNLSNVLKNNGGKMENMQLTLNLQTENKGSVVSGGELTIFLDGPTVDLGNVPNGSALTDGSQLPSRDSSGTAVAPENRHQPPSTNCFGGRSRTHRHSGASARTTPATGEQSPGARSRHRQPVKNSGHSGLANGTVNDEPTTATDPEEPSVVGVTSPPAAPLSVTPNPNTTSLPAPATPAEGEEPSTSGTQQLPAAAQAPDALPAGWEQRELPNGRVYYVDHNTKTTTWERPLPPG

SEQ ID NO: 69990 - protein, 69 aa, Homo sapiens
MESPKKKNQQLKVGILHLGSRQKKIRIQLRSQVLGREMRDMEGDLQELHQSNTGDKSGFGFRRQGEDNT

SEQ ID NO: 69991 - protein, 81 aa, Homo sapiens
MESPKKKNQQLKVGILHLGSRQKKIRIQLRSQCATWKVICKSCISQTPGINLDLGSGVKVKIIPKEEHCKMPEAGEEQPQV

SEQ ID NO: 69992 - protein, 146 aa, Homo sapiens
MLLWCPPQCACSLGVFPSAPSPVWGTRRSCEPATRVPEVWILSPLLRHGGHTQTQNHTASPRSPVMESPKKKNQQLKVGILHLGSRQKKIRIQLRSQCATWKVICKSCISQTPGINLDLGSGVKVKIIPKEEHCKMPEAGEEQPQV

SEQ ID NO: 69993 - protein, 69 aa, Homo sapiens; identical to SEQ ID NO: 69990

SEQ ID NO: 69994 - protein, 69 aa, Homo sapiens; identical to SEQ ID NO: 69990

SEQ ID NO: 69995 - protein, 81 aa, Homo sapiens; identical to SEQ ID NO: 69991

SEQ ID NO: 69996 - protein, 69 aa, Homo sapiens; identical to SEQ ID NO: 69990

SEQ ID NO: 69997 - protein, 146 aa, Homo sapiens; identical to SEQ ID NO: 69992

SEQ ID NO: 69998 - protein, 81 aa, Homo sapiens; identical to SEQ ID NO: 69991

SEQ ID NO: 69999 - protein, 69 aa, Homo sapiens; identical to SEQ ID NO: 69990

SEQ ID NO: 70000 - protein, 81 aa, Homo sapiens; identical to SEQ ID NO: 69991

SEQ ID NO: 70001 - protein, 146 aa, Homo sapiens; identical to SEQ ID NO: 69992

SEQ ID NO: 70002 - protein, 69 aa, Homo sapiens; identical to SEQ ID NO: 69990

SEQ ID NO: 70003 - protein, 69 aa, Homo sapiens; identical to SEQ ID NO: 69990

SEQ ID NO: 70004 - protein, 81 aa, Homo sapiens; identical to SEQ ID NO: 69991

SEQ ID NO: 70005 - protein, 146 aa, Homo sapiens; identical to SEQ ID NO: 69992

SEQ ID NO: 70006 - protein, 111 aa, Homo sapiens
MIWRGRSTYRPRPRRSVPPPELIGPMLEPGDEEPQQEEPPTESRDPAPGQEREEDQGAAETQVPDLEADLQELSQSKTGGECGNGPDDQGKILPKSEQFKMPEGGDRQPQV

SEQ ID NO: 70007 - protein, 111 aa, Homo sapiens; identical to SEQ ID NO: 70006

SEQ ID NO: 70008 - protein, 1333 aa, Homo sapiens
MTADKLVFFVNGRKVVEKNADPETTLLAYLRRKLGLSGTKLGCGEGGCGACTVMLSKYDRLQNKIVHFSANACLAPICSLHHVAVTTVEGIGSTKTRLHPVQERIAKSHGSQCGFCTPGIVMSMYTLLRNQPEPTMEEIENAFQGNLCRCTGYRPILQGFRTFARDGGCCGGDGNNPNCCMNQKKDHSVSLSPSLFKPEEFTPLDPTQEPIFPPELLRLKDTPRKQLRFEGERVTWIQASTLKELLDLKAQHPDAKLVVGNTEIGIEMKFKNMLFPMIVCPAWIPELNSVEHGPDGISFGAACPLSIVEKTLVDAVAKLPAQKTEVFRGVLEQLRWFAGKQVKSVASVGGNIITASPISDLNPVFMASGAKLTLVSRGTRRTVQMDHTFFPGYRKTLLSPEEILLSIEIPYSREGEYFSAFKQASRREDDIAKVTSGMRVLFKPGTTEVQELALCYGGMANRTISALKTTQRQLSKLWKEELLQDVCAGLAEELHLPPDAPGGMVDFRCTLTLSFFFKFYLTVLQKLGQENLEDKCGKLDPTFASATLLFQKDPPADVQLFQEVPKGQSEEDMVGRPLPHLAADMQASGEAVYCDDIPRYENELSLRLVTSTRAHAKIKSIDTSEAKKVPGFVCFISADDVPGSNITGICNDETVFAKDKVTCVGHIIGAVVADTPEHTQRAAQGVKITYEELPAIITIEDAIKNNSFYGPELKIEKGDLKKGFSEADNVVSGEIYIGGQEHFYLETHCTIAVPKGEAGEMELFVSTQNTMKTQSFVAKMLGVPANRIVVRVKRMGGGFGGKETRSTVVSTAVALAAYKTGRPVRCMLDRDEDMLITGGRHPFLARYKVGFMKTGTVVALEVDHFSNVGNTQDLSQSIMERALFHMDNCYKIPNIRGTGRLCKTNLPSNTAFRGFGGPQGMLIAECWMSEVAVTCGMPAEEVRRKNLYKEGDLTHFNQKLEGFTLPRCWEECLASSQYHARKSEVDKFNKENCWKKRGLCIIPTKFGISFTVPFLNQAGALLHVYTDGSVLLTHGGTEMGQGLHTKMVQVASRALKIPTSKIYISETSTNTVPNTSPTAASVSADLNGQAVYAACQTILKRLEPYKKKNPSGSWEDWVTAAYMDTVSLSATGFYRTPNLGYSFETNSGNPFHYFSYGVACSEVEIDCLTGDHKNLRTDIVMDVGSSLNPAIDIGQVEGAFVQGLGLFTLEELHYSPEGSLHTRGPSTYKIPAFGSIPIEFRVSLLRDCPNKKAIYASKAVGEPPLFLAASIFFAIKDAIRAARAQHTGNNVKELFRLDSPATPEKIRNACVDKFTTLCVTGVPENCKPWSVRV

SEQ ID NO: 70009 - protein, 631 aa, Homo sapiens
MKFAEHLSAHITPEWRKQYIQYEAFKDMLYSAQDQAPSVEVTDEDTVKRYFAKFEEKFFQTCEKELAKINTFYSEKLAEAQRRFATLQNELQSSLDAQKESTGVTTLRQRRKPVFHLSHEERVQHRNIKDLKLAFSEFYLSLILLQNYQNLNFTGFRKILKKHDKILETSRGADWRVAHVEVAPFYTCKKINQLISETEAVVTNELEDGDRQKAMKRLRVPPLGAAQPAPAWTTFRVGLFCGIFIVLNITLVLAAVFKLETDRSIWPLIRIYRGGFLLIEFLFLLGINTYGWRQAGVNHVLIFELNPRSNLSHQHLFEIAGFLGILWCLSLLACFFAPISVIPTYVYPLALYGFMVFFLINPTKTFYYKSRFWLLKLLFRVFTAPFHKVGFADFWLADQLNSLSVILMDLEYMICFYSLELKWDESKGLLPNNSEERGHSDTMVFFYLWIVFYIISSCYTLIWDLKMDWGLFDKNAGENTFLREEIVYPQKAYYYCAIIEDVILRFAWTIQISITSTTLLPHSGDIIATVFAPLEVFRRFVWNFFRLENEHLNNCGEFRAVRDISVAPLNADDQTLLEQMMDQDDGVRNRQKNRSWKYNQSISLRRPRLASQSKARDTKVLIEDTDDEANT

SEQ ID NO: 70010 - protein, 696 aa, Homo sapiens
MKFAEHLSAHITPEWRKQYIQYEAFKDMLYSAQDQAPSVEVTDEDTVKRYFAKFEEKFFQTCEKELAKINTFYSEKLAEAQRRFATLQNELQSSLDAQKESTGVTTLRQRRKPVFHLSHEERVQHRNIKDLKLAFSEFYLSLILLQNYQNLNFTGFRKILKKHDKILETSRGADWRVAHVEVAPFYTCKKINQLISETEAVVTNELEDGDRQKAMKRLRVPPLGAAQPAPAWTTFRVGLFCGIFIVLNITLVLAAVFKLETDRSIWPLIRIYRGGFLLIEFLFLLGINTYGWRQAGVNHVLIFELNPRSNLSHQHLFEIAGFLGILWCLSLLACFFAPISVIPTYVYPLALYGFMVFFLINPTKTFYYKSRFWLLKLLFRVFTAPFHKVGFADFWLADQLNSLSVILMDLEYMICFYSLELKWDESKGLLPNNSEESGICHKYTYGVRAIVQCIPAWLRFIQCLRRYRDTKRAFPHLVNAGKYSTTFFMVTFAALYSTHKERGHSDTMVFFYLWIVFYIISSCYTLIWDLKMDWGLFDKNAGENTFLREEIVYPQKAYYYCAIIEDVILRFAWTIQISITSTTLLPHSGDIIATVFAPLEVFRRFVWNFFRLENEHLNNCGEFRAVRDISVAPLNADDQTLLEQMMDQDDGVRNRQKNRSWKYNQSISLRRPRLASQSKARDTKVLIEDTDDEANT

SEQ ID NO: 70011 - protein, 180 aa, Homo sapiens
MESWWGLPCLAFLCFLMHARGQRDFDLADALDDPEPTKKPNSDIYPKPKPPYYPQPENPDSGGNIYPRPKPRPQPQPGNSGNSGGYFNDVDRDDGRYPPRPRPRPPAGGGGGGYSSYGNSDNTHGGDHHSTYGNPEGNMVAKIVSPIVSVVVVTLLGAAASYFKLNNRRNCFRTHEPENV

SEQ ID NO: 70012 - protein, 195 aa, Homo sapiens
MESWWGLPCLAFLCFLMHARGQRDFDLADALDDPEPTKKPNSDIYPKPKPPYYPQPENPDSGGNIYPRPKPRPQPQPGNSGNSGGYFNDVDRDDGRYPPRPRPRPPAGGGGGGYSSYGNSDNTHGRGGYRLNSRYGNTYGGDHHSTYGNPEGNMVAKIVSPIVSVVVVTLLGAAASYFKLNNRRNCFRTHEPENV

SEQ ID NO: 70013 - protein, 181 aa, Homo sapiens
MESWWGLPCLAFLCFLMHARGQRDFDLADALDDPEPTKKPNSDIYPKPKPPYYPQPENPDSGGNIYPRPKPRPQPQPGNSGNSGGSYFNDVDRDDGRYPPRPRPRPPAGGGGGGYSSYGNSDNTHGGDHHSTYGNPEGNMVAKIVSPIVSVVVVTLLGAAASYFKLNNRRNCFRTHEPENV

SEQ ID NO: 70014 - protein, 42 aa, Homo sapiens
MVAKIVSPIVSVVVVTLLGAAASYFKLNNRRNCFRTHEPENV

SEQ ID NO: 70015 - protein, 3549 aa, Homo sapiens
MFPMQKGSLNLLRQKWESCDYQRSECHPRDSHCTIFQPQESKLLAPEGEVVSAPQSLDPTSLPYSTGEEMWSSKPEEKDSVDKSNNTREYGRPEVLKEDSLSSRRRIERFSIALDELRSVFEAPKSGNKPAEYGGKEVEIERSLCSPAFKSHPGSQLEDSVKDSDKKGKETSFDKMSPESGHSRIFEATAGPNKPESGFAEDSAARGEGVSDLHEVVSLKERMARYQAAVSRGDCRSFSANMMEESEMCAVPGGLAKVKKQFEDEITSSRNTFAQYQYQHQNRSEQEAIHSSQVGTSRSSQEMARNEQEGSKVQKIDVHGTEMVSHLEKHTEEVNQASQFHQYVQETVIDTPEDEEIPKVSTKLLKEQFEKSAQEKILYSDKEMTTPAKQIKTESEYEETFKPSSVVSTSSTSCVSTSQRKETSTTRYSDHSVTSSTLAQINATSSGMTEEFPPPPPDVLQTSVDVTAFSQSPELPSPPRRLPVPKDVYSKQRNLYELNRLYKHIHPELRKNLEKDYISEVSEIVSSQMNSGSSVSADVQQARYVFENTNDSSQKDLNSEREYLEWDEILKGEVQSIRWIFENQPLDSINNGSPDEGDISRGIADQEIIAGGDVKYTTWMFETQPIDTLGAYSSDTVENAEKIPELARGDVCTARWMFETRPLDSMNKMHQSQEESAVTISKDITGGDVKTVRYMFETQHLDQLGQLHSVDEVHLLQLRSELKEIKGNVKRSIKCFETQPLYVIRDGSGQMLEIKTVHREDVEKGDVRTARWMFETQPLDTINKDITEIKVVRGISMEENVKGGVSKAKWLFETQPLEKIKESEEVIIEKEKIIGTDVSRKCWMFETQPLDILKEVPDADSLQREEIIGGDVQTTKHLFETLPIEALKDSPDIGKLQKITASEEEKGDVRHQKWIFETQPLEDIRKDKKEYTRTVKLEEVDRGDVKNYTHIFESNNLIKFDASHKIEVEGVTRGAVELNKSLFETTPLYAIQDPLGKYHQVKTVQQEEIVRGDVRSCRWLFETRPIDQFDESIHKFQIIRGISAQEIQTGNVKSAKWLFETQPLDSIKYFSDVEETESKTEQTRDIVKGDVKTCKWLFETQPMESLYEKVSLMTSSEEIHKGDVKTCTWLFETQPLDTIKDDSETAVKLQTVKQEEIQGGDVRTACFLFETENLDSIQGEEVKEIKPVEMDIQAGDVSSMRYKFENQSLDSISSSSEEVLKKIKTLKTEDIQKGNVLNCRWLFENQPIDKIKESQEGDECVKTVTDIQGGDVRKGCFIFETFSLDEIKEESDYISTKKTITEEVIQGDVKSYRMLFETQPLYAIQDREGSYHEVTTVKKEEVIHGDVRGTRWLFETKPLDSINKSETVYVIKSVTQEDIQKGDVSSVRYRFETQPLDQISEESHNIMPSIDHIQGGNVKTSRQFFESENFDKNNYIRTVSVNEIQKGNVKTSTWLFETHTMDELRGEGLEYENIKTVTQEDVQKGDVKQAVWLFENRTFDSIMEAHKGITKMTKEEIPPSDVKTTTWLFETTPLHEFNETRVEKIEIIGKSIKETLEDLYSQKVIQAPGIIIEADEIGDVRMAKYKLMNQASPEIQKEEIIRADLRNIMVNLLSKRDCTEREILISEEEKGNVNLTKTQLLNRSTEFHAEKEEIVKGDVQQAIKNLFSEERSVKKGILIQEDEKGDINMTIYCLLHENDGDTIEREEVIGGDVKRTIHNLLSSTSNNKISERAKIDASERGNVQFFTTCIEAGALDYLKQLHTESNETLTAKKQEGEKEIIGGDVEGTKLLLKKRQSLVERTVSETDIIPGDVHNTVKVFMTEPQSTFGKIPKEEIIKGDLTSTLNSLSQAVNQKTVTKTEEIIKGNMLATLKSLKESSHRWKESKQPDAIPGDIEKAIECLEKATNTKTEILKKELLKDDLETSLRSLKEAQRSFKEVHKEGVIKKDAKAVMAGSSGEQKTDIHQVAVQRNKNSLLQPKPGPFEPAAKWQGGADTLSQTMGKSCHGNLVEERTEVNLPKAPKGTVKIVIDREQNNDALEKSLRRLSNSHHKSNVLESGDKTGVWTDTTGEQHLRDEYMSRQLTSTVSVKNNLTTKESDRAVRELKKDDVFNSIQSAGKTVGKQQTYELRNDHQKMEGFHIKSPKKTKNIKILTDTQSSKPSPTQHPVSMPVGGTYDLSGDFQKQTLLKQETKYSNKDIKKKNINLQPMWQLLPVEQDTSNVTEMKVSEKSHNTFKATNKKRETDVHLKSQDFLMKTNTSTGLKMAMERSLNPINFNPENNVKESECPLPPPSPPPPPPSNASSEIEFPLPPPPPLMMFPEKNGFLPSLSTEKIKAEFESFPGLPLPPPPVDEKSERESSSMFLPPPPPPTPSQKPAHLLSSSAPEKHSGDFMQQYSQKEASNSQNSQAKIITGKTGVLPPPTLPKPKLPKHIKDNKNDFSPKVELATSLSDMECKITTSKDQKKVMVMTSSEHTETKQNVISKSLDERKQLSIDSANCLSHTVPGTSAPRKKQIAPLIKSHSFPESSGQQNPKPYMRKFKTPLMIAEEKYRQQKEEIEKQKQESSYYNIVKTQSQNQHITEVEKEMPLQKTNEEVSLSGIDSECTVVQPSPGSQSNARILGVCSDNQLSTTSPETVAAKRLHHVLAASEDKDKMKKEVLQSSRDIMQSKSACEIKQSHQECSTQQTQQKKYLEQLHLPQSKPISPNFKVKTIKLPTLDHTLNETDHSYESHKQQSEIDVQTFTKKQYLKTKKTEASTECSHKQSLAERHYQLPKKEKRVTVQLPTESIQKNQEDKLKMVPRKQREFSGSDRGKLPGSEEKNQGPSMIGRKEERLITERKHEHLKNKSAPKVVKQKVIDAHLDSQTQNFQQTQIQTAESKAEHKKLPQPYNSLQEEKCLEVKGIQEKQVFSNTKDSKQEITQNKSFFSSVKESQRDDGKGALNIVEFLRKREELQQILSRVKQFEAEPNKSGLKTFQTLLNTIPGWLISEDKREYAVHIAMENNLEKVKEEITHIKTQAEDMLVSYENIIQTAMMSSKTGKPGNKPTSLDETSSKVSNVHVSNNKNSEQKENKIAKEKTVQHQVAAHHEATVRSHVKTHQEIKLDDSNIPPPSLKTRPPSPTFITIESTARRTENPTKNELSQSPKKDSYVEPPPRRPMSQKSEIHRANTSPSPPRSRSEQLVRLKDTTAKLSKGAIPCPAATPVPIVEKRSEIIMSPATLRRQIKIETRGRDSPPTITIPVNINHAASGSFRESVDAQEEIRKVEKRATYVHKDGLNSTDHMVPDTESYDAVEIIRKVAVPPRLSEHTQRYEAANRTVQMAENFVNDPENEINRWFREFEHGPVSEAKSNRRVYAKGETNHNIQQESRTFCKEEFGLTSLGNTSFTDFSCKHPRELREKIPVKQPRICSETRSLSEHFSGMDAFESQIVESKMKTSSSHSSEAGKSGCDFKHAPPTYEDVIAGHILDISDSPKEVRKNFQKTWQESGRVFKGLGYATADASATEMRTTFQEESAFISEAAAPRQGNMYTLSKDSLSNGVPSGRQAEFS

SEQ ID NO: 70016 - protein, 938 aa, Homo sapiens
MFPMQKGSLNLLRQKWESCDYQRSECHPRDSHCTIFQPQESKLLAPEGEVVSAPQSLDPTSLPYSTGEEMWSSKPEEKDSVDKSNNTREYGRPEVLKEDSLSSRRRIERFSIALDELRSVFEAPKSGNKPAEYGGKEVEIERSLCSPAFKSHPGSQLEDSVKDSDKKGKETSFDKMSPESGHSRIFEATAGPNKPESGFAEDSAARGEGVSDLHEVVSLKERMARYQAAVSRGDCRSFSANMMEESEMCAVPGGLAKVKKQFEDEITSSRNTFAQYQYQHQNRSEQEAIHSSQVGTSRSSQEMARNEQEGSKVQKIDVHGTEMVSHLEKHTEEVNQASQFHQYVQETVIDTPEDEEIPKVSTKLLKEQFEKSAQEKILYSDKEMTTPAKQIKKLLLQDKEICILCQKTVYPMECLVADKQNFHKSCFRCHHCNSKLSLGNYASLHGQIYCKPHFKQLFKSKGNYDEGFGHKQHKDRWNCKNQSRSVDFIPNEEPNMCKNIAENTLVPGDRNEHLDAGNSEGQRNDLRKLGERGKLKVIWPPSKEIPKKTLPFEEELKMSKPKWPPEMTTLLSPEFKSESLLEDVRTPENKGQRQDHFPFLQPYLQSTHVCQKEDVIGIKEMKMPEGRKDEKKEGRKNVQDRPSEAEDTKSNRKSAMDLNDNNNVIVQSAEKEKNEKTNQTNGAEVLQVTNTDDEMMPENHKENLNKNNNNNYVAVSYLNNCRQKTSILEFLDLLPLSSEANDTANEYEIEKLENTSRISELLGIFESEKTYSRNVLAMALKKQTDRAAAGSPVQPAPKPSLSRGLMVKGGSSIISPDTNLLNIKGSHSKSKNLHFFFSNTVKITAFSKKNENIFNCDLIDSVDQIKNMPCLDLREFGKDVKPWHVETTEAARNNENTGFDALSHECTAKPLFPRVEVQSEQLTVEEQIKRNRCYSDTE

SEQ ID NO: 70017 - protein, 3549 aa, Homo sapiens; identical to SEQ ID NO: 70015

SEQ ID NO: 70018 - protein, 3327 aa, Homo sapiens
MARYQAAVSRGDCRSFSANMMEESEMCAVPGGLAKVKKQFEDEITSSRNTFAQYQYQHQNRSEQEAIHSSQVGTSRSSQEMARNEQEGSKVQKIDVHGTEMVSHLEKHTEEVNQASQFHQYVQETVIDTPEDEEIPKVSTKLLKEQFEKSAQEKILYSDKEMTTPAKQIKTESEYEETFKPSSVVSTSSTSCVSTSQRKETSTTRYSDHSVTSSTLAQINATSSGMTEEFPPPPPDVLQTSVDVTAFSQSPELPSPPRRLPVPKDVYSKQRNLYELNRLYKHIHPELRKNLEKDYISEVSEIVSSQMNSGSSVSADVQQARYVFENTNDSSQKDLNSEREYLEWDEILKGEVQSIRWIFENQPLDSINNGSPDEGDISRGIADQEIIAGGDVKYTTWMFETQPIDTLGAYSSDTVENAEKIPELARGDVCTARWMFETRPLDSMNKMHQSQEESAVTISKDITGGDVKTVRYMFETQHLDQLGQLHSVDEVHLLQLRSELKEIKGNVKRSIKCFETQPLYVIRDGSGQMLEIKTVHREDVEKGDVRTARWMFETQPLDTINKDITEIKVVRGISMEENVKGGVSKAKWLFETQPLEKIKESEEVIIEKEKIIGTDVSRKCWMFETQPLDILKEVPDADSLQREEIIGGDVQTTKHLFETLPIEALKDSPDIGKLQKITASEEEKGDVRHQKWIFETQPLEDIRKDKKEYTRTVKLEEVDRGDVKNYTHIFESNNLIKFDASHKIEVEGVTRGAVELNKSLFETTPLYAIQDPLGKYHQVKTVQQEEIVRGDVRSCRWLFETRPIDQFDESIHKFQIIRGISAQEIQTGNVKSAKWLFETQPLDSIKYFSDVEETESKTEQTRDIVKGDVKTCKWLFETQPMESLYEKVSLMTSSEEIHKGDVKTCTWLFETQPLDTIKDDSETAVKLQTVKQEEIQGGDVRTACFLFETENLDSIQGEEVKEIKPVEMDIQAGDVSSMRYKFENQSLDSISSSSEEVLKKIKTLKTEDIQKGNVLNCRWLFENQPIDKIKESQEGDECVKTVTDIQGGDVRKGCFIFETFSLDEIKEESDYISTKKTITEEVIQGDVKSYRMLFETQPLYAIQDREGSYHEVTTVKKEEVIHGDVRGTRWLFETKPLDSINKSETVYVIKSVTQEDIQKGDVSSVRYRFETQPLDQISEESHNIMPSIDHIQGGNVKTSRQFFESENFDKNNYIRTVSVNEIQKGNVKTSTWLFETHTMDELRGEGLEYENIKTVTQEDVQKGDVKQAVWLFENRTFDSIMEAHKGITKMTKEEIPPSDVKTTTWLFETTPLHEFNETRVEKIEIIGKSIKETLEDLYSQKVIQAPGIIIEADEIGDVRMAKYKLMNQASPEIQKEEIIRADLRNIMVNLLSKRDCTEREILISEEEKGNVNLTKTQLLNRSTEFHAEKEEIVKGDVQQAIKNLFSEERSVKKGILIQEDEKGDINMTIYCLLHENDGDTIEREEVIGGDVKRTIHNLLSSTSNNKISERAKIDASERGNVQFFTTCIEAGALDYLKQLHTESNETLTAKKQEGEKEIIGGDVEGTKLLLKKRQSLVERTVSETDIIPGDVHNTVKVFMTEPQSTFGKIPKEEIIKGDLTSTLNSLSQAVNQKTVTKTEEIIKGNMLATLKSLKESSHRWKESKQPDAIPGDIEKAIECLEKATNTKTEILKKELLKDDLETSLRSLKEAQRSFKEVHKEGVIKKDAKAVMAGSSGEQKTDIHQVAVQRNKNSLLQPKPGPFEPAAKWQGGADTLSQTMGKSCHGNLVEERTEVNLPKAPKGTVKIVIDREQNNDALEKSLRRLSNSHHKSNVLESGDKTGVWTDTTGEQHLRDEYMSRQLTSTVSVKNNLTTKESDRAVRELKKDDVFNSIQSAGKTVGKQQTYELRNDHQKMEGFHIKSPKKTKNIKILTDTQSSKPSPTQHPVSMPVGGTYDLSGDFQKQTLLKQETKYSNKDIKKKNINLQPMWQLLPVEQDTSNVTEMKVSEKSHNTFKATNKKRETDVHLKSQDFLMKTNTSTGLKMAMERSLNPINFNPENNVKESECPLPPPSPPPPPPSNASSEIEFPLPPPPPLMMFPEKNGFLPSLSTEKIKAEFESFPGLPLPPPPVDEKSERESSSMFLPPPPPPTPSQKPAHLLSSSAPEKHSGDFMQQYSQKEASNSQNSQAKIITGKTGVLPPPTLPKPKLPKHIKDNKNDFSPKVELATSLSDMECKITTSKDQKKVMVMTSSEHTETKQNVISKSLDERKQLSIDSANCLSHTVPGTSAPRKKQIAPLIKSHSFPESSGQQNPKPYMRKFKTPLMIAEEKYRQQKEEIEKQKQESSYYNIVKTQSQNQHITEVEKEMPLQKTNEEVSLSGIDSECTVVQPSPGSQSNARILGVCSDNQLSTTSPETVAAKRLHHVLAASEDKDKMKKEVLQSSRDIMQSKSACEIKQSHQECSTQQTQQKKYLEQLHLPQSKPISPNFKVKTIKLPTLDHTLNETDHSYESHKQQSEIDVQTFTKKQYLKTKKTEASTECSHKQSLAERHYQLPKKEKRVTVQLPTESIQKNQEDKLKMVPRKQREFSGSDRGKLPGSEEKNQGPSMIGRKEERLITERKHEHLKNKSAPKVVKQKVIDAHLDSQTQNFQQTQIQTAESKAEHKKLPQPYNSLQEEKCLEVKGIQEKQVFSNTKDSKQEITQNKSFFSSVKESQRDDGKGALNIVEFLRKREELQQILSRVKQFEAEPNKSGLKTFQTLLNTIPGWLISEDKREYAVHIAMENNLEKVKEEITHIKTQAEDMLVSYENIIQTAMMSSKTGKPGNKPTSLDETSSKVSNVHVSNNKNSEQKENKIAKEKTVQHQVAAHHEATVRSHVKTHQEIKLDDSNIPPPSLKTRPPSPTFITIESTARRTENPTKNELSQSPKKDSYVEPPPRRPMSQKSEIHRANTSPSPPRSRSEQLVRLKDTTAKLSKGAIPCPAATPVPIVEKRSEIIMSPATLRRQIKIETRGRDSPPTITIPVNINHAASGSFRESVDAQEEIRKVEKRATYVHKDGLNSTDHMVPDTESYDAVEIIRKVAVPPRLSEHTQRYEAANRTVQMAENFVNDPENEINRWFREFEHGPVSEAKSNRRVYAKGETNHNIQQESRTFCKEEFGLTSLGNTSFTDFSCKHPRELREKIPVKQPRICSETRSLSEHFSGMDAFESQIVESKMKTSSSHSSEAGKSGCDFKHAPPTYEDVIAGHILDISDSPKEVRKNFQKTWQESGRVFKGLGYATADASATEMRTTFQEESAFISEAAAPRQGNMYTLSKDSLSNGVPSGRQAEFS

SEQ ID NO: 70019 - protein, 716 aa, Homo sapiens
MARYQAAVSRGDCRSFSANMMEESEMCAVPGGLAKVKKQFEDEITSSRNTFAQYQYQHQNRSEQEAIHSSQVGTSRSSQEMARNEQEGSKVQKIDVHGTEMVSHLEKHTEEVNQASQFHQYVQETVIDTPEDEEIPKVSTKLLKEQFEKSAQEKILYSDKEMTTPAKQIKKLLLQDKEICILCQKTVYPMECLVADKQNFHKSCFRCHHCNSKLSLGNYASLHGQIYCKPHFKQLFKSKGNYDEGFGHKQHKDRWNCKNQSRSVDFIPNEEPNMCKNIAENTLVPGDRNEHLDAGNSEGQRNDLRKLGERGKLKVIWPPSKEIPKKTLPFEEELKMSKPKWPPEMTTLLSPEFKSESLLEDVRTPENKGQRQDHFPFLQPYLQSTHVCQKEDVIGIKEMKMPEGRKDEKKEGRKNVQDRPSEAEDTKSNRKSAMDLNDNNNVIVQSAEKEKNEKTNQTNGAEVLQVTNTDDEMMPENHKENLNKNNNNNYVAVSYLNNCRQKTSILEFLDLLPLSSEANDTANEYEIEKLENTSRISELLGIFESEKTYSRNVLAMALKKQTDRAAAGSPVQPAPKPSLSRGLMVKGGSSIISPDTNLLNIKGSHSKSKNLHFFFSNTVKITAFSKKNENIFNCDLIDSVDQIKNMPCLDLREFGKDVKPWHVETTEAARNNENTGFDALSHECTAKPLFPRVEVQSEQLTVEEQIKRNRCYSDTE

SEQ ID NO: 70020 - protein, 938 aa, Homo sapiens; identical to SEQ ID NO: 70016

SEQ ID NO: 70021 - protein, 963 aa, Homo sapiens
MPLQKTNEEVSLSGIDSECTVVQPSPGSQSNARILGVCSDNQLSTTSPETVAAKRLHHVLAASEDKDKMKKEVLQSSRDIMQSKSACEIKQSHQECSTQQTQQKKYLEQLHLPQSKPISPNFKVKTIKLPTLDHTLNETDHSYESHKQQSEIDVQTFTKKQYLKTKKTEASTECSHKQSLAERHYQLPKKEKRVTVQLPTESIQKNQEDKLKMVPRKQREFSGSDRGKLPGSEEKNQGPSMIGRKEERLITERKHEHLKNKSAPKVVKQKVIDAHLDSQTQNFQQTQIQTAESKAEHKKLPQPYNSLQEEKCLEVKGIQEKQVFSNTKDSKQEITQNKSFFSSVKESQRDDGKGALNIVEFLRKREELQQILSRVKQFEAEPNKSGLKTFQTLLNTIPGWLISEDKREYAVHIAMENNLEKVKEEITHIKTQAEDMLVSYENIIQTAMMSSKTGKPGNKPTSLDETSSKVSNVHVSNNKNSEQKENKIAKEKTVQHQVAAHHEATVRSHVKTHQEIKLDDSNIPPPSLKTRPPSPTFITIESTARRTENPTKNELSQSPKKDSYVEPPPRRPMSQKSEIHRANTSPSPPRSRSEQLVRLKDTTAKLSKGAIPCPAATPVPIVEKRSEIIMSPATLRRQIKIETRGRDSPPTITIPVNINHAASGSFRESVDAQEEIRKVEKRATYVHKDGLNSTDHMVPDTESYDAVEIIRKVAVPPRLSEHTQRYEAANRTVQMAENFVNDPENEINRWFREFEHGPVSEAKSNRRVYAKGETNHNIQQESRTFCKEEFGLTSLGNTSFTDFSCKHPRELREKIPVKQPRICSETRSLSEHFSGMDAFESQIVESKMKTSSSHSSEAGKSGCDFKHAPPTYEDVIAGHILDISDSPKEVRKNFQKTWQESGRVFKGLGYATADASATEMRTTFQEESAFISEAAAPRQGNMYTLSKDSLSNGVPSGRQAEFS

SEQ ID NO: 70022 - protein, 971 aa, Homo sapiens
MFPMQKGSLNLLRQKWESCDYQRSECHPRDSHCTIFQPQESKLLAPEGEVVSAPQSLDPTSLPYSTGEEMWSSKPEEKDSVDKSNNTREYGRPEVLKEDSLSSRRRIERFSIALDELRSVFEAPKSGNKPAEYGGKEVEIERSLCSPAFKSHPGSQLEDSVKDSDKKGKETSFDKMSPESGHSRIFEAVFSTDQAQILRLHLHPKLTKTPKNSLKSSTYISTAGPNKPESGFAEDSAARGEGVSDLHEVVSLKERMARYQAAVSRGDCRSFSANMMEESEMCAVPGGLAKVKKQFEDEITSSRNTFAQYQYQHQNRSEQEAIHSSQVGTSRSSQEMARNEQEGSKVQKIDVHGTEMVSHLEKHTEEVNQASQFHQYVQETVIDTPEDEEIPKVSTKLLKEQFEKSAQEKILYSDKEMTTPAKQIKKLLLQDKEICILCQKTVYPMECLVADKQNFHKSCFRCHHCNSKLSLGNYASLHGQIYCKPHFKQLFKSKGNYDEGFGHKQHKDRWNCKNQSRSVDFIPNEEPNMCKNIAENTLVPGDRNEHLDAGNSEGQRNDLRKLGERGKLKVIWPPSKEIPKKTLPFEEELKMSKPKWPPEMTTLLSPEFKSESLLEDVRTPENKGQRQDHFPFLQPYLQSTHVCQKEDVIGIKEMKMPEGRKDEKKEGRKNVQDRPSEAEDTKSNRKSAMDLNDNNNVIVQSAEKEKNEKTNQTNGAEVLQVTNTDDEMMPENHKENLNKNNNNNYVAVSYLNNCRQKTSILEFLDLLPLSSEANDTANEYEIEKLENTSRISELLGIFESEKTYSRNVLAMALKKQTDRAAAGSPVQPAPKPSLSRGLMVKGGSSIISPDTNLLNIKGSHSKSKNLHFFFSNTVKITAFSKKNENIFNCDLIDSVDQIKNMPCLDLREFGKDVKPWHVETTEAARNNENTGFDALSHECTAKPLFPRVEVQSEQLTVEEQIKRNRCYSDTE

SEQ ID NO: 70023 - protein, 971 aa, Homo sapiens; identical to SEQ ID NO: 70022

SEQ ID NO: 70024 - protein, 459 aa, Homo sapiens
METVFEEMDEESTGGVSSSKEEIVLGQRLHLSFPFSIIFSTVLYCGEVAFGLYMFEIYRKANDTFWMSFTISFIIVGAILDQIILMFFNKDLRRNKAALLFWHILLLGPIVRCLHTIRNYHKWLKNLKQEKEETQVSITKRNTMLEREIAFSIRDNFMQQKAFKYMSVIQAFLGSVPQLILQMYISLTIREWPLNRALLMTFSLLSVTYGAIRCNILAIQISNDDTTIKLPPIEFFCVVMWRFLEVISRVVTLAFFIASLKLKSLPVLLIIYFVSLLAPWLEFWKSGAHLPGNKENNSNMVGTVLMLFLITLLYAAINFSCWSAVKLQLSDDKIIDGRQRWGHRILHYSFQFLENVIMILVFRFFGGKTLLNCCDSLIAVQLIISYLLATGFMLLFYQYLYPWQSGKVLPGRTENQPEAPYYYVNIEKTEKNKNKQLRNYCHSCNRVGYFSIRKSMTCS

SEQ ID NO: 70025 - protein, 462 aa, Homo sapiens
MNTRPQHSERTSTMDRVYEIPEEPNVDPVSSLEEDVIRGANPRFTFPFSILFSTFLYCGEAASALYMVRIYRKNSETYWMTYTFSFFMFSSIMVQLTLIFVHRDLAKDKPLSLFMHLILLGPVIRCLEAMIKYLTLWKKEEQEEPYVSLTRKKMLIDGEEVLIEWEVGHSIRTLAMHRNAYKRMSQIQAFLGSVPQLTYQLYVSLISAEVPLGRVVLMVFSLVSVTYGATLCNMLAIQIKYDDYKIRLGPLEVLCITIWRTLEITSRLLILVLFSATLKLKAVPFLVLNFLIILFEPWIKFWRSGAQMPNNIEKNFSRVGTLVVLISVTILYAGINFSCWSALQLRLADRDLVDKGQNWGHMGLHYSVRLVENVIMVLVFKFFGVKVLLNYCHSLIALQLIIAYLISIGFMLLFFQYLHPLRSLFTHNVVDYLHCVCCHQHPRTRVENSEPPFETEARQSVV

SEQ ID NO: 70026 - protein, 449 aa, Homo sapiens
MDRVYEIPEEPNVDPVSSLEEDVIRGANPRFTFPFSILFSTFLYCGEAASALYMVRIYRKNSETYWMTYTFSFFMFSSIMVQLTLIFVHRDLAKDKPLSLFMHLILLGPVIRCLEAMIKYLTLWKKEEQEEPYVSLTRKKMLIDGEEVLIEWEVGHSIRTLAMHRNAYKRMSQIQAFLGSVPQLTYQLYVSLISAEVPLGRVVLMVFSLVSVTYGATLCNMLAIQIKYDDYKIRLGPLEVLCITIWRTLEITSRLLILVLFSATLKLKAVPFLVLNFLIILFEPWIKFWRSGAQMPNNIEKNFSRVGTLVVLISVTILYAGINFSCWSALQLRLADRDLVDKGQNWGHMGLHYSVRLVENVIMVLVFKFFGVKVLLNYCHSLIALQLIIAYLISIGFMLLFFQYLHPLRSLFTHNVVDYLHCVCCHQHPRTRVENSEPPFETEARQSVV

SEQ ID NO: 70027 - protein, 444 aa, Homo sapiens
MKFPASVLASVFLFVAETTAALSLSSTYRSGGDRMWQALTLLFSLLPCALVQLTLLFVHRDLSRDRPLVLLLHLLQLGPLFRCFEVFCIYFQSGNNEEPYVSITKKRQMPKNGLSEEIEKEVGQAEGKLITHRSAFSRASVIQAFLGSAPQLTLQLYISVMQQDVTVGRSLLMTISLLSIVYGALRCNILAIKIKYDEYEVKVKPLAYVCIFLWRSFEIATRVVVLVLFTSVLKTWVVVIILINFFSFFLYPWILFWCSGSPFPENIEKALSRVGTTIVLCFLTLLYTGINMFCWSAVQLKIDSPDLISKSHNWYQLLVYYMIRFIENAILLLLWYLFKTDIYMYVCAPLLVLQLLIGYCTAILFMLVFYQFFHPCKKLFSSSVSEGFQRWLRCFCWACRQQKPCEPIGKEDLQSSRDRDETPSSSKTSPEPGQFLNAEDLCSA

SEQ ID NO: 70028 - protein, 642 aa, Homo sapiens
MAASRKPPRVRVNHQDFQLRNLRIIEPNEVTHSGDTGVETDGRMPPKVTSELLRQLRQAMRNSEYVTEPIQAYIIPSGDAHQSEYIAPCDCRRAFVSGFDGSAGTAIITEEHAAMWTDGRYFLQAAKQMDSNWTLMKMGLKDTPTQEDWLVSVLPEGSRVGVDPLIIPTDYWKKMAKVLRSAGHHLIPVKENLVDKIWTDRPERPCKPLLTLGLDYTGISWKDKVADLRLKMAERNVMWFVVTALDEIAWLFNLRGSDVEHNPVFFSYAIIGLETIMLFIDGDRIDAPSVKEHLLLDLGLEAEYRIQVHPYKSILSELKALCADLSPREKVWVSDKASYAVSETIPKDHRCCMPYTPICIAKAVKNSAESEGMRRAHIKDAVALCELFNWLEKEVPKGGVTEISAADKAEEFRRQQADFVDLSFPTISSTGPNGAIIHYADGTTDVTRTMHFGTPTAYEKECFTYVLKGHIAVSAAVFPTGTKGHLLDSFARSALWDSGLDYLHGTGHGVGSFLNVHEGPCGISYKTFSDEPLEAGMIVTDEPGYYEDGAFGIRIENVVLVVPVKTKYNFNNRGSLTFEPLTLVPIQTKMIDVDSLTDKECDWLNNYHLTCRDVIGKELQKQGRQEALEWLIRETQPISKQH

SEQ ID NO: 70029 - protein, 623 aa, Homo sapiens
MPPKVTSELLRQLRQAMRNSEYVTEPIQAYIIPSGDAHQSEYIAPCDCRRAFVSGFDGSAGTAIITEEHAAMWTDGRYFLQAAKQMDSNWTLMKMGLKDTPTQEDWLVSVLPEGSRVGVDPLIIPTDYWKKMAKVLRSAGHHLIPVKENLVDKIWTDRPERPCKPLLTLGLDYTGISWKDKVADLRLKMAERNVMWFVVTALDEIAWLFNLRGSDVEHNPVFFSYAIIGLETIMLFIDGDRIDAPSVKEHLLLDLGLEAEYRIQVHPYKSILSELKALCADLSPREKVWVSDKASYAVSETIPKDHRCCMPYTPICIAKAVKNSAESEGMRRAHIKDAVALCELFNWLEKEVPKGGVTEISAADKAEEFRRQQADFVDLSFPTISSTGPNGAIIHYAPVPETNRTLSLDEVYLIDSGAQYKDGTTDVTRTMHFGTPTAYEKECFTYVLKGHIAVSAAVFPTGTKGHLLDSFARSALWDSGLDYLHGTGHGVGSFLNVHEGPCGISYKTFSDEPLEAGMIVTDEPGYYEDGAFGIRIENVVLVVPVKTKYNFNNRGSLTFEPLTLVPIQTKMIDVDSLTDKECDWLNNYHLTCRDVIGKELQKQGRQEALEWLIRETQPISKQH

SEQ ID NO: 70030 - protein, 552 aa, Homo sapiens
MWTDGRYFLQAAKQMDSNWTLMKMGLKDTPTQEDWLVSVLPEGSRVGVDPLIIPTDYWKKMAKVLRSAGHHLIPVKENLVDKIWTDRPERPCKPLLTLGLDYTGISWKDKVADLRLKMAERNVMWFVVTALDEIAWLFNLRGSDVEHNPVFFSYAIIGLETIMLFIDGDRIDAPSVKEHLLLDLGLEAEYRIQVHPYKSILSELKALCADLSPREKVWVSDKASYAVSETIPKDHRCCMPYTPICIAKAVKNSAESEGMRRAHIKDAVALCELFNWLEKEVPKGGVTEISAADKAEEFRRQQADFVDLSFPTISSTGPNGAIIHYAPVPETNRTLSLDEVYLIDSGAQYKDGTTDVTRTMHFGTPTAYEKECFTYVLKGHIAVSAAVFPTGTKGHLLDSFARSALWDSGLDYLHGTGHGVGSFLNVHEGPCGISYKTFSDEPLEAGMIVTDEPGYYEDGAFGIRIENVVLVVPVKTKYNFNNRGSLTFEPLTLVPIQTKMIDVDSLTDKECDWLNNYHLTCRDVIGKELQKQGRQEALEWLIRETQPISKQH

SEQ ID NO: 70031 - protein, 303 aa, Homo sapiens
MPPKVTSELLRQLRQAMRNSEYVTEPIQAYIIPSGDAHQSEYIAPCDCRRAFVSGFDGSAGTAIITEEHAAMWTDGRYFLQAAKQMDSNWTLMKMGLKDTPTQEDWLVSVLPEGSRVGVDPLIIPTDYWKKMAKVLRSAGHHLIPVKENLVDKIWTDRPERPCKPLLTLGLDYTGISWKDKVADLRLKMAERNVMWFVVTALDEIAWLFNLRGSDVEHNPVFFSYAIIGLETIMLFIDGDRIDAPSVKEHLLLDLGLEAEYRIQVHPYKSILSELKALCADLSPREKVWVSDKASYAVSETIP

SEQ ID NO: 70032 - protein, 666 aa, Homo sapiens
MAASRKPPRVRVNHQDFQLRNLRIIEPNEVTHSGDTGVETDGRMPPKVTSELLRQLRQAMRNSEYVTEPIQAYIIPSGDAHQSEYIAPCDCRRAFVSGFDGSAGTAIITEEHAAMWTDGRYFLQAAKQMDSNWTLMKMGLKDTPTQEDWLVSVLPEGSRVGVDPLIIPTDYWKKMAKVLRSAGHHLIPVKENLVDKIWTDRPERPCKPLLTLGLDYTGISWKDKVADLRLKMAERNVMWFVVTALDEIAWLFNLRGSDVEHNPVFFSYAIIGLETIMLFIDGDRIDAPSVKEHLLLDLGLEAEYRIQVHPYKSILSELKALCADLSPREKVWVSDKASYAVSETIPKDHRCCMPYTPICIAKAVKNSAESEGMRRAHIKDAVALCELFNWLEKEVPKGGVTEISAADKAEEFRRQQADFVDLSFPTISSTGPNGAIIHYAPVPETNRTLSLDEVYLIDSGAQYKDGTTDVTRTMHFGTPTAYEKECFTYVLKGHIAVSAAVFPTGTKGHLLDSFARSALWDSGLDYLHGTGHGVGSFLNVHEGPCGISYKTFSDEPLEAGMIVTDEPGYYEDGAFGIRIENVVLVVPVKTKYNFNNRGSLTFEPLTLVPIQTKMIDVDSLTDKECDWLNNYHLTCRDVIGKELQKQGRQEALEWLIRETQPISKQH

SEQ ID NO: 70033 - protein, 183 aa, Homo sapiens
MARAHWGCCPWLVLLCACAWGHTKPVDLGGQDVRNCSTNPPYLPVTVVNTTMSLTALRQQMQTQNLSAYIIPGTDAHMNEYIGQHDERRAWITGFTGSAGTAVVTMKKAAVWTDSRYWTQAERQMDCNWELHKEVGTTPIVTWLLTEIPAGGRVGFDPFLLSIGMLFLQSLNLSMLTRVTQLP

SEQ ID NO: 70034 - protein, 674 aa, Homo sapiens
MARAHWGCCPWLVLLCACAWGHTKPVDLGGQDVRNCSTNPPYLPVTVVNTTMSLTALRQQMQTQNLSAYIIPGTDAHMNEYIGQHDERRAWITGFTGSAGTAVVTMKKAAVWTDSRYWTQAERQMDCNWELHKEVGTTPIVTWLLTEIPAGGRVGFDPFLLSIDTWESYDLALQGSNRQLVSITTNLVDLVWGSERPPVPNQPIYALQEAFTGSTWQEKVSGVRSQMQKHQKVPTAVLLSALEETAWLFNLRASDIPYNPFFYSYTLLTDSSIRLFANKSRFSSETLSYLNSSCTGPMCVQIEDYSQVRDSIQAYSLGDVRIWIGTSYTMYGIYEMIPKEKLVTDTYSPVMMTKAVKNSKEQALLKASHVRDAVAVIRYLVWLEKNVPKGTVDEFSGAEIVDKFRGEEQFSSGPSFETISASGLNAALAHYSPTKELNRKLSSDEMYLLDSGGQYWDGTTDITRTVHWGTPSAFQKEAYTRVLIGNIDLSRLIFPAATSGRMVEAFARRALWDAGLNYGHGTGHGIGNFLCVHEWPVGFQSNNIAMAKGMFTSIEPGYYKDGEFGIRLEDVALVVEAKTKYPGSYLTFEVVSFVPYDRNLIDVSLLSPEHLQYLNRYYQTIREKVGPELQRRQLLEEFEWLQQHTEPLAARAPDTASWASVLVVSTLAILGWSV

SEQ ID NO: 70035 - protein, 507 aa, Homo sapiens
MPWLLSAPKLVPAVANVRGLSGCMLCSQRRYSLQPVPERRIPNRYLGQPSPFTHPHLLRPGEVTPGLSQVEYALRRHKLMSLIQKEAQGQSGTDQTVVVLSNPTYYMSNDIPYTFHQDNNFLYLCGFQEPDSILVLQSLPGKQLPSHKAILFVPRRDPSRELWDGPRSGTDGAIALTGVDEAYTLEEFQHLLPKMKAETNMVWYDWMRPSHAQLHSDYMQPLTEAKAKSKNKVRGVQQLIQRLRLIKSPAEIERMQIAGKLTSQAFIETMFTSKAPVEEAFLYAKFEFECRARGADILAYPPVVAGGNRSNTLHYVKNNQLIKDGEMVLLDGGCESSCYVSDITRTWPVNGRFTAPQAELYEAVLEIQRDCLALCFPGTSLENIYSMMLTLIGQKLKDLGIMKNIKENNAFKAARKYCPHHVGHYLGMDVHDTPDMPRSLPLQPGMVITIEPGIYIPEDDKDAPEKFRGLGVRIEDDVVVTQDSPLILSADCPKEMNDIEQICSQAS

SEQ ID NO: 70036 - protein, 278 aa, Homo sapiens
MPWLLSAPKLVPAVANVRGLSGCMLCSQRRYSLQPVPERRIPNRYLGQPSPFTHPHLLRPGEVTPGLSQVEYALRRHKLMSLIQKEAQGQSGTDQTVVVLSNPTYYMSNDIPYTFHQDNNFLYLCGFQEPDSILVLQSLPGKQLPSHKAILFVPRRDPSRELWDGPRSGTDGAIALTGVDEAYTLEEFQHLLPKMKAETNMVWYDWMRPSHAQLHSDYMQPLTEAKAKSKNKVRGVQQLIQRLRLIKSPAEIERMQIAGKLTSQRQGFSVLSRLVSNS

SEQ ID NO: 70037 - protein, 288 aa, Homo sapiens
MPWLLSAPKLVPAVANVRGLSGCMLCSQRRYSLQPVPERRIPNRYLGQPSPFTHPHLLRPGEVTPGLSQVEYALRRHKLMSLIQKEAQGQSGTDQTVVVLSNPTYYMSNDIPYTFHQDNNFLYLCGFQEPDSILVLQSLPGKQLPSHKAILFVPRRDPSRELWDGPRSGTDGAIALTGVDEAYTLEEFQHLLPKMKAETNMVWYDWMRPSHAQLHSDYMQPLTEAKAKSKNKVRGVQQLIQRLRLIKSPAEIERMQIAGKLTSQKSVLLARHGGSRLYSHHFGRPRLS

SEQ ID NO: 70038 - protein, 484 aa, Homo sapiens
MLCSQRRYSLQPVPERRIPNRYLGQPSPFTHPHLLRPGEVTPGLSQVEYALRRHKLMSLIQKEAQGQSGTDQTVVVLSNPTYYMSNDIPYTFHQDNNFLYLCGFQEPDSILVLQSLPGKQLPSHKAILFVPRRDPSRELWDGPRSGTDGAIALTGVDEAYTLEEFQHLLPKMKAETNMVWYDWMRPSHAQLHSDYMQPLTEAKAKSKNKVRGVQQLIQRLRLIKSPAEIERMQIAGKLTSQAFIETMFTSKAPVEEAFLYAKFEFECRARGADILAYPPVVAGGNRSNTLHYVKNNQLIKDGEMVLLDGGCESSCYVSDITRTWPVNGRFTAPQAELYEAVLEIQRDCLALCFPGTSLENIYSMMLTLIGQKLKDLGIMKNIKENNAFKAARKYCPHHVGHYLGMDVHDTPDMPRSLPLQPGMVITIEPGIYIPEDDKDAPEKFRGLGVRIEDDVVVTQDSPLILSADCPKEMNDIEQICSQAS

SEQ ID NO: 70039 - protein, 792 aa, Homo sapiens
MAFSGIYKLDDGKPYLNNCFPARNLLRVPEEGQGHWLVVQKGNLKKKPKGLVGAQAERRESLKATSFEFKGKKESRRENQVDLPGHILDQAFLLKHHCVRKPSDLCTINAKENDFKHFHSVIYINASENLLPLEAFHTFPALKELDLAFNGIKTIYVKYGDFKLLEFLDLSFNSLTVEAICDLGILPHLRVLLLTGNGLTSLPPNLAVAEQEASVTSLTSKRYILRFPALETLMLDDNRLSNPSCFASLAGLRRLKKLSLDENRIIRIPYLQQVQLYDESVDWNGGRGSPHKEPQFMLQSKPRMLEDSDEQLDYTVLPMKKDVDRTEVVFSSYPGFSTSETTKICSLPPIFEILPVKSLKARNQTLAPPFPELRYLSLAYNKIAKEDAVLPVALFPSLCEFVFHNNPLVAHTRGVPPLLKSFLQERLGIHLIRRKIVKPKHHVLMSRKESWKVKSEIPKVPKQPLVLHHPRMTTTKSPSKDMLEPEAELAEDLPTTKSTSVESEMPTENLEGHSPSCRTFVPLPPICSNSTVHSEETLSHLSDTTVRLSPERPSDEDSKSTESIFLTQVSELPSSVIHKDDLELKEKDQKKPPTAPREVKGTRRKLPTAFLPSKYHGYEELLTAKPDPAFIEPKGIQKNAQALQQMLKHPLLCHSSKPKLDTLQKPYVHKEKRAQRIPIPPPKKTRAQLLDDIFIRLRDPRNITEAPLGAVLHQWTERRLVNHKQYLEAKRLLKEFQARYRQLVSGSLRTVFGTTPLPMACPALSESQPKFGHFLEFMDEFCQEPTASDSQG

SEQ ID NO: 70040 - protein, 778 aa, Homo sapiens
MAFSGIYKLDDGKPYLNNCFPARNLLRVPEEGQGHWLVVQKGNLKKKPKGLVGAQAERRESLKATSFEFKGKKESRRENQVDLPGHILDQAFLLKHHCVRKPSDLCTINAKENDFKHFHSVIYINASENLLPLEAFHTFPALKELDLAFNGIKTIYVKYGDFKLLEFLDLSFNSLTVEAICDLGILPHLRVLLLTGNGLTSLPPNLAVAEQEASVTSLTSKRYILRFPALETLMLDDNRLSNPSCFASLAGLRRLKKLSLDENRIIRIPYLQQVQLYDESVDWNGGRGSPHKEPQFMLQSKPRMLEDSDEQLDYTVLPMKKDVDRTTTKICSLPPIFEILPVKSLKARNQTLAPPFPELRYLSLAYNKIAKEDAVLPVALFPSLCEFVFHNNPLVAHTRGVPPLLKSFLQERLGIHLIRRKIVKPKHHVLMSRKESWKVKSEIPKVPKQPLVLHHPRMTTTKSPSKDMLEPEAELAEDLPTTKSTSVESEMPTENLEGHSPSCRTFVPLPPICSNSTVHSEETLSHLSDTTVRLSPERPSDEDSKSTESIFLTQVSELPSSVIHKDDLELKEKDQKKPPTAPREVKGTRRKLPTAFLPSKYHGYEELLTAKPDPAFIEPKGIQKNAQALQQMLKHPLLCHSSKPKLDTLQKPYVHKEKRAQRIPIPPPKKTRAQLLDDIFIRLRDPRNITEAPLGAVLHQWTERRLVNHKQYLEAKRLLKEFQARYRQLVSGSLRTVFGTTPLPMACPALSESQPKFGHFLEFMDEFCQEPTASDSQG

SEQ ID NO: 70041 - protein, 736 aa, Homo sapiens
MAFSGIYKLDDGKPYLNNCFPARNLLRVPEEGQGHWLVVQKGNLKKKPKGLVGAQAERRESLKATSFEFKGKKESRRENQVDLPGHILDQAFLLKHHCVRKPSDLCTINAKENDFKHFHSVIYINASENLLPLEAFHTFPALKELDLAFNGIKTIYVKYGDFKLLEFLDLSFNSLTVEAICDLGILPHLRVLLLTGNGLTSLPPNLAVAEQEASVTSLTSKRYILRFPALETLMLDDNRLSNPSCFASLAGLRRLKKLSLDENRIIRIPYLQQVQLYDESVDWNGGRGSPHKEPQFMLQSKPRMLEDSDEQLDYTVLPMKKDVDRTIAKEDAVLPVALFPSLCEFVFHNNPLVAHTRGVPPLLKSFLQERLGIHLIRRKIVKPKHHVLMSRKESWKVKSEIPKVPKQPLVLHHPRMTTTKSPSKDMLEPEAELAEDLPTTKSTSVESEMPTENLEGHSPSCRTFVPLPPICSNSTVHSEETLSHLSDTTVRLSPERPSDEDSKSTESIFLTQVSELPSSVIHKDDLELKEKDQKKPPTAPREVKGTRRKLPTAFLPSKYHGYEELLTAKPDPAFIEPKGIQKNAQALQQMLKHPLLCHSSKPKLDTLQKPYVHKEKRAQRIPIPPPKKTRAQLLDDIFIRLRDPRNITEAPLGAVLHQWTERRLVNHKQYLEAKRLLKEFQARYRQLVSGSLRTVFGTTPLPMACPALSESQPKFGHFLEFMDEFCQEPTASDSQG

SEQ ID NO: 70042 - protein, 296 aa, Homo sapiens
MAFSGIYKLDDGKPYLNNCFPARNLLRVPEEGQGHWLVVQKGNLKKKPKGLVGAQAERRESLKATSFEFKGKKESRRENQVDLPGHILDQAFLLKHHCVRKPSDLCTINVSGLKFSKAKENDFKHFHSVIYINASENLLPLEAFHTFPALKELDLAFNGIKTIYVKYGDFKLLEFLDLSFNSLTVEAICDLGILPHLRVLLLTGNGLTSLPPNLAVAEQEASVTSLTSKRYILRFPALETLMLDDNRLSNPSCFASLAGLRRLKKLSLDENRIIRIPYLQQVQLYDESVDWNGGRG

SEQ ID NO: 70043 - protein, 598 aa, Homo sapiens
MAFSGIYKLDDGKPYLNNCFPARNLLRVPEEGQGHWLVVQKGNLKKKPKGLVGAQAERRESLKATSFEFKGKKESRRENQVDLPGHILDQAFLLKHHCVRKPSDLCTINAKENDFKHFHSVIYINASENLLPLEAFHTFPALKELDLAFNGIKTIYVKYGDFKLLEFLDLSFNSLTVEAICDLGILPHLRVLLLTGNGLTSLPPNLAVAEQEASVTSLTSKRYILRFPALETLMLDDNRLSNPSCFASLAGLRRLKKLSLDENRIIRIPYLQQVQLYDESVDWNGGRGSPHKEPQFMLQSKPRMLEDSDEQLDYTVLPMKKDVDRTGVPPLLKSFLQERLGIHLIRRKIVKPKHHVLMSRKESWKVKSEIPKVPKQPLVLHHPRMTTTKSPSKDMLEPEAELAEDLPTTKSTSVESEMPTENLEGHSPSCRTFVPLPPICSNSTVHSEETLSHLSDTTVRLSPERPSDEDSKSTESIFLTQVSELPSSVIHKDDLELKEKDQKKPPTAPREVKGTRRKLPTAFLPSKYHGYEELLTAKPDPAFIEPKGIQKNAQALQQMLKHPLLCHSSKPKLDTLQKPYVHKEKRVLSCTSGQNGGW

SEQ ID NO: 70044 - protein, 517 aa, Homo sapiens
MLDDNRLSNPSCFASLAGLRRLKKLSLDENRIIRIPYLQQVQLYDESVDWNGGRGSPHKEPQFMLQSKPRMLEDSDEQLDYTVLPMKKDVDRTEVVFSSYPGFSTSEIAKEDAVLPVALFPSLCEFVFHNNPLVAHTRGVPPLLKSFLQERLGIHLIRRKIVKPKHHVLMSRKESWKVKSEIPKVPKQPLVLHHPRMTTTKSPSKDMLEPEAELAEDLPTTKSTSVESEMPTENLEGHSPSCRTFVPLPPICSNSTVHSEETLSHLSDTTVRLSPERPSDEDSKSTESIFLTQVSELPSSVIHKDDLELKEKDQKKPPTAPREVKGTRRKLPTAFLPSKYHGYEELLTAKPDPAFIEPKGIQKNAQALQQMLKHPLLCHSSKPKLDTLQKPYVHKEKRAQRIPIPPPKKTRAQLLDDIFIRLRDPRNITEAPLGAVLHQWTERRLVNHKQYLEAKRLLKEFQARYRQLVSGSLRTVFGTTPLPMACPALSESQPKFGHFLEFMDEFCQEPTASDSQG

SEQ ID NO: 70045 - protein, 327 aa, Homo sapiens
MFPSRRKAAQLPWEDGRSGLLSGGLPRKCSVFHLFVACLSLGFFSLLWLQLSCSGDVARAVRGQGQETSGPPRACPPEPPPEHWEEDASWGPHRLAVLVPFRERFEELLVFVPHMRRFLSRKKIRHHIYVLNQVDHFRFNRAALINVGFLESSNSTDYIAMHDVDLLPLNEELDYGFPEAGPFHVASPELHPLYHYKTYVGGILLLSKQHYRLCNGMSNRFWGWGREDDEFYRRIKGAGLQLFRPSGITTGYKTFRHLHDPAWRKRDQKRIAAQKQEQFKVDREGGLNTVKYHVASRTALSVGGAPCTVLNIMLDCDKTATPWCTFS

SEQ ID NO: 70046 - protein, 213 aa, Homo sapiens
MRRFLSRKKIRHHIYVLNQVDHFRFNRAALINVGFLESSNSTDYIAMHDVDLLPLNEELDYGFPEAGPFHVASPELHPLYHYKTYVGGILLLSKQHYRLCNGMSNRFWGWGREDDEFYRRIKGAGLQLFRPSGITTGYKTFRHLHDPAWRKRDQKRIAAQKQEQFKVDREGGLNTVKYHVASRTALSVGGAPCTVLNIMLDCDKTATPWCTFS

SEQ ID NO: 70047 - protein, 959 aa, Homo sapiens
MVAAPCARRLARRSHSALLAALTVLLLQTLVVWNFSSLDSGAGERRGGAAVGGGEQPPPAPAPRRERRDLPAEPAAARGGGGGGGGGGGGRGPQARARGGGPGEPRGQQPASRGALPARALDPHPSPLITLETQDGYFSHRPKEKVRTDSNNENSVPKDFENVDNSNFAPRTQKQKHQPELAKKPPSRQKELLKRKLEQQEKGKGHTFPGKGPGEVLPPGDRAAANSSHGKDVSRPPHARKTGGSSPETKYDQPPKCDISGKEAISALSRAKSKHCRQEIGETYCRHKLGLLMPEKVTRFCPLEGKANKNVQWDEDSVEYMPANPVRIAFVLVVHGRASRQLQRMFKAIYHKDHFYYIHVDKRSNYLHRQVLQVSRQYSNVRVTPWRMATIWGGASLLSTYLQSMRDLLEMTDWPWDFFINLSAADYPIRTNDQLVAFLSRYRDMNFLKSHGRDNARFIRKQGLDRLFLECDAHMWRLGDRRIPEGIAVDGGSDWFLLNRRFVEYVTFSTDDLVTKMKQFYSYTLLPAESFFHTVLENSPHCDTMVDNNLRITNWNRKLGCKCQYKHIVDWCGCSPNDFKPQDFHRFQQTARPTFFARKFEAVVNQEIIGQLDYYLYGNYPAGTPGLRSYWENVYDEPDGIHSLSDVTLTLYHSFARLGLRRAETSLHTDGENSCRYYPMGHPASVHLYFLADRFQGFLIKHHATNLAVSKLETLETWVMPKKVFKIASPPSDFGRLQFSEVGTDWDAKERLFRNFGGLLGPMDEPVGMQKWGKGPNVTVTVIWVDPVNVIAATYDILIESTAEFTHYKPPLNLPLRPGVWTVKILHHWVPVAETKFLVAPLTFSNRQPIKPEEALKLHNGPLRNAYMEQSFQSLNPVLSLPINPAQVEQARRNAASTGTALEGWLDSLVGGMWTAMDICATGPTACPVMQTCSQTAWSSFSPDPKSELGAVKPDGRLR

SEQ ID NO: 70048 - protein, 865 aa, Homo sapiens [sequence omitted]

SEQ ID NO: 70049 - protein, 676 aa, Homo sapiens
MVASARVQKLVRRYKLAIATALAILLLQGLVVWSFSGLEEDEAGEKGRQRKPRPLDPGEGSKDTDSSAGRRGSTGRRHGRWRGRAESPGVPVAKVVRAVTSRQRASRRVPPAPPPEAPGRQNLSGAAAGEALVGAAGFPPHGDTGSVEGAPQPTDNGFTPKCEIVGKDALSALARASTKQCQQEIANVVCLHQAGSLMPKAVPRHCQLTGKMSPGIQWDESQAQQPMDGPPVRIAYMLVVHGRAIRQLKRLLKAVYHEQHFFYIHVDKRSDYLHREVVELAQGYDNVRVTPWRMVTIWGGASLLRMYLRSMRDLLEVPGWAWDFFINLSATDYPTRTNEELVAFLSKNRDKNFLKSHGRDNSRFIKKQGLDRLFHECDSHMWRLGERQIPAGIVVDGGSDWFVLTRSFVEYVVYTDDPLVAQLRQFYTYTLLPAESFFHTVLENSLACETLVDNNLRVTNWNRKLGCKCQYKHIVDWCGCSPNDFKPQDFLRLQQVSRPTFFARKFESTVNQEVLEILDFHLYGSYPPGTPALKAYWENTYDAADGPSGLSDVMLTAYTAFARLSLHHAATAAPPMGTPLCRFEPRGLPSSVHLYFYDDHFQGYLVTQAVQPSAQGPAETLEMWLMPQGSLKLLGRSDQASRLQSLENRGLSMLPRLVSNSWPQAVLPLQPPKALG

SEQ ID NO: 70050 - protein, 536 aa, Homo sapiens
MAEHAPRRCCLGWDFSTQQVKVVAVDAELNVFYEESVHFDRDLPEFGTQGGVHVHKDGLTVTSPVLMWVQALDIILEKMKASGFDFSQVLALSGAGQQHGSIYWKAGAQQALTSLSPDLRLHQQLQDCFSISDCPVWMDSSTTAQCRQLEAAVGGAQALSCLTGSRAYERFTGNQIAKIYQQNPEAYSHTERISLVSSFAASLFLGSYSPIDYSDGSGMNLLQIQDKVWSQACLGACAPHLEEKLSPPVPSCSVVGAISSYYVQRYGFPPGCKVVAFTGDNPASLAGMRLEEGDIAVSLGTSDTLFLWLQEPMPALEGHIFCNPVDSQHYMALLCFKNGSLMREKIRNESVSRSWSDFSKALQSTEMGNGGNLGFYFDVMEITPEIIGRHRFNTENHKVAAFPGDVEVRALIEGQFMAKRIHAEGLGYRVMSKTKILATGGASHNREILQVLADVFDAPVYVIDTANSACVGSAYRAFHGLAGGTDVPFSEVVKLAPNPRLAATPSPGASQVYEALLPQYAKLEQRILSQTRGPPE

SEQ ID NO: 70051 - protein, 399 aa, Homo sapiens
MDSSTTAQCRQLEAAVGGAQALSCLTGSRAYERFTGNQIAKIYQQNPEAYSHTERISLVSSFAASLFLGSYSPIDYSDGSGMNLLQIQDKVWSQACLGACAPHLEEKLSPPVPSCSVVGAISSYYVQRYGFPPGCKVVAFTGDNPASLAGMRLEEGDIAVSLGTSDTLFLWLQEPMPALEGHIFCNPVDSQHYMALLCFKNGSLMREKIRNESVSRSWSDFSKALQSTEMGNGGNLGFYFDVMEITPEIIGRHRFNTENHKVAAFPGDVEVRALIEGQFMAKRIHAEGLGYRVMSKTKILATGGASHNREILQVLADVFDAPVYVIDTANSACVGSAYRAFHGLAGGTDVPFSEVVKLAPNPRLAATPSPGASQVYEALLPQYAKLEQRILSQTRGPPE

SEQ ID NO: 70052 - protein, 1422 aa, Homo sapiens
MSGIKRTIKETDPDYEDVSVALPNKRHKAIENSARDAAVQKIETIIKEQFALEMKNKEHEIEVIDQRLIEARRMMDKLRACIVANYYASAGLLKVSEGSKTCDTMVFNHPAIKKFLESPSRSSSPANQRAETPSANHSESDSLSQHNDFLSDKDNNSNMDIEERLSNNMEQRPSRNTGRDTSRITGSHKTEQRNADLTDETSRLFVKKTIVVGNVSKYIPPDKREENDQSTHKWMVYVRGSRREPSINHFVKKVWFFLHPSYKPNDLVEVREPPFHLTRRGWGEFPVRVQVHFKDSQNKRIDIIHNLKLDRTYTGLQTLGAETVVDVELHRHSLGEDCIYPQSSESDISDAPPSLPLTIPAPVKASSPIKQSHEPVPDTSVEKGFPASTEAERHTPFYALPSSLERTPTKMTTSQKVTFCSHGNSAFQPIASSCKIVPQSQVPNPESPGKSFQPITMSCKIVSGSPISTPSPSPLPRTPTSTPVHVKQGTAGSVINNPYVIMDKQPGQVIGATTPSTGSPTNKISTASQVSQGTGSPVPKIHGSSFVTSTVKQEDSLFASMPPLCPIGSHPKVQSPKPITGGLGAFTKVIIKQEPGEAPHVPATGAASQSPLPQYVTVKGGHMIAVSPQKQVITPGEGIAQSAKVQPSKVVGVPVGSALPSTVKQAVAISGGQILVAKASSSVSKAVGPKQVVTQGVAKAIVSGGGGTIVAQPVQTLTKAQVTAAGPQKSGSQGSVMATLQLPATNLANLANLPPGTKLYLTTNSKNPSGKGKLLLIPQGAILRATNNANLQSGSAASGGSGAGGGGGGGGGGGSGSGGGGSTGGGGGTAGGGTQSTAGPGGISQHLTYTSYILKQTPQGTFLVGQPSPQTSGKQLTTGSVVQGTLGVSTSSAQGQQTLKVISGQKTTLFTQAAHGGQASLMKISDSTLKTVPATSQLSKPGTTMLRVAGGVITTATSPAVALSANGPAQQSEGMAPVSSSTVSSVTKTSGQQQVCVSQATVGTCKAATPTVVSATSLVPTPNPISGKATVSGLLKIHSSQSSPQQAVLTIPSQLKPLSVNTSGGVQTILMPVNKVVQSFSTSKPPAILPVAAPTPVVPSSAPAAVAKVKTEPETPGPSCLSQEGQTAVKTEESSELGNYVIKIDHLETIQQLLTAVVKKIPLITAKSEDASCFSAKSVEQYYGWNIGKRRAAEWQRAMTMRKVLQEILEKNPRFHHLTPLKTKHIAHWCRCHGYTPPDPESLRNDGDSIEDVLTQIDSEPECPSSFSSADNLCRKLEDLQQFQKREPENEEEVDILSLSEPVKINIKKEQEEKQEEVKFYLPPTPGSEFIGDVTQKIGITLQPVALHRNVYASVVEDMILKATEQLVNDILRQALAVGYQTASHNRIPKEITVSNIHQAICNIPFLDFLTNKHMGILNEDQ

SEQ ID NO: 70053 - protein, 1422 aa, Homo sapiens; identical to SEQ ID NO: 70052

SEQ ID NO: 70054 - protein, 227 aa, Homo sapiens
MFKRMAEFGPDSGGRVKGVTIVKPIVYGNVARYFGKKREEDGHTHQWTVYVKPYRNEDMSAYVKKIQFKLHESYGNPLRVVTKPPYEITETGWGEFEIIIKIFFIDPNERPVTLYHLLKLFQSDTNAMLGKKTVVSEFYDEMIFQDPTAMMQQLLTTSRQLTLGAYKHETEFAELEVKTREKLEAAKKKTSFEIAELKERLKASRETINCLKNEIRKLEEDDQAKDI

SEQ ID NO: 70055 - protein, 350 aa, Homo sapiens
MATTAAPAGGARNGAGPEWGGFEENIQGGGSAVIDMENMDDTSGSSFEDMGELHQRLREEEVDADAADAAAAEEEDGEFLGMKGFKGQLSRQVADQMWQAGKRQASRAFSLYANIDILRPYFDVEPAQVRSRLLESMIPIKMVNFPQKIAGELYGPLMLVFTLVAILLHGMKTSDTIIREGTLMGTAIGTCFGYWLGVSSFIYFLAYLCNAQITMLQMLALLGYGLFGHCIVLFITYNIHLHALFYLFWLLVGGLSTLRMVAVLVSRTVGPTQRLLLCGTLAALHMLFLLYLHFAYHKVVEGILDTLEGPNIPPIQRVPRDIPAMLPAARLPTTVLNATAKAVAVTLQSH

SEQ ID NO: 70056 - protein, 257 aa, Homo sapiens
MSGFENLNTDFYQTSYSIDDQSQQSYDYGGSGGPYSKQYAGYDYSQQGRFVPPDMMQPQQPYTGQIYQPTQAYTPASPQPFYGNNFEDEPPLLEELGINFDHIWQKTLTVLHPLKVADGSIMNETDLAGPMVFCLAFGATLLLAGKIQFGYVYGISAIGCLGMFCLLNLMSMTGVSFGCVASVLGYCLLPMILLSSFAVIFSLQGMVGIILTAGIIGWCSFSASKIFISALAMEGQQLLVAYPCALLYGVFALISVF

SEQ ID NO: 70057 - protein, 265 aa, Homo sapiens
MSGFENLNTDFYQTSYSIDDQSQQSYDYGGSGGPYSKQYAGYDYSQQGRFVPPDMMQPQQPYTGQIYQPTQAYTPASPQPFYGNNFEDEPPLLEELGINFDHIWQKTLTVLHPLKVADGSIMNETDLAGPMVFCLAFGATLLLAGKIQFGYVYGISAIGCLGMFCLLNLMSMTGVSFGCVASVLGYCLLPMILLSSFAVIFSLQGMVGIILTAGIIGWCSFSASKIFISALAMEGQQLLVALQPNITYGSNYFLFCCLPYPQQHF

SEQ ID NO: 70058 - protein, 257 aa, Homo sapiens; identical to SEQ ID NO: 70056

SEQ ID NO: 70059 - protein, 203 aa, Homo sapiens
MMQPQQPYTGQIYQPTQAYTPASPQPFYGNNFEDEPPLLEELGINFDHIWQKTLTVLHPLKVADGSIMNETDLAGPMVFCLAFGATLLLAGKIQFGYVYGISAIGCLGMFCLLNLMSMTGVSFGCVASVLGYCLLPMILLSSFAVIFSLQGMVGIILTAGIIGWCSFSASKIFISALAMEGQQLLVAYPCALLYGVFALISVF

SEQ ID NO: 70060 - protein, 177 aa, Homo sapiens
MMQPQQPYTGQIYQPTQAYTPASPQPFYGNNFEDEPPLLEELGINFDHIWQKTLTVLHPLKVADGSIMNETDLAGPMVFCLAFGATLLLAGKIQFGYVYGISAIGCLGMFCLLNLMSMTGVSFGCVASVLGYCLLPMILLSSFAVIFSLQGMVGIILTAGIIGWCSFSASKIFISAL

SEQ ID NO: 70061 - protein, 101 aa, Homo sapiens
MMQPQQPYTGQIYQPTQAYTPASPQPFYGNNFEDEPPLLEELGINFDHIWQKTLTVLHPLKVADGSIMNETDLAGPMVFCLAFGATLLLAGKIQFGYVYGI

SEQ ID NO: 70062 - protein, 142 aa, Homo sapiens
MSGFENLNTDFYQTSYSIDDQSQQSYDYGGSGGPYSKQYAGYDYSQQGRFVPPDMMQPQQPYTGQIYQPTQAYTPASPQPFYGNNFEDEPPLLEELGINFDHIWQKTLTVLHPLKVADGSIMNETDLAQWFFALLLEPHCYW

SEQ ID NO: 70063 - protein, 293 aa, Homo sapiens
MAYHSGYGAHGSKHRARAAPDPPPLFDDTSGGYSSQPGGYPATGADVAFSVNHLLGDPMANVAMAYGSSIASHGKDMVHKELHRFVSVSKLKYFFAVDTAYVAKKLGLLVFPYTHQNWEVQYSRDAPLPPRQDLNAPDLYIPTMAFITYVLLAGMALGIQKRFSPEVLGLCASTALVWVVMEVLALLLGLYLATVRSDLSTFHLLAYSGYKYVGMILSVLTGLLFGSDGYYVALAWTSSALMYFIVRSLRTAALGPDSMGGPVPRQRLQLYLTLGAAAFQPLIIYWLTFHLVR

SEQ ID NO: 70064 - protein, 119 aa, Homo sapiens
MVKMTKSKTFQAYLPNCHRTYSCIHCRAHLANHDELISKSFQGSQGRAYLFNSVVNVGCGPAEERVLLTGLHAVADIYCENCKTTLGWKYEHAFESSQKYKEGKFIIELAHMIKDNGWE

SEQ ID NO: 70065 - protein, 119 aa, Homo sapiens
MVKMTRSKTFQAYLPSCHRTYSCIHCRAHLANHDELISKSFQGSQGRAYLFNSVVNVGCGPAEERVLLTGLHAVADIYCENCKTTLGWKYEHAFESSQKYKEGKYIIELAHMIKDNGWD

SEQ ID NO: 70066 - protein, 119 aa, Homo sapiens
MVRISKPKTFQAYLDDCHRRYSCAHCRAHLANHDDLISKSFQGSQGRAYLFNSVVNVGCGPAEERVLLTGLHAVADIHCENCKTTLGWKYEQAFESSQKYKEGKYIIELNHMIKDNGWD

SEQ ID NO: 70067 - protein, 157 aa, Homo sapiens
MCVAQVLTAHLLPPRQALGSLCSPWAAPRVGPLPPAPAMVRISKPKTFQAYLDDCHRRYSCAHCRAHLANHDDLISKSFQGSQGRAYLFNSVVNVGCGPAEERVLLTGLHAVADIHCENCKTTLGWKYEQAFESSQKYKEGKYIIELNHMIKDNGWD

SEQ ID NO: 70068 - protein, 127 aa, Homo sapiens
MPSCDPGPGPACLPTKTFRSYLPRCHRTYSCVHCRAHLAKHDELISKSFQGSHGRAYLFNSVVNVGCGPAEQRLLLTGLHSVADIFCESCKTTLGWKYEQAFETSQKYKEGKYIIEMSHMVKDNGWD

SEQ ID NO: 70069 - protein, 127 aa, Homo sapiens; identical to SEQ ID NO: 70068

SEQ ID NO: 70070 - protein, 127 aa, Homo sapiens; identical to SEQ ID NO: 70068

SEQ ID NO: 70071 - protein, 80 aa, Homo sapiens
MPSCDPGPGPACLPTKTFRSYLPRCHRTYSCVHCRAHLAKHDELISKSFQGSHGRAYLFNSVVNVGCGPAEQRLLLTGLH

SEQ ID NO: 70072 - protein, 127 aa, Homo sapiens; identical to SEQ ID NO: 70068

SEQ ID NO: 70073 - protein, 121 aa, Homo sapiens
MGRIFLDHIGGTRLFSCANCDTILTNRSELISTRFTGATGRAFLFNKVVNLQYSEVQDRVMLTGRHMVRDVSCKNCNSKLGWIYEFATEDSQRYKEGRVILERALVRESEGFEEHVPSDNS

SEQ ID NO: 70074 - protein, 121 aa, Homo sapiens; identical to SEQ ID NO: 70073

SEQ ID NO: 70075 - protein, 121 aa, Homo sapiens; identical to SEQ ID NO: 70073

SEQ ID NO: 70076 - protein, 121 aa, Homo sapiens; identical to SEQ ID NO: 70073

SEQ ID NO: 70077 - protein, 121 aa, Homo sapiens; identical to SEQ ID NO: 70073

SEQ ID NO: 70078 - protein, 773 aa, Homo sapiens
MFSLSSTVQPQVTVPLSHLINAFHTPKNTSVSLSGVSVSQNQHRDVVPEHEAPSSECMFSDFLTKLNIVSIGKGKIFEGYRSMFMEPAKRMKKSLDTTDNWHIRPEPFSLSIPPSLNLRDLGLSELKIGQIDQLVENLLPGFCKGKNISSHWHTSHVSAQSFFENKYGNLDIFSTLRSSCLYRHHSRALQSICSDLQYWPVFIQSRGFKTLKSRTRRLQSTSERLAETQNIAPSFVKGFLLRDRGSDVESLDKLMKTKNIPEAHQDAFKTGFAEGFLKAQALTQKTNDSLRRTRLILFVLLLFGIYGLLKNPFLSVRFRTTTGLDSAVDPVQMKNVTFEHVKGVEEAKQELQEVVEFLKNPQKFTILGGKLPKGILLVGPPGTGKTLLARAVAGEADVPFYYASGSEFDEMFVGVGASRIRNLFREAKANAPCVIFIDELDSVGGKRIESPMHPYSRQTINQLLAEMDGFKPNEGVIIIGATNFPEALDNALIRPGRFDMQVTVPRPDVKGRTEILKWYLNKIKFDQSVDPEIIARGTVGFSGAELENLVNQAALKAAVDGKEMVTMKELEFSKDKILMGPERRSVEIDNKNKTITAYHESGHAIIAYYTKDAMPINKATIMPRGPTLGHVSLLPENDRWNETRAQLLAQMDVSMGGRVAEELIFGTDHITTGASSDFDNATKIAKRMVTKFGMSEKLGVMTYSDTGKLSPETQSAIEQEIRILLRDSYERAKHILKTHAKEHKNLAEALLTYETLDAKEIQIVLEGKKLEVR

SEQ ID NO: 70079 - protein, 740 aa, Homo sapiens
MFSLSSTVQPQVTVPLSHLINAFHTPKNTSVSLSGVSVSQNQHRDVVPEHEAPSSECMFSDFLTKLNIVSIGKGKIFEGYRSMFMEPAKRMKKSLDTTDNWHIRPEPFSLSIPPSLNLRDLGLSELKIGQIDQLVENLLPGFCKGKNISSHWHTSHVSAQSFFENKYGNLDIFSTLRSSCLYRHHSRALQSICSDLQYWPVFIQSRGFKTLKSRTRRLQSTSERLAETQNIAPSFVKGFLLRDRGSDVESLDKLMKTKNIPEAHQDAFKTGFAEGFLKAQALTQKTNDSLRRTRLILFVLLLFGIYGLLKNPFLSVRFRTTTGLDSAVDPVQMKNVTFEHVKGVEEAKQELQEVVEFLKNPQKFTILGGKLPKGILLVGPPGTGKTLLARAVAGEADVPFYYASGSEFDEMFVGVGASRIRNLFREAKANAPCVIFIDELDSVGGKRIESPMHPYSRQTINQLLAEMDGFKPNEGVIIIGATNFPEALDNALIRPGRFDMQVTVPRPDVKGRTEILKWYLNKIKFDQSVDPEIIARGTVGFSGAELENLVNQAALKAAVDGKEMVTMKELEFSKDKILMGPERRSVEIDNKNKTITAYHESGHAIIAYYTKDAMPINKATIMPRGPTLGHVSLLPENDRWNETRAQLLAQMDVSMGGRVAEELIFGTDHITTGASSDFDNATKIAKRMVTKFGMSEKLGVMTYSDTGKLSPETQSAIEQEIRILLRDSYERAKHILKTHS

SEQ ID NO: 70080 - protein, 683 aa, Homo sapiens
MFSLSSTVQPQVTVPLSHLINAFHTPKNTSVSLSGVSVSQNQHRDVVPEHEAPSSEPSLNLRDLGLSELKIGQIDQLVENLLPGFCKGKNISSHWHTSHVSAQSFFENKYVFIQSRGFKTLKSRTRRLQSTSERLAETQNIAPSFVKGFLLRDRGSDVESLDKLMKTKNIPEAHQDAFKTGFAEGFLKAQALTQKTNDSLRRTRLILFVLLLFGIYGLLKNPFLSVRFRTTTGLDSAVDPVQMKNVTFEHVKGVEEAKQELQEVVEFLKNPQKFTILGGKLPKGILLVGPPGTGKTLLARAVAGEADVPFYYASGSEFDEMFVGVGASRIRNLFREAKANAPCVIFIDELDSVGGKRIESPMHPYSRQTINQLLAEMDGFKPNEGVIIIGATNFPEALDNALIRPGRFDMQVTVPRPDVKGRTEILKWYLNKIKFDQSVDPEIIARGTVGFSGAELENLVNQAALKAAVDGKEMVTMKELEFSKDKILMGPERRSVEIDNKNKTITAYHESGHAIIAYYTKDAMPINKATIMPRGPTLGHVSLLPENDRWNETRAQLLAQMDVSMGGRVAEELIFGTDHITTGASSDFDNATKIAKRMVTKFGMSEKLGVMTYSDTGKLSPETQSAIEQEIRILLRDSYERAKHILKTHAKEHKNLAEALLTYETLDAKEIQIVLEGKKLEVR

SEQ ID NO: 70081 - protein, 716 aa, Homo sapiens
MFSLSSTVQPQVTVPLSHLINAFHTPKNTSVSLSGVSVSQNQHRDVVPEHEAPSSEPSLNLRDLGLSELKIGQIDQLVENLLPGFCKGKNISSHWHTSHVSAQSFFENKYGNLDIFSTLRSSCLYRHHSRALQSICSDLQYWPVFIQSRGFKTLKSRTRRLQSTSERLAETQNIAPSFVKGFLLRDRGSDVESLDKLMKTKNIPEAHQDAFKTGFAEGFLKAQALTQKTNDSLRRTRLILFVLLLFGIYGLLKNPFLSVRFRTTTGLDSAVDPVQMKNVTFEHVKGVEEAKQELQEVVEFLKNPQKFTILGGKLPKGILLVGPPGTGKTLLARAVAGEADVPFYYASGSEFDEMFVGVGASRIRNLFREAKANAPCVIFIDELDSVGGKRIESPMHPYSRQTINQLLAEMDGFKPNEGVIIIGATNFPEALDNALIRPGRFDMQVTVPRPDVKGRTEILKWYLNKIKFDQSVDPEIIARGTVGFSGAELENLVNQAALKAAVDGKEMVTMKELEFSKDKILMGPERRSVEIDNKNKTITAYHESGHAIIAYYTKDAMPINKATIMPRGPTLGHVSLLPENDRWNETRAQLLAQMDVSMGGRVAEELIFGTDHITTGASSDFDNATKIAKRMVTKFGMSEKLGVMTYSDTGKLSPETQSAIEQEIRILLRDSYERAKHILKTHAKEHKNLAEALLTYETLDAKEIQIVLEGKKLEVR

SEQ ID NO: 70082 - protein, 248 aa, Homo sapiens
MYQVTVPLSHLINAFHTPKNTSVSLSGVSVSQNQHRDVVPEHEAPSSEPSLNLRDLGLSELKIGQIDQLVENLLPGFCKGKNISSHWHTSHVSAQSFFENKYGNLDIFSTLRSSCLYRHHSRALQSICSDLQYWPVFIQSRGFKTLKSRTRRLQSTSERLAETQNIAPSFVKGFLLRDRGSDVESLDKLMKTKNIPEAHQDAFKTGFAEGFLKAQALTQKTNDSLRRTRLILFVLLLFGIYGLLKNPF

SEQ ID NO: 70083 - protein, 253 aa, Homo sapiens
MFSLSSTVQPQVTVPLSHLINAFHTPKNTSVSLSGVSVSQNQHRDVVPEHEAPSSEPSLNLRDLGLSELKIGQIDQLVENLLPGFCKGKNISSHWHTSHVSAQSFFENKYVFIQSRGFKTLKSRTRRLQSTSERLAETQNIAPSFVKGFLLRDRGSDVESLDKLMKTKNIPEAHQDAFKTGFAEGFLKAQALTQKTNDSLRRTRLILFVLLLFGIYGLLKNPFLSVRFRTTTGLDSAVDPVQMKNVTFEHVKG

SEQ ID NO: 70084 - protein, 516 aa, Homo sapiens
MKTKNIPEAHQDAFKTGFAEGFLKAQALTQKTNDSLRRTRLILFVLLLFGIYGLLKNPFLSVRFRTTTGLDSAVDPVQMKNVTFEHVKGVEEAKQELQEVVEFLKNPQKFTILGGKLPKGILLVGPPGTGKTLLARAVAGEADVPFYYASGSEFDEMFVGVGASRIRNLFREAKANAPCVIFIDELDSVGGKRIESPMHPYSRQTINQLLAEMDGFKPNEGVIIIGATNFPEALDNALIRPGRFDMQVTVPRPDVKGRTEILKWYLNKIKFDQSVDPEIIARGTVGFSGAELENLVNQAALKAAVDGKEMVTMKELEFSKDKILMGPERRSVEIDNKNKTITAYHESGHAIIAYYTKDAMPINKATIMPRGPTLGHVSLLPENDRWNETRAQLLAQMDVSMGGRVAEELIFGTDHITTGASSDFDNATKIAKRMVTKFGMSEKLGVMTYSDTGKLSPETQSAIEQEIRILLRDSYERAKHILKTHAKEHKNLAEALLTYETMPKRFKLFLRGKSWK

SEQ ID NO: 70085 - protein, 348 aa, Homo sapiens
MFGPAKGRHFGVHPAPGFPGGVSQQAAGTKAGPAGAWPVGSRTDTMWRLRCKAKDGTHVLQGLSSRTRVRELQGQIAAITGIAPGGQRILVGYPPECLDLSNGDTILEDLPIQSGDMLIIEEDQTRPRSSPAFTKRGASSYVRETLPVLTRTVVPADNSCLFTSVYYVVEGGVLNPACAPEMRRLIAQIVASDPDFYSEAILGKTNQEYCDWIKRDDTWGGAIEISILSKFYQCEICVVDTQTVRIDRFGEDAGYTKRVLLIYDGIHYDPLQRNFPDPDTPPLTIFSSNDDIVLVQALELADEARRRRQFTDVNRFTLRCMVCQKGLTGQAEAREHAKETGHTNFGEV

SEQ ID NO: 70086 - protein, 304 aa, Homo sapiens
METLHIIYSEAKSFTVEGLSSRTRVRELQGQIAAITGIAPGGQRILVGYPPECLDLSNGDTILEDLPIQSGDMLIIEEDQTRPRSSPAFTKRGASSYVRETLPVLTRTVVPADNSCLFTSVYYVVEGGVLNPACAPEMRRLIAQIVASDPDFYSEAILGKTNQEYCDWIKRDDTWGGAIEISILSKFYQCEICVVDTQTVRIDRFGEDAGYTKRVLLIYDGIHYDPLQRNFPDPDTPPLTIFSSNDDIVLVQALELADEARRRRQFTDVNRFTLRCMVCQKGLTGQAEAREHAKETGHTNFGEV

SEQ ID NO: 70087 - protein, 304 aa, Homo sapiens; identical to SEQ ID NO: 70086

SEQ ID NO: 70088 - protein, 279 aa, Homo sapiens
MSPARRCRGMRAAVAASVGLSEGPAGSRSGRLFRPPSPAPAAPGARLLRLPGSGAVQAASPERAGWTEALRAAVAELRAGAVVAVPTDTLYGLACAASCSAALRAVYRLKGRSEAKPLAVCLGRVADVYRYCRVRVPEGLLKDLLPGPVTLVMERSEELNKDLNPFTPLVGIRIPDHAFMQDLAQMFEGPLALTSANLSSQASSLNVEEFQDLWPQLSLVIDGGQIGDGQSPECRLGSTVVDLSVPGKFGIIRPGCALESTTAILQQKYGLLPSHASYL

SEQ ID NO: 70089 - protein, 579 aa, Homo sapiens
MSASSLLEQRPKGQGNKVQNGSVHQKDGLNDDDFEPYLSPQARPNNAYTAMSDSYLPSYYSPSIGFSYSLGEAAWSTGGDTAMPYLTSYGQLSNGEPHFLPDAMFGQPGALGSTPFLGQHGFNFFPSGIDFSAWGNNSSQGQSTQSSGYSSNYAYAPSSLGGAMIDGQSAFANETLNKAPGMNTIDQGMAALKLGSTEVASNVPKVVGSAVGSGSITSNIVASNSLPPATIAPPKPASWADIASKPAKQQPKLKTKNGIAGSSLPPPPIKHNMDIGTWDNKGPVAKAPSQALVQNIGQPTQGSPQPVGQQANNSPPVAQASVGQQTQPLPPPPPQPAQLSVQQQAAQPTRWVAPRNRGSGFGHNGVDGNGVGQSQAGSGSTPSEPHPVLEKLRSINNYNPKDFDWNLKHGRVFIIKSYSEDDIHRSIKYNIWCSTEHGNKRLDAAYRSMNGKGPVYLLFSVNGSGHFCGVAEMKSAVDYNTCAGVWSQDKWKGRFDVRWIFVKDVPNSQLRHIRLENNENKPVTNSRDTQEVPLEKAKQVLKIIASYKHTTSIFDDFSHYEKRQEEEESVKKERQGRGK

SEQ ID NO: 70090 - protein, 569 aa, Homo sapiens
MSASSLLEQRPKGQGNKVQNGSVHQKDGLNDDDFEPYLSPQARPNNAYTAMSDSYLPSYYSPSIGFSYSLGEAAWSTGGDTAMPYLTSYGQLSNGEPHFLPDAMFGQPGALGSTPFLGQHGFNFFPSGIDFSAWGNNSSQGQSTQSSGYSSNYAYAPSSLGGAMIDGQSAFANETLNKAPGMNTIDQGMAALKLGSTEVASNVPKVVGSAVGSGSITSNIVASNSLPPATIAPPKPASWADIASKPAKQQPKLKTKNGIAGSSLPPPPIKHNMDIGTWDNKGPVAKAPSQALVQNIGQPTQGSPQPVGQQANNSPPVAQASVGQQTQPLPPPPPQPAQLSVQQQAAQPTRWVAPRNRGSGFGHNGVDGNGVGQSQAGSGSTPSEPHPVLEKLRSINNYNPKDFDWNLKHGRVFIIKSYSEDDIHRSIKYNIWCSTEHGNKRLDAAYRSMNGKGPVYLLFSVNGSGHFCGVAEMKSAVDYNTCAGVWSQDKWKGRFDVRWIFVKDVPNSQLRHIRLENNENKPVTNSRDTQEVPLEKAKQVLKIIASYKHTTSIFDDFSHYEKRQGRRKC

SEQ ID NO: 70091 - protein, 529 aa, Homo sapiens
MSDSYLPSYYSPSIGFSYSLGEAAWSTGGDTAMPYLTSYGQLSNGEPHFLPDAMFGQPGALGSTPFLGQHGFNFFPSGIDFSAWGNNSSQGQSTQSSGYSSNYAYAPSSLGGAMIDGQSAFANETLNKAPGMNTIDQGMAALKLGSTEVASNVPKVVGSAVGSGSITSNIVASNSLPPATIAPPKPASWADIASKPAKQQPKLKTKNGIAGSSLPPPPIKHNMDIGTWDNKGPVAKAPSQALVQNIGQPTQGSPQPVGQQANNSPPVAQASVGQQTQPLPPPPPQPAQLSVQQQAAQPTRWVAPRNRGSGFGHNGVDGNGVGQSQAGSGSTPSEPHPVLEKLRSINNYNPKDFDWNLKHGRVFIIKSYSEDDIHRSIKYNIWCSTEHGNKRLDAAYRSMNGKGPVYLLFSVNGSGHFCGVAEMKSAVDYNTCAGVWSQDKWKGRFDVRWIFVKDVPNSQLRHIRLENNENKPVTNSRDTQEVPLEKAKQVLKIIASYKHTTSIFDDFSHYEKRQEEEESVKKERQGRGK

SEQ ID NO: 70092 - protein, 579 aa, Homo sapiens; identical to SEQ ID NO: 70089

SEQ ID NO: 70093 - protein, 414 aa, Homo sapiens
MASGDTLYIATDGSEMPAEIVELHEIEVETIPVETIETTVVGEEEEEDDDDEDGGGGDHGGGGGHGHAGHHHHHHHHHHHPPMIALQPLVTDDPTQVHHHQEVILVQTREEVVGGDDSDGLRAEDGFEDQILIPVPAPAGGDDDYIEQTLVTVAAAGKSGGGGSSSSGGGRVKKGGGKKSGKKSYLSGGAGAAGGGGADPGNKKWEQKQVQIKTLEGEFSVTMWSSDEKKDIDHETVVEEQIIGENSPPDYSEYMTGKKLPPGGIPGIDLSDPKQLAEFARMKPRKIKEDDAPRTIACPHKGCTKMFRDNSAMRKHLHTHGPRVHVCAECGKAFVESSKLKRHQLVHTGEKPFQCTFEGCGKRFSLDFNLRTHVRIHTGDRPYVCPFDGCNKKFAQSTNLKSHILTHAKAKNNQ

SEQ ID NO: 70094 - protein, 34 aa, Homo sapiens
MASGDTLYIATDGSEMPAEIVELHEIEVETIPVE

SEQ ID NO: 70095 - protein, 406 aa, Homo sapiens
MAQAPADPGREGHLEQRILQVLTEAGSPVKLAQLVKECQAPKRELNQVLYRMKKELKVSLTSPATWCLGGTDPEGEGPAELALSSPEEDIYRFLKDNGPQRALVIAQALGMRTAKDVNRDLYRMKSRHLLDMDEQSKAWTIYRPEDSGRRAKSASIIYQHNPINMICQNGPNSWISIANSEAIQIGHGNIITRQTVSREDGSAGPRHLPSMAPGDSSTWGTLVDPWGPQDIHMEQSILRRVQLGHSNEMRLHGVPSEGPAHIPPGSPPVSATAAGPEASFEARIPSPGTHPEGEAAQRIHMKSCFLEDATIGNSNKMSISPGVAGPGGVAGSGEGEPGEDAGRRPADTQSRSHFPRDIGQPITPSHSKLTPKLETMTLGNRSHKAAEGSHYVDEASHEGSWWGGGI

SEQ ID NO: 70096 - protein, 446 aa, Homo sapiens
MAQAPADPGREGHLEQRILQVLTEAGSPVKLAQLVKECQAPKRELNQVLYRMKKELKVSLTSPATWCLGGTDPEGEGPAELALSSPAERPQQHAATIPETPGPQFSQQREEDIYRFLKDNGPQRALVIAQALGMRTAKDVNRDLYRMKSRHLLDMDEQSKAWTIYRPEDSGRRAKSASIIYQHNPINMICQNGPNSWISIANSEAIQIGHGNIITRQTVSREDGSAGPRHLPSMAPGDSSTWGTLVDPWGPQDIHMEQSILRRVQLGHSNEMRLHGVPSEGPAHIPPGSPPVSATAAGPEASFEARIPSPGTHPEGEAAQRIHMKSCFLEDATIGNSNKMSISPGVAGPGGVAGSGEGEPGEDAVAAFTEVLNPSKSFMKFGINFFQTPVNVDSLTSSHESQMFLTACRLVIFSRRFSTYFAQIHLRNHSVLHLCPHKIYLLKNKK

SEQ ID NO: 70097 - protein, 380 aa, Homo sapiens
MAQAPADPGREGHLEQRILQVLTEAGSPVKLAQLVKECQAPKRELNQVLYRMKKELKVSLTSPATWCLGGTDPEGEGPAELALSSPAERPQQHAATIPETPGPQFSQQREEDIYRFLKDNGPQRALVIAQALGMRTAKDVNRDLYRMKSRHLLDMDEQSKAWTIYRPEDSGRRAKSASIIYQHNPINMICQNGPNSWISIANSEAIQIGHGNIITRQTVSREDGSAGPRHLPSMAPGDSSTWGTLVDPWGPQDIHMEQSILRRVQLGHSNEMRLHGVPSEGPAHIPPGSPPVSATAAGPEASFEARIPSPGTHPEGEAAQRIHMKSCFLEDATIGNSNKMSISPGVAGPGGVAGSGEGEPGEDAGRRPADTQARSFDGQE

SEQ ID NO: 70098 - protein, 429 aa, Homo sapiens
MAQAPADPGREGHLEQRILQVLTEAGSPVKLAQLVKECQAPKRELNQVLYRMKKELKVSLTSPATWCLGGTDPEGEGPAELALSSPAERPQQHAATIPETPGPQFSQQREEDIYRFLKDNGPQRALVIAQALGMRTAKDVNRDLYRMKSRHLLDMDEQSKAWTIYRPEDSGRRAKSASIIYQHNPINMICQNGPNSWISIANSEAIQIGHGNIITRQTVSREDGSAGPRHLPSMAPGDSSTWGTLVDPWGPQDIHMEQSILRRVQLGHSNEMRLHGVPSEGPAHIPPGSPPVSATAAGPEASFEARIPSPGTHPEGEAAQRIHMKSCFLEDATIGNSNKMSISPGVAGPGGVAGSGEGEPGEDAGRRPADTQSRSHFPRDIGQPITPSHSKLTPKLETMTLGNRSHKAAEGSHYVDEASHEGSWWGGGI

SEQ ID NO: 70099 - protein, 248 aa, Homo sapiens
MAQAPADPGREGHLEQRILQVLTEAGSPVKLAQLVKECQAPKRELNQVLYRMKKELKVSLTSPATWCLGGTDPEGEGPAELALSSPAERPQQHAATIPETPGPQFSQQREEDIYRFLKDNGPQRALVIAQALGMRTAKDVNRDLYRMKSRHLLDMDEQSKAWTIYRPEDSGRRAKSASIIYQHNPINMICQNGPNSWISIANSEAIQIGHGNIITRQTVSREDGKSPKRAQGGDLGGEPPDPLGGGKG

SEQ ID NO: 70100 - protein, 354 aa, Homo sapiens
MAQAPADPGREAERPQQHAATIPETPGPQFSQQREEDIYRFLKDNGPQRALVIAQALGMRTAKDVNRDLYRMKSRHLLDMDEQSKAWTIYRPEDSGRRAKSASIIYQHNPINMICQNGPNSWISIANSEAIQIGHGNIITRQTVSREDGSAGPRHLPSMAPGDSSTWGTLVDPWGPQDIHMEQSILRRVQLGHSNEMRLHGVPSEGPAHIPPGSPPVSATAAGPEASFEARIPSPGTHPEGEAAQRIHMKSCFLEDATIGNSNKMSISPGVAGPGGVAGSGEGEPGEDAGRRPADTQSRSHFPRDIGQPITPSHSKLTPKLETMTLGNRSHKAAEGSHYVDEASHEGSWWGGGI

SEQ ID NO: 70101 - protein, 619 aa, Homo sapiens
MPDPAAHLPFFYGSISRAEAEEHLKLAGMADGLFLLRQCLRSLGGYVLSLVHDVRFHHFPIERQLNGTYAIAGGKAHCGPAELCEFYSRDPDGLPCNLRKPCNRPSGLEPQPGVFDCLRDAMVRDYVRQTWKLEGEALEQAIISQAPQVEKLIATTAHERMPWYHSSLTREEAERKLYSGAQTDGKFLLRPRKEQGTYALSLIYGKTVYHYLISQDKAGKYCIPEGTKFDTLWQLVEYLKLKADGLIYCLKEACPNSSASNASGAAAPTLPAHPSTLTHPQRRIDTLNSDGYTPEPARITSPDKPRPMPMDTSVYESPYSDPEELKDKKLFLKRDNLLIADIELGCGNFGSVRQGVYRMRKKQIDVAIKVLKQGTEKADTEEMMREAQIMHQLDNPYIVRLIGVCQAEALMLVMEMAGGGPLHKFLVGKREEIPVSNVAELLHQVSMGMKYLEEKNFVHRDLAARNVLLVNRHYAKISDFGLSKALGADDSYYTARSAGKWPLKWYAPECINFRKFSSRSDVWSYGVTMWEALSYGQKPYKKMKGPEVMAFIEQGKRMECPPECPPELYALMSDCWIYKWEDRPDFLTVEQRMRACYYSLASKVEGPPGSTQKAEAACA

SEQ ID NO: 70102 - protein, 493 aa, Homo sapiens
MRLGPRWKGEALEQAIISQAPQVEKLIATTAHERMPWYHSSLTREEAERKLYSGAQTDGKFLLRPRKEQGTYALSLIYGKTVYHYLISQDKAGKYCIPEGTKFDTLWQLVEYLKLKADGLIYCLKEACPNSSASNASGAAAPTLPAHPSTLTHPQRRIDTLNSDGYTPEPARITSPDKPRPMPMDTSVYESPYSDPEELKDKKLFLKRDNLLIADIELGCGNFGSVRQGVYRMRKKQIDVAIKVLKQGTEKADTEEMMREAQIMHQLDNPYIVRLIGVCQAEALMLVMEMAGGGPLHKFLVGKREEIPVSNVAELLHQVSMGMKYLEEKNFVHRDLAARNVLLVNRHYAKISDFGLSKALGADDSYYTARSAGKWPLKWYAPECINFRKFSSRSDVWSYGVTMWEALSYGQKPYKKMKGPEVMAFIEQGKRMECPPECPPELYALMSDCWIYKWEDRPDFLTVEQRMRACYYSLASKVEGPPGSTQKAEAACA

SEQ ID NO: 70103 - protein, 312 aa, Homo sapiens
MPMDTSVYESPYSDPEELKDKKLFLKRDNLLIADIELGCGNFGSVRQGVYRMRKKQIDVAIKVLKQGTEKADTEEMMREAQIMHQLDNPYIVRLIGVCQAEALMLVMEMAGGGPLHKFLVGKREEIPVSNVAELLHQVSMGMKYLEEKNFVHRDLAARNVLLVNRHYAKISDFGLSKALGADDSYYTARSAGKWPLKWYAPECINFRKFSSRSDVWSYGVTMWEALSYGQKPYKKMKGPEVMAFIEQGKRMECPPECPPELYALMSDCWIYKWEDRPDFLTVEQRMRACYYSLASKVEGPPGSTQKAEAACA

SEQ ID NO: 70104 - protein, 447 aa, Homo sapiens
MLLDAGPQYPAIGVTTFGASRHHSAGDVAERDVGLGINPFADGMGAFKLNPSSHELASAGQTAFTSQAPGYAAAAALGHHHHPGHVGSYSSAAFNSTRDFLFRNRGFGDAAAAASAQHSLFAASAGGFGGPHGHTDAAGHLLFPGLHEQAAGHASPNVVNGQMRLGFSGDMYPRPEQYGQVTSPRSEHYAAPQLHGYGPMNVNMAAHHGAGAFFRYMRQPIKQELICKWIEPEQLANPKKSCNKTFSTMHELVTHVTVEHVGGPEQSNHICFWEECPREGKPFKAKYKLVNHIRVHTGEKPFPCPFPGCGKVFARSENLKIHKRTHTGEKPFKCEFEGCDRRFANSSDRKKHMHVHTSDKPYLCKMCDKSYTHPSSLRKHMKVHESSSQGSQPSPAASSGYESSTPPTIVSPSTDNPTTSSLSPSSSAVHHTAGHSALSSNFNEWYV

SEQ ID NO: 70105 - protein, 532 aa, Homo sapiens
MLLDAGPQFPAIGVGSFARHHHHSAAAAAAAAAEMQDRELSLAAAQNGFVDSAAAHMGAFKLNPGAHELSPGQSSAFTSQGPGAYPGSAAAAAAAAALGPHAAHVGSYSGPPFNSTRDFLFRSRGFGDSAPGGGQHGLFGPGAGGLHHAHSDAQGHLLFPGLPEQHGPHGSQNVLNGQMRLGLPGEVFGRSEQYRQVASPRTDPYSAAQLHNQYGPMNMNMGMNMAAAAAHHHHHHHHHPGAFFRYMRQQCIKQELICKWIDPEQLSNPKKSCNKTFSTMHELVTHVSVEHVGGPEQSNHVCFWEECPREGKPFKAKYKLVNHIRVHTGEKPFPCPFPGCGKVFARSENLKIHKRTHTGEKPFQCEFEGCDRRFANSSDRKKHMHVHTSDKPYLCKMCDKSYTHPSSLRKHMKVHESSPQGSESSPAASSGYESSTPPGLVSPSAEPQSSSNLSPAAAAAAAAAAAAAAAVSAVHRGGGSGSGGAGGGSGGGSGSGGGGGGAGGGGGGSSGGGSGTAGGHSGLSSNFNEWYV

SEQ ID NO: 70106 - protein, 162 aa, Homo sapiens
PPPPPPPPAPPPPPPLNPKKSCNKTFSTMHELVTHVSVEHVGGPEQSNHVCFWEECPREGKPFKAKYKLVNHIRVHTGEKPFPCPFPGCGKVFARSENLKIHKRTHTGEKPFQCEFEGCDRRFANSSDRKKHMHVHTSDKPYLCKMCDKSYTHPSSLRKHMK

SEQ ID NO: 70107 - protein, 260 aa, Homo sapiens
MLLDAGPQFPAIGVGSFARHHHHSAAAAAAAAAEMQDRELSLAAAQNGFVDSAAAHMGAFKLNPGAHELSPGQSSAFTSQGPGAYPGSAAAAAAAAALGPHAAHVGSYSGPPFNSTRDFLFRSRGFGDSAPGGGQHGLFGPGAGGLHHAHSDAQGHLLFPGLPEQHGPHGSQNVLNGQMRLGLPGEVFGRSEQYRQVASPRTDPYSAAQLHNQYGPMNMNMGMNMAAAAAHHHHHHHHPVPSLLTNCVHSGLLLSPPRWF

SEQ ID NO: 70108 - protein, 467 aa, Homo sapiens
MTMLLDGGPQFPGLGVGSFGAPRHHEMPNREPAGMGLNPFGDSTHAAAAAAAAAAFKLSPAAAHDLSSGQSSAFTPQGSGYANALGHHHHHHHHHHHTSQVPSYGGAASAAFNSTREFLFRQRSSGLSEAASGGGQHGLFAGSASSLHAPAGIPEPPSYLLFPGLHEQGAGHPSPTGHVDNNQVHLGLRGELFGRADPYRPVASPRTDPYAAGAQFPNYSPMNMNMGVNVAAHHGPGAFFRYMRQPIKQELSCKWIDEAQLSRPKKSCDRTFSTMHELVTHVTMEHVGGPEQNNHVCYWEECPREGKSFKAKYKLVNHIRVHTGEKPFPCPFPGCGKIFARSENLKIHKRTHTGEKPFKCEFEGCDRRFANSSDRKKHMHVHTSDKPYICKVCDKSYTHPSSLRKHMKVHESQGSDSSPAASSGYESSTPPAIASANSKDTTKTPSAVQTSTSHNPGLPPNFNEWYV

SEQ ID NO: 70109 - protein, 457 aa, Homo sapiens
MTMLLDGGPQFPGLGVGSFGAPRHHEMPNREPAGMGLNPFGDSTHAAAAAAAAAAFKLSPAAAHDLSSGQSSAFTPQGSGYANALGHHHHHHHHHHHTSQVPSYGGAASAAFNSTREFLFRQRSSGLSEAASGGGQHGLFAGSASSLHAPAGIPEPPSYLLFPGLHEQGAGHPSPTGHVDNNQVHLGLRGELFGRADPYRPVASPRTDPYAAGAQFPNYSPMNMNMGVNVAAHHGPGAFFRYMRQPIKQELSCKWIDEAQLSRPKKSCDRTFSTMHELVTHVTMEHVGGPEQNNHVCYWEECPREGKSFKAKYKLVNHIRVHTGEKPFPCPFPGCGKIFARSENLKIHKRTHTGEKPFKCEFEGCDRRFANSSDRKKHMHVHTSDKPYICKVCDKSYTHPSSLRKHMKCCPAWYPGQSLIPDEELDTDVGMQQPALHNTTYPKCRVNAEPTVQEMIY

SEQ ID NO: 70110 - protein, 334 aa, Homo sapiens
MRYKTSLVMRKRLRLYRNTLKESSSSSGHHGPQLTAASSPSVFPGLHEEPPQASPSRPLNGLLRLGLPGDMYARPEPFPPGPAARSDALAAAAALHGYGGMNLTVNLAAPHGPGAFFRYMRQPIKQELICKWLAADGTATPSLCSKTFSTMHELVTHVTVEHVGGPEQANHICFWEECPRQGKPFKAKYKLVNHIRVHTGEKPFPCPFPGCGKVFARSENLKIHKRTHTGEKPFRCEFEGCERRFANSSDRKKHSHVHTSDKPYTCKVRGCDKCYTHPSSLRKHMKVHGRSPPPSSGYDSATPSALVSPSSDCGHKSQVASSAAVAARTADLSE

SEQ ID NO: 70111 - protein, 372 aa, Homo sapiens
MNGPCQSLRKAEGLLEGCTSAVTVFRKLPLDSKAQSQKMRYKTSLVMRKRLRLYRNTLKESSSSSGHHGPQLTAASSPSVFPGLHEEPPQASPSRPLNGLLRLGLPGDMYARPEPFPPGPAARSDALAAAAALHGYGGMNLTVNLAAPHGPGAFFRYMRQPIKQELICKWLAADGTATPSLCSKTFSTMHELVTHVTVEHVGGPEQANHICFWEECPRQGKPFKAKYKLVNHIRVHTGEKPFPCPFPGCGKVFARSENLKIHKRTHTGEKPFRCEFEGCERRFANSSDRKKHSHVHTSDKPYTCKVRGCDKCYTHPSSLRKHMKVHGRSPPPSSGYDSATPSALVSPSSDCGHKSQVASSAAVAARTADLSE

SEQ ID NO: 70112 - protein, 229 aa, Homo sapiens
MRYKTSLVMRKRLRLYRNTLKESSSSSGHHGPQLTAASSPSVFPGLHEEPPQASPSRPLNGLLRLGLPGDMYARPEPFPPGPAARSDALAAAAALHGYGGMNLTVNLAAPHGPGAFFRYMRQPIKQELICKWLAADGTATPSLCSKTFSTMHELVTHVTVEHVGGPEQANHICFWEECPRQGKPFKAKYKLVNHIRVHTGEKPFPCPFPGCGKVFARSENLKIHKRTHT

SEQ ID NO: 70113 - protein, 68 aa, Homo sapiens
MRYKTSLVMRKRLRLYRNTLKESSSSSGHHGPQLTAASSPSVFPGLHEEPPQASPSRPLNGLLRLGLP

SEQ ID NO: 70114 - protein, 334 aa, Homo sapiens; identical to SEQ ID NO: 70110

SEQ ID NO: 70115 - protein, 334 aa, Homo sapiens; identical to SEQ ID NO: 70110

SEQ ID NO: 70116 - protein, 77 aa, Homo sapiens
MRYKTSLVMRKRLRLYRNTLKESSSSSGHHGPQLTAASSPSVFPGLHEEPPQASPSRPLNGLLRLGLPGDMYARPEP

SEQ ID NO: 70117 - protein, 384 aa, Homo sapiens
MPPFCRNAKLGLLSFLICAGRSLLPLGKNAFWLERIENNNTLWEKAQSQKMRYKTSLVMRKRLRLYRNTLKESSSSSGHHGPQLTAASSPSVFPGLHEEPPQASPSRPLNGLLRLGLPGDMYARPEPFPPGPAARSDALAAAAALHGYGGMNLTVNLAAPHGPGAFFRYMRQPIKQELICKWLAADGTATPSLCSKTFSTMHELVTHVTVEHVGGPEQANHICFWEECPRQGKPFKAKYKLVNHIRVHTGEKPFPCPFPGCGKVFARSENLKIHKRTHTGEKPFRCEFEGCERRFANSSDRKKHSHVHTSDKPYTCKVRGCDKCYTHPSSLRKHMKVHGRSPPPSSGYDSATPSALVSPSSDCGHKSQVASSAAVAARTADLSE

SEQ ID NO: 70118 - protein, 227 aa, Homo sapiens
MGGKQSTAARSRGPFPGVSTDDSAVPPPGGAPHFGHYRTGGGAMGLRSRSVSSVAGMGMDPSTAGGVPFGLYTPASRGTGDSERAPGGGGSASDSTYAHGNGYQETGGGHHRDGMLYLGSRASLADALPLHIAPRWFSSHSGFKCPICSKSVASDEMEMHFIMCLSKPRLSYNDDVLTKDAGECVICLEELLQGDTIARLPCLCIYHKSCIDSWFEVNRSCPEHPAD

SEQ ID NO: 70119 - protein, 180 aa, Homo sapiens
QRGVPAAGTPSSPRLLVSRSLGGAVGSVASGARAAQSPFSIPNSSSGPYGSQDSVHSSPEDGGGGRDRPVGGSPGGPRLVIGSLPAHLSPHMFGGFKCPVCSKFVSSDEMDLHLVMCLTKPRITYNEDVLSKDAGECAICLEELQQGDTIARLPCLCIYHKGCIDEWFEVNRSCPEHPSD

SEQ ID NO: 70120 - protein, 242 aa, Homo sapiens
MGAKQSGPAAANGRTRAYSGSDLPSSSSGGANGTAGGGGGARAAAAGRFPAQVPSAHQPSASGGAAAAAAAPAAPAAPRSRSLGGAVGSVASGARAAQSPFSIPNSSSGPYGSQDSVHSSPEDGGGGRDRPVGGSPGGPRLVIGSLPAHLSPHMFGGFKCPVCSKFVSSDEMDLHLVMCLTKPRITYNEDVLSKDAGECAICLEELQQGDTIARLPCLCIYHKGCIDEWFEVNRSCPEHPSD

SEQ ID NO: 70121 - protein, 836 aa, Homo sapiens
MHPLGLCNNNDEEDLYEYGWVGVVKLEQPELDPKPCLTVLGKAKRAVQRGATAVIFDVSENPEAIDQLNQGSEDPLKRPVVYVKGADAIKLMNIVNKQKVARARIQHRPPRQPTEYFDMGIFLAFFVVVSLVCLILLVKIKLKQRRSQNSMNRLAVQALEKMETRKFNSKSKGRREGSCGALDTLSSSSTSDCAICLEKYIDGEELRVIPCTHRFHRKCVDPWLLQHHTCPHCRHNIIEQKGNPSAVCVETSNLSRGRQQRVTLPVHYPGRVHRTNAIPAYPTRTSMDSHGNPVTLLTMDRHGEQSLYSPQTPAYIRSYPPLHLDHSLAAHRCGLEHRAYSPAHPFRRPKLSGRSFSKAACFSQYETMYQHYYFQGLSYPEQEGQSPPSLAPRGPARAFPPSGSGSLLFPTVVHVAPPSHLESGSTSSFSCYHGHRSVCSGYLADCPGSDSSSSSSSGQCHCSSSDSVVDCTEVSNQGVYGSCSTFRSSLSSDYDPFIYRSRSPCRASEAGGSGSSGRGPALCFEGSPPPEELPAVHSHGAGRGEPWPGPASPSGDQVSTCSLEMNYSSNSSLEHRGPNSSTSEVGLEASPGAAPDLRRTWKGGHELPSCACCCEPQPSPAGPSAGAAGSSTLFLGPHLYEGSGPAGGEPQSGSSQGLYGLHPDHLPRTDGVKYEGLPCCFYEEKQVARGGGGGSGCYTEDYSVSVQYTLTEEPPPGCYPGARDLSQRIPIIPEDVDCDLGLPSDCQGTHSLGSWGGTRGPDTPRPHRGLGATREEERALCCQARALLRPGCPPEEAGAVRANFPSALQDTQESSTTATEAAGPRSHSADSSSPGA

SEQ ID NO: 70122 - protein, 836 aa, Homo sapiens; identical to SEQ ID NO: 70121

SEQ ID NO: 70123 - protein, 836 aa, Homo sapiens; identical to SEQ ID NO: 70121

SEQ ID NO: 70124 - protein, 643 aa, Homo sapiens
VPSVWRSTLMERSCGSSPVLTGFTGSAWTPLLQHHTCPHCRHNIIEQKGNPSAVCVETSNLSRGRQQRVTLPVHYPGRVHRTNAIPAYPTRTSMDSHGNPVTLLTMDRHGEQSLYSPQTPAYIRSYPPLHLDHSLAAHRCGLEHRAYSPAHPFRRPKLSGRSFSKAACFSQYETMYQHYYFQGLSYPEQEGQSPPSLAPRGPARAFPPSGSGSLLFPTVVHVAPPSHLESGSTSSFSCYHGHRSVCSGYLADCPGSDSSSSSSSGQCHCSSSDSVVDCTEVSNQGVYGSCSTFRSSLSSDYDPFIYRSRSPCRASEAGGSGSSGRGPALCFEGSPPPEELPAVHSHGAGRGEPWPGPASPSGDQVSTCSLEMNYSSNSSLEHRGPNSSTSEVGLEASPGAAPDLRRTWKGGHELPSCACCCEPQPSPAGPSAGAAGSSTLFLGPHLYEGSGPAGGEPQSGSSQGLYGLHPDHLPRTDGVKYEGLPCCFYEEKQVARGGGGGSGCYTEDYSVSVQYTLTEEPPPGCYPGARDLSQRIPIIPEDVDCDLGLPSDCQGTHSLGSWGGTRGPDTPRPHRGLGATREEERALCCQARALLRPGCPPEEAGAVRANFPSALQDTQESSTTATEAAGPRSHSADSSSPGA

SEQ ID NO: 70125 - protein, 936 aa, Homo sapiens
MRPRSGGRPGATGRRRRRLRRRPRGLRCSRLPPPPPLPLLLGLLLAAAGPGAARAKETAFVEVVLFESSPSGDYTTYTTGLTGRFSRAGATLSAEGEIVQMHPLGLCNNNDEEDLYEYGWVGVVKLEQPELDPKPCLTVLGKAKRAVQRGATAVIFDVSENPEAIDQLNQGSEDPLKRPVVYVKGADAIKLMNIVNKQKVARARIQHRPPRQPTEYFDMGIFLAFFVVVSLVCLILLVKIKLKQRRSQNSMNRLAVQALEKMETRKFNSKSKGRREGSCGALDTLSSSSTSDCAICLEKYIDGEELRVIPCTHRFHRKCVDPWLLQHHTCPHCRHNIIEQKGNPSAVCVETSNLSRGRQQRVTLPVHYPGRVHRTNAIPAYPTRTSMDSHGNPVTLLTMDRHGEQSLYSPQTPAYIRSYPPLHLDHSLAAHRCGLEHRAYSPAHPFRRPKLSGRSFSKAACFSQYETMYQHYYFQGLSYPEQEGQSPPSLAPRGPARAFPPSGSGSLLFPTVVHVAPPSHLESGSTSSFSCYHGHRSVCSGYLADCPGSDSSSSSSSGQCHCSSSDSVVDCTEVSNQGVYGSCSTFRSSLSSDYDPFIYRSRSPCRASEAGGSGSSGRGPALCFEGSPPPEELPAVHSHGAGRGEPWPGPASPSGDQVSTCSLEMNYSSNSSLEHRGPNSSTSEVGLEASPGAAPDLRRTWKGGHELPSCACCCEPQPSPAGPSAGAAGSSTLFLGPHLYEGSGPAGGEPQSGSSQGLYGLHPDHLPRTDGVKYEGLPCCFYEEKQVARGGGGGSGCYTEDYSVSVQYTLTEEPPPGCYPGARDLSQRIPIIPEDVDCDLGLPSDCQGTHSLGSWGGTRGPDTPRPHRGLGATREEERALCCQARALLRPGCPPEEAGAVRANFPSALQDTQESSTTATEAAGPRSHSADSSSPGA

SEQ ID NO: 70126 - protein, 429 aa, Homo sapiens
MPLCRPEHLMPRASRVPVAASLPLSHAVIPTQLPSRPGHRPPGRPRRCPKASCLPPPVGPSSTQTAKRVTMGWPRPGRALVAVKALLVLSLLQVPAQAVVRAVLEDNSSSVDFADLPALFGVPLAPEGIRGYLMEVKPANACHPIEAPRLGNRSLGAIVLIRRYDCTFDLKVLNAQRAGFEAAIVHNVHSDDLVSMTHVYEDLRGQIAIPSVFVSEAASQDLRVILGCNKSAHALLLPDDPPCHDLGCHPVLTVSWVLGCTLALVVSAFFVLNHLWLWAQACCSHRRPVKTSTCQKAQVRTFTWHNDLCAICLDEYEEGDQLKILPCSHTYHCKCIDPWFSQAPRRSCPVCKQSVAATEDSFDSTTYSFRDEDPSLPGHRPPIWAIQVQLRSRRLELLGRASPHCHCSTTSLEAEYTTVSSAPPEAPGQ

SEQ ID NO: 70127 - protein, 479 aa, Homo sapiens
MAALEKMTFPKKMTFPEKPSHKKYRAALKKEKRKKRRQELARLRDSGLSQEEEEDTFIEEQQLEEEKLLERERERLHEEWLLREQKAQEEFRIKKEKEEAAKKWLEEQERKLKEQWKEQQRKEREEEEQKQQEKKEKEEAVQKMLDQAENDLENSTTWQNPEPPVDFRVMEKDRANCPFYSKTGACRFGDRCSRKHNFPTSSPTLLIKSMFTTFGMEQCRRDDYDPDASLEYSEEETYQQFLDFYEDVLPEFKNVGKVIQFKVSCNLEPHLRGNVYVQYQSEEECQAALSLFNGRWYAGRQLQCEFCPVTRWKMAICGLFEIQQCPRGKHCNFLHVFRNPNNEFWEANRDIYLSSDQTGSSFGKNSERREKMGHHDHYYSRQRGRRNPSPDHTYKRNGESERKKSSHRGKKSHKRTSKSRERHNSPSRGRNRHRSWDQGRRSQSRRSHRSRSQSSSRCRSRGRRKSGNRDRTVQSPQSK

SEQ ID NO: 70128 - protein, 482 aa, Homo sapiens
MAAPEKMTFPEKPSHKKYRAALKKEKRKKRRQELARLRDSGLSQKEEEEDTFIEEQQLEEEKLLERERQRLHEEWLLREQKAQEEFRIKKEKEEAAKKRQEEQERKLKEQWEEQQRKEREEEEQKRQEKKEKEEALQKMLDQAENELENGTTWQNPEPPVDFRVMEKDRANCPFYSKTGACRFGDRCSRKHNFPTSSPTLLIKSMFTTFGMEQCRRDDYDPDASLEYSEEETYQQFLDFYEDVLPEFKNVGKVIQFKVSCNLEPHLRGNVYVQYQSEEECQAALSLFNGRWYAGRQLQCEFCPVTRWKMAICGLFEIQQCPRGKHCNFLHVFRNPNNEFWEANRDIYLSPDRTGSSFGKNSERRERMGHHDDYYSRLRGRRNPSPDHSYKRNGESERKSSRHRGKKSHKRTSKSRERHNSRSRGRNRDRSRDRSRGRGSRSRSRSRSRRSRRSRSQSSSRSRSRGRRRSGNRDRTVQSPKSK

SEQ ID NO: 70129 - protein, 147 aa, Homo sapiens
MAAPEKMTFPEKPSHKKYRAALKKEKRKKRRQELARLRDSGLSQKEEEEDTFIEEQQLEEEKLLERERLECSGVISAHRNLHLPGSHDSPASASRVAGITGTHRHTQLIFFCTFSRDGVSPCWPGWSRSLDLMICPPRPHKVLRLQV

SEQ ID NO: 70130 - protein, 1145 aa, Homo sapiens
MCKCCNLFSPNQSELLSHVSEKHMEEGVNVDEIIIPLRPLSTPEPPNSSKTGDEFLVMKRKRGRPKGSTKKSSTEEELAENIVSPTEDSPLAPEEGNSLPPSSLECSKCCRKFSNTRQLRKHICIIVLNLGEEEGEAGNESDLELEKKCKEDDREKASKRPRSQKTEKVQKISGKEARQLSGAKKPIISVVLTAHEAIPGATKIVPVEAGPPETGATNSETTSADLVPRRGYQEYAIQQTPYEQPMKSSRLGPTQLKIFTCEYCNKVFKFKHSLQAHLRIHTNEKPYKCPQCSYASAIKANLNVHLRKHTGEKFACDYCSFTCLSKGHLKVHIERVHKKIKQHCRFCKKKYSDVKNLIKHIRDAHDPQDKKVKEALDELCLMTREGKRQLLYDCHICERKFKNELDRDRHMLVHGDKWPFACELCGHGATKYQALELHVRKHPFVYVCAVCRKKFVSSIRLRTHIKEVHGAAQEALVFTSSINQSFCLLEPGGDIQQEALGDQLQLVEEEFALQGVNALKEEACPGDTQLEEGRKEPEAPGEMPAPAVHLASPQAESTALPPCELETTVVSSSDLHSQEVVSDDFLLKNDTSSAEAHAAPEKPPDMQHRSSVQTQGEVITLLLSKAQSAGSDQESHGAQSPLGEGQNMAVLSAGDPDPSRCLRSNPAEASDLLPPVAGGGDTITHQPDSCKAAPEHRSGITAFMKVLNSLQKKQMNTSLCERIRKVYGDLECEYCGKLFWYQVHFDMHVRTHTREHLYYCSQCHYSSITKNCLKRHVIQKHSNILLKCPTDGCDYSTPDKYKLQAHLKVHTALDKRSYSCPVCEKSFSEDRLIKSHIKTNHPEVSMSTISEVLGRRVQLKGLIGKRAMKCPYCDFYFMKNGSDLQRHIWAHEGVKPFKCSLCEYATRSKSNLKAHMNRHSTEKTHLCDMCGKKFKSKGTLKSHKLLHTADGKQFKCTVCDYTAAQKPQLLRHMEQHVSFKPFRCAHCHYSCNISGSLKRHYNRKHPNEEYANVGTGELAAEVLIQQGGLKCPVCSFVYGTKWEFNRHLKNKHGLKVVEIDGDPKWEVTEEEPSSNHTVMIQETVQQASVELAEQHHLVVSSDDVEGIETVTVYTQGGEASEFIVYVQEAMQPVEEQAVEQPAQEL

SEQ ID NO: 70131 - protein, 1181 aa, Homo sapiens
METRAAENTAIFMCKCCNLFSPNQSELLSHVSEKHMEEGVNVDEIIIPLRPLSTPEPPNSSKTGDEFLVMKRKRGRPKGSTKKSSTEEELAENIVSPTEDSPLAPEEGNSLPPSSLECSKCCRKFSNTRQLRKHICIIVLNLGEEEGEAGATKIVPVEAGPPETGATNSETTSADLVPRRGYQEYAIQQTPYEQPMKSSRLGPTQLKIFTCEYCNKVFKFKHSLQAHLRIHTNEKPYKCPQCSYASAIKANLNVHLRKHTGEKFACDYCSFTCLSKGHLKVHIERVHKKIKQHCRFCKKKYSDVKNLIKHIRDAHDPQDKKVKEALDELCLMTREGKRQLLYDCHICERKFKNELDRDRHMLVHGDKWPFACELCGHGATKYQALELHVRKHPFVYVCAVCRKKFVSSIRLRTHIKEVHGAAQEALVFTSSINQSFCLLEPGGDIQQEALGDQLQLVEEEFALQGVNALKEEACPGDTQLEEGRKEPEAPGEMPAPAVHLASPQAESTALPPCELETTVVSSSDLHSQEVVSDDFLLKNDTSSAEAHAAPEKPPDMQHRSSVQTQGEVITLLLSKAQSAGSDQESHGAQSPLGEGQNMAVLSAGDPDPSRCLRSNPAEASDLLPPVAGGGDTITHQPDSCKAAPEHRSGITAFMKVLNSLQKKQMNTSLCERIRKVYGDLECEYCGKLFWYQVHFDMHVRTHTREHLYYCSQCHYSSITKNCLKRHVIQKHSNILLKCPTDGCDYSTPDKYKLQAHLKVHTALDKRSYSCPVCEKSFSEDRLIKSHIKTNHPEVSMSTISEVLGRRVQLKGLIGKRAMKCPYCDFYFMKNGSDLQRHIWAHEGVKPFKCSLCEYATRSKSNLKAHMNRHSTEKTHLCDMCGKKFKSKGTLKSHKLLHTADGKQFKCTVCDYTAAQKPQLLRHMEQHVSFKPFRCAHCHYSCNISGSLKRHYNRKHPNEEYANVGTGELAAEVLIQQGGLKCPVCSFVYGTKWEFNRHLKNKHGLKVVEIDGDPKWETATEAPEEPSTQYLHITEAEEDVQGTQAAVAALQDLRYTSESGDRLDPTAVNILQQIIELGAETHDATALASVVAMAPGTVTVVKQVTEEEPSSNHTVMIQETVQQASVELAEQHHLVVSSDDVEGIETVTVYTQGGEASEFIVYVQEAMQPVEEQAVEQPAQEL

SEQ ID NO: 70132 - protein, 58 aa, Homo sapiens
METRAAGLLEFAGGPLHTLFAWVSPVEAAEQQRLLPVPASGSFVPEGHLPDASQSSPV

SEQ ID NO: 70133 - protein, 550 aa, Homo sapiens
MDLTKMGMIQLQNPSHPTGLLCKANQMRLAGTLCDVVIMVDSQEFHAHRTVLACTSKMFEILFHRNSQHYTLDFLSPKTFQQILEYAYTATLQAKAEDLDDLLYAAEILEIEYLEEQCLKMLETIQASDDNDTEATMADGGAEEEEDRKARYLKNIFISKHSSEESGYASVAGQSLPGPMVDQSPSVSTSFGLSAMSPTKAAVDSLMTIGQSLLQGTLQPPAGPEEPTLAGGGRHPGVAEVKTEMMQVDEVPSQGFIQRELFSKLGELAVGMKSESRTIGEQCSVCGVELPDNEAVEQHRKLHSGMKTYGCELCGKRFLDSLRLRMHLLAHSAGAKAFVCDQCGAQFSKEDALETHRQTHTGTDMAVFCLLCGKRFQAQSALQQHMEVHAGVRSYICSECNRTFPSHTALKRHLRSHTGDHPYECEFCGSCFRDESTLKSHKRIHTGEKPYECNGCGKKFSLKHQLETHYRVHTGEKPFECKLCHQRSRDYSAMIKHLRTHNGASPYQCTICTEYCPSLSSMQKHMKGHKPEEIPPDWRIEKTYLYLCYV

SEQ ID NO: 70134 - protein, 673 aa, Homo sapiens
MDLTKMGMIQLQNPSHPTGLLCKANQMRLAGTLCDVVIMVDSQEFHAHRTVLACTSKMFEILFHRNSQHYTLDFLSPKTFQQILEYAYTATLQAKAEDLDDLLYAAEILEIEYLEEQCLKMLETIQASDDNDTEATMADGGAEEEEDRKARYLKNIFISKHSSEESGYASVAGQSLPGPMVDQSPSVSTSFGLSAMSPTKAAVDSLMTIGQSLLQGTLQPPAGPEEPTLAGGGRHPGVAEVKTEMMQVDEVPSQDSPGAAESSISGGMGDKVEERGKEGPGTPTRSSVITSARELHYGREESAEQVPPPAEAGQAPTGRPEHPAPPPEKHLGIYSVLPNHKADAVLSMPSSVTSGLHVQPALAVSMDFSTYGGLLPQGFIQRELFSKLGELAVGMKSESRTIGEQCSVCGVELPDNEAVEQHRKLHSGMKTYGCELCGKRFLDSLRLRMHLLAHSAGAKAFVCDQCGAQFSKEDALETHRQTHTGTDMAVFCLLCGKRFQAQSALQQHMEVHAGVRSYICSECNRTFPSHTALKRHLRSHTGDHPYECEFCGSCFRDESTLKSHKRIHTGEKPYECNGCGKKFSLKHQLETHYRVHTGEKPFECKLCHQRSRDYSAMIKHLRTHNGASPYQCTICTEYCPSLSSMQKHMKGHKPEEIPPDWRIEKTYLYLCYV

SEQ ID NO: 70135 - protein, 673 aa, Homo sapiens; identical to SEQ ID NO: 70134

SEQ ID NO: 70136 - protein, 148 aa, Homo sapiens
MDLTKMGMIQLQNPSHPTGLLCKANQMRLAGTLCDVVIMVDSQEFHAHRTVLACTSKMFEILFHRNSQHYTLDFLSPKTFQQILEYAYTATLQAKAEDLDDLLYAAEILEIEYLEEQCLKMLETIQASDDNDTEATMADGGAEEEEDR

SEQ ID NO: 70137 - protein, 115 aa, Homo sapiens
MDLTKMGMIQLQNPSHPTGLLCKANQMRLAGTLCDVVIMVDSQEFHAHRTVLACTSKMFEILFHRNSQHYTLDFLSPKTFQQILEYAYTATLQAKAEDLDDLLYAAEILEIEYLE

SEQ ID NO: 70138 - protein, 240 aa, Homo sapiens
EALPVRLLRPLLLRPHFQDAPPGDPRHGQGAQVPTLRQEVQPGNLKRHLRIHSGEKPYVCIHCQRQFADPGALQRHVRIHTGEKPCQCVMCGKAFTQASSLIAHVRQHTGEKPYVCERCGKRFVQSSQLANHIRHHDNIRPHKCSVCSKAFVNVGDLSKHIIIHTGEKPYLCDKCGRGFNRVDNLRSHVKTVHQGKAGIKILEPEEGSEVSVVTVDDMVTLATEALAATAVTQLTVVPVG

SEQ ID NO: 70139 - protein, 810 aa, Homo sapiens
MDFPQHSQHVLEQLNQQRQLGLLCDCTFVVDGVHFKAHKAVLAACSEYFKMLFVDQKDVVHLDISNAAGLGQVLEFMYTAKLSLSPENVDDVLAVATFLQMQDIITACHALKSLAEPATSPGGNAEALATEGGDKRAKEEKVATSTLSRLEQAGRSTPIGPSRDLKEERGGQAQSAASGAEQTEKADAPREPPPVELKPDPTSGMAAAEAEAALSESSEQEMEVEPARKGEEEQKEQEEQEEEGAGPAEVKEEGSQLENGEAPEENENEESAGTDSGQELGSEARGLRSGTYGDRTESKAYGSVIHKCEDCGKEFTHTGNFKRHIRIHTGEKPFSCRECSKAFSDPAACKAHEKTHSPLKPYGCEECGKSYRLISLLNLHKKRHSGEARYRCEDCGKLFTTSGNLKRHQLVHSGEKPYQCDYCGRSFSDPTSKMRHLETHDTDKEHKCPHCDKKFNQVGNLKAHLKIHIADGPLKCRECGKQFTTSGNLKRHLRIHSGEKPYVCIHCQRQFADPGALQRHVRIHTGEKPCQCVMCGKAFTQASSLIAHVRQHTGEKPYVCERCGKRFVQSSQLANHIRHHDNIRPHKCSVCSKAFVNVGDLSKHIIIHTGEKPYLCDKCGRGFNRVDNLRSHVKTVHQGKAGIKILEPEEGSEVSVVTVDDMVTLATEALAATAVTQLTGPATLPAVVPVGAAVTADETEVLKAEISKAVKQVQEEDPNTHILYACDSCGDKFLDANSLAQHVRIHTAQALVMFQTDADFYQQYGPGGTWPAGQVLQAGELVFRPRDGAEGQPALAETSPTAPECPPPAE

SEQ ID NO: 70140 - protein, 803 aa, Homo sapiens
MDFPQHSQHVLEQLNQQRQLGLLCDCTFVVDGVHFKAHKAVLAACSEYFKMLFVDQKDVVHLDISNAAGLGQVLEFMYTAKLSLSPENVDDVLAVATFLQMQDIITACHALKSLAEPATSPGGNAEALATEGGDKRAKEEKVATSTLSRLEQAGRSTPIGPSRDLKEERGGQAQSAASGAEQTEKADAPREPPPVELKPDPTSGMAAAEAEAALSESSEQEMEVEPARKGEEEQKEQEEQEEEGAGPAEVKEEGSQLENGEAPEENENEESAGTDSGQELGSEARGLRSGTYGDRTESKAYGSVIHKCEDCGKEFTHTGNFKRHIRIHTGEKPFSCRECSKAFSDPAACKAHEKTHSPLKPYGCEECGKSYRLISLLNLHKKRHSGEARYRCEDCGKLFTTSGNLKRHQLVHSGEKPYQCDYCGRSFSDPTSKMRHLETHDTDKEHKCPHCDKKFNQVGNLKAHLKIHIADGPLKCRECGKQFTTSGNLKRHLRIHSGEKPYVCIHCQRQFADPGALQRHVRIHTGEKPCQCVMCGKAFTQASSLIAHVRQHTGEKPYVCERCGKRFVQSSQLANHIRHHDNIRPHKCSVCSKAFVNVGDLSKHIIIHTGEKPYLCDKCGRGFNRVDNLRSHVKTVHQGKAGIKILEPEEGSEVSVVTVDDMVTLATEALAATAVTQLTVVPVGAAVTADETEVLKAEISKAVKQVQEEDPNTHILYACDSCGDKFLDANSLAQHVRIHTAQALVMFQTDADFYQQYGPGGTWPAGQVLQAGELVFRPRDGAEGQPALAETSPTAPECPPPAE

SEQ ID NO: 70141 - protein, 210 aa, Homo sapiens
  VARIANT 1: note = MOD_RES - Any amino acid
XSKHIIIHTGEKPYLCDKCGRGFNRVDNLRSHVKTVHQGKAGIKILEPEEGSEVSVVTVDDMVTLATEALAATAVTQLTGPATLPAVVPVGAAVTADETEVLKAEISKAVKQVQEEDPNTHILYACDSCGDKFLDANSLAQHVRIHTAQALVMFQTDADFYQQYGPGGTWPAGQVLQAGELVFRPRDGAEGQPALAETSPTAPECPPPAE

SEQ ID NO: 70142 - protein, 241 aa, Homo sapiens
  VARIANT 1: note = MOD_RES - Any amino acid
XEALPVRLLRPLLLRPHFQDAPPGDPRHGQGAQVPTLRQEVQPGNLKRHLRIHSGEKPYVCIHCQRQFADPGALQRHVRIHTGEKPCQCVMCGKAFTQASSLIAHVRQHTGEKPYVCERCGKRFVQSSQLANHIRHHDNIRPHKCSVCSKAFVNVGDLSKHIIIHTGEKPYLCDKCGRGFNRVDNLRSHVKTVHQGKAGIKILEPEEGSEVSVVTVDDMVTLATEALAATAVTQLTVVPVG

SEQ ID NO: 70143 - protein, 722 aa, Homo sapiens
MDFPQHSQHVLEQLNQQRQLGLLCDCTFVVDGVHFKAHKAVLAACSEYFKMLFVDQKDVVHLDISNAAGLGQVLEFMYTAKLSLSPENVDDVLAVAPGAEQTEKADAPREPPPVELKPDPTSGMAAAEAEAALSESSEQEMEVEPARKGEEEQKEQEEQEEEGAGPAEVKEEGSQLENGEAPEENENEESAGTDSGQELGSEARGLRSGTYGDRTESKAYGSVIHKCEDCGKEFTHTGNFKRHIRIHTGEKPFSCRECSKAFSDPAACKAHEKTHSPLKPYGCEECGKSYRLISLLNLHKKRHSGEARYRCEDCGKLFTTSGNLKRHQLVHSGEKPYQCDYCGRSFSDPTSKMRHLETHDTDKEHKCPHCDKKFNQVGNLKAHLKIHIADGPLKCRECGKQFTTSGNLKRHLRIHSGEKPYVCIHCQRQFADPGALQRHVRIHTGEKPCQCVMCGKAFTQASSLIAHVRQHTGEKPYVCERCGKRFVQSSQLANHIRHHDNIRPHKCSVCSKAFVNVGDLSKHIIIHTGEKPYLCDKCGRGFNRVDNLRSHVKTVHQGKAGIKILEPEEGSEVSVVTVDDMVTLATEALAATAVTQLTVVPVGAAVTADETEVLKAEISKAVKQVQEEDPNTHILYACDSCGDKFLDANSLAQHVRIHTAQALVMFQTDADFYQQYGPGGTWPAGQVLQAGELVFRPRDGAEGQPALAETSPTAPECPPPAE

SEQ ID NO: 70144 - protein, 509 aa, Homo sapiens
MDFPQHSQHVLEQLNQQRQLGLLCDCTFVVDGVHFKAHKAVLAACSEYFKMLFVDQKDVVHLDISNAAGGDKRAKEEKVATSTLSRLEQAGRSTPIGPSRDLKEERGGQAQSAASGAEQTEKADAPREPPPVELKPDPTSGMAAAEAEAALSESSEQEMEVEPARKGEEEQKEQEEQEEEGAGPAEVKEEGSQLENGEAPEENENEESAGTDSGQELGSEARGLRSGTYGDRTESKAYGSVIHKCEDCGKEFTHTGNFKRHIRIHTGEKPFSCRECSKAFSDPAACKAHEKTHSPLKPYGCEECGKSYRLISLLNLHKKRHSGEARYRCEDCGKLFTTSGNLKRHQLVHSGEKPYQCDYCGRSFSDPTSKMRHLETHDTDKEHKCPHCDKKFNQVCGPLPEPAPGSRRWPQPHACHVVGRAGSTAPASRSSSACSPRKQAQREPLPRGSSRLLCGGQADSGRGLVLKKWGGAAYLSPLGPGTSPDPGEIEPFTDPGKPESQLFLCGRGR

SEQ ID NO: 70145 - protein, 721 aa, Homo sapiens
MMCWPWPLSSKCRTSSRPAMPSSHLLSRLPALGEMRRPWPQKVCPVPSPGGDKRAKEEKVATSTLSRLEQAGRSTPIGPSRDLKEERGGQAQSAASGAEQTEKADAPREPPPVELKPDPTSGMAAAEAEAALSESSEQEMEVEPARKGEEEQKEQEEQEEEGAGPAEVKEEGSQLENGEAPEENENEESAGTDSGQELGSEARGLRSGTYGDRTESKAYGSVIHKCEDCGKEFTHTGNFKRHIRIHTGEKPFSCRECSKAFSDPAACKAHEKTHSPLKPYGCEECGKSYRLISLLNLHKKRHSGEARYRCEDCGKLFTTSGNLKRHQLVHSGEKPYQCDYCGRSFSDPTSKMRHLETHDTDKEHKCPHCDKKFNQVGNLKAHLKIHIADGPLKCRECGKQFTTSGNLKRHLRIHSGEKPYVCIHCQRQFADPGALQRHVRIHTGEKPCQCVMCGKAFTQASSLIAHVRQHTGEKPYVCERCGKRFVQSSQLANHIRHHDNIRPHKCSVCSKAFVNVGDLSKHIIIHTGEKPYLCDKCGRGFNRVDNLRSHVKTVHQGKAGIKILEPEEGSEVSVVTVDDMVTLATEALAATAVTQLTVVPVGAAVTADETEVLKAEISKAVKQVQEEDPNTHILYACDSCGDKFLDANSLAQHVRIHTAQALVMFQTDADFYQQYGPGGTWPAGQVLQAGELVFRPRDGAEGQPALAETSPTAPECPPPAE

SEQ ID NO: 70146 - protein, 668 aa, Homo sapiens
MTERIHSINLHNFSNSVLETLNEQRNRGHFCDVTVRIHGSMLRAHRCVLAAGSPFFQDKLLLGYSDIEIPSVVSVQSVQKLIDFMYSGVLRVSQSEALQILTAASILQIKTVIDECTRIVSQNVGDVFPGIQDSGQDTPRGTPESGTSGQSSDTESGYLQSHPQHSVDRIYSALYACSMQNGSGERSFYSGAVVSHHETALGLPRDHHMEDPSWITRIHERSQQMERYLSTTPETTHCRKQPRPVRIQTLVGNIHIKQEMEDDYDYYGQQRVQILERNESEECTEDTDQAEGTESEPKGESFDSGVSSSIGTEPDSVEQQFGPGAARDSQAEPTQPEQAAEAPAEGGPQTNQLETGASSPERSNEVEMDSTVITVSNSSDKSVLQQPSVNTSIGQPLPSTQLYLRQTETLTSNLRMPLTLTSNTQVIGTAGNTYLPALFTTQPAGSGPKPFLFSLPQPLAGQQTQFVTVSQPGLSTFTAQLPAPQPLASSAGHSTASGQGEKKPYECTLCNKTFTAKQNYVKHMFVHTGEKPHQCSICWRSFSLKDYLIKHMVTHTGVRAYQCSICNKRFTQKSSLNVHMRLHRGEKSYECYICKKKFSHKTLLERHVALHSASNGTPPAGTPPGARAGPPGVVACTEGTTYVCSVCPAKFDQIEQFNDHMRMHVSDG

SEQ ID NO: 70147 - protein, 668 aa, Homo sapiens; identical to SEQ ID NO: 70146

SEQ ID NO: 70148 - protein, 668 aa, Homo sapiens; identical to SEQ ID NO: 70146

SEQ ID NO: 70149 - protein, 668 aa, Homo sapiens; identical to SEQ ID NO: 70146

SEQ ID NO: 70150 - protein, 57 aa, Homo sapiens
MTERIHSINLHNFSNSVLETLNEQRNRGHFCDVTVRIHGSMLRAHRCVLAAGSPFFQ

SEQ ID NO: 70151 - protein, 668 aa, Homo sapiens; identical to SEQ ID NO: 70146

SEQ ID NO: 70152 - protein, 741 aa, Homo sapiens
MLERKKPKTAENQKASEENEITQPGGSSAKPGLPCLNFEAVLSPDPALIHSTHSLTNSHAHTGSSDCDISCKGMTERIHSINLHNFSNSVLETLNEQRNRGHFCDVTVRIHGSMLRAHRCVLAAGSPFFQDKLLLGYSDIEIPSVVSVQSVQKLIDFMYSGVLRVSQSEALQILTAASILQIKTVIDECTRIVSQNVGDVFPGIQDSGQDTPRGTPESGTSGQSSDTESGYLQSHPQHSVDRIYSALYACSMQNGSGERSFYSGAVVSHHETALGLPRDHHMEDPSWITRIHERSQQMERYLSTTPETTHCRKQPRPVRIQTLVGNIHIKQEMEDDYDYYGQQRVQILERNESEECTEDTDQAEGTESEPKGESFDSGVSSSIGTEPDSVEQQFGPGAARDSQAEPTQPEQAAEAPAEGGPQTNQLETGASSPERSNEVEMDSTVITVSNSSDKSVLQQPSVNTSIGQPLPSTQLYLRQTETLTSNLRMPLTLTSNTQVIGTAGNTYLPALFTTQPAGSGPKPFLFSLPQPLAGQQTQFVTVSQPGLSTFTAQLPAPQPLASSAGHSTASGQGEKKPYECTLCNKTFTAKQNYVKHMFVHTGEKPHQCSICWRSFSLKDYLIKHMVTHTGVRAYQCSICNKRFTQKSSLNVHMRLHRGEKSYECYICKKKFSHKTLLERHVALHSASNGTPPAGTPPGARAGPPGVVACTEGTTYVCSVCPAKFDQIEQFNDHMRMHVSDG

SEQ ID NO: 70153 - protein, 668 aa, Homo sapiens; identical to SEQ ID NO: 70146

SEQ ID NO: 70154 - protein, 19 aa, Homo sapiens
MLERKKPKTAENQKASEEN

SEQ ID NO: 70155 - protein, 697 aa, Homo sapiens
MAETSPEPSGQLVVHSDAHSDTVLASFEDQRKKGFLCDITLIVENVHFRAHKALLAASSEYFSMMFAEEGEIGQSIYMLEGMVADTFGILLEFIYTGYLHASEKSTEQILATAQFLKVYDLVKAYTDFQNNHSSPKPTTLNTAGAPVVVISNKKNDPPKRKRGRPKKVNTLQEEKSELAAEEEIQLRVNNSVQNRQNFVVKGDSGVLNEQIAAKEKEESEPTCEPSREEEMPVEKDENYDPKTEDGQASQSRYSKRRIWRSVKLKDYKLVGDQEDHGSAKRICGRRKRPGGPEARCKDCGKVFKYNHFLAIHQRSHTGERPFKCNECGKGFAQKHSLQVHTRMHTGERPYTCTVCSKALTTKHSLLEHMSLHSGQKSFTCDQCGKYFSQNRQLKSHYRVHTGHSLPECKDCHRKFMDVSQLKKHLRTHTGEKPFTCEICGKSFTAKSSLQTHIRIHRGEKPYSCGICGKSFSDSSAKRRHCILHTGKKPFSCPECNLQFARLDNLKAHLKIHSKEKHASDASSISGSSNTEEVRNILQLQPYQLSTSGEQEIQLLVTDSVHNINFMPGPSQGISIVTAESSQNMTADQAANLTLLTQQPEQLQNLILSAQQEQTEHIQSLNMIESQMGPSQTEPVHVITLSKETLEHLHAHQEQTEELHLATSTSDPAQHLQLTQEPGPPPPTHHVPQPTPLGQEQS

SEQ ID NO: 70156 - protein, 435 aa, Homo sapiens
MDTASHSLVLLQQLNMQREFGFLCDCTVAIGDVYFKAHRAVLAAFSNYFKMIFIHQTSECIKIQPTDIQPDIFSYLLHIMYTGKGPKQIVDHSRLEEGIRFLHADYLSHIATEMNQVFSPETVQSSNLYGIQISTTQKTVVKQGLEVKEAPSSNSGNRAAVQGDHPQLQLSLAIGLDDGTADQQRACPATQALEEHQKPPVSIKQERCDPESVISQSHPSPSSEVTGPTFTENSVKIHLCHYCGERFDSRSNLRQHLHTHVSGSLPFGVPASILESNDLGEVHPLNENSEALECRRLSSFIVKENEQQPDHTNRGTTEPLQISQVSLISKDTEPVELNCNFSFSRKRKMSCTICGHKFPRKSQLLEHMYTHKGKSYRYNRCQRFGNALAQRFQPYCDSWSDVSLKSSRLSQEHLDLPCALESELTQENVDTILVE

SEQ ID NO: 70157 - protein, 435 aa, Homo sapiens; identical to SEQ ID NO: 70156

SEQ ID NO: 70158 - protein, 487 aa, Homo sapiens
MSLPPIRLPSPYGSDRLVQLAARLRPALCDTLITVGSQEFPAHSLVLAGVSQQLGRRGQWALGEGISPSTFAQLLNFVYGESVELQPGELRPLQEAARALGVQSLEEACWRARGDRAKKPDPGLKKHQEEPEKPSRNPERELGDPGEKQKPEQVSRTGGREQEMLHKHSPPRGRPEMAGATQEAQQEQTRSKEKRLQAPVGQRGADGKHGVLTWLRENPGGSEESLRKLPGPLPPAGSLQTSVTPRPSWAEAPWLVGGQPALWSILLMPPRYGIPFYHSTPTTGAWQEVWREQRIPLSLNAPKGLWSQNQLASSSPTPGSLPQGPAQLSPGEMEESDQGHTGALATCAGHEDKAGCPPRPHPPPAPPARSRPYACSVCGKRFSLKHQMETHYRVHTGEKPFSCSLCPQRSRDFSAMTKHLRTHGAAPYRCSLCGAGCPSLASMQAHMRGHSPSQLPPGWTIRSTFLYSSSRPSRPSTSPCCPSSSTT

SEQ ID NO: 70159 - protein, 487 aa, Homo sapiens; identical to SEQ ID NO: 70158

SEQ ID NO: 70160 - protein, 672 aa, Homo sapiens
MESRKLISATDIQYSGSLLNSLNEQRGHGLFCDVTVIVEDRKFRAHKNILSASSTYFHQLFSVAGQVVELSFIRAEIFAEILNYIYSSKIVRVRSDLLDELIKSGQLLGVKFIAELGVPLSQVKSISGTAQDGNTEPLPPDSGDKNLVIQKSKDEAQDNGATIMPIITESFSLSAEDYEMKKIIVTDSDDDDDDVIFCSEILPTKETLPSNNTVAQVQSNPGPVAISDVAPSASNNSPPLTNITPTQKLPTPVNQATLSQTQGSEKLLVSSAPTHLTPNIILLNQTPLSTPPNVSSSLPNHMPSSINLLVQNQQTPNSAILTGNKANEEEEEEIIDDDDDTISSSPDSAVSNTSLVPQADTSQNTSFDGSLIQKMQIPTLLQEPLSNSLKISDIITRNTNDPGVGSKHLMEGQKIITLDTATEIEGLSTGCKVYANIGEDTYDIVIPVKDDPDEGEARLENEIPKTSGSEMANKRMKVKHDDHYELIVDGRVYYICIVCKRSYVCLTSLRRHFNIHSWEKKYPCRYCEKVFPLAEYRTKHEIHHTGERRYQCLACGKSFINYQFMSSHIKSVHSQDPSGDSKLYRLHPCRSLQIRQYAYLSDRSSTIPAMKDDGIGYKVDTGKEPPVGTTTSTQNKPMTWEDIFIQQENDSIFKQNVTDGSTEFEFIIPESY

SEQ ID NO: 70161 - protein, 672 aa, Homo sapiens; identical to SEQ ID NO: 70160

SEQ ID NO: 70162 - protein, 672 aa, Homo sapiens; identical to SEQ ID NO: 70160

SEQ ID NO: 70163 - protein, 504 aa, Homo sapiens
MSVEMDSSSFIQFDVPEYSSTVLSQLNELRLQGKLCDIIVHIQGQPFRAHKAVLAASSPYFRDHSALSTMSGLSISVIKNPNVFEQLLSFCYTGRMSLQLKDVVSFLTAASFLQMQCVIDKCTQILESIHSKISVGDVDSVTVGAEENPESRNGVKDSSFFANPVEISPPYCSQGRQPTASSDLRMETTPSKALRSRLQEEGHSDRGSSGSVSEYEIQIEGDHEQGDLLVRESQITEVKVKMEKSDRPSCSDSSSLGDDGYHTEMVDGEQVVAVNVGSYGSVLQHAYSYSQAASQPTNVSEAFGSLSNSSPSRSMLSCFRGGRARQKRALSVHLHSDLQGLVQGSDSEAMMNNPGYESSPRERSARGHWYPYNERLICIYCGKSFNQKGSLDRHMRLHMGITPFVCKFCGKKYTRKDQLEYHIRGHTDDKPFRCEICGKCFPFQGTLNQHLRKNHPGVAEVRSRIESPERTDVYVEQKLENDASASEMGLDSRMEIHTVSDAPD

SEQ ID NO: 70164 - protein, 500 aa, Homo sapiens
MDSSSFIQFDVPEYSSTVLSQLNELRLQGKLCDIIVHIQGQPFRAHKAVLAASSPYFRDHSALSTMSGLSISVIKNPNVFEQLLSFCYTGRMSLQLKDVVSFLTAASFLQMQCVIDKCTQILESIHSKISVGDVDSVTVGAEENPESRNGVKDSSFFANPVEISPPYCSQGRQPTASSDLRMETTPSKALRSRLQEEGHSDRGSSGSVSEYEIQIEGDHEQGDLLVRESQITEVKVKMEKSDRPSCSDSSSLGDDGYHTEMVDGEQVVAVNVGSYGSVLQHAYSYSQAASQPTNVSEAFGSLSNSSPSRSMLSCFRGGRARQKRALSVHLHSDLQGLVQGSDSEAMMNNPGYESSPRERSARGHWYPYNERLICIYCGKSFNQKGSLDRHMRLHMGITPFVCKFCGKKYTRKDQLEYHIRGHTDDKPFRCEICGKCFPFQGTLNQHLRKNHPGVAEVRSRIESPERTDVYVEQKLENDASASEMGLDSRMEIHTVSDAPD

SEQ ID NO: 70165 - protein, 1196 aa, Homo sapiens
MMTVMSLSRDLKDDFHSDTVLSILNEQRIRGILCDVTIIVEDTKFKAHSNVLAASSLYFKNIFWSHTICISSHVLELDDLKAEVFTEILNYIYSSTVVVKRQETVTDLAAAGKKLGISFLEDLTDRNFSNSPGPYVFCITEKGVVKEEKNEKRHEEPAITNGPRITNAFSIIETENSNNMFSPLDLRASFKKVSDSMRTASLCLERTDVCHEAEPVRTLAEHSYAVSSVAEAYRSQPVREHDGSSPGNTGKENCEALAAKPKTCRKPKTFSIPQDSDSATENIPPPPVSNLEVNQERSPQPAAVLTRSKSPNNEGDVHFSREDENQSSDVPGPPAAEVPPLVYNCSCCSKAFDSSTLLSAHMQLHKPTQEPLVCKYCNKQFTTLNRLDRHEQICMRSSHMPIPGGNQRFLENYPTIGQNGGSFTGPEPLLSENRIGEFSSTGSTLPDTDHMVKFVNGQMLYSCVVCKRSYVTLSSLRRHANVHSWRRTYPCHYCNKVFALAEYRTRHEIWHTGERRYQCIFCLETFMTYYILKNHQKSFHAIDHRLSISKKTANGGLKPSVYPYKLYRLLPMKCKRAPYKSYRNSSYENARENSQMNESAPGTYVVQNPHSSELPTLNFQDTVNTLTNSPAIPLETSACQDIPTSANVQNAEGTKWGEEALKMDLDNNFYSTEVSVSSTENAVSSDLRAGDVPVLSLSNSSENAASVISYSGSAPSVIVHSSQFSSVIMHSNAIAAMTSSNHRAFSDPAVSQSLKDDSKPEPDKVGRFASRPKSIKEKKKTTSHTRGEIPEESNYVADPGGSLSKTTNIAEETSKIETYIAKPALPGTSTNSNVAPLCQITVKIGNEAIVKRHILGSKLFYKRGRRPKYQMQEEPLPQGNDPEPSGDSPLGLCQSECMEMSEVFDDASDQDSTDKPWRPYYNYKPKKKSRQLKKMRKVNWRKEHGNRSPSHKCKYPAELDCAVGKAPQDKPFEEEETKEMPKLQCELCDGDKAVGAGNQGRPHRHLTSRPYACELCAKQFQSPSTLKMHMRCHTGEKPYQCKTCGRCFSVQGNLQKHERIHLGLKEFVCQYCNKAFTLNETLKIHERIHTGEKRYHCQFCFQRFLYLSTKRNHEQRHIREHNGKGYACFQCPKICKTAAALGMHQKKHLFKSPSQQEKIGDVCHENSNPLENQHFIGSEDNDQKDNIQTGVENVVL

SEQ ID NO: 70166 - protein, 1195 aa, Homo sapiens
MTVMSLSRDLKDDFHSDTVLSILNEQRIRGILCDVTIIVEDTKFKAHSNVLAASSLYFKNIFWSHTICISSHVLELDDLKAEVFTEILNYIYSSTVVVKRQETVTDLAAAGKKLGISFLEDLTDRNFSNSPGPYVFCITEKGVVKEEKNEKRHEEPAITNGPRITNAFSIIETENSNNMFSPLDLRASFKKVSDSMRTASLCLERTDVCHEAEPVRTLAEHSYAVSSVAEAYRSQPVREHDGSSPGNTGKENCEALAAKPKTCRKPKTFSIPQDSDSATENIPPPPVSNLEVNQERSPQPAAVLTRSKSPNNEGDVHFSREDENQSSDVPGPPAAEVPPLVYNCSCCSKAFDSSTLLSAHMQLHKPTQEPLVCKYCNKQFTTLNRLDRHEQICMRSSHMPIPGGNQRFLENYPTIGQNGGSFTGPEPLLSENRIGEFSSTGSTLPDTDHMVKFVNGQMLYSCVVCKRSYVTLSSLRRHANVHSWRRTYPCHYCNKVFALAEYRTRHEIWHTGERRYQCIFCLETFMTYYILKNHQKSFHAIDHRLSISKKTANGGLKPSVYPYKLYRLLPMKCKRAPYKSYRNSSYENARENSQMNESAPGTYVVQNPHSSELPTLNFQDTVNTLTNSPAIPLETSACQDIPTSANVQNAEGTKWGEEALKMDLDNNFYSTEVSVSSTENAVSSDLRAGDVPVLSLSNSSENAASVISYSGSAPSVIVHSSQFSSVIMHSNAIAAMTSSNHRAFSDPAVSQSLKDDSKPEPDKVGRFASRPKSIKEKKKTTSHTRGEIPEESNYVADPGGSLSKTTNIAEETSKIETYIAKPALPGTSTNSNVAPLCQITVKIGNEAIVKRHILGSKLFYKRGRRPKYQMQEEPLPQGNDPEPSGDSPLGLCQSECMEMSEVFDDASDQDSTDKPWRPYYNYKPKKKSRQLKKMRKVNWRKEHGNRSPSHKCKYPAELDCAVGKAPQDKPFEEEETKEMPKLQCELCDGDKAVGAGNQGRPHRHLTSRPYACELCAKQFQSPSTLKMHMRCHTGEKPYQCKTCGRCFSVQGNLQKHERIHLGLKEFVCQYCNKAFTLNETLKIHERIHTGEKRYHCQFCFQRFLYLSTKRNHEQRHIREHNGKGYACFQCPKICKTAAALGMHQKKHLFKSPSQQEKIGDVCHENSNPLENQHFIGSEDNDQKDNIQTGVENVVL

SEQ ID NO: 70167 - protein, 34 aa, Homo sapiens
MTVMSLSRDLKDDFHSDTVLSILNEQRIRGILCD

SEQ ID NO: 70168 - protein, 94 aa, Homo sapiens
MTVMSLSRDLKDDFHSDTVLSILNEQRIRGILCDVTIIVEDTKFKAHSNVLAASSLYFKNIFWSHTICISSHVLELDDLKAEVFTEILNYIYSS

SEQ ID NO: 70169 - protein, 118 aa, Homo sapiens
MTVMSLSRDLKDDFHSDTVLSILNEQRIRGILCDVTIIVEDTKFKAHSNVLAASSLYFKNIFWSHTICISSHVLELDDLKAEVFTEILNYIYSSTVVVKRQETVTDLAAAGKKLGISF

SEQ ID NO: 70170 - protein, 111 aa, Homo sapiens
MTVMSLSRDLKDDFHSDTVLSILNEQRIRGILCDVTIIVEDTKFKAHSNVLAASSLYFKNIFWSHTICISSHVLELDDLKAEVFTEILNYIYSSTVVVKRQETVTDLAAAG

SEQ ID NO: 70171 - protein, 150 aa, Homo sapiens
MTVMSLSRDLKDDFHSDTVLSILNEQRIRGILCDVTIIVEDTKFKAHSNVLAASSLYFKNIFWSHTICISSHVLELDDLKAEVFTEILNYIYSSTVVVKRQETVTDLAAAGKKLGISFLEDLTDRNFSNSPGPYVFCITEKGVVKEEKNE

SEQ ID NO: 70172 - protein, 771 aa, Homo sapiens
MTVMSLSRDLKDDFHSDTVLSILNEQRIRGILCDVTIIVEDTKFKAHSNVLAASSLYFKNIFWSHTICISSHVLELDDLKAEVFTEILNYIYSSTVVVKRQETVTDLAAAGKKLGISFLEDLTDRNFSNSPGPYVFCITEKGVVKEEKNEKRHEEPAITNGPRITNAFSIIETENSNNMFSPLDLRASFKKVSDSMRTASLCLERTDVCHEAEPVRTLAEHSYAVSSVAEAYRSQPVREHDGSSPGNTGKENCEALAAKPKTCRKPKTFSIPQDSDSATENIPPPPVSNLEVNQERSPQPAAVLTRSKSPNNEGDVHFSREDENQSSDVPGPPAAEVPPLVYNCSCCSKAFDSSTLLSAHMQLHKPTQEPLVCKYCNKQFTTLNRLDRHEQICMRSSHMPIPGGNQRFLENYPTIGQNGGSFTGPEPLLSENRIGEFSSTGSTLPDTDHMVKFVNGQMLYSCVVCKRSYVTLSSLRRHANVHSWRRTYPCHYCNKVFALAEYRTRHEIWHTGERRYQCIFCLETFMTYYILKNHQKSFHAIDHRLSISKKTANGGLKPSVYPYKLYRLLPMKCKRAPYKSYRNSSYENARENSQMNESAPGTYVVQNPHSSELPTLNFQDTVNTLTNSPAIPLETSACQDIPTSANVQNAEGTKWGEEALKMDLDNNFYSTEVSVSSTENAVSSDLRAGDVPVLSLSNSSENAASVISYSGSAPSVIVHSSQFSSVIMHSNAIAAMTSSNHRAFSDPAVSQSLKDDSKPEPDKVGRFASRP

SEQ ID NO: 70173 - protein, 146 aa, Homo sapiens
MTVMSLSRDLKDDFHSDTVLSILNEQRIRGILCDVTIIVEDTKFKAHSNVLAASSLYFKNIFWSHTICISSHVLELDDLKAEVFTEILNYIYSSTVVVKRQETVTDLAAAGKKLGISFLEDLTDRNFSNSPGPYVFCITEKGVVKE

SEQ ID NO: 70174 - protein, 210 aa, Homo sapiens
MTVMSLSRDLKDDFHSDTVLSILNEQRIRGILCDVTIIVEDTKFKAHSNVLAASSLYFKNIFWSHTICISSHVLELDDLKAEVFTEILNYIYSSTVVVKRQETVTDLAAAGKKLGISFLEDLTDRNFSNSPGPYVFCITEKGVVKEEKNEKRHEEPAITNGPRITNAFSIIETENSNNMFSPLDLRASFKKVSDSMRTASLCLERTDVCH

SEQ ID NO: 70175 - protein, 108 aa, Homo sapiens
MTVMSLSRDLKDDFHSDTVLSILNEQRIRGILCDVTIIVEDTKFKAHSNVLAASSLYFKNIFWSHTICISSHVLELDDLKAEVFTEILNYIYSSTVVVKRQETVTDLA

SEQ ID NO: 70176 - protein, 70 aa, Homo sapiens
MTVMSLSRDLKDDFHSDTVLSILNEQRIRGILCDVTIIVEDTKFKAHSNVLAASSLYFKNIFWSHTICIS

SEQ ID NO: 70177 - protein, 1195 aa, Homo sapiens; identical to SEQ ID NO: 70166

SEQ ID NO: 70178 - protein, 1013 aa, Homo sapiens
MPPPAEVTDPSHAPAVLRQLNEQRLRGLFCDVTLIAGDTKFPAHRSVLAASSPFFREALLTSAPLPLPPATGGAAPNPATTTAASSSSSSSSSSSSSSSSASSSSSSSSSSPPPASPPASSPPRVLELPGVPAAAFSDVLNFIYSARLALPGGGGDGAAVAEIGALGRRLGISRLQGLGEGGDAWVPPTPAPMATSQPEEDSFGPGPRPAGEWEGDRAEAQAPDLQCSLPRRPLPCPQCGKSFIHPKRLQTHEAQCRRGASTRGSTGLGAGGAGPGGPAGVDASALPPPVGFRGGPEHVVKVVGGHVLYVCAACERSYVTLSSLKRHSNVHSWRRKYPCRYCEKVFALAEYRTKHEVWHTGERRYQCIFCWETFVTYYNLKTHQRAFHGISPGLLASEKTPNGGYKPKLNTLKLYRLLPMRAAKRPYKTYSQGAPEAPLSPTLNTPAPVAMPASPPPGPPPAPEPGPPPSVITFAHPAPSVIVHGGSSSGGGGSGTASTGGSQAASVITYTAPPRPPKKREYPPPPPEPAATPTSPATAVSPATAAGPAMATTTEEAKGRNPRAGRTLTYTAKPVGGIGGGGGPPTGAGRGPSQLQAPPPLCQITVRIGEEAIVKRRISETDLRPGELSGEEMEESEEDEEEEDEEEEEEDEEESKAGGEDQLWRPYYSYKPKRKAGAAGGASVGGSGLPRGRRPPRWRQKLERRSWEETPAAESPAGRARTERRHRCGDCAQTFTTLRKLRKHQEAHGGGSHSSRAGRRPSTRFTCPHCAKVCKTAAALSRHGQRHAAERPGGTPTPVIAYSKGSAGTRPGDVKEEAPQEMQVSSSSGEAGGGSTAAEEASETASLQDPIISGGEEPPVVASGGSYVYPPVQEFPLALIGGGREPGGGRGKSGSEGPVGAGEGDRMEGIGAAKVTFYPEPYPLVYGPQLLAAYPYNFSNLAALPVALNMVLPDEKGAGALPFLPGVFGYAVNPQAAPPAPPTPPPPTLPPPIPPKGEGERAGVERTQKGDVG

SEQ ID NO: 70179 - protein, 1013 aa, Homo sapiens; identical to SEQ ID NO: 70178

SEQ ID NO: 70180 - protein, 235 aa, Homo sapiens
MELPNYSRQLLQQLYTLCKEQQFCDCTISIGTIYFRAHKLVLAAASLLFKTLLDNTDTISIDASVVSPEEFALLLEMMYTGKLPVGKHNFSKIISLADSLQMFDVAVSCKNLLTSLLAATPGGPVKAETEEAAHSVSQEMSVNSPTAQESQRNAETPAETPTTAEACSPSPAVQTFSEAKKTSTEPGCERKHYQLNFLLENEGVFSDALMVTQDVLKKLEMCSNCCVPVEAVPIF

SEQ ID NO: 70181 - protein, 1127 aa, Homo sapiens
MELPNYSRQLLQQLYTLCKEQQFCDCTISIGTIYFRAHKLVLAAASLLFKTLLDNTDTISIDASVVSPEEFALLLEMMYTGKLPVGKHNFSKIISLADSLQMFDVAVSCKNLLTSLVNCSVQGQVVRDVSAPSSETFRKEPEKPQVEILSSEGAGEPHSSPELAATPGGPVKAETEEAAHSVSQEMSVNSPTAQESQRNAETPAETPTTAEACSPSPAVQTFSEAKKTSTEPGCERKHYQLNFLLENEGVFSDALMVTQDVLKKLEMCSEIKGPQKEVILNCCEGRTPKETIENLLHRMTEEKTLTAEGLVKLLQAVKTTFPNLGLLLEKLQKSATLPSTTVQPSPDDYGTELLRRYHENLSEIFTDNQILLKMISHMTSLAPGEREVMEKLVKRDSGSGGFNSLISAVLEKQTLSATAIWQLLLVVQETKTCPLDLLMEEIRREPGADAFFRAVTTPEHATLETILRHNQLILEAIQQKIEYKLFTSEEEHLAETVKEILSIPSETASPEASLRAVLSRAMEKSVPAIEICHLLCSVHKSFPGLQPVMQELAYIGVLTKEDGEKETWKVSNKFHLEANNKEDEKAAKEDSQPGEQNDQGETGSLPGQQEKEASASPDPAKKSFICKACDKSFHFYCRLKVHMKRCRVAKSKQVQCKECSETKDSKKELDKHQLEAHGAGGEPDAPKKKKKRLPVTCDLCGREFAHASGMQYHKLTEHFDEKPFSCEECGAKFAANSTLKNHLRLHTGDRPFMCKHCLMTFTQASALAYHTKKKHSEGKMYACQYCDAVFAQSIELSRHVRTHTGDKPYVCRDCGKGFRQANGLSIHLHTFHNIEDPYDCKKCRMSFPTLQDHRKHIHEVHSKEYHPCPTCGKIFSAPSMLERHVVTHVGGKPFSCGICNKAYQQLSGLWYHNRTHHPDVFAAQNHRSSKFSSLQCSSCDKTFPNTIEHKKHIKAEHADMKFHECDQCKELFPTPALLQVHVKCQHSGSQPFRCLYCAATFRFPGALQHHVTTEHFKQSETTFPCELCGELFTSQAQLDSHLESEHPKVMSTETQAAASQMAQVIQTPEPVAPTEQVITLEETQLAGSQVFVTLPDSQASQASSELVAVTVEDLLDGTVTLICGEAK

SEQ ID NO: 70182 - protein, 1239 aa, Homo sapiens
MELPNYSRQLLQQLYTLCKEQQFCDCTISIGTIYFRAHKLVLAAASLLFKTLLDNTDTISIDASVVSPEEFALLLEMMYTGKLPVGKHNFSKIISLADSLQMFDVAVSCKNLLTSLVNCSVQGQVVRDVSAPSSETFRKEPEKPQVEILSSEGAGEPHSSPELAATPGGPVKAETEEAAHSVSQEMSVNSPTAQESQRNAETPAETPTTAEACSPSPAVQTFSEAKKTSTEPGCERKHYQLNFLLENEGVFSDALMVTQDVLKKLEMCSEIKGPQKEMIVKCFEGEGGHSAFQRILGKVREESLDVQTVVSLLRLYQYSNPAVKTALLDRKPEDVDTVQPKGSTEEGKTLSVLLLEHKEDLIQCVTQLRPIMESLETAKEEFLTGTEKRVILNCCEGRTPKETIENLLHRMTEEKTLTAEGLVKLLQAVKTTFPNLGLLLEKLQKSATLPSTTVQPSPDDYGTELLRRYHENLSEIFTDNQILLKMISHMTSLAPGEREVMEKLVKRDSGSGGFNSLISAVLEKQTLSATAIWQLLLVVQETKTCPLDLLMEEIRREPGADAFFRAVTTPEHATLETILRHNQLILEAIQQKIEYKLFTSEEEHLAETVKEILSIPSETASPEASLRAVLSRAMEKSVPAIEICHLLCSVHKSFPGLQPVMQELAYIGVLTKEDGEKETWKVSNKFHLEANNKEDEKAAKEDSQPGEQNDQGETGSLPGQQEKEASASPDPAKKSFICKACDKSFHFYCRLKVHMKRCRVAKSKQVQCKECSETKDSKKELDKHQLEAHGAGGEPDAPKKKKKRLPVTCDLCGREFAHASGMQYHKLTEHFDEKPFSCEECGAKFAANSTLKNHLRLHTGDRPFMCKHCLMTFTQASALAYHTKKKHSEGKMYACQYCDAVFAQSIELSRHVRTHTGDKPYVCRDCGKGFRQANGLSIHLHTFHNIEDPYDCKKCRMSFPTLQDHRKHIHEVHSKEYHPCPTCGKIFSAPSMLERHVVTHVGGKPFSCGICNKAYQQLSGLWYHNRTHHPDVFAAQNHRSSKFSSLQCSSCDKTFPNTIEHKKHIKAEHADMKFHECDQCKELFPTPALLQVHVKCQHSGSQPFRCLYCAATFRFPGALQHHVTTEHFKQSETTFPCELCGELFTSQAQLDSHLESEHPKVMSTETQAAASQMAQVIQTPEPVAPTEQVITLEETQLAGSQVFVTLPDSQASQASSELVAVTVEDLLDGTVTLICGEAK

SEQ ID NO: 70183 - protein, 453 aa, Homo sapiens
MELPNYSRQLLQQLYTLCKEQQFCDCTISIGTIYFRAHKLVLAAASLLFKTLLDNTDTISIDASVVSPEEFALLLEMMYTGKLPVGKHNFSKIISLADSLQMFDVAVSCKNLLTSLVNCSVQGQVVRDVSAPSSETFRKEPEKPQVEILSSEGAGEPHSSPELAATPGGPVKAETEEAAHSVSQEMSVNSPTAQESQRNAETPAETPTTAEACSPSPAVQTFSEAKKTSTEPGCERKHYQLNFLLENEGVFSDALMVTQDVLKKLEMCSEIKGPQKEMIVKCFEGEGGHSAFQRILGKVREESLDVQTVVSLLRLYQYSNPAVKTALLDRKPEDVDTVQPKGSTEEGKTLSVLLLEHKEDLIQCVTQLRPIMESLETAKEEFLTGTEKRVILNCCEGRTPKETIENLLHRMTEEKTLTAEGLVKLLQAVKTTFPNLGLLLEKLQKSATLPSTT

SEQ ID NO: 70184 - protein, 1239 aa, Homo sapiens; identical to SEQ ID NO: 70182

SEQ ID NO: 70185 - protein, 422 aa, Homo sapiens
MEFPEHGGRLLGRLRQQRELGFLCDCTVLVGDARFPAHRAVLAACSVYFHLFYRDRPAGSRDTVRLNGDIVTAPAFGRLLDFMYEGRLDLRSLPVEDVLAAASYLHMYDIVKVCKGRLQEKDRSLDPGNPAPGAEPAQPPCPWPVWTADLCPAARKAKLPPFGVKAALPPRASGPPPCQVPEESDQALDLSLKSGPRQERVHPPCVLQTPLCSQRQPGAQPLVKDERDSLSEQEESSSSRSPHSPPKPPPVPAAKGLVVGLQPLPLSGEGSRELELGAGRLASEDELGPGGPLCICPLCSKLFPSSHVLQLHLSAHFRERDSTRARLSPDGVAPTCPLCGKTFSCTYTLKRHERTHSGEKPYTCVQCGKSFQYSHNLSRHTVVHTREKPHACRWCERRFTQSGDLYRHVRKFHCGLVKSLLV

SEQ ID NO: 70186 - protein, 422 aa, Homo sapiens; identical to SEQ ID NO: 70185

SEQ ID NO: 70187 - protein, 604 aa, Homo sapiens
MASTWAIQAHMDQDEPLEVKIEEEKYTTRQDWDLRKNNTHSREVFRQYFRQFCYQETSGPREALSRLRELCHQWLRPETHTKEQILELLVLEQFLTILPEELQAWVQEQHPESGEEVVTVLEDLERELDEPGEQVSVHTGEQEMFLQETVRLRKEGEPSMSLQSMKAQPKYESPELESQQEQVLDVETGNEYGNLKQEVSEEMEPHGKTSSKFENDMSKSARCGETREPEEITEEPSACSREDKQPTCDENGVSLTENSDHTEHQRICPGEESYGCDDCGKAFSQHSHLIEHQRIHTGDRPYKCEECGKAFRGRTVLIRHKIIHTGEKPYKCNECGKAFGRWSALNQHQRLHTGEKHYHCNDCGKAFSQKAGLFHHIKIHTRDKPYQCTQCNKSFSRRSILTQHQGVHTGAKPYECNECGKAFVYNSSLVSHQEIHHKEKCYQCKECGKSFSQSGLIQHQRIHTGEKPYKCDVCEKAFIQRTSLTEHQRIHTGERPYKCDKCGKAFTQRSVLTEHQRIHTGERPYKCDECGNAFRGITSLIQHQRIHTGEKPYQCDECGKAFRQRKKTSYKEILLKNHSEPQAGVNLLLSSLIPEWQSCFRRDL

SEQ ID NO: 70188 - protein, 604 aa, Homo sapiens; identical to SEQ ID NO: 70187

SEQ ID NO: 70189 - protein, 491 aa, Homo sapiens
MAIPKHSLSPVPWEEDSFLQVKVEEEEEASLSQGGESSHDHIAHSEAARLRFRHFRYEEASGPHEALAHLRALCCQWLQPEAHSKEQILELLVLEQFLGALPPEIQAWVGAQSPKSGEEAAVLVEDLTQVLDKRGWDPGAEPTEASCKQSDLGESEPSNVTETLMGGVSLGPAFVKACEPEGSSERSGLSGEIWTKSVTQQIHFKKTSGPYKDVPTDQRGRESGASRNSSSAWPNLTSQEKPPSEDKFDLVDAYGTEPPYTYSGKRSSKCRECRKMFQSASALEAHQKTHSRKTPYACSECGKAFSRSTHLAQHQVVHTGAKPHECKECGKAFSRVTHLTQHQRIHTGEKPYKCGECGKTFSRSTHLTQHQRVHTGERPYECDACGKAFSQSTHLTQHQRIHTGEKPYKCDACGRAFSDCSALIRHLRIHSGEKPYQCKVCPKAFAQSSSLIEHQRIHTGEKPYKCSDCGKAFSRSSALMVHLRIHITVLQ

SEQ ID NO: 70190 - protein, 433 aa, Homo sapiens
MALDLRTIFQCEPSENNLGSENSAFQQSQGPAVQREEGISEFSRMVLNSFQDSNNSYARQELQRLYRIFHSWLQPEKHSKDEIISLLVLEQFMIGGHCNDKASVKEKWKSSGKNLERFIEDLTDDSINPPALVHVHMQGQEALFSEDMPLRDVIVHLTKQVNAQTTREANMGTPSQTSQDTSLETGQGYEDEQDGWNSSSKTTRVNENITNQGNQIVSLIIIQEENGPRPEEGGVSSDNPYNSKRAELVTARSQEGSINGITFQGVPMVMGAGCISQPEQSSPESALTHQSNEGNSTCEVHQKGSHGVQKSYKCEECPKVFKYLCHLLAHQRRHRNERPFVCPECQKGFFQISDLRVHQIIHTGKKPFTCSMCKKSFSHKTNLRSHERIHTGEKPYTCPFCKTSYRQSSTYHRHMRTHEKITLPSVPSTPEAS

SEQ ID NO: 70191 - protein, 810 aa, Homo sapiens
MPNQGEDCYFFFYSTCTKGDSCPFRHCEAAIGNETVCTLWQEGRCFRQVCRFRHMEIDKKRSEIPCYWENQPTGCQKLNCAFHHNRGRYVDGLFLPPSKTVLPTVPESPEEEVKASQLSVQQNKLSVQSNPSPQLRSVMKVESSENVPSPTHPPVVINAADDDEDDDDQFSEEGDETKTPTLQPTPEVHNGLRVTSVRKPAVNIKQGECLNFGIKTLEEIKSKKMKEKSKKQGEGSSGVSSLLLHPEPVPGPEKENVRTVVRTVTLSTKQGEEPLVRLSLTERLGKRKFSAGGDSDPPLKRSLAQRLGKKVEAPETNIDKTPKKAQVSKSLKERLGMSADPDNEDATDKVNKVGEIHVKTLEEILLERASQKRGELQTKLKTEGPSKTDDSTSGARSSSTIRIKTFSEVLAEKKHRQQEAERQKSKKDTTCIKLKIDSEIKKTVVLPPIVASRGQSEEPAGKTKSMQEVHIKTLEEIKLEKALRVQQSSESSTSSPSQHEATPGARRLLRITKRTGMKEEKNLQEGNEVDSQSSIRTEAKEASGETTGVDITKIQVKRCETMREKHMQKQQEREKSVLTPLRGDVASCNTQVAEKPVLTAVPGITRHLTKRLPTKSSQKVEVETSGIGDSLLNVKCAAQTLEKRGKAKPKVNVKPSVVKVVSSPKLAPKRKAVEMHAAVIAAVKPLSSSSVLQEPPAKKAAVAVVPLVSEDKSVTVPEAENPRDSLVLPPTQSSSDSSPPEVSGPSSSQMSMKTRRLSSASTGKPPLSVEDDFEKLIWEISGGKLEAEIDLDPGKDEDDLLLELSEMIDS

SEQ ID NO: 70192 - protein, 810 aa, Homo sapiens; identical to SEQ ID NO: 70191

SEQ ID NO: 70193 - protein, 810 aa, Homo sapiens; identical to SEQ ID NO: 70191

SEQ ID NO: 70194 - protein, 810 aa, Homo sapiens; identical to SEQ ID NO: 70191

SEQ ID NO: 70195 - protein, 50 aa, Homo sapiens
MPNQGEDCYFFFYSTCTKGDSCPFRHCEAAIGNETVCTLWQEGRCFRQVC

SEQ ID NO: 70196 - protein, 515 aa, Homo sapiens
MPNQGEDCYFFFYSTCTKGDSCPFRHCEAAIGNETVCTLWQEGRCFRQVCRFRHMEIDKKRSEIPCYWENQPTGCQKLNCAFHHNRGRYVDGLFLPPSKTVLPTVPESPEEEVKASQLSVQQNKLSVQSNPSPQLRSVMKVESSENVPSPTHPPVVINAADDDEDDDDQFSEEGDETKTPTLQPTPEVHNGLRVTSVRKPAVNIKQGECLNFGIKTLEEIKSKKMKEKSKKQGEGSSGVSSLLLHPEPVPGPEKENVRTVVRTVTLSTKQGEEPLVRLSLTERLGKRKFSAGGDSDPPLKRSLAQRLGKKVEAPETNIDKTPKKAQVSKSLKERLGMSADPDNEDATDKVNKVGEIHVKTLEEILLERASQKRGELQTKLKTEGPSKTDDSTSGARSSSTIRIKTFSEVLAEKKHRQQEAERQKSKKDTTCIKLKIDSEIKKTVVLPPIVASRGQSEEPAGKTKSMQEVHIKTLEEIKLEKALRVQQSSESSTSSPSQHEATPGARRLLRITKRT

SEQ ID NO: 70197 - protein, 756 aa, Homo sapiens
MEIDKKRSEIPCYWENQPTGCQKLNCAFHHNRGRYVDGLFLPPSKTVLPTVPESPEEEVKASQLSVQQNKLSVQSNPSPQLRSVMKVESSENVPSPTHPPVVINAADDDEDDDDQFSEEGDETKTPTLQPTPEVHNGLRVTSVRKPAVNIKQGECLNFGIKTLEEIKSKKMKEKSKKQGEGSSGVSSLLLHPEPVPGPEKENVRTVVRTVTLSTKQGEEPLVRLSLTERLGKRKFSAGGDSDPPLKRSLAQRLGKKVEAPETNIDKTPKKAQVSKSLKERLGMSADPDNEDATDKVNKVGEIHVKTLEEILLERASQKRGELQTKLKTEGPSKTDDSTSGARSSSTIRIKTFSEVLAEKKHRQQEAERQKSKKDTTCIKLKIDSEIKKTVVLPPIVASRGQSEEPAGKTKSMQEVHIKTLEEIKLEKALRVQQSSESSTSSPSQHEATPGARRLLRITKRTGMKEEKNLQEGNEVDSQSSIRTEAKEASGETTGVDITKIQVKRCETMREKHMQKQQEREKSVLTPLRGDVASCNTQVAEKPVLTAVPGITRHLTKRLPTKSSQKVEVETSGIGDSLLNVKCAAQTLEKRGKAKPKVNVKPSVVKVVSSPKLAPKRKAVEMHAAVIAAVKPLSSSSVLQEPPAKKAAVAVVPLVSEDKSVTVPEAENPRDSLVLPPTQSSSDSSPPEVSGPSSSQMSMKTRRLSSASTGKPPLSVEDDFEKLIWEISGGKLEAEIDLDPGKDEDDLLLELSEMIDS

SEQ ID NO: 70198 - protein, 810 aa, Homo sapiens; identical to SEQ ID NO: 70191

SEQ ID NO: 70199 - protein, 527 aa, Homo sapiens
MEHPSKMEFFQKLGYDREDVLRVLGKLGEGALVNDVLQELIRTGSRPGALEHPAAPRLVPRGSCGVPDSAQRGPGTALEEDFRTLASSLRPIVIDGSNVAMSHGNKETFSCRGIKLAVDWFRDRGHTYIKVFVPSWRKDPPRADTPIREQHVLAELERQAVLVYTPSRKVHGKRLVCYDDRYIVKVAYEQDGVIVSNDNYRDLQSENPEWKWFIEQRLLMFSFVNDRFMPPDDPLGRHGPSLSNFLSRKPKPPEPSWQHCPYGKKCTYGIKCKFYHPERPHHAQLAVADELRAKTGARPGAGAEEQRPPRAPGGSAGARAAPREPFAHSLPPARGSPDLAALRGSFSRLAFSDDLGPLGPPLPVPACSLTPRLGGPDWVSAGGRVPGPLSLPSPESQFSPGDLPPPPGLQLQPRGEHRPRDLHGDLLSPRRPPDDPWARPPRSDRFPGRSVWAEPAWGDGATGGLSVYATEDDEGDARARARIALYSVFPRDQVDRVMAAFPELSDLARLILLVQRCQSAGAPLGKP

SEQ ID NO: 70200 - protein, 527 aa, Homo sapiens; identical to SEQ ID NO: 70199

SEQ ID NO: 70201 - protein, 321 aa, Homo sapiens
MEHPSKMEFFQKLGYDREDVLRVLGKLGEGALVNDVLQELIRTGSRPGALEHPAAPRLVPRGSCGVPDSAQRGPGTALEEDFRTLASSLRPIVIDGSNVAMSHGNKETFSCRGIKLAVDWFRDRGHTYIKVFVPSWRKDPPRADTPIREQHVLAELERQAVLVYTPSRKVHGKRLVCYDDRYIVKVAYEQDGVIVSNDNYRDLQSENPEWKWFIEQRLLMFSFVNDRFMPPDDPLGRHGPSLSNFLSRKPKPPEPSWQHCPYGKKCTYGIKCKFYHPERPHHAQLAVADELRAKTGARLGVRGRPPASARPAAPAAGRTPP

SEQ ID NO: 70202 - protein, 321 aa, Homo sapiens
MEHPSKMEFFQKLGYDREDVLRVLGKLGEGALVNDVLQELIRTGSRPGALEHPAAPRLVPRGSCGVPDSAQRGPGTALEEDFRTLASSLRPIVIDGSNVAMSHGNKETFSCRGIKLAVDWFRDRGHTYIKVFVPSWRKDPPRADTPIREQHVLAELERQAVLVYTPSRKVHGKRLVCYDDRYIVKVAYEQDGVIVSNDNYRDLQSENPEWKWFIEQRLLMFSFVNDRFMPPDDPLGRHGPSLSNFLSRKPKPPEPSWQHCPYGKKCTYGIKCKFYHPERPHHAQLAVADELRAKTGARPVLPGRPPASARPAAPAAGRTPP

SEQ ID NO: 70203 - protein, 736 aa, Homo sapiens
MEIGTEISRKIRSAIKGKLQELGAYVDEELPDYIMVMVANKKSQDQMTEDLSLFLGNNTIRFTVWLHGVLDKLRSVTTEPSSLKSSDTNIFDSNVPSNKSNFSRGDERRHEAAVPPLAIPSARPEKRDSRVSTSSQESKTTNVRQTYDDGAATRLMSTVKPLREPAPSEDVIDIKPEPDDLIDEDLNFVQENPLSQKKPTVTLTYGSSRPSIEIYRPPASRNADSGVHLNRLQFQQQQNSIHAAKQLDMQSSWVYETGRLCEPEVLNSLEETYSPFFRNNSEKMSMEDENFRKRKLPVVSSVVKVKKFNHDGEEEEEDDDYGSRTGSISSSVSVPAKPERRPSLPPSKQANKNLILKAISEAQESVTKTTNYSTVPQKQTLPVAPRTRTSQEELLAEVVQGQSRTPRISPPIKEEETKGDSVEKNQGTQQRQLLSRLQIDPVMAETLQMSQDYYDMESMVHADTRSFILKKPKLSEEVVVAPNQESGMKTADSLRVLSGHLMQTRDLVQPDKPASPKFIVTLDGVPSPPGYMSDQEEDMCFEGMKPVNQTAASNKGLRGLLHPQQLHLLSRQLEDPNGSFSNAEMSELSVAQKPEKLLERCKYWPACKNGDECAYHHPISPCKAFPNCKFAEKCLFVHPNCKYDAKCTKPDCPFTHVSRRIPVLSPKPAVAPPAPPSSSQLCRYFPACKKMECPFYHPKHCRFNTQCTRPDCTFYHPTINVPPRHALKWIRPQTSE

SEQ ID NO: 70204 - protein, 579 aa, Homo sapiens
MEIGTEISRKIRSAIKGKLQELGAYVDEELPDYIMVMVANKKSQDQMTEDLSLFLGNNTIRFTVWLHGVLDKLRSVTTEPSSLKSSDTNIFDSNVPSNKSNFSRGDERRHEAAVPPLAIPSARPEKRDSRVSTSSQESKTTNVRQTYDDGAATRLMSTVKPLREPAPSEDVIDIKPEPDDLIDEDLNFVQENPLSQKKPTVTLTYGSSRPSIEIYRPPASRNADSGVHLNRLQFQQQQNSIHAAKQLDMQSSWVYETGRLCEPEVLNSLEETYSPFFRNNSEKMSMEDENFRKRKLPVVSSVVKVKKFNHDGEEEEEDDDYGSRTGSISSSVSVPAKPERRPSLPPSKQANKNLILKAISEAQESVTKTTNYSTVPQKQTLPVAPRTRTSQEELLAEVVQGQSRTPRISPPIKEEETKGDSVEKNQAEMSELSVAQKPEKLLERCKYWPACKNGDECAYHHPISPCKAFPNCKFAEKCLFVHPNCKYDAKCTKPDCPFTHVSRRIPVLSPKPVAPPAPPSSSQLCRYFPACKKMECPFYHPKHCRFNTQCTRPDCTFYHPTINVPPRHALKWIRPQTSE

SEQ ID NO: 70205 - protein, 306 aa, Homo sapiens
MRMSSKFPSPPLPIFLPPEPVDLGSITSSSCSLNELDNISHLLRKISADINEIKGMKAAILTVEANLFDLNVRVSKNEAKISSLEVKMNEYSTTYECNRQFEDQEEDTESQSRTTDVKIIGFLRNVEKGTQQRQLLSRLQIDPVMAETLQMSQAEMSELSVAQKPEKLLERCKYWPACKNGDECAYHHPISPCKAFPNCKFAEKCLFVHPNCKYDAKCTKPDCPFTHVSRRIPVLSPKPVAPPAPPSSSQLCRYFPACKKMECPFYHPKHCRFNTQCTRPDCTFYHPTINVPPRHALKWIRPQTSE

SEQ ID NO: 70206 - protein, 571 aa, Homo sapiens
MVMVANKKSQDQMTEDLSLFLGNNTIRFTVWLHGVLDKLRSVTTEPSSLKSSDTNIFDSNVPSNKSNFSRGDERRHEAAVPPLAIPSARPEKRDSRVSTSSQESKTTNVRQTYDDGAATRLMSTVKPLREPAPSEDVIDIKPEPDDLIDEDLNFVQENPLSQKKPTVTLTYGSSRPSIEIYRPPASRNADSGVHLNRLQFQQQQNSIHAAKQLDMQSSWVYETGRLCEPEVLNSLEETYSPFFRNNSEKMSMEDENFRKRKLPVVSSVVKVKKFNHDGEEEEEDDDYGSRTGSISSSVSVPAKPERRPSLPPSKQANKNLILKAISEAQESVTKTTNYSTVPQKQTLPVAPRTRTSQEELLAEVVQGQSRTPRISPPIKEEETKGDSVEKNQGTQQRQLLSRLQIDPVMAETLQMSQAEMSELSVAQKPEKLLERCKYWPACKNGDECAYHHPISPCKAFPNCKFAEKCLFVHPNCKYDAKCTKPDCPFTHVSRRIPVLSPKPAVAPPAPPSSSQLCRYFPACKKMECPFYHPKHCRFNTQCTRPDCTFYHPTINVPPRHALKWIRPQTSE

SEQ ID NO: 70207 - protein, 673 aa, Homo sapiens
MEIGTEISRKIRSAIKGKLQELGAYIDEELPDYIMVMVANKKSQDQMTEDLSLFLGNNTIRFTVWLHGVLDKLRSVTTEPSSLKSSDTNIFDSNVPSNKSNFSRGDERRHEAAVPPLAIPSARPEKRDSRVSTSSQESKTTNVRQTYDDGAATRLMSTVKPLREPAPSEDVIDIKPEPDDLIDEDLNFVQENPLSQKKPTVTLTYGSSRPSIEIYRPPASRNADSGVHLNRLQFQQQQNSIHAAKQLDMQSSWVYETGRLCEPEVLNSLEETYSPFFRNNSEKMSMEDENFRKRKLPVVSSVVKVKKFNHDGEEEEEDDDYGSRTGSISSSVSVPAKPERRPSLPPSKQANKNLILKAISEAQESVTKTTNYSTVPQKQTLPVAPRTRTSQEELLAEVVQGQSRTPRISPPIKEEETKGDSVEKNQGTQQRQLLSRLQIDPVMAETLQMSQDYYDMESMVHADTRSFILKKPKLSEEVVVAPNQESGMKTADSLRVLSGHLMQTRDLVQPDKPASPKFIVTLDGVPSPPGYMSDQEEDMCFEGMKPVNQTAASNKGLRGLLHPQQLHLLSRQLEDPNCKYDAKCTKPDCPFTHVSRRIPVLSPKPAVAPPAPPSSSQLCRYFPACKKMECPFYHPKHCRFNTQCTRPDCTFYHPTINVPPRHALKWIRPQTSE

SEQ ID NO: 70208 - protein, 571 aa, Homo sapiens; identical to SEQ ID NO: 70206

SEQ ID NO: 70209 - protein, 585 aa, Homo sapiens
MEIGTEISRKIRSAIKGKLQELGAYVDEELPDYIMVMVANKKSQDQMTEDLSLFLGNNTIRFTVWLHGVLDKLRSVTTEPSSLKSSDTNIFDSNVPPLAIPSARPEKRDSRVSTSSQESKTTNVRQTYDDGAATRLMSTVKPLREPAPSEDVIDIKPEPDDLIDEDLNFVQENPLSQKKPTVTLTYGSSRPSIEIYRPPASRNADSGVHLNRLQFQQQQNSIHAAKQLDMQSSWVYETGRLCEPEVLNSLEETYSPFFRNNSEKMSMEDENFRKRKLPVVSSVVKVKKFNHDGEEEEEDDDYGSRTGSISSSVSVPAKPERRPSLPPSKQANKNLILKAISEAQESVTKTTNYSTVPQKQTLPVAPRTRTSQEELLAEVVQGQSRTPRISPPIKEEETKGDSVEKNQGTQQRQLLSRLQIDPVMAETLQMSQAEMSELSVAQKPEKLLERCKYWPACKNGDECAYHHPISPCKAFPNCKFAEKCLFVHPNCKYDAKCTKPDCPFTHVSRRIPVLSPKPVAPPAPPSSSQLCRYFPACKKMECPFYHPKHCRFNTQCTRPDCTFYHPTINVPPRHALKWIRPQTSE

SEQ ID NO: 70210 - protein, 711 aa, Homo sapiens
MEIGTEISRKIRSAIKGKLQELGAYVDEELPDYIMVMVANKKSQDQMTEDLSLFLGNNTIRFTVWLHGVLDKLRSVTTEPSSLKSSDTNIFDSNVPSNKSNFSRGDERRHEAAVPPLAIPSARPEKRDSRVSTSSQESKTTNVRQTYDDGAATRLMSTVKPLREPAPSEDVIDIKPEPDDLIDEDLNFVQENPLSQKKPTVTLTYGSSRPSIEIYRPPASRNADSGVHLNRLQFQQQQNSIHAAKQLDMQSSWVYETGRLCEPEVLNSLEETYSPFFRNNSEKMSMEDENFRKRKLPVVSSVVKVKKFNHDGEEEEEDDDYGSRTGSISSSVSVPAKPERRPSLPPSKQANKNLILKAISEAQESVTKTTNYSTVPQKQTLPVAPRTRTSQEELLAEVVQGQSRTPRISPPIKEEETKGDSVEKNQDYYDMESMVHADTRSFILKKPKLSEEVVVAPNQESGMKTADSLRVLSGHLMQTRDLVQPDKPASPKFIVTLDGVPSPPGYMSDQEEDMCFEGMKPVNQTAASNKGLRGLLHPQQLHLLSRQLEDPNGSFSNAEMSELSVAQKPEKLLERCKYWPACKNGDECAYHHPISPCKAFPNCKFAEKCLFVHPNCKYDAKCTKPDCPFTHVSRRIPVLSPKPAVAPPAPPSSSQLCRYFPACKKMECPFYHPKHCRFNTQCTRPDCTFYHPTINVPPRHALKWIRPQTSE

SEQ ID NO: 70211 - protein, 711 aa, Homo sapiens
MEIGTEISRKIRSAIKGKLQELGAYIDEELPDYIMVMVANKKSQDQMTEDLSLFLGNNTIRFTVWLHGVLDKLRSVTTEPSSLKSSDTNIFDSNVPSNKSNFSRGDERRHEAAVPPLAIPSARPEKRDSRVSTSSQESKTTNVRQTYDDGAATRLMSTVKPLREPAPSEDVIDIKPEPDDLIDEDLNFVQENPLSQKKPTVTLTYGSSRPSIEIYRPPASRNADSGVHLNRLQFQQQQNSIHAAKQLDMQSSWVYETGRLCEPEVLNSLEETYSPFFRNNSEKMSMEDENFRKRKLPVVSSVVKVKKFNHDGEEEEEDDDYGSRTGSISSSVSVPAKPERRPSLPPSKQANKNLILKAISEAQESVTKTTNYSTVPQKQTLPVAPRTRTSQEELLAEVVQGQSRTPRISPPIKEEETKGDSVEKNQDYYDMESMVHADTRSFILKKPKLSEEVVVAPNQESGMKTADSLRVLSGHLMQTRDLVQPDKPASPKFIVTLDGVPSPPGYMSDQEEDMCFEGMKPVNQTAASNKGLRGLLHPQQLHLLSRQLEDPNGSFSNAEMSELSVAQKPEKLLERCKYWPACKNGDECAYHHPISPCKAFPNCKFAEKCLFVHPNCKYDAKCTKPDCPFTHVSRRIPVLSPKPAVAPPAPPSSSQLCRYFPACKKMECPFYHPKHCRFNTQCTRPDCTFYHPTINVPPRHALKWIRPQTSE

SEQ ID NO: 70212 - protein, 282 aa, Homo sapiens
MRMSSKFPSPPLPIFLPPEPVDLGSITSSSCSLNELDNISHLLRKISADINEIKGMKAAILTVEANLFDLNVRVSKNEAKISSLEVKMNEYSTTYECNRQFEDQEEDTESQSRTTDVKIIGFLRNVEKAEMSELSVAQKPEKLLERCKYWPACKNGDECAYHHPISPCKAFPNCKFAEKCLFVHPNCKYDAKCTKPDCPFTHVSRRIPVLSPKPAVAPPAPPSSSQLCRYFPACKKMECPFYHPKHCRFNTQCTRPDCTFYHPTINVPPRHALKWIRPQTSE

SEQ ID NO: 70213 - protein, 72 aa, Homo sapiens
MVMVANKKSQDQMTEDLSLFLGNNTIRFTVWLHGVLDKLRSVTTEPSSLKSSDTNIFDSNVPSNKSNFSRGD

SEQ ID NO: 70214 - protein, 94 aa, Homo sapiens
MVMVANKKSQDQMTEDLSLFLGNNTIRFTVWLHGVLDKLRSVTTEPSSLKSSDTNIFDSNVPSNKSNFSRGDERRHEAAVPPLAIPSARPEKRD

SEQ ID NO: 70215 - protein, 215 aa, Homo sapiens
MVMVANKKSQDQMTEDLSLFLGNNTIRFTVWLHGVLDKLRSVTTEPSSLKSSDTNIFDSNVPSNKSNFSRGDERRHEAAVPPLAIPSARPEKRDSRVSTSSQESKTTNVRQTYDDGAATRLMSTVKPLREPAPSEDVIDIKPEPDDLIDEDLNFVQENPLSQKKPTVTLTYGSSRPSIEIYRPPASRNADSGVHLNRLQFQQQQNSIHAAKQLDM

SEQ ID NO: 70216 - protein, 651 aa, Homo sapiens
  VARIANT 1: note = MOD_RES - Any amino acid
XSDTNIFDSNVPSNKSNFSRGDERRHEAAVPPLAIPSARPEKRDSRVSTSSQESKTTNVRQTYDDGAATRLMSTVKPLREPAPSEDVIDIKPEPDDLIDEDLNFVQENPLSQKKPTVTLTYGSSRPSIEIYRPPASRNADSGVHLNRLQFQQQQNSIHAAKQLDMQSSWVYETGRLCEPEVLNSLEETYSPFFRNNSEKMSMEDENFRKRKLPVVSSVVKVKKFNHDGEEEEEDDDYGSRTGSISSSVSVPAKPERRPSLPPSKQANKNLILKAISEAQESVTKTTNYSTVPQKQTLPVAPRTRTSQEELLAEVVQGQSRTPRISPPIKEEETKGDSVEKNQGTQQRQLLSRLQIDPVMAETLQMSQDYYDMESMVHADTRSFILKKPKLSEEVVVAPNQESGMKTADSLRVLSGHLMQTRDLVQPDKPASPKFIVTLDGVPSPPGYMSDQEEDMCFEGMKPVNQTAASNKGLRGLLHPQQLHLLSRQLEDPNGSFSNAEMSELSVAQKPEKLLERCKYWPACKNGDECAYHHPISPCKAFPNCKFAEKCLFVHPNCKYDAKCTKPDCPFTHVSRRIPVLSPKPVAPPAPPSSSQLCRYFPACKKMECPFYHPKHCRFNTQCTRPDCTFYHPTINVPPRHALKWIRPQTSE

SEQ ID NO: 70217 - protein, 133 aa, Homo sapiens
MVMVANKKSQDQMTEDLSLFLGNNTIRFTVWLHGVLDKLRSVTTEPSSLKSSDTNIFDSNVPSNKSNFSRGDERRHEAAVPPLAIPSARPEKRDSRVSTSSQESKTTNVRQTYDDGAATRLMSTVKPLREPAP

SEQ ID NO: 70218 - protein, 730 aa, Homo sapiens
MEIGTEISRKIRSAIKGKLQELGAYVDEELPDYIMVMVANKKSQDQMTEDLSLFLGNNTIRFTVWLHGVLDKLRSVTTEPSSLKSSDTNIFDSNVPSNKSNFSRGDERRHEAAVPPLAIPSARPEKRDSRVSTSSQESKTTNVRQTYDDGAATRLMSTVKPLREPAPSEDVIDIKPEPDDLIDEDLNFVQENPLSQKKPTVTLTYGSSRPSIEIYRPPASRNADSGVHLNRLQFQQQQNSIHAAKQLDMQSSWVYETGRLCEPEVLNSLEETYSPFFRNNSEKMSMEDENFRKRKLPVVSSVVKVKKFNHDGEEEEEDDDYGSRTGSISSSVSVPAKPERRPSLPPSKQANKNLILKAISEAQESVTKTTNYSTVPQKQTLPVAPRTRTSQEELLAEVVQGQSRTPRISPPIKEEETKGDSVEKNQGTQQRQLLSRLQIDPVMAETLQMSQDYYDMESMVHADTRSFILKKPKLSEEVVVAPNQESGMKTADSLRVLSGHLMQTRDLVQPDKPASPKFIVTLDGVPSPPGYMSDQEEDMCFEGMKPVNQTAASNKGLRGLLHPQQLHLLSRQLEDPNAEMSELSVAQKPEKLLERCKYWPACKNGDECAYHHPISPCKAFPNCKFAEKCLFVHPNCKYDAKCTKPDCPFTHVSRRIPVLSPKPVAPPAPPSSSQLCRYFPACKKMECPFYHPKHCRFNTQCTRPDCTFYHPTINVPPRHALKWIRPQTSE

SEQ ID NO: 70219 - protein, 902 aa, Homo sapiens
MADPEVCCFITKILCAHGGRMALDALLQEIALSEPQLCEVLQVAGPDRFVVLETGGEAGITRSVVATTRARVCRRKYCQRPCDNLHLCKLNLLGRCNYSQSERNLCKYSHEVLSEENFKVLKNHELSGLNKEELAVLLLQSDPFFMPEICKSYKGEGRQQICNQQPPCSRLHICDHFTRGNCRFPNCLRSHNLMDRKVLAIMREHGLNPDVVQNIQDICNSKHMQKNPPGPRAPSSHRRNMAYRARSKSRDRFFQGSQEFLASASASAERSCTPSPDQISHRASLEDAPVDDLTRKFTYLGSQDRARPPSGSSKATDLGGTSQAGTSQRFLENGSQEDLLHGNPGSTYLASNSTSAPNWKSLTSWTNDQGARRKTVFSPTLPAARSSLGSLQTPEAVTTRKGTGLLSSDYRIINGKSGTQDIQPGPLFNNNADGVATDITSTRSLNYKSTSSGHREISSPRIQDAGPASRDVQATGRIADDADPRVALVNDSLSDVTSTTSSRVDDHDSEEICLDHLCKGCPLNGSCSKVHFHLPYRWQMLIGKTWTDFEHMETIEKGYCNPGIHLCSVGSYTINFRVMSCDSFPIRRLSTPSSVTKPANSVFTTKWIWYWKNESGTWIQYGEEKDKRKNSNVDSSYLESLYQSCPRGVVPFQAGSRNYELSFQGMIQTNIASKTQKDVIRRPTFVPQWYVQQMKRGPDHQPAKTSSVSLTATFRPQEDFCFLSSKKYKLSEIHHLHPEYVRVSEHFKASMKNFKIEKIKKIENSELLDKFTWKKSQMKEEGKLLFYATSRAYVESICSNNFDSFLHETHENKYGKGIYFAKDAIYSHKNCPYDAKNVVMFVAQVLVGKFTEGNITYTSPPPQFDSCVDTRSNPSVFVIFQKDQVYPQYVIEYTEDKACVIS

SEQ ID NO: 70220 - protein, 699 aa, Homo sapiens
MADPEVCCFITKILCAHGGRMALDALLQEIALSEPQLCEVLQVAGPDRFVVLETGGEAGITRSVVATTRARVCRRKYCQRPCDNLHLCKLNLLGRCNYSQSERNLCKYSHEVLSEENFKVLKNHELSGLNKEELAVLLLQSDPFFMPEICKSYKGEGRQQICNQQPPCSRLHICDHFTRGNCRFPNCLRSHNLMDRKVLAIMREHGLNPDVVQNIQDICNSKHMQKNPPGPRAPSSHRRNMAYRARSKSRDRFFQGSQEFLASASASAERSCTPSPDQISHRASLEDAPVDDLTRKFTYLGSQDRARPPSGSSKATDLGGTSQAGTSQRFLENGSQEDLLHGNPGSTYLASNSTSAPNWKSLTSWTNDQGARRKTVFSPTLPAARSSLGSLQTPEAVTTRKGTGLLSSDYRIINGKSGTQDIQPGPLFNNNADGVATDITSTRSLNYKSTSSGHREISSPRIQDAGPASRDVQATGRIADDADPRVALVNDSLSDVTSTTSSRVDDHDSEEICLDHLCKGCPLNGSCSKVHFHLPYRWQMLIGKTWTDFEHMETIEKGYCNPGIHLCSVGSYTINFRVMSCDSFPIRRLSTPSSVTKPANSVFTTKWIWYWKNESGTWIQYGEEKDKRKNSNVDSSYLESLYQSCPRGVVPFQAGSRNYELSFQGMIQTNIASKTQKDVIRRPTFVPQWYVQQMKRGPE

SEQ ID NO: 70221 - protein, 506 aa, Homo sapiens
MAYRARSKSRDRFFQGSQEFLASASASAERSCTPSPDQISHRASLEDAPVDDLTRKFTYLGSQDRARPPSGSSKATDLGGTSQAGTSQRFLENGSQEDLLHGNPGSTYLASNSTSAPNWKSLTSWTNDQGARRKTVFSPTLPAARSSLGSLQTPEAVTTRKGTGLLSSDYRIINGKSGTQDIQPGPLFNNNADGVATDITSTRSLNYKSTSSGHREISSPRIQDAGPASRDVQATGRIADDADPRVALVNDSLSDVTSTTSSRVDDHDSEEICLDHLCKGCPLNGSCSKVHFHLPYRWQMLIGKTWTDFEHMETIEKGYCNPGIHLCSVGSYTINFRVMSCDSFPIRRLSTPSSVTKPANSVFTTKWIWYWKNESGTWIQYGEEKDKRKNSNVDSSYLESLYQSCPRGVVPFQAGSRNYELSFQGMIQTNIASKTQKDVIRRPTFVPQWYVQEERARVSVLKQLFADRCLRCSCPGLIKSLVNLEPVFLKSSCLHYSAVSICIIDE

SEQ ID NO: 70222 - protein, 217 aa, Homo sapiens
MSGGLAPSKSTVYVSNLPFSLTNNDLYRIFSKYGKVVKVTIMKDKDTRKSKGVAFILFLDKDSAQNCTRAINNKQLFGRVIKASIAIDNGRAAEFIRRRNYFDKSKCYECGESGHLSYACPKNMLGEREPPKKKEKKKKKKAPEPEEEIEEVEESEDEGEDPALDSLSQAIAFQQAKIEEEQKKWKPSSGVPSTSDDSRRPRIKKSTYFSDEEELSD

SEQ ID NO: 70223 - protein, 166 aa, Homo sapiens
MAMSQESLTFKDVFVDFTLEEWQQLDSAQKNLYRDVMLENYSHLVSVGYLVAKPDVIFRLGPGEESWMADGGTPVRTCAEVWQVDEQIDHYKESQDKLPWQAAFIGKETLKDESGQESRTCRKSIYLSTEFDSVRQRLPKYYSWEKAFKTSFKLSWSKWKLCKKER

SEQ ID NO: 70224 - protein, 171 aa, Homo sapiens
MAMSQESLTFKDVFVDFTLEEWQQLDSAQKNLYRDVMLENYSHLVSVGYLVAKPDVIFRLGPGEESWMADGGTPVRTCAGEDRPEVWQVDEQIDHYKESQDKLPWQAAFIGKETLKDESGQESRTCRKSIYLSTEFDSVRQRLPKYYSWEKAFKTSFKLSWSKWKLCKKER

SEQ ID NO: 70225 - protein, 98 aa, Homo sapiens
MAMSQESLTFKDVFVDFTLEEWQQLDSAQKNLYRDVMLENYSHLVSVGYLVAKPDVIFRLGPGEESWMADGGTPVRTCAGEDRPDVSIFASCILKCCY

SEQ ID NO: 70226 - protein, 98 aa, Homo sapiens; identical to SEQ ID NO: 70225

SEQ ID NO: 70227 - protein, 171 aa, Homo sapiens
VAMSQESLTFKDVFVDFTLEEWQQLDSAQKNLYRDVMLENYSHLVSVGYLVAKPDVIFRLGPGEESWMADGGTPVRTCAGEDRPEVWQVDEQIDHYKESQDKLPWQAAFIGKETLKDESGQESRTCRKSIYLSTEFDSVRQRLPKYYSWEKAFKTSFKLSWSKWKLCKKER

SEQ ID NO: 70228 - protein, 98 aa, Homo sapiens; identical to SEQ ID NO: 70225

SEQ ID NO: 70229 - protein, 287 aa, Homo sapiens
MMNRFRKWLYKPKRSDPQLLARFYYADEELNQVAAELDSLDGRKDPQRCTLLVSQFRSCQDNVLNIINQIMDECIPQDRAPRDFCVKFPEEIRHDNLAGQLWFGAECLAAGSIIMNRELESMAMRPLAKELTRSLEDVRGALRDQALRDLNTYTEKMREALRHFDVLFAEFELSYVSAMVPVKSPREYYVQQEVIVLFCETVERALDFGYLTQDMIDDYEPALMFSIPRLAIVCPLLPAHPRTRAGATAHVACRMVAGSSSGALTHPPVSKQGVISALLRPLPELPP

SEQ ID NO: 70230 - protein, 172 aa, Homo sapiens
MMNRFRKWLYKPKDNVLNIINQIMDECIPQDRAPRDFCVKFPEEIRHDNLAGQLWFGAECLAAGSIIMNRELESMAMRPLAKELTRSLEDVRGALRDQALRDLNTYTEKMREALRHFDVLFAEFELSYVSAMVPVKSPREYYVQQEVIVLFCETVERNGKGVLKFMWNCNGP

SEQ ID NO: 70231 - protein, 163 aa, Homo sapiens
MDECIPQDRAPRDFCVKFPEEIRHDNLAGQLWFGAECLAAGSIIMNRELESMAMRPLAKELTRSLEDVRGALRDQALRDLNTYTEKMREALRHFDVLFAEFELSYVSAMVPVKSPREYYVQQEVIVLFCETVERALDFGYLTQDMIDDYEPALMFSIPRLAIV

SEQ ID NO: 70232 - protein, 3703 aa, Homo sapiens
MEGCDSPVVSGKDNGCGIPQHQQWTELNSTHLPDKPSSMEQSTGESHGPLDSLRAPFNERLAESTASAGPPSEPASKEVTCNECSASFASLQTYMEHHCPSARPPPPLREESASDTGEEGDEESDVENLAGEIVYQPDGSAYIVESLSQLTQGGGACGSGSGSGPLPSLFLNSLPGAGGKQGDPSCAAPVYPQIINTFHIASSFGKWFEGPDQAFPNTSALAGLSPVLHSFRVFDVRHKSNKDYLNSDGSAKSSCVSKDVPNNVDLSKFDGFVLYGKRKPILMCFLCKLSFGYVRSFVTHAVHDHRMTLSEDERKILSNKNISAIIQGIGKDKEPLVSFLEPKNKNFQHPLVSTANLIGPGHSFYGKFSGIRMEGEEALPAGSAAGPEQPQAGLLTPSTLLNLGGLTSSVLKTPITSVPLGPLASSPTKSSEGKDSGAAEGEKQEVGDGDCFSEKVEPAEEEAEEEEEEEEAEEEEEEEEEEEEEEEDEGCKGLFPSELDEELEDRPHEEPGAAAGSSSKKDLALSNQSISNSPLMPNVLQTLSRGTASTSSNSASSFVVFDGANRRNRLSFNSEGVRANVAEGGRRLDFADESANKDNATAPEPNESTEGDDGGFVPHHQHAGSLCELGVGECPSGSGVECPKCDTVLGSSRSLGGHMTMMHSRNSCKTLKCPKCNWHYKYQQTLEAHMKEKHPEPGGSCVYCKSGQPHPRLARGESYTCGYKPFRCEVCNYSTTTKGNLSIHMQSDKHLNNMQNLQNGGGEQVFSHTAGAAAAAVAAAAAAANISSSCGAPSPTKPKTKPTWRCEVCDYETNVARNLRIHMTSEKHMHNMMLLQQNMTQIQHNRHLGLGSLPSPAEAELYQYYLAQNMNLPNLKMDSAASDAQFMMSGFQLDPAGPMAAMTPALVGGEIPLDMRLGGGQLVSEELMNLGESFIQTNDPSLKLFQCAVCNKFTTDNLDMLGLHMNVERSLSEDEWKAVMGDSYQCKLCRYNTQLKANFQLHCKTDKHVQKYQLVAHIKEGGKANEWRLKCVAIGNPVHLKCNACDYYTNSLEKLRLHTVNSRHEASLKLYKHLQQHESGVEGESCYYHCVLCNYSTKAKLNLIQHVRSMKHQRSESLRKLQRLQKGLPEEDEDLGQIFTIRRCPSTDPEEAIEDVEGPSETAADPEELAKDQEGGASSSQAEKELTDSPATSKRISFPGSSESPLSSKRPKTAEEIKPEQMYQCPYCKYSNADVNRLRVHAMTQHSVQPMLRCPLCQDMLNNKIHLQLHLTHLHSVAPDCVEKLIMTVTTPEMVMPSSMFLPAAVPDRDGNSNLEEAGKQPETSEDLGKNILPSASTEQSGDLKPSPADPGSVREDSGFICWKKGCNQVFKTSAALQTHFNEVHAKRPQLPVSDRHVYKYRCNQCSLAFKTIEKLQLHSQYHVIRAATMCCLCQRSFRTFQALKKHLETSHLELSEADIQQLYGGLLANGDLLAMGDPTLAEDHTIIVEEDKEEESDLEDKQSPTGSDSGSVQEDSGSEPKRALPFRKGPNFTMEKFLDPSRPYKCTVCKESFTQKNILLVHYNSVSHLHKLKRALQESATGQPEPTSSPDNKPFKCNTCNVAYSQSSTLEIHMRSVLHQTKARAAKLEAASGSSNGTGNSSSISLSSSTPSPVSTSGSNTFTTSNPSSAGIAPSSNLLSQVPTESVGMPPLGNPIGANIASPSEPKEANRKKLADMIASRQQQQQQQQQQQQQQQQQQQAQTLAQAQAQVQAHLQQELQQQAALIQSQLFNPTLLPHFPMTTETLLQLQQQQHLLFPFYIPSAEFQLNPEVSLPVTSGALTLTGTGPGLLEDLKAQVQVPQQSHQQILPQQQQNQLSIAQSHSALLQPSQHPEKKNKLVIKEKEKESQRERDSAEGGEGNTGPKETLPDALKAKEKKELAPGGGSEPSMLPPRIASDARGNATKALLENFGFELVIQYNENKQKVQKKNGKTDQGENLEKLECDSCGKLFSNILILKSHQEHVHQNYFPFKQLERFAKQYRDHYDKLYPLRPQTPEPPPPPPPPPPPPLPAAPPQPASTPAIPASAPPITSPTIAPAQPSVPLTQLSMPMELPIFSPLMMQTMPLQTLPAQLPPQLGPVEPLPADLAQLYQHQLNPTLLQQQNKRPRTRITDDQLRVLRQYFDINNSPSEEQIKEMADKSGLPQKVIKHWFRNTLFKERQRNKDSPYNFSNPPITSLEELKIDSRPPSPEPPKQEYWGSKRSSRTRFTDYQLRVLQDFFDANAYPKDDEFEQLSNLLNLPTRVIVVWFQNARQKARKNYENQGEGKDGERRELTNDRYIRTSNLNYQCKKCSLVFQRIFDLIKHQKKLCYKDEDEEGQDDSQNEDSMDAMEILTPTSSSCSTPMPSQAYSAPAPSANNTASSAFLQLTAEAEELATFNSKTEAGDEKPKLAEAPSAQPNQTQEKQGQPKPELQQQEQPEQKTNTPQQKLPQLVSLPSLPQPPPQAPPPQCPLPQSSPSPSQLSHLPLKPLHTSTPQQLANLPPQLIPYQCDQCKLAFPSFEHWQEHQQLHFLSAQNQFIHPQFLDRSLDMPFMLFDPSNPLLASQLLSGAIPQIPASSATSPSTPTSTMNTLKRKLEEKASASPGENDSGTGGEEPQRDKRLRTTITPEQLEILYQKYLLDSNPTRKMLDHIAHEVGLKKRVVQVWFQNTRARERKGQFRAVGPAQAHRRCPFCRALFKAKTALEAHIRSRHWHEAKRAGYNLTLSAMLLDCDGGLQMKGDIFDGTSFSHLPPSSSDGQGVPLSPVSKTMELSPRTLLSPSSIKVEGIEDFESPSMSSVNLNFDQTKLDNDDCSSVNTAITDTTTGDEGNADNDSATGIATETKSSSAPNEGLTKAAMMAMSEYEDRLSSGLVSPAPSFYSKEYDNEGTVDYSETSSLADPCSPSPGASGSAGKSGDSGDRPGQKRFRTQMTNLQLKVLKSCFNDYRTPTMLECEVLGNDIGLPKRVVQVWFQNARAKEKKSKLSMAKHFGINQTSYEGPKTECTLCGIKYSARLSVRDHIFSQQHISKVKDTIGSQLDKEKEYFDPATVRQLMAQQELDRIKKANEVLGLAAQQQGMFDNTPLQALNLPTAYPALQGIPPVLLPGLNSPSLPGFTPSNTALTSPKPNLMGLPSTTVPSPGLPTSGLPNKPSSASLSSPTPAQATMAMGPQQPPQQQQQQQQPQVQQPPPPPAAQPPPTPQLPLQQQQQRKDKDSEKVKEKEKAHKGKGEPLPVPKKEKGEAPTATAATISAPLPTMEYAVDPAQLQALQAALTSDPTALLTSQFLPYFVPGFSPYYAPQIPGALQSGYLQPMYGMEGLFPYSPALSQALMGLSPGSLLQQYQQYQQSLQEAIQQQQQRQLQQQQQQKVQQQQPKASQTPVPPGAPSPDKDPAKESPKPEEQKNTPREVSPLLPKLPEEPEAESKSADSLYDPFIVPKVQYKLVCRKCQAGFSDEEAARSHLKSLCFFGQSVVNLQEMVLHVPTGGGGGGSGGGGGGGGGGGGGGSYHCLACESALCGEEALSQHLESALHKHRTITRAARNAKEHPSLLPHSACFPDPSTASTSQSAAHSNDSPPPPSAAAPSSASPHASRKSWPQVVSRASAAKPPSFPPLSSSSTVTSSSCSTSGVQPSMPTDDYSEESDTDLSQKSDGPASPVEGPKDPSCPKDSGLTSVGTDTFRL

SEQ ID NO: 70233 - protein, 2789 aa, Homo sapiens
MRLGGGQLVSEELMNLGESFIQTNDPSLKLFQCAVCNKFTTDNLDMLGLHMNVERSLSEDEWKAVMGDSYQCKLCRYNTQLKANFQLHCKTDKHVQKYQLVAHIKEGGKANEWRLKCVAIGNPVHLKCNACDYYTNSLEKLRLHTVNSRHEASLKLYKHLQQHESGVEGESCYYHCVLCNYSTKAKLNLIQHVRSMKHQRSESLRKLQRLQKGLPEEDEDLGQIFTIRRCPSTDPEEAIEDVEGPSETAADPEELAKDQEGGASSSQAEKELTDSPATSKRISFPGSSESPLSSKRPKTAEEIKPEQMYQCPYCKYSNADVNRLRVHAMTQHSVQPMLRCPLCQDMLNNKIHLQLHLTHLHSVAPDCVEKLIMTVTTPEMVMPSSMFLPAAVPDRDGNSNLEEAGKQPETSEDLGKNILPSASTEQSGDLKPSPADPGSVREDSGFICWKKGCNQVFKTSAALQTHFNEVHAKRPQLPVSDRHVYKYRCNQCSLAFKTIEKLQLHSQYHVIRAATMCCLCQRSFRTFQALKKHLETSHLELSEADIQQLYGGLLANGDLLAMGDPTLAEDHTIIVEEDKEEESDLEDKQSPTGSDSGSVQEDSGSEPKRALPFRKGPNFTMEKFLDPSRPYKCTVCKESFTQKNILLVHYNSVSHLHKLKRALQESATGQPEPTSSPDNKPFKCNTCNVAYSQSSTLEIHMRSVLHQTKARAAKLEAASGSSNGTGNSSSISLSSSTPSPVSTSGSNTFTTSNPSSAGIAPSSNLLSQVPTESVGMPPLGNPIGANIASPSEPKEANRKKLADMIASRQQQQQQQQQQQQQQQQQQQAQTLAQAQAQVQAHLQQELQQQAALIQSQLFNPTLLPHFPMTTETLLQLQQQQHLLFPFYIPSAEFQLNPEVSLPVTSGALTLTGTGPGLLEDLKAQVQVPQQSHQQILPQQQQNQLSIAQSHSALLQPSQHPEKKNKLVIKEKEKESQRERDSAEGGEGNTGPKETLPDALKAKEKKELAPGGGSEPSMLPPRIASDARGNATKALLENFGFELVIQYNENKQKVQKKNGKTDQGENLEKLECDSCGKLFSNILILKSHQEHVHQNYFPFKQLERFAKQYRDHYDKLYPLRPQTPEPPPPPPPPPPPPLPAAPPQPASTPAIPASAPPITSPTIAPAQPSVPLTQLSMPMELPIFSPLMMQTMPLQTLPAQLPPQLGPVEPLPADLAQLYQHQLNPTLLQQQNKRPRTRITDDQLRVLRQYFDINNSPSEEQIKEMADKSGLPQKVIKHWFRNTLFKERQRNKDSPYNFSNPPITSLEELKIDSRPPSPEPPKQEYWGSKRSSRTRFTDYQLRVLQDFFDANAYPKDDEFEQLSNLLNLPTRVIVVWFQNARQKARKNYENQGEGKDGERRELTNDRYIRTSNLNYQCKKCSLVFQRIFDLIKHQKKLCYKDEDEEGQDDSQNEDSMDAMEILTPTSSSCSTPMPSQAYSAPAPSANNTASSAFLQLTAEAEELATFNSKTEAGDEKPKLAEAPSAQPNQTQEKQGQPKPELQQQEQPEQKTNTPQQKLPQLVSLPSLPQPPPQAPPPQCPLPQSSPSPSQLSHLPLKPLHTSTPQQLANLPPQLIPYQCDQCKLAFPSFEHWQEHQQLHFLSAQNQFIHPQFLDRSLDMPFMLFDPSNPLLASQLLSGAIPQIPASSATSPSTPTSTMNTLKRKLEEKASASPGENDSGTGGEEPQRDKRLRTTITPEQLEILYQKYLLDSNPTRKMLDHIAHEVGLKKRVVQVWFQNTRARERKGQFRAVGPAQAHRRCPFCRALFKAKTALEAHIRSRHWHEAKRAGYNLTLSAMLLDCDGGLQMKGDIFDGTSFSHLPPSSSDGQGVPLSPVSKTMELSPRTLLSPSSIKVEGIEDFESPSMSSVNLNFDQTKLDNDDCSSVNTAITDTTTGDEGNADNDSATGIATETKSSSAPNEGLTKAAMMAMSEYEDRLSSGLVSPAPSFYSKEYDNEGTVDYSETSSLADPCSPSPGASGSAGKSGDSGDRPGQKRFRTQMTNLQLKVLKSCFNDYRTPTMLECEVLGNDIGLPKRVVQVWFQNARAKEKKSKLSMAKHFGINQTSYEGPKTECTLCGIKYSARLSVRDHIFSQQHISKVKDTIGSQLDKEKEYFDPATVRQLMAQQELDRIKKANEVLGLAAQQQGMFDNTPLQALNLPTAYPALQGIPPVLLPGLNSPSLPGFTPSNTALTSPKPNLMGLPSTTVPSPGLPTSGLPNKPSSASLSSPTPAQATMAMGPQQPPQQQQQQQQPQVQQPPPPPAAQPPPTPQLPLQQQQQRKDKDSEKVKEKEKAHKGKGEPLPVPKKEKGEAPTATAATISAPLPTMEYAVDPAQLQALQAALTSDPTALLTSQFLPYFVPGFSPYYAPQIPGALQSGYLQPMYGMEGLFPYSPALSQALMGLSPGSLLQQYQQYQQSLQEAIQQQQQRQLQQQQQQKVQQQQPKASQTPVPPGAPSPDKDPAKESPKPEEQKNTPREVSPLLPKLPEEPEAESKSADSLYDPFIVPKVQYKLVCRKCQAGFSDEEAARSHLKSLCFFGQSVVNLQEMVLHVPTGGGGGGSGGGGGGGGGGGGGGSYHCLACESALCGEEALSQHLESALHKHRTITRAARNAKEHPSLLPHSACFPDPSTASTSQSAAHSNDSPPPPSAAAPSSASPHASRKSWPQVVSRASAAKPPSFPPLSSSSTVTSSSCSTSGVQPSMPTDDYSEESDTDLSQKSDGPASPVEGPKDPSCPKDSGLTSVGTDTFRL

SEQ ID NO: 70234 - protein, 3567 aa, Homo sapiens
METCDSPPISRQENGQSTSKLCGTTQLDNEVPEKVAGMEPDRENSSTDDNLKTDERKSEALLGFSVENAAATQVTSAKEIPCNECATSFPSLQKYMEHHCPNARLPVLKDDNESEISELEDSDVENLTGEIVYQPDGSAYIIEDSKESGQNAQTGANSKLFSTAMFLDSLASAGEKSDQSASAPMSFYPQIINTFHIASSLGKPFTADQAFPNTSALAGVGPVLHSFRVYDLRHKREKDYLTSDGSAKNSCVSKDVPNNVDLSKFDGCVSDGKRKPVLMCFLCKLSFGYIRSFVTHAVHDHRMTLNDEEQKLLSNKCVSAIIQGIGKDKEPLISFLEPKKSTSVYPHFSTTNLIGPDPTFRGLWSAFHVENGDSLPAGFAFLKGSASTSSSAEQPLGITQMPKAEVNLGGLSSLVVNTPITSVSLSHSSSESSKMSESKDQENNCERPKESNVLHPNGECPVKSEPTEPGDEDEEDAYSNELDDEEVLGELTDSIGNKDFPLLNQSISPLSSSVLKFIEKGTSSSSATVSDDTEKKKQTAAVRASGSVASNYGISGKDFADASASKDSATAAHPSEIARGDEDSSATPHQHGFTPSTPGTPGPGGDGSPGSGIECPKCDTVLGSSRSLGGHMTMMHSRNSCKTLKCPKCNWHYKYQQTLEAHMKEKHPEPGGSCVYCKTGQPHPRLARGESYTCGYKPFRCEVCNYSTTTKGNLSIHMQSDKHLNNVQNLQNGNGEQVFGHSAPAPNTSLSGCGTPSPSKPKQKPTWRCEVCDYETNVARNLRIHMTSEKHMHNMMLLQQNMKQIQHNLHLGLAPAEAELYQYYLAQNIGLTGMKLENPADPQLMINPFQLDPATAAALAPGLGELSPYISDPALKLFQCAVCNKFTSDSLEALSVHVSSERSLPEEEWRAVIGDIYQCKLCNYNTQLKANFQLHCKTDKHMQKYQLVAHIKEGGKSNEWRLKCIAIGNPVHLKCNACDYYTNSVDKLRLHTTNHRHEAALKLYKHLQKQEGAVNPESCYYYCAVCDYTTKVKLNLVQHVRSVKHQQTEGLRKLQLHQQGLAPEEDNLSEIFFVKDCPPNELETASLGARTCDDDLTEQHEEAEGAIKPTAVAEDDEKDTSERDNSEGKNSNKDSVSVAGGTQPLLLAKEEDVATKRSKPTEDNKFCHEQFYQCPYCNYNSRDQSRIQMHVLSQHSVQPVICCPLCQDVLSNKMHLQLHLTHLHSVSPDCVEKLLMTVPVPDVMMPNSMLLPAAASEKSERDTPAAVTAEGSGKYSGESPMDDKSMAGLEDSKANVEVKNEEQKPTKEPLEVSEWNKNSSKDVKIPDTLQDQLNEQQKRQPLSVSDRHVYKYRCNHCSLAFKTMQKLQIHSQYHAIRAATMCNLCQRSFRTFQALKKHLEAGHPELSEAELQQLYASLPVNGELWAESETMSQDDHGLEQEMEREYEVDHEGKASPVGSDSSSIPDDMGSEPKRTLPFRKGPNFTMEKFLDPSRPYKCTVCKESFTQKNILLVHYNSVSHLHKLKKVLQEASSPVPQETNSNTDNKPYKCSICNVAYSQSSTLEIHMRSVLHQTKARAAKLEPSGHVAGGHSIAANVNSPGQGMLDSMSLAAVNSKDTHLDAKELNKKQTPDLISAQPAHHPPQSPAQIQMQLQHELQQQAAFFQPQFLNPAFLPHFPMTPEALLQFQQPQFLFPFYIPGTEFSLGPDLGLPGSATFGMPGMTGMAGSLLEDLKQQIQTQHHVGQTQLQILQQQAQQYQATQPQLQPQKQQQQPPPPQQQQQQQASKLLKQEQSNIVSADCQIMKDVPSYKEAEDISEKPEKPKQEFISEGEGLKEGKDTKKQKSLEPSIPPPRIASGARGNAAKALLENFGFELVIQYNENRQKVQKKGKSGEGENTDKLECGTCGKLFSNVLILKSHQEHVHGQFFPYAALEKFARQYREAYDKLYPISPSSPETPPPPPPPPPLPPAPPQPSSMGPVKIPNTVSTPLQAPPPTPPPPPPPPPPPPPPPPPPPPSAPPQVQLPVSLDLPLFPSIMMQPVQHPALPPQLALQLPQMDALSADLTQLCQQQLGLDPNFLRHSQFKRPRTRITDDQLKILRAYFDINNSPSEEQIQEMAEKSGLSQKVIKHWFRNTLFKERQRNKDSPYNFSNPPITVLEDIRIDPQPTSLEHYKSDASFSKRSSRTRFTDYQLRVLQDFFDTNAYPKDDEIEQLSTVLNLPTRVIVVWFQNARQKARKSYENQAETKDNEKRELTNERYIRTSNMQYQCKKCNVVFPRIFDLITHQKKQCYKDEDDDAQDESQTEDSMDATDQVVYKHCTVSGQTDAAKNAAAPAASSGSGTSTPLIPSPKPEPEKTSPKPEYPAEKPKQSDPSPPSQGTKPALPLASTSSDPPQASTAQPQPQPQPPKQPQLIGRPPSASQTPVPSSPLQISMTSLQNSLPPQLLQYQCDQCTVAFPTLELWQEHQHMHFLAAQNQFLHSPFLERPMDMPYMIFDPNNPLMTGQLLGSSLTQMPPQASSSHTTAPTTVAASLKRKLDDKEDNNCSEKEGGNSGEDQHRDKRLRTTITPEQLEILYEKYLLDSNPTRKMLDHIAREVGLKKRVVQVWFQNTRARERKGQFRAVGPAQSHKRCPFCRALFKAKSALESHIRSRHWNEGKQAGYSLPPSPLISTEDGGESPQKYIYFDYPSLPLTKIDLSSENELASTVSTPVSKTAELSPKNLLSPSSFKAECSEDVENLNAPPAEAGYDQNKTDFDETSSINTAISDATTGDEGNTEMESTTGSSGDVKPALSPKEPKTLDTLPKPATTPTTEVCDDKFLFSLTSPSIHFNDKDGDHDQSFYITDDPDDNADRSETSSIADPSSPNPFGSSNPFKSKSNDRPGHKRFRTQMSNLQLKVLKACFSDYRTPTMQECEMLGNEIGLPKRVVQVWFQNARAKEKKFKINIGKPFMINQGGTEGTKPECTLCGVKYSARLSIRDHIFSKQHISKVRETVGSQLDREKDYLAPTTVRQLMAQQELDRIKKASDVLGLTVQQPGMMDSSSLHGISLPTAYPGLPGLPPVLLPGMNGPSSLPGFPQNSNIASGMLGFPTSATSSPALSLSSAPTKPLLQTPPPPPPPPPPPPSSSLSGQQTEQQNKESEKKQTKPNKVKKIKEEELEATKPEKHPKKEEKISSALSVLGKVVGETHVDPIQLQALQNAIAGDPASFIGGQFLPYFIPGFASYFTPQLPGTVQGGYFPPVCGMESLFPYGPTMPQTLAGLSPGALLQQYQQYQQNLQESLQKQQKQQQEQQQKPVQAKTSKVESDQPQNSNDASETKEDKSTATESTKEEPQLESKSADFSDTYVVPFVKYEFICRKCQMMFTDEDAAVNHQKSFCYFGQPLIDPQETVLRVPVSKYQCLACDVAISGNEALSQHLQSSLHKEKTIKQAMRNAKEHVRLLPHSVCSPNPNTTSTSQSAASSNNTYPHLSCFSMKSWPNILFQASARRAASPPSSPPSLSLPSTVTSSLCSTSGVQTSLPTESCSDESDSELSQKLEDLDNSLEVKAKPASGLDGNFNSIRMDMFSV

SEQ ID NO: 70235 - protein, 3600 aa, Homo sapiens
METCDSPPISRQENGQSTSKLCGTTQLDNEVPEKVAGMEPDRENSSTDDNLKTDERKSEALLGFSVENAAATQVTSAKEIPCNECATSFPSLQKYMEHHCPNARLPVLKDDNESEISELEDSDVENLTGEIVYQPDGSAYIIEDSKESGQNAQTGANSKLFSTAMFLDSLASAGEKSDQSASAPMSFYPQIINTFHIASSLGKPFTADQAFPNTSALAGVGPVLHSFRVYDLRHKREKDYLTSDGSAKNSCVSKDVPNNVDLSKFDGCVSDGKRKPVLMCFLCKLSFGYIRSFVTHAVHDHRMTLNDEEQKLLSNKCVSAIIQGIGKDKEPLISFLEPKKSTSVYPHFSTTNLIGPDPTFRGLWSAFHVENGDSLPAGFAFLKGSASTSSSAEQPLGITQMPKAEVNLGGLSSLVVNTPITSVSLSHSSSESSKMSESKDQENNCERPKESNVLHPNGECPVKSEPTEPGDEDEEDAYSNELDDEEVLGELTDSIGNKDFPLLNQSISPLSSSVLKFIEKGTSSSSATVSDDTEKKKQTAAVRASGSVASNYGISGKDFADASASKDSATAAHPSEIARGDEDSSATPHQHGFTPSTPGTPGPGGDGSPGSGIECPKCDTVLGSSRSLGGHMTMMHSRNSCKTLKCPKCNWHYKYQQTLEAHMKEKHPEPGGSCVYCKTGQPHPRLARGESYTCGYKPFRCEVCNYSTTTKGNLSIHMQSDKHLNNVQNLQNGNGEQVFGHSAPAPNTSLSGCGTPSPSKPKQKPTWRCEVCDYETNVARNLRIHMTSEKHMHNMMLLQQNMKQIQHNLHLGLAPAEAELYQYYLAQNIGLTGMKLENPADPQLMINPFQLDPATAAALAPGLVNNELPPEIRLASGQLMGDDLSLLTAGELSPYISDPALKLFQCAVCNKFTSDSLEALSVHVSSERSLPEEEWRAVIGDIYQCKLCNYNTQLKANFQLHCKTDKHMQKYQLVAHIKEGGKSNEWRLKCIAIGNPVHLKCNACDYYTNSVDKLRLHTTNHRHEAALKLYKHLQKQEGAVNPESCYYYCAVCDYTTKVKLNLVQHVRSVKHQQTEGLRKLQLHQQGLAPEEDNLSEIFFVKDCPPNELETASLGARTCDDDLTEQQLRSTSEEQSEEAEGAIKPTAVAEDDEKDTSERDNSEGKNSNKDSGIITPEKELKVSVAGGTQPLLLAKEEDVATKRSKPTEDNKFCHEQFYQCPYCNYNSRDQSRIQMHVLSQHSVQPVICCPLCQDVLSNKMHLQLHLTHLHSVSPDCVEKLLMTVPVPDVMMPNSMLLPAAASEKSERDTPAAVTAEGSGKYSGESPMDDKSMAGLEDSKANVEVKNEEQKPTKEPLEVSEWNKNSSKDVKIPDTLQDQLNEQQKRQPLSVSDRHVYKYRCNHCSLAFKTMQKLQIHSQYHAIRAATMCNLCQRSFRTFQALKKHLEAGHPELSEAELQQLYASLPVNGELWAESETMSQDDHGLEQEMEREYEVDHEGKASPVGSDSSSIPDDMGSEPKRTLPFRKGPNFTMEKFLDPSRPYKCTVCKESFTQKNILLVHYNSVSHLHKLKKVLQEASSPVPQETNSNTDNKPYKCSICNVAYSQSSTLEIHMRSVLHQTKARAAKLEPSGHVAGGHSIAANVNSPGQGMLDSMSLAAVNSKDTHLDAKELNKKQTPDLISAQPAHHPPQSPAQIQMQLQHELQQQAAFFQPQFLNPAFLPHFPMTPEALLQFQQPQFLFPFYIPGTEFSLGPDLGLPGSATFGMPGMTGMAGSLLEDLKQQIQTQHHVGQTQLQILQQQAQQYQATQPQLQPQKQQQQPPPPQQQQQQQASKLLKQEQSNIVSADCQIMKDVPSYKEAEDISEKPEKPKQEFISEGEGLKEGKDTKKQKSLEPSIPPPRIASGARGNAAKALLENFGFELVIQYNENRQKVQKKGKSGEGENTDKLECGTCGKLFSNVLILKSHQEHVHGQFFPYAALEKFARQYREAYDKLYPISPSSPETPPPPPPPPPLPPAPPQPSSMGPVKIPNTVSTPLQAPPPTPPPPSAPPQVQLPVSLDLPLFPSIMMQPVQHPALPPQLALQLPQMDALSADLTQLCQQQLGLDPNFLRHSQFKRPRTRITDDQLKILRAYFDINNSPSEEQIQEMAEKSGLSQKVIKHWFRNTLFKERQRNKDSPYNFSNPPITVLEDIRIDPQPTSLEHYKSDASFSKRSSRTRFTDYQLRVLQDFFDTNAYPKDDEIEQLSTVLNLPTRVIVVWFQNARQKARKSYENQAETKDNEKRELTNERYIRTSNMQYQCKKCNVVFPRIFDLITHQKKQCYKDEDDDAQDESQTEDSMDATDQVVYKHCTVSGQTDAAKNAAAPAASSGSGTSTPLIPSPKPEPEKTSPKPEYPAEKPKQSDPSPPSQGTKPALPLASTSSDPPQASTAQPQPQPQPPKQPQLIGRPPSASQTPVPSSPLQISMTSLQNSLPPQLLQYQCDQCTVAFPTLELWQEHQHMHFLAAQNQFLHSPFLERPMDMPYMIFDPNNPLMTGQLLGSSLTQMPPQASSSHTTAPTTVAASLKRKLDDKEDNNCSEKEGGNSGEDQHRDKRLRTTITPEQLEILYEKYLLDSNPTRKMLDHIAREVGLKKRVVQVWFQNTRARERKGQFRAVGPAQSHKRCPFCRALFKAKSALESHIRSRHWNEGKQAGYSLPPSPLISTEDGGESPQKYIYFDYPSLPLTKIDLSSENELASTVSTPVSKTAELSPKNLLSPSSFKAECSEDVENLNAPPAEAGYDQNKTDFDETSSINTAISDATTGDEGNTEMESTTGSSGDVKPALSPKEPKTLDTLPKPATTPTTEVCDDKFLFSLTSPSIHFNDKDGDHDQSFYITDDPDDNADRSETSSIADPSSPNPFGSSNPFKSKSNDRPGHKRFRTQMSNLQLKVLKACFSDYRTPTMQECEMLGNEIGLPKRVVQVWFQNARAKEKKFKINIGKPFMINQGGTEGTKPECTLCGVKYSARLSIRDHIFSKQHISKVRETVGSQLDREKDYLAPTTVRQLMAQQELDRIKKASDVLGLTVQQPGMMDSSSLHGISLPTAYPGLPGLPPVLLPGMNGPSSLPGFPQNSNTLTPPGAGMLGFPTSATSSPALSLSSAPTKPLLQTPPPPPPPPPPPPSSSLSGQQTEQQNKESEKKQTKPNKVKKIKEEELEATKPEKHPKKEEKISSALSVLGKVVGETHVDPIQLQALQNAIAGDPASFIGGQFLPYFIPGFASYFTPQLPGTVQGGYFPPVCGMESLFPYGPTMPQTLAGLSPGALLQQYQQYQQNLQESLQKQQKQQQEQQQKPVQAKTSKVESDQPQNSNDASETKEDKSTATESTKEEPQLESKSADFSDTYVVPFVKYEFICRKCQMMFTDEDAAVNHQKSFCYFGQPLIDPQETVLRVPVSKYQCLACDVAISGNEALSQHLQSSLHKEKTIKQAMRNAKEHVRLLPHSVCSPNPNTTSTSQSAASSNNTYPHLSCFSMKSWPNILFQASARRAASPPSSPPSLSLPSTVTSSLCSTSGVQTSLPTESCSDESDSELSQKLEDLDNSLEVKAKPASGLDGNFNSIRMDMFSV

SEQ ID NO: 70236 - protein, 3571 aa, Homo sapiens
METCDSPPISRQENGQSTSKLCGTTQLDNEVPEKVAGMEPDRENSSTDDNLKTDERKSEALLGFSVENAAATQVTSAKEIPCNECATSFPSLQKYMEHHCPNARLPVLKDDNESEISELEDSDVENLTGEIVYQPDGSAYIIEDSKESGQNAQTGANSKLFSTAMFLDSLASAGEKSDQSASAPMSFYPQIINTFHIASSLGKPFTADQAFPNTSALAGVGPVLHSFRVYDLRHKREKDYLTSDGSAKNSCVSKDVPNNVDLSKFDGCVSDGKRKPVLMCFLCKLSFGYIRSFVTHAVHDHRMTLNDEEQKLLSNKCVSAIIQGIGKDKEPLISFLEPKKSTSVYPHFSTTNLIGPDPTFRGLWSAFHVENGDSLPAGFAFLKGSASTSSSAEQPLGITQMPKAEVNLGGLSSLVVNTPITSVSLSHSSSESSKMSESKDQENNCERPKESNVLHPNGECPVKSEPTEPGDEDEEDAYSNELDDEEVLGELTDSIGNKDFPLLNQSISPLSSSVLKFIEKGTSSSSATVSDDTEKKKQTAAVRASGSVASNYGISGKDFADASASKDSATAAHPSEIARGDEDSSATPHQHGFTPSTPGTPGPGGDGSPGSGIECPKCDTVLGSSRSLGGHMTMMHSRNSCKTLKCPKCNWHYKYQQTLEAHMKEKHPEPGGSCVYCKTGQPHPRLARGESYTCGYKPFRCEVCNYSTTTKGNLSIHMQSDKHLNNVQNLQNGNGEQVFGHSAPAPNTSLSGCGTPSPSKPKQKPTWRCEVCDYETNVARNLRIHMTSEKHMHNMMLLQQNMKQIQHNLHLGLAPAEAELYQYYLAQNIGLTGMKLENPADPQLMINPFQLDPATAAALAPGLGELSPYISDPALKLFQCAVCNKFTSDSLEALSVHVSSERSLPEEEWRAVIGDIYQCKLCNYNTQLKANFQLHCKTDKHMQKYQLVAHIKEGGKSNEWRLKCIAIGNPVHLKCNACDYYTNSVDKLRLHTTNHRHEAALKLYKHLQKQEGAVNPESCYYYCAVCDYTTKVKLNLVQHVRSVKHQQTEGLRKLQLHQQGLAPEEDNLSEIFFVKDCPPNELETASLGARTCDDDLTEQHEEAEGAIKPTAVAEDDEKDTSERDNSEGKNSNKDSVSVAGGTQPLLLAKEEDVATKRSKPTEDNKFCHEQFYQCPYCNYNSRDQSRIQMHVLSQHSVQPVICCPLCQDVLSNKMHLQLHLTHLHSVSPDCVEKLLMTVPVPDVMMPNSMLLPAAASEKSERDTPAAVTAEGSGKYSGESPMDDKSMAGLEDSKANVEVKNEEQKPTKEPLEVSEWNKNSSKDVKIPDTLQDQLNEQQKRQPLSVSDRHVYKYRCNHCSLAFKTMQKLQIHSQYHAIRAATMCNLCQRSFRTFQALKKHLEAGHPELSEAELQQLYASLPVNGELWAESETMSQDDHGLEQEMEREYEVDHEGKASPVGSDSSSIPDDMGSEPKRTLPFRKGPNFTMEKFLDPSRPYKCTVCKESFTQKNILLVHYNSVSHLHKLKKVLQEASSPVPQETNSNTDNKPYKCSICNVAYSQSSTLEIHMRSVLHQTKARAAKLEPSGHVAGGHSIAANVNSPGQGMLDSMSLAAVNSKDTHLDAKELNKKQTPDLISAQPAHHPPQSPAQIQMQLQHELQQQAAFFQPQFLNPAFLPHFPMTPEALLQFQQPQFLFPFYIPGTEFSLGPDLGLPGSATFGMPGMTGMAGSLLEDLKQQIQTQHHVGQTQLQILQQQAQQYQATQPQLQPQKQQQQPPPPQQQQQQQASKLLKQEQSNIVSADCQIMKDVPSYKEAEDISEKPEKPKQEFISEGEGLKEGKDTKKQKSLEPSIPPPRIASGARGNAAKALLENFGFELVIQYNENRQKVQKKGKSGEGENTDKLECGTCGKLFSNVLILKSHQEHVHGQFFPYAALEKFARQYREAYDKLYPISPSSPETPPPPPPPPPLPPAPPQPSSMGPVKIPNTVSTPLQAPPPTPPPPPPPPPPPPPPPPPPPPSAPPQVQLPVSLDLPLFPSIMMQPVQHPALPPQLALQLPQMDALSADLTQLCQQQLGLDPNFLRHSQFKRPRTRITDDQLKILRAYFDINNSPSEEQIQEMAEKSGLSQKVIKHWFRNTLFKERQRNKDSPYNFSNPPITVLEDIRIDPQPTSLEHYKSDASFSKRSSRTRFTDYQLRVLQDFFDTNAYPKDDEIEQLSTVLNLPTRVIVVWFQNARQKARKSYENQAETKDNEKRELTNERYIRTSNMQYQCKKCNVVFPRIFDLITHQKKQCYKDEDDDAQDESQTEDSMDATDQVVYKHCTVSGQTDAAKNAAAPAASSGSGTSTPLIPSPKPEPEKTSPKPEYPAEKPKQSDPSPPSQGTKPALPLASTSSDPPQASTAQPQPQPQPPKQPQLIGRPPSASQTPVPSSPLQISMTSLQNSLPPQLLQYQCDQCTVAFPTLELWQEHQHMHFLAAQNQFLHSPFLERPMDMPYMIFDPNNPLMTGQLLGSSLTQMPPQASSSHTTAPTTVAASLKRKLDDKEDNNCSEKEGGNSGEDQHRDKRLRTTITPEQLEILYEKYLLDSNPTRKMLDHIAREVGLKKRVVQVWFQNTRARERKGQFRAVGPAQSHKRCPFCRALFKAKSALESHIRSRHWNEGKQAGYSLPPSPLISTEDGGESPQKYIYFDYPSLPLTKIDLSSENELASTVSTPVSKTAELSPKNLLSPSSFKAECSEDVENLNAPPAEAGYDQNKTDFDETSSINTAISDATTGDEGNTEMESTTGSSGDVKPALSPKEPKTLDTLPKPATTPTTEVCDDKFLFSLTSPSIHFNDKDGDHDQSFYITDDPDDNADRSETSSIADPSSPNPFGSSNPFKSKSNDRPGHKRFRTQMSNLQLKVLKACFSDYRTPTMQECEMLGNEIGLPKRVVQVWFQNARAKEKKFKINIGKPFMINQGGTEGTKPECTLCGVKYSARLSIRDHIFSKQHISKVRETVGSQLDREKDYLAPTTVRQLMAQQELDRIKKASDVLGLTVQQPGMMDSSSLHGISLPTAYPGLPGLPPVLLPGMNGPSSLPGFPQNSNTLTPPGAGMLGFPTSATSSPALSLSSAPTKPLLQTPPPPPPPPPPPPSSSLSGQQTEQQNKESEKKQTKPNKVKKIKEEELEATKPEKHPKKEEKISSALSVLGKVVGETHVDPIQLQALQNAIAGDPASFIGGQFLPYFIPGFASYFTPQLPGTVQGGYFPPVCGMESLFPYGPTMPQTLAGLSPGALLQQYQQYQQNLQESLQKQQKQQQEQQQKPVQAKTSKVESDQPQNSNDASETKEDKSTATESTKEEPQLESKSADFSDTYVVPFVKYEFICRKCQMMFTDEDAAVNHQKSFCYFGQPLIDPQETVLRVPVSKYQCLACDVAISGNEALSQHLQSSLHKEKTIKQAMRNAKEHVRLLPHSVCSPNPNTTSTSQSAASSNNTYPHLSCFSMKSWPNILFQASARRAASPPSSPPSLSLPSTVTSSLCSTSGVQTSLPTESCSDESDSELSQKLEDLDNSLEVKAKPASGLDGNFNSIRMDMFSV

SEQ ID NO: 70237 - protein, 155 aa, Homo sapiens
METCDSPPISRQENGQSTSKLCGTTQLDNEVPEKVAGMEPDRENSSTDDNLKTDERKSEALLGFSVENAAATQVTSAKEIPCNECATSFPSLQKYMEHHCPNARLPVLKDDNESEISELEDSDVENLTGEIVYQPDGSAYIIEDSKESGQNAQTG

SEQ ID NO: 70238 - protein, 3590 aa, Homo sapiens
METCDSPPISRQENGQSTSKLCGTTQLDNEVPEKVAGMEPDRENSSTDDNLKTDERKSEALLGFSVENAAATQVTSAKEIPCNECATSFPSLQKYMEHHCPNARLPVLKDDNESEISELEDSDVENLTGEIVYQPDGSAYIIEDSKESGQNAQTGANSKLFSTAMFLDSLASAGEKSDQSASAPMSFYPQIINTFHIASSLGKPFTADQAFPNTSALAGVGPVLHSFRVYDLRHKREKDYLTSDGSAKNSCVSKDVPNNVDLSKFDGCVSDGKRKPVLMCFLCKLSFGYIRSFVTHAVHDHRMTLNDEEQKLLSNKCVSAIIQGIGKDKEPLISFLEPKKSTSVYPHFSTTNLIGPDPTFRGLWSAFHVENGDSLPAGFAFLKGSASTSSSAEQPLGITQMPKAEVNLGGLSSLVVNTPITSVSLSHSSSESSKMSESKDQENNCERPKESNVLHPNGECPVKSEPTEPGDEDEEDAYSNELDDEEVLGELTDSIGNKDFPLLNQSISPLSSSVLKFIEKGTSSSSATVSDDTEKKKQTAAVRASGSVASNYGISGKDFADASASKDSATAAHPSEIARGDEDSSATPHQHGFTPSTPGTPGPGGDGSPGSGIECPKCDTVLGSSRSLGGHMTMMHSRNSCKTLKCPKCNWHYKYQQTLEAHMKEKHPEPGGSCVYCKTGQPHPRLARGESYTCGYKPFRCEVCNYSTTTKGNLSIHMQSDKHLNNVQNLQNGNGEQVFGHSAPAPNTSLSGCGTPSPSKPKQKPTWRCEVCDYETNVARNLRIHMTSEKHMHNMMLLQQNMKQIQHNLHLGLAPAEAELYQYYLAQNIGLTGMKLENPADPQLMINPFQLDPATAAALAPGLGELSPYISDPALKLFQCAVCNKFTSDSLEALSVHVSSERSLPEEEWRAVIGDIYQCKLCNYNTQLKANFQLHCKTDKHMQKYQLVAHIKEGGKSNEWRLKCIAIGNPVHLKCNACDYYTNSVDKLRLHTTNHRHEAALKLYKHLQKQEGAVNPESCYYYCAVCDYTTKVKLNLVQHVRSVKHQQTEGLRKLQLHQQGLAPEEDNLSEIFFVKDCPPNELETASLGARTCDDDLTEQQLRSTSEEQSEEAEGAIKPTAVAEDDEKDTSERDNSEGKNSNKDSGIITPEKELKVSVAGGTQPLLLAKEEDVATKRSKPTEDNKFCHEQFYQCPYCNYNSRDQSRIQMHVLSQHSVQPVICCPLCQDVLSNKMHLQLHLTHLHSVSPDCVEKLLMTVPVPDVMMPNSMLLPAAASEKSERDTPAAVTAEGSGKYSGESPMDDKSMAGLEDSKANVEVKNEEQKPTKEPLEVSEWNKNSSKDVKIPDTLQDQLNEQQKRQPLSVSDRHVYKYRCNHCSLAFKTMQKLQIHSQYHAIRAATMCNLCQRSFRTFQALKKHLEAGHPELSEAELQQLYASLPVNGELWAESETMSQDDHGLEQEMEREYEVDHEGKASPVGSDSSSIPDDMGSEPKRTLPFRKGPNFTMEKFLDPSRPYKCTVCKESFTQKNILLVHYNSVSHLHKLKKVLQEASSPVPQETNSNTDNKPYKCSICNVAYSQSSTLEIHMRSVLHQTKARAAKLEPSGHVAGGHSIAANVNSPGQGMLDSMSLAAVNSKDTHLDAKELNKKQTPDLISAQPAHHPPQSPAQIQMQLQHELQQQAAFFQPQFLNPAFLPHFPMTPEALLQFQQPQFLFPFYIPGTEFSLGPDLGLPGSATFGMPGMTGMAGSLLEDLKQQIQTQHHVGQTQLQILQQQAQQYQATQPQLQPQKQQQQPPPPQQQQQQQASKLLKQEQSNIVSADCQIMKDVPSYKEAEDISEKPEKPKQEFISEGEGLKEGKDTKKQKSLEPSIPPPRIASGARGNAAKALLENFGFELVIQYNENRQKVQKKGKSGEGENTDKLECGTCGKLFSNVLILKSHQEHVHGQFFPYAALEKFARQYREAYDKLYPISPSSPETPPPPPPPPPLPPAPPQPSSMGPVKIPNTVSTPLQAPPPTPPPPPPPPPPPPPPPPPPPPSAPPQVQLPVSLDLPLFPSIMMQPVQHPALPPQLALQLPQMDALSADLTQLCQQQLGLDPNFLRHSQFKRPRTRITDDQLKILRAYFDINNSPSEEQIQEMAEKSGLSQKVIKHWFRNTLFKERQRNKDSPYNFSNPPITVLEDIRIDPQPTSLEHYKSDASFSKRSSRTRFTDYQLRVLQDFFDTNAYPKDDEIEQLSTVLNLPTRVIVVWFQNARQKARKSYENQAETKDNEKRELTNERYIRTSNMQYQCKKCNVVFPRIFDLITHQKKQCYKDEDDDAQDESQTEDSMDATDQVVYKHCTVSGQTDAAKNAAAPAASSGSGTSTPLIPSPKPEPEKTSPKPEYPAEKPKQSDPSPPSQGTKPALPLASTSSDPPQASTAQPQPQPQPPKQPQLIGRPPSASQTPVPSSPLQISMTSLQNSLPPQLLQYQCDQCTVAFPTLELWQEHQHMHFLAAQNQFLHSPFLERPMDMPYMIFDPNNPLMTGQLLGSSLTQMPPQASSSHTTAPTTVAASLKRKLDDKEDNNCSEKEGGNSGEDQHRDKRLRTTITPEQLEILYEKYLLDSNPTRKMLDHIAREVGLKKRVVQVWFQNTRARERKGQFRAVGPAQSHKRCPFCRALFKAKSALESHIRSRHWNEGKQAGYSLPPSPLISTEDGGESPQKYIYFDYPSLPLTKIDLSSENELASTVSTPVSKTAELSPKNLLSPSSFKAECSEDVENLNAPPAEAGYDQNKTDFDETSSINTAISDATTGDEGNTEMESTTGSSGDVKPALSPKEPKTLDTLPKPATTPTTEVCDDKFLFSLTSPSIHFNDKDGDHDQSFYITDDPDDNADRSETSSIADPSSPNPFGSSNPFKSKSNDRPGHKRFRTQMSNLQLKVLKACFSDYRTPTMQECEMLGNEIGLPKRVVQVWFQNARAKEKKFKINIGKPFMINQGGTEGTKPECTLCGVKYSARLSIRDHIFSKQHISKVRETVGSQLDREKDYLAPTTVRQLMAQQELDRIKKASDVLGLTVQQPGMMDSSSLHGISLPTAYPGLPGLPPVLLPGMNGPSSLPGFPQNSNTLTPPGAGMLGFPTSATSSPALSLSSAPTKPLLQTPPPPPPPPPPPPSSSLSGQQTEQQNKESEKKQTKPNKVKKIKEEELEATKPEKHPKKEEKISSALSVLGKVVGETHVDPIQLQALQNAIAGDPASFIGGQFLPYFIPGFASYFTPQLPGTVQGGYFPPVCGMESLFPYGPTMPQTLAGLSPGALLQQYQQYQQNLQESLQKQQKQQQEQQQKPVQAKTSKVESDQPQNSNDASETKEDKSTATESTKEEPQLESKSADFSDTYVVPFVKYEFICRKCQMMFTDEDAAVNHQKSFCYFGQPLIDPQETVLRVPVSKYQCLACDVAISGNEALSQHLQSSLHKEKTIKQAMRNAKEHVRLLPHSVCSPNPNTTSTSQSAASSNNTYPHLSCFSMKSWPNILFQASARRAASPPSSPPSLSLPSTVTSSLCSTSGVQTSLPTESCSDESDSELSQKLEDLDNSLEVKAKPASGLDGNFNSIRMDMFSV

SEQ ID NO: 70239 - protein, 155 aa, Homo sapiens; identical to SEQ ID NO: 70237

SEQ ID NO: 70240 - protein, 3616 aa, Homo sapiens
METCDSPPISRQENGQSTSKLCGTTQLDNEVPEKVAGMEPDRENSSTDDNLKTDERKSEALLGFSVENAAATQVTSAKEIPCNECATSFPSLQKYMEHHCPNARLPVLKDDNESEISELEDSDVENLTGEIVYQPDGSAYIIEDSKESGQNAQTGANSKLFSTAMFLDSLASAGEKSDQSASAPMSFYPQIINTFHIASSLGKPFTADQAFPNTSALAGVGPVLHSFRVYDLRHKREKDYLTSDGSAKNSCVSKDVPNNVDLSKFDGCVSDGKRKPVLMCFLCKLSFGYIRSFVTHAVHDHRMTLNDEEQKLLSNKCVSAIIQGIGKDKEPLISFLEPKKSTSVYPHFSTTNLIGPDPTFRGLWSAFHVENGDSLPAGFAFLKGSASTSSSAEQPLGITQMPKAEVNLGGLSSLVVNTPITSVSLSHSSSESSKMSESKDQENNCERPKESNVLHPNGECPVKSEPTEPGDEDEEDAYSNELDDEEVLGELTDSIGNKDFPLLNQSISPLSSSVLKFIEKGTSSSSATVSDDTEKKKQTAAVRASGSVASNYGISGKDFADASASKDSATAAHPSEIARGDEDSSATPHQHGFTPSTPGTPGPGGDGSPGSGIECPKCDTVLGSSRSLGGHMTMMHSRNSCKTLKCPKCNWHYKYQQTLEAHMKEKHPEPGGSCVYCKTGQPHPRLARGESYTCGYKPFRCEVCNYSTTTKGNLSIHMQSDKHLNNVQNLQNGNGEQVFGHSAPAPNTSLSGCGTPSPSKPKQKPTWRCEVCDYETNVARNLRIHMTSEKHMHNMMLLQQNMKQIQHNLHLGLAPAEAELYQYYLAQNIGLTGMKLENPADPQLMINPFQLDPATAAALAPGLVNNELPPEIRLASGQLMGDDLSLLTAGELSPYISDPALKLFQCAVCNKFTSDSLEALSVHVSSERSLPEEEWRAVIGDIYQCKLCNYNTQLKANFQLHCKTDKHMQKYQLVAHIKEGGKSNEWRLKCIAIGNPVHLKCNACDYYTNSVDKLRLHTTNHRHEAALKLYKHLQKQEGAVNPESCYYYCAVCDYTTKVKLNLVQHVRSVKHQQTEGLRKLQLHQQGLAPEEDNLSEIFFVKDCPPNELETASLGARTCDDDLTEQQLRSTSEEQSEEAEGAIKPTAVAEDDEKDTSERDNSEGKNSNKDSGIITPEKELKVSVAGGTQPLLLAKEEDVATKRSKPTEDNKFCHEQFYQCPYCNYNSRDQSRIQMHVLSQHSVQPVICCPLCQDVLSNKMHLQLHLTHLHSVSPDCVEKLLMTVPVPDVMMPNSMLLPAAASEKSERDTPAAVTAEGSGKYSGESPMDDKSMAGLEDSKANVEVKNEEQKPTKEPLEVSEWNKNSSKDVKIPDTLQDQLNEQQKRQPLSVSDRHVYKYRCNHCSLAFKTMQKLQIHSQYHAIRAATMCNLCQRSFRTFQALKKHLEAGHPELSEAELQQLYASLPVNGELWAESETMSQDDHGLEQEMEREYEVDHEGKASPVGSDSSSIPDDMGSEPKRTLPFRKGPNFTMEKFLDPSRPYKCTVCKESFTQKNILLVHYNSVSHLHKLKKVLQEASSPVPQETNSNTDNKPYKCSICNVAYSQSSTLEIHMRSVLHQTKARAAKLEPSGHVAGGHSIAANVNSPGQGMLDSMSLAAVNSKDTHLDAKELNKKQTPDLISAQPAHHPPQSPAQIQMQLQHELQQQAAFFQPQFLNPAFLPHFPMTPEALLQFQQPQFLFPFYIPGTEFSLGPDLGLPGSATFGMPGMTGMAGSLLEDLKQQIQTQHHVGQTQLQILQQQAQQYQATQPQLQPQKQQQQPPPPQQQQQQQASKLLKQEQSNIVSADCQIMKDVPSYKEAEDISEKPEKPKQEFISEGEGLKEGKDTKKQKSLEPSIPPPRIASGARGNAAKALLENFGFELVIQYNENRQKVQKKGKSGEGENTDKLECGTCGKLFSNVLILKSHQEHVHGQFFPYAALEKFARQYREAYDKLYPISPSSPETPPPPPPPPPLPPAPPQPSSMGPVKIPNTVSTPLQAPPPTPPPPPPPPPPPPPPPPPPPPSAPPQVQLPVSLDLPLFPSIMMQPVQHPALPPQLALQLPQMDALSADLTQLCQQQLGLDPNFLRHSQFKRPRTRITDDQLKILRAYFDINNSPSEEQIQEMAEKSGLSQKVIKHWFRNTLFKERQRNKDSPYNFSNPPITVLEDIRIDPQPTSLEHYKSDASFSKRSSRTRFTDYQLRVLQDFFDTNAYPKDDEIEQLSTVLNLPTRVIVVWFQNARQKARKSYENQAETKDNEKRELTNERYIRTSNMQYQCKKCNVVFPRIFDLITHQKKQCYKDEDDDAQDESQTEDSMDATDQVVYKHCTVSGQTDAAKNAAAPAASSGSGTSTPLIPSPKPEPEKTSPKPEYPAEKPKQSDPSPPSQGTKPALPLASTSSDPPQASTAQPQPQPQPPKQPQLIGRPPSASQTPVPSSPLQISMTSLQNSLPPQLLQYQCDQCTVAFPTLELWQEHQHMHFLAAQNQFLHSPFLERPMDMPYMIFDPNNPLMTGQLLGSSLTQMPPQASSSHTTAPTTVAASLKRKLDDKEDNNCSEKEGGNSGEDQHRDKRLRTTITPEQLEILYEKYLLDSNPTRKMLDHIAREVGLKKRVVQVWFQNTRARERKGQFRAVGPAQSHKRCPFCRALFKAKSALESHIRSRHWNEGKQAGYSLPPSPLISTEDGGESPQKYIYFDYPSLPLTKIDLSSENELASTVSTPVSKTAELSPKNLLSPSSFKAECSEDVENLNAPPAEAGYDQNKTDFDETSSINTAISDATTGDEGNTEMESTTGSSGDVKPALSPKEPKTLDTLPKPATTPTTEVCDDKFLFSLTSPSIHFNDKDGDHDQSFYITDDPDDNADRSETSSIADPSSPNPFGSSNPFKSKSNDRPGHKRFRTQMSNLQLKVLKACFSDYRTPTMQECEMLGNEIGLPKRVVQVWFQNARAKEKKFKINIGKPFMINQGGTEGTKPECTLCGVKYSARLSIRDHIFSKQHISKVRETVGSQLDREKDYLAPTTVRQLMAQQELDRIKKASDVLGLTVQQPGMMDSSSLHGISLPTAYPGLPGLPPVLLPGMNGPSSLPGFPQNSNTLTPPGAGMLGFPTSATSSPALSLSSAPTKPLLQTPPPPPPPPPPPPSSSLSGQQTEQQNKESEKKQTKPNKVKKIKEEELEATKPEKHPKKEEKISSALSVLGKVVGETHVDPIQLQALQNAIAGDPASFIGGQFLPYFIPGFASYFTPQLPGTVQGGYFPPVCGMESLFPYGPTMPQTLAGLSPGALLQQYQQYQQNLQESLQKQQKQQQEQQQKPVQAKTSKVESDQPQNSNDASETKEDKSTATESTKEEPQLESKSADFSDTYVVPFVKYEFICRKCQMMFTDEDAAVNHQKSFCYFGQPLIDPQETVLRVPVSKYQCLACDVAISGNEALSQHLQSSLHKEKTIKQAMRNAKEHVRLLPHSVCSPNPNTTSTSQSAASSNNTYPHLSCFSMKSWPNILFQASARRAASPPSSPPSLSLPSTVTSSLCSTSGVQTSLPTESCSDESDSELSQKLEDLDNSLEVKAKPASGLDGNFNSIRMDMFSV

SEQ ID NO: 70241 - protein, 140 aa, Homo sapiens
METCDSPPISRQENGQSTSKLCGTTQLDNEVPEKVAGMEPDRENSSTDDNLKTDERKSEALLGFSVENAAATQVTSAKEIPCNECATSFPSLQKYMEHHCPNARLPVLKDDNESEISELEDSDVENLTGEIVYQPDGSAY

SEQ ID NO: 70242 - protein, 101 aa, Homo sapiens
METCDSPPISRQENGQSTSKLCGTTQLDNEVPEKVAGMEPDRENSSTDDNLKTDERKSEALLGFSVENAAATQVTSAKEIPCNECATSFPSLQKYMEHHCP

SEQ ID NO: 70243 - protein, 750 aa, Homo sapiens
MEFVSGYRDEFLDFTALLFGWFRKFVAERGAVGTSLEGRCRQLEAQIRRLPQDPALWVLHVLPNHSVGISLGQGAEPGPGPGLGTAWLLGDNPPLHLRDLSPYISFVSLEDGEEGEEEEEEDEEEEKREDGGAGSTEKVEPEEDRELAPTSRESPQETNPPGESEEAAREAGGGKDGCREDRVENETRPQKRKGQRSEAAPLHVSCLLLVTDEHGTILGIDLLVDGAQGTASWGSGTKDLAPWAYALLCHSMACPMGSGDPRKPRQLTVGDARLHRELESLVPRLGVKLAKTPMRTWGPRPGFTFASLRARTCHVCHRHSFEAKLTPCPQCSAVLYCGEACLRADWQRCPDDVSHRFWCPRLAAFMERAGELATLPFTYTAEVTSETFNKEAFLASRGLTRGYWTQLSMLIPGPGFSRHPRGNTPSLSLLRGGDPYQLLQGDGTALMPPVPPHPPRGVFGSWQDYYTWRGLSLDSPIAVLLTYPLTVYYVITHLVPQSFPELNIQNKQSLKIHVVEAGKEFDLVMVFWELLVLLPHVALELQFVGDGLPPESDEQHFTLQRDSLEVSVRPGSGISARPSSGTKEKGGRRDLQIKVSARPYHLFQGPKPDLVIASPSSLSAGFNSGFALKDTWLRSLPRLQSLRVPAFFTESSEYSCVMDGQTMAVATGGGTSPPQPNPFRSPFRLRAADNCMSWYCNAFIFHLVYKPAQGSGARPAPGPPPPSPTPSAPPAPTRRRRGEKKPGRGARRRK

SEQ ID NO: 70244 - protein, 703 aa, Homo sapiens
MEFVSGYRDEFLDFTALLFGWFRKFVAERGAVGTSLEGRCRQLEAQIRRLPQDPALWVLHVLPNHSVGISLGQGAEPGPGPGLGTAWLLGDNPPLHLRDLSPYISFVSLEDGEEGEEEEEEDEEEEKREDGGAGSTEKVEPEEDRELAPTSRESPQETNPPGESEEAAREAGGGKDGCREDRVENETRPQKRKGQRSEAAPLHVSCLLLVTDEHGTILGIDLLVDGAQGTASWGSGTKDLAPWAYALLCHSMACPMGSGDPRKPRQLTVGDARLHRELESLVPRLGVKLAKTPMRTWGPRPGFTFASLRARTCHVCHRHSFEAKLTPCPQCSAVLYCGEACLRADWQRCPDDVSHRFWCPRLAAFMERAGELATLPFTYTAEVTSETFNKEAFLASRGLTRGYWTQLSMLIPGPGFSRHPRGNTPSLSLLRGGDPYQLLQGDGTALMPPVPPHPPRGVFVPELNIQNKQSLKIHVVEAGKEFDLVMVFWELLVLLPHVALELQFVGDGLPPESDEQHFTLQRDSLEVSVRPGSGISARPSSGTKEKGGRRDLQIKVSARPYHLFQGPKPDLVIGFNSGFALKDTWLRSLPRLQSLRVPAFFTESSEYSCVMDGQTMAVATGGGTSPPQPNPFRSPFRLRAADNCMSWYCNAFIFHLVYKPAQGSGARPAPGPPPPSPTPSAPPAPTRRRRGEKKPGRGARRRK

SEQ ID NO: 70245 - protein, 573 aa, Homo sapiens
MDAKSLTAWSRTLVTFKDVFVDFTREEWKLLDTAQQIVYRNVMLENYKNLVSLGYQLTKPDVILRLEKGEEPWLVEREIHQETHPDSETAFEIKSSVSSRSIFKDKQSCDIKMEGMARNDLWYLSLEEVWKCRDQLDKYQENPERHLRQVAFTQKKVLTQERVSESGKYGGNCLLPAQLVLREYFHKRDSHTKSLKHDLVLNGHQDSCASNSNECGQTFCQNIHLIQFARTHTGDKSYKCPDNDNSLTHGSSLGISKGIHREKPYECKECGKFFSWRSNLTRHQLIHTGEKPYECKECGKSFSRSSHLIGHQKTHTGEEPYECKECGKSFSWFSHLVTHQRTHTGDKLYTCNQCGKSFVHSSRLIRHQRTHTGEKPYECPECGKSFRQSTHLILHQRTHVRVRPYECNECGKSYSQRSHLVVHHRIHTGLKPFECKDCGKCFSRSSHLYSHQRTHTGEKPYECHDCGKSFSQSSALIVHQRIHTGEKPYECCQCGKAFIRKNDLIKHQRIHVGEETYKCNQCGIIFSQNSPFIVHQIAHTGEQFLTCNQCGTALVNTSNLIGYQTNHIRENAY

SEQ ID NO: 70246 - protein, 573 aa, Homo sapiens; identical to SEQ ID NO: 70245

SEQ ID NO: 70247 - protein, 72 aa, Homo sapiens
MDAKSLTAWSRTLVTFKDVFVDFTREEWKLLDTAQQIVYRNVMLENYKNLVSLGYQLTKPDVILRLEKGEEP

SEQ ID NO: 70248 - protein, 43 aa, Homo sapiens
MDAKSLTAWSRTLVTFKDVFVDFTREEWKLLDTAQQIVYRNVM

SEQ ID NO: 70249 - protein, 47 aa, Homo sapiens
MDAKSLTAWSRTLVTFKDVFVDFTREEWKLLDTAQQIVYRNVMLENY

SEQ ID NO: 70250 - protein, 542 aa, Homo sapiens
MDDPRYGMCPLKGASGCPGAERSLLVQSYFEKGPLTFRDVAIEFSLEEWQCLDSAQQGLYRKVMLENYRNLVFLAGIALTKPDLITCLEQGKEPWNIKRHEMVAKPPVICSHFPQDLWAEQDIKDSFQEAILKKYGKYGHDNLQLQKGCKSVDECKVHKEHDNKLNQCLITTQSNIFQCDPSAKVFHTFSNSNRHKIRHTRKKPFKCKKCEKSFCMLLHLTQHKRFHITENSYQCKDCGKAFNWFSTLTTHRRIHTGEKPYKCEECGKAFNRSSHLTTHKIIHTGEKPYRCEECGKAFNRSSHLTTHKRIHTGVKPYKCTECGKAFNRSSHLTTHRIIHTGEKPYKCEECGKAFNQSSTLTTHKITHAGEKPYKCEECGKAFYRFSYLTKHKTSHTGEKFYKCEECGKGFNWSSALTKHKRIHTGEKPYKCEECGKAFNESSNLTTHKMIHTGEKPYKCDECGKAFNRSSQLTAHKMIHTGEKPYKCEECGKAFNRSSTLTKHKITHTGEKSYKWEECGKDFNQSLSLIKQNNSYWRETLQM

SEQ ID NO: 70251 - protein, 436 aa, Homo sapiens
MDSVAFEDVAVNFTQEEWALLSPSQKNLYRDVTLETFRNLASVGIQWKDQDIENLYQNLGIKLRSLVERLCGRKEGNEHRETFSQIPDCHLNKKSQTGVKPCKCSVCGKVFLRHSFLDRHMRAHAGHKRSECGGEWRETPRKQKQHGKASISPSSGARRTVTPTRKRPYECKVCGKAFNSPNLFQIHQRTHTGKRSYKCREIVRAFTVSSFFRKHGKMHTGEKRYECKYCGKPIDYPSLFQIHVRTHTGEKPYKCKQCGKAFISAGYLRTHEIRSHALEKSHQCQECGKKLSCSSSLHRHERTHSGGKLYECQKCAKVFRCPTSLQAHERAHTGERPYECNKCGKTFNYPSCFRRHKKTHSGEKPYECTRCGKAFGWCSSLRRHEMTHTGEKPFDCKQCGKVFTFSNYLRLHERTHLAGRSQCFGRRQGDHLSPGV

SEQ ID NO: 70252 - protein, 436 aa, Homo sapiens; identical to SEQ ID NO: 70251

SEQ ID NO: 70253 - protein, 316 aa, Homo sapiens
MRAHAGHKRSECGGEWRETPRKQKQHGKASISPSSGARRTVTPTRKRPYECKVCGKAFNSPNLFQIHQRTHTGKRSYKCREIVRAFTVSSFFRKHGKMHTGEKRYECKYCGKPIDYPSLFQIHVRTHTGEKPYKCKQCGKAFISAGYLRTHEIRSHALEKSHQCQECGKKLSCSSSLHRHERTHSGGKLYECQKCAKVFRCPTSLQAHERAHTGERPYECNKCGKTFNYPSCFRRHKKTHSGEKPYECTRCGKAFGWCSSLRRHEMTHTGEKPFDCKQCGKVFTFSNYLRLHERTHLAGRSQCFGRRQGDHLSPGV

SEQ ID NO: 70254 - protein, 436 aa, Homo sapiens; identical to SEQ ID NO: 70251

SEQ ID NO: 70255 - protein, 783 aa, Homo sapiens
MVAKPPVMSFHFAQDLWPEQNIKDSFQKVTLRRYGKCEYENLQLRKGCKHVDECTGHKGGHNTVNQCLTATPSKIFQCNKYVKVFDKFSNSNRYKRRHTGNKHFKCKECSKSFCVLSQLTQHRRIHTRVNSYKCEECGKAFNWFSTLTKHKRIHTGEKPYKCEECGKAFNQSSQLTRHKIIHTEEKPNKCEECGKAFKQASHLTIHKIIHTGEKPYKYEECGKVFSQSSHLTTQKILHTGENLYKCKECGKAFNLFSNLTNHKRIHAGEKPYKCKECGRAFNISSNLNKQEKIHTGGKLNKCEECDKAFNRSLKLTAHKKILMEEKPYKCEECGKVFNQFSTLTRHKIIHTGEKPYKCKECGKAFNQSSNLTEHKKIHTAEKSYKCEECGKAFNQHSNLINHRKIYSGEKPYKCEECGKAFNRSSTLTRHKKIHTGEKPYKCEECDRAFSQSSNLTEHKKIHTGEKPYKCEECGKAFNRFSTLTKHKRIHTGEKPYKCEECGKAFNQSYQLTRHKIVHTKEKLNKCEEFGKAFKQSSHRTIHKIIHTGEKPYKCEEHGKVFNQSSNLTTQKIIHTGENLYKFEEHGKAFNLFSNITNHKIIYTGEKPHKCEECGKAYNRFSNLTIHKRIHTGEKPYQCAECGKAFNCSSTLNRHKIIHTGEKPYKCKECGKAFNLSSTLTAHKKIHTGEKPYKCEECGKAFNQSSNLTTHKKIHTSEKPYKCEECGKSFNQFSSLNIHKIIHTGEKPYKCGDYGRAFNLSSNLTTHKKIHTGEKPYKCEYGKT

SEQ ID NO: 70256 - protein, 91 aa, Homo sapiens
MVAKPPVMSFHFAQDLWPEQNIKDSFQKVTLRRYGKCEYENLQLRKGCKHVDECTGHKGGHNTVNQCLTATPSKIFQCNKYVKVFDKFSNS

SEQ ID NO: 70257 - protein, 783 aa, Homo sapiens; identical to SEQ ID NO: 70255

SEQ ID NO: 70258 - protein, 783 aa, Homo sapiens; identical to SEQ ID NO: 70255

SEQ ID NO: 70259 - protein, 150 aa, Homo sapiens
MVAKPPVMSFHFAQDLWPEQNIKDSFQKVTLRRYGKCEYENLQLRKGCKHVDECTGHKGGHNTVNQCLTATPSKIFQCNKYVKVFDKFSNSNRYKRRHTGNKHFKCKECSKSFCVLSQLTQHRRIHTRVNSYKCEECGKAIIICSDFTQH

SEQ ID NO: 70260 - protein, 417 aa, Homo sapiens
MSQDSVTFADVAVNFTKEEWTLLDPAQRNLYRDVMLENSRNLAFIDWATPCKTKDATPQPDILPKRTFPEANRVCLTSISSQHSTLREDWRCPKTEEPHRQGVNNVKPPAVAPEKDESPVSICEDHEMRNHSKPTCRLVPSQGDSIRQCILTRDSSIFKYNPVLNDSQKTHENNEDDGVLGWNIQWVPCGRKTELKSSTWTGSQNTVHHIRDEIDTGANRHQRNPFGKAFREDGSLRAHNTHGREKMYDFTQCENTSRNNSIHAMQMQLYTAETNKKDCQTGATSANAPNSGSHKSHCTGEKTHKCPECGRAFFYQSFLMRHMKIHTGEKPYECGKCGKAFRYSLHLNKHLRKHVVQKKPYECEECGKVIRESSKYTHIRSHTGEKPYKCKTCGKDFAKSSGLKKHLKTHKDEKPCE

SEQ ID NO: 70261 - protein, 417 aa, Homo sapiens; identical to SEQ ID NO: 70260

SEQ ID NO: 70262 - protein, 483 aa, Homo sapiens
MKRHEMVAKHLVMFYYFAQHLWPEQNIRDSFQKVTLRRYRKCGYENLQLRKGCKSVVECKQHKGDYSGLNQCLKTTLSKIFQCNKYVEVFHKISNSNRHKMRHTENKHFKCKECRKTFCMLSHLTQHKRIQTRVNFYKCEAYGRAFNWSSTLNKHKRIHTGEKPYKCKECGKAFNQTSHLIRHKRIHTEEKPYKCEECGKAFNQSSTLTTHNIIHTGEIPYKCEKCVRAFNQASKLTEHKLIHTGEKRYECEECGKAFNRSSKLTEHKYIHTGEKLYKCEECGKAFNQSSTLTTHKRIHSGEKPYKCEECGKAFKQFSNLTDHKKIHTGEKPYKCEECGKAFNQLSNLTRHKVIHTGEKPYKCGECGKAFNQSSALNTHKIIHTGENPHKCRESGKVFHLSSKLSTCKKIHTGEKLYKCEECGKAFNRSSTLIGHKRIHTGEKPYKCEECGKAFNQSSTLTTHKIIHTEEKQYKCDECGKAST

SEQ ID NO: 70263 - protein, 383 aa, Homo sapiens
MKRHEMVAKHLVMFYYFAQHLWPEQNIRDSFQKVTLRRYRKCGYENLQLRKGCKSVVECKQHKGDYSGLNQCLKTTLSKIFQCNKYVEVFHKISNSNRHKMRHTENKHFKCKECRKTFCMLSHLTQHKRIQTRVNFYKCEAYGRAFNWSSTLNKHKRIHTGEKPYKCKECGKAFNQTSHLIRHKRIHTEEKPYKCEECGKAFNQSSTLTTHNIIHTGEIPYKCEKCVRAFNQASKLTEHKLIHTGEKRYECEECGKAFNRSSKLTEHKYIHTGEKLYKCEECGKAFNQSSTLTTHKRIHSGEKPYKCEECGKAFKQFSNLTDHKKIHTGEKPYKCEECGKAFNQLSNLTRHKVIHTGEKPYKCGECGKANLSSTLTPHKTIHI

SEQ ID NO: 70264 - protein, 455 aa, Homo sapiens
MLENYSNLVSVGYHIIKPDVISKLEQGEEPWIVEGEFLLQSYPDEVWQTDDLIERIQEEENKPSRQTVFIETLIEERGNVPGKTFDVETNPVPSRKIAYKNSLCDSCEKCLTSVSEYISSDGSYARMKADECSGCGKSLLHIKLEKTHPGDQAYEFNQNGEPYTLNEESLYQKIRILEKPFEYIECQKAFQKDTVFVNHMEEKPYKWNGSEIAFLQMSDLTVHQTSHMEMKPYECSECGKSFCKKSKFIIHQRTHTGEKPYECNQCGKSFCQKGTLTVHQRTHTGEKPYECNECGKNFYQKLHLIQHQRTHSGEKPYECSYCGKSFCQKTHLTQHQRTHSGERPYVCHDCGPSRRSQHLMHQKIHTGVKLYKCSECGKCFCRKSTLTTHLRTHTGEKPYECNECGKFFSRLSYLTVHYRTHSGEKPYECNECGKTFYLNSALMRHQRVHTGEKPY

SEQ ID NO: 70265 - protein, 659 aa, Homo sapiens
MNKSLGPVSFKDVAVDFTQEEWQQLDPEQKITYRDVMLENYSNLVSVGYHIIKPDVISKLEQGEEPWIVEGEFLLQSYPDEVWQTDDLIERIQEEENKPSRQTVFIETLIEEREYISSDGSYARMKADECSGCGKSLLHIKLEKTHPGDQAYEFNQNGEPYTLNEESLYQKIRILEKPFEYIECQKAFQKDTVFVNHMEEKPYKWNGSEIAFLQMSDLTVHQTSHMEMKPYECSECGKSFCKKSKFIIHQRTHTGEKPYECNQCGKSFCQKGTLTVHQRTHTGEKPYECNECGKNFYQKLHLIQHQRTHSGEKPYECSYCGKSFCQKTHLTQHQRTHSGERPYVCHDCGKTFSQKSALNDHQKIHTGVKLYKCSECGKCFCRKSTLTTHLRTHTGEKPYECNECGKFFSRLSYLTVHYRTHSGEKPYECNECGKTFYLNSALMRHQRVHTGEKPYECNECGKLFSQLSYLTIHHRTHSGVKPYECSECGKTFYQNSALCRHRRIHKGEKPYECYICGKFFSQMSYLTIHHRIHSGEKPYECSECGKTFCQNSALNRHQRTHTGEKAYECYECGKCFSQMSYLTIHHRIHSGEKPFECNECGKAFSRMSYLTVHYRTHSGEKPYECTECGKKFYHKSAFNSHQRIHRRGNMNVIDVGRLL

SEQ ID NO: 70266 - protein, 755 aa, Homo sapiens
MRATALVRWTGRDLASRRAPATAIPPRPVGSGGAEAAEPQEDLPPLSQSSRFFQEQQKMNKSLGPVSFKDVAVDFTQEEWQQLDPEQKITYRDVMLENYSNLVSVGYHIIKPDVISKLEQGEEPWIVEGEFLLQSYPDEVWQTDDLIERIQEEENKPSRQTVFIETLIEERGNVPGKTFDVETNPVPSRKIAYKNSLCDSCEKCLTSVSEYISSDGSYARMKADECSGCGKSLLHIKLEKTHPGDQAYEFNQNGEPYTLNEESLYQKIRILEKPFEYIECQKAFQKDTVFVNHMEEKPYKWNGSEIAFLQMSDLTVHQTSHMEMKPYECSECGKSFCKKSKFIIHQRTHTGEKPYECNQCGKSFCQKGTLTVHQRTHTGEKPYECNECGKNFYQKLHLIQHQRTHSGEKPYECSYCGKSFCQKTHLTQHQRTHSGERPYVCHDCGKTFSQKSALNDHQKIHTGVKLYKCSECGKCFCRKSTLTTHLRTHTGEKPYECNECGKFFSRLSYLTVHYRTHSGEKPYECNECGKTFYLNSALMRHQRVHTGEKPYECNECGKLFSQLSYLTIHHRTHSGVKPYECSECGKTFYQNSALCRHRRIHKGEKPYECYICGKFFSQMSYLTIHHRIHSGEKPYECSECGKTFCQNSALNRHQRTHTGEKAYECYECGKCFSQMSYLTIHHRIHSGEKPFECNECGKAFSRMSYLTVHYRTHSGEKPYECTECGKKFYHKSAFNSHQRIHRRGNMNVIDVGRLL

SEQ ID NO: 70267 - protein, 697 aa, Homo sapiens
MNKSLGPVSFKDVAVDFTQEEWQQLDPEQKITYRDVMLENYSNLVSVGYHIIKPDVISKLEQGEEPWIVEGEFLLQSYPDEVWQTDDLIERIQEEENKPSRQTVFIETLIEERGNVPGKTFDVETNPVPSRKIAYKNSLCDSCEKCLTSVSEYISSDGSYARMKADECSGCGKSLLHIKLEKTHPGDQAYEFNQNGEPYTLNEESLYQKIRILEKPFEYIECQKAFQKDTVFVNHMEEKPYKWNGSEIAFLQMSDLTVHQTSHMEMKPYECSECGKSFCKKSKFIIHQRTHTGEKPYECNQCGKSFCQKGTLTVHQRTHTGEKPYECNECGKNFYQKLHLIQHQRTHSGEKPYECSYCGKSFCQKTHLTQHQRTHSGERPYVCHDCGKTFSQKSALNDHQKIHTGVKLYKCSECGKCFCRKSTLTTHLRTHTGEKPYECNECGKFFSRLSYLTVHYRTHSGEKPYECNECGKTFYLNSALMRHQRVHTGEKPYECNECGKLFSQLSYLTIHHRTHSGVKPYECSECGKTFYQNSALCRHRRIHKGEKPYECYICGKFFSQMSYLTIHHRIHSGEKPYECSECGKTFCQNSALNRHQRTHTGEKAYECYECGKCFSQMSYLTIHHRIHSGEKPFECNECGKAFSRMSYLTVHYRTHSGEKPYECTECGKKFYHKSAFNSHQRIHRRGNMNVIDVGRLL

SEQ ID NO: 70268 - protein, 390 aa, Homo sapiens
MAEIHNGGELCDFMENGEIFSEHSCLNAHMGTENTGDTYDCDEYGENFPMLHNSAPAGETLSVLNQCRKAFSLPPNVHQRTWIGDKSFEYSDCEEAFVDQSHLQANRITHNGETLYEQKQCGRAFTYSTSHAVSVKMHTVEKPYECKECGKFFRYSSYLNSHMRTHTGEKPYECKECGKCFTVSSHLVEHVRIHTGEKPYQCKECGRAFAGRSGLTKHVRIHTGEKPYECNECGKAYNRFYLLTEHFKTHTEEKPFECKVCGKSFRSSSCLKNHFRIHTGIKPYKCKECGKAFTVSSSLHNHVKIHTGEKPYECKDCGKAFATSSQLIEHIRTHTGEKPYICKECGKTFRASSHLQKHVRIHTGEKPYICNECGKAYNRFYLLTKHLKTH

SEQ ID NO: 70269 - protein, 343 aa, Homo sapiens
MAEIHNGGELCDFMENGEIFSEHSCLNAHMGTENTGDTYDCDEYGENFPMLHNSAPAGETLSVLNQCRKAFSLPPNVHQRTWIGDKSFEYSDCEEAFVDQSHLQANRITHNGETLYEQKQCGRAFTYSTSHAVSVKMHTVEKPYECKECGKFFRYSSYLNSHMRTHTGEKPYECKECGKCFTVSSHLVEHVRIHTGEKPYQCKECGRAFAGRSGLTKHVRIHTGEKPYECNECGKAYNRFYLLTEHFKTHTEEKPFECKVCGKSFRSSSCLKNHFRIHTGIKPYKCKECGKAFTVSSSLHNHVKIHTGEKPYECKDCGKAFATSSQLIEHIRTHTCNPSTLRG

SEQ ID NO: 70270 - protein, 289 aa, Homo sapiens
MSGHPGSWEMNSVAFEDVAVNFTQEEWALLDPSQKNLYRDVMQETFRNLASIGNKGEDQSIEDQYKNSSRNLSSFQIHQRNHTGEKPYECMECGKALGFSRSLNRHKRIHTGEKRYECKQCGKAFSRSSHLRDHERTHTGEKPYECKHCGKAFRYSNCLHYHERTHTGEKPYVCMECGKAFSCLSSLQGHIKAHAGEEPYPCKQCGKAFRYASSLQKHEKTHIAQKPYVCNNCGKGFRCSSSLRDHERTHTGEKPYECQKCGKAFSRASTLWKHKKTHTGEKPYKCKKM

SEQ ID NO: 70271 - protein, 312 aa, Homo sapiens [sequence omitted]

SEQ ID NO: 70272 - protein, 155 aa, Homo sapiens
MNALCVKNSSYHSSLHRHIISHSGNNPYGCEECGKKPCTCKQCQKTSLSVTRVHRDTVMHTGNGHYGCTICEKVFNIPSSFQIHQRNHTGEKPYECMECGKALGFSRSLNRHKRIHTGEKRYECKKCGKAFSRASTLWKHKKTHTGEKPYKCKKM

SEQ ID NO: 70273 - protein, 295 aa, Homo sapiens
MNALCVKNSSYHSSLHRHIISHSGNNPYGCEECGKKPCTCKQCQKTSLSVTRVHRDTVMHTGNGHYGCTICEKVFNIPSSFQIHQRNHTGEKPYECMECGKALGFSRSLNRHKRIHTGEKRYECKQCGKAFSRSSHLRDHERTHTGEKPYECKHCGKAFRYSNCLHYHERTHTGEKPYVCMECGKAFSCLSSLQGHIKAHAGEEPYPCKQCGKAFRYASSLQKHEKTHIAQKPYVCNNCGKGFRCSSSLRDHERTHTGEKPYECQKCGKAFSRASTLWKHKKTHTGEKPYKCKKM

SEQ ID NO: 70274 - protein, 73 aa, Homo sapiens
MSGHPGSWEMNSVAFEDVAVNFTQEEWALLDPSQKNLYRDVMQETFRNLASIGNKGEDQSIEDQYKNSSRNLR

SEQ ID NO: 70275 - protein, 589 aa, Homo sapiens
MEAEETMECLQEFPEHHKMILDRLNEQREQDRFTDITLIVDGHHFKAHKAVLAACSKFFYKFFQEFTQEPLVEIEGVSKMAFRHLIEFTYTAKLMIQGEEEANDVWKAAEFLQMLEAIKALEVRNKENSAPLEENTTGKNEAKKRKIAETSNVITESLPSAESEPVEIEVEIAEGTIEVEDEGIETLEEVASAKQSVKYIQSTGSSDDSALALLADITSKYRQGDRKGQIKEDGCPSDPTSKQEHMKSHSTESFKCEICNKRYLRESAWKQHLNCYHLEEGGVSKKQRTGKKIHVCQYCEKQFDHFGHFKEHLRKHTGEKPFECPNCHERFARNSTLKCHLTACQTGVGAKKGRKKLYECQVCNSVFNSWDQFKDHLVIHTGDKPNHCTLCDLWFMQGNELRRHLSDAHNISERLVTEEVLSVETRVQTEPVTSMTIIEQVGKVHVLPLLQVQVDSAQVTVEQVHPDLLQDSQVHDSHMSELPEQVQVSYLEVGRIQTEEGTEVHVEELHVERVNQMPVEVQTELLEADLDHVTPEIMNQEERESSQADAAEAAREDHEDAEDLETKPTVDSEAEKAENEDRTALPVLE

SEQ ID NO: 70276 - protein, 623 aa, Homo sapiens
MEAEETMECLQEFPEHHKMILDRLNEQREQDRFTDITLIVDGHHFKAHKAVLAACSKFFYKFFQEFTQEPLVEIEGVSKMAFRHLIEFTYTAKLMIQGEEEANDVWKAAEFLQMLEAIKALEVRNKENSAPLEENTTGKNEAKKRKIAETSNVITESLPSAESEPVEIEVEIAEGTIEVEDEGIETLEEVASAKQSVKYIQSTGSSDDSALALLADITSKYRQGDRKGQIKEDGCPSDPTSKQVEGIEIVELQLSHVKDLFHCEKCNRSFKLFYHFKEHMKSHSTESFKCEICNKRYLRESAWKQHLNCYHLEEGGVSKKQRTGKKIHVCQYCEKQFDHFGHFKEHLRKHTGEKPFECPNCHERFARNSTLKCHLTACQTGVGAKKGRKKLYECQVCNSVFNSWDQFKDHLVIHTGDKPNHCTLCDLWFMQGNELRRHLSDAHNISERLVTEEVLSVETRVQTEPVTSMTIIEQVGKVHVLPLLQVQVDSAQVTVEQVHPDLLQDSQVHDSHMSELPEQVQVSYLEVGRIQTEEGTEVHVEELHVERVNQMPVEVQTELLEADLDHVTPEIMNQEERESSQADAAEAAREDHEDAEDLETKPTVDSEAEKAENEDRTALPVLE

SEQ ID NO: 70277 - protein, 589 aa, Homo sapiens; identical to SEQ ID NO: 70275

SEQ ID NO: 70278 - protein, 151 aa, Homo sapiens
MEAEETMECLQEFPEHHKMILDRLNEQREQDRFTDITLIVDGHHFKAHKAVLAACSKFFYKFFQEFTQEPLVEIEGVSKMAFRHLIEFTYTAKLMIQGEEEANDVWKAAEFLQMLEAIKALEVRNKENSAPLEENTTGKNEAKKRKIAETS

SEQ ID NO: 70279 - protein, 623 aa, Homo sapiens; identical to SEQ ID NO: 70276

SEQ ID NO: 70280 - protein, 139 aa, Homo sapiens
MEAEETMECLQEFPEHHKMILDRLNEQREQDRFTDITLIVDGHHFKAHKAVLAACSKFFYKFFQEFTQEPLVEIEGVSKMAFRHLIEFTYTAKLMIQGEEEANDVWKAAEFLQMLEAIKALEVRNKENSAPLEENTTGK

SEQ ID NO: 70281 - protein, 589 aa, Homo sapiens; identical to SEQ ID NO: 70275

SEQ ID NO: 70282 - protein, 265 aa, Homo sapiens
MEAEETMECLQEFPEHHKMILDRLNEQREQDRFTDITLIVDGHHFKAHKAVLAACSKFFYKFFQEFTQEPLVEIEGVSKMAFRHLIEFTYTAKLMIQGEEEANDVWKAAEFLQMLEAIKALEVRNKENSAPLEENTTGKNEAKKRKIAETSNVITESLPSAESEPVEIEVEIAEGTIEVEDEGIETLEEVASAKQSVKYIQSTGSSDDSALALLADITSKYRQGDRKGQIKEDGCPSDPTSKQEHMKSHSTESFKCEICNKRYLR

SEQ ID NO: 70283 - protein, 706 aa, Homo sapiens
MALPSPQVLMGLPALLMGPAQHTSWPCGSAVPTLKSMVTFEDVAVYFSQEEWELLDAAQRHLYHSVMLENLELVTSLGSWHGVEGEGAHPKQNVSVEVLQVRIPNADPSTKKANSCDMCGPFLKDILHLAEHQGTQSEEKPYTCGACGRDFWLNANLHQHQKEHSGGKPFRWYKDRDALMKSSKVHLSENPFTCREGGKVILGSCDLLQLQAVDSGQKPYSNLGQLPEVCTTQKLFECSNCGKAFLKSSTLPNHLRTHSEEIPFTCPTGGNFLEEKSILGNKKFHTGEIPHVCKECGKAFSHSSKLRKHQKFHTEVKYYECIACGKTFNHKLTFVHHQRIHSGERPYECDECGKAFSNRSHLIRHEKVHTGERPFECLKCGRAFSQSSNFLRHQKVHTQVRPYECSQCGKSFSRSSALIQHWRVHTGERPYECSECGRAFNNNSNLAQHQKVHTGERPFECSECGRDFSQSSHLLRHQKVHTGERPFECCDCGKAFSNSSTLIQHQKVHTGQRPYECSECRKSFSRSSSLIQHWRIHTGEKPYECSECGKAFAHSSTLIEHWRVHTKERPYECNECGKFFSQNSILIKHQKVHTGEKPYKCSECGKFFSRKSSLICHWRVHTGERPYECSECGRAFSSNSHLVRHQRVHTQERPYECIQCGKAFSERSTLVRHQKVHTRERTYECSQCGKLFSHLCNLAQHKKIHT

SEQ ID NO: 70284 - protein, 396 aa, Homo sapiens
PTLKSMVTFEDVAVYFSQEEWELLDAAQRHLYHSVMLENLELVTSLGNALSQHVCLFPIESSVHPKARSWVLLPSRVSCCRCWGAEVLLGVEGEGAHPKQNVSVEVLQHQKEHSGGKPFRWYKDSSGQKPYSNLGQLPEVCTTQKLFECSNCGKAFLKSSTLPNHLRTHSEEIPFTCPTGGNFLEEKSILGNKKFHTGEIPHVCKECGKAFSHSSKLRKHQKFHTEVRPYECSQCGKSFSRSSALIQHWRIHTGEKPYECSECGKAFAHSSTLIEHWRVHTKERPYECNECGKFFSQNSILIKHQKVHTGEKPYKCSECGKFFSRKSSLICHWRVHTGERPYECSECGRAFSSNSHLVRHQRVHTQERPYECIQCGKAFSERSTLVRHQKVHTRER

SEQ ID NO: 70285 - protein, 654 aa, Homo sapiens
MAFRDVAVDFTQDEWRLLSPAQRTLYREVMLENYSNLVSLGISFSKPELITQLEQGKETWREEKKCSPATCPADPEPELYLDPFCPPGFSSQKFPMQHVLCNHPPWIFTCLCAEGNIQPGDPGPGDQEKQQQASEGRPWSDQAEGPEGEGAMPLFGRTKKRTLGAFSRPPQRQPVSSRNGLRGVELEASPAQSGNPEETDKLLKRIEVLGFGTVNCGECGLSFSKMTNLLSHQRIHSGEKPYVCGVCEKGFSLKKSLARHQKAHSGEKPIVCRECGRGFNRKSTLIIHERTHSGEKPYMCSECGRGFSQKSNLIIHQRTHSGEKPYVCRECGKGFSQKSAVVRHQRTHLEEKTIVCSDCGLGFSDRSNLISHQRTHSGEKPYACKECGRCFRQRTTLVNHQRTHSKEKPYVCGVCGHSFSQNSTLISHRRTHTGEKPYVCGVCGRGFSLKSHLNRHQNIHSGEKPIVCKDCGRGFSQQSNLIRHQRTHSGEKPMVCGECGRGFSQKSNLVAHQRTHSGERPYVCRECGRGFSHQAGLIRHKRKHSREKPYMCRQCGLGFGNKSALITHKRAHSEEKPCVCRECGQGFLQKSHLTLHQMTHTGEKPYVCKTCGRGFSLKSHLSRHRKTTSVHHRLPVQPDPEPCAGQPSDSLYSL

SEQ ID NO: 70286 - protein, 99 aa, Homo sapiens
MAFRDVAVDFTQDEWRLLSPAQRTLYREVMLENYSNLVSLGISFSKPELITQLEQGKETWREEKKCSPATCPDHQEYGNNCDLQKEADPEPELYLDPFC

SEQ ID NO: 70287 - protein, 653 aa, Homo sapiens
MAFRDVAVDFTQDEWRLLSPAQRTLYREVMLENYSNLVSLGISFSKPELITQLEQGKETWREEKKCSPATCPDPEPELYLDPFCPPGFSSQKFPMQHVLCNHPPWIFTCLCAEGNIQPGDPGPGDQEKQQQASEGRPWSDQAEGPEGEGAMPLFGRTKKRTLGAFSRPPQRQPVSSRNGLRGVELEASPAQSGNPEETDKLLKRIEVLGFGTVNCGECGLSFSKMTNLLSHQRIHSGEKPYVCGVCEKGFSLKKSLARHQKAHSGEKPIVCRECGRGFNRKSTLIIHERTHSGEKPYMCSECGRGFSQKSNLIIHQRTHSGEKPYVCRECGKGFSQKSAVVRHQRTHLEEKTIVCSDCGLGFSDRSNLISHQRTHSGEKPYACKECGRCFRQRTTLVNHQRTHSKEKPYVCGVCGHSFSQNSTLISHRRTHTGEKPYVCGVCGRGFSLKSHLNRHQNIHSGEKPIVCKDCGRGFSQQSNLIRHQRTHSGEKPMVCGECGRGFSQKSNLVAHQRTHSGERPYVCRECGRGFSHQAGLIRHKRKHSREKPYMCRQCGLGFGNKSALITHKRAHSEEKPCVCRECGQGFLQKSHLTLHQMTHTGEKPYVCKTCGRGFSLKSHLSRHRKTTSVHHRLPVQPDPEPCAGQPSDSLYSL

SEQ ID NO: 70288 - protein, 657 aa, Homo sapiens
MAHMAFRDVAVDFTQDEWRLLSPAQRTLYREVMLENYSNLVSLGISFSKPELITQLEQGKETWREEKKCSPATCPADPEPELYLDPFCPPGFSSQKFPMQHVLCNHPPWIFTCLCAEGNIQPGDPGPGDQEKQQQASEGRPWSDQAEGPEGEGAMPLFGRTKKRTLGAFSRPPQRQPVSSRNGLRGVELEASPAQSGNPEETDKLLKRIEVLGFGTVNCGECGLSFSKMTNLLSHQRIHSGEKPYVCGVCEKGFSLKKSLARHQKAHSGEKPIVCRECGRGFNRKSTLIIHERTHSGEKPYMCSECGRGFSQKSNLIIHQRTHSGEKPYVCRECGKGFSQKSAVVRHQRTHLEEKTIVCSDCGLGFSDRSNLISHQRTHSGEKPYACKECGRCFRQRTTLVNHQRTHSKEKPYVCGVCGHSFSQNSTLISHRRTHTGEKPYVCGVCGRGFSLKSHLNRHQNIHSGEKPIVCKDCGRGFSQQSNLIRHQRTHSGEKPMVCGECGRGFSQKSNLVAHQRTHSGERPYVCRECGRGFSHQAGLIRHKRKHSREKPYMCRQCGLGFGNKSALITHKRAHSEEKPCVCRECGQGFLQKSHLTLHQMTHTGEKPYVCKTCGRGFSLKSHLSRHRKTTSVHHRLPVQPDPEPCAGQPSDSLYSL

SEQ ID NO: 70289 - protein, 654 aa, Homo sapiens; identical to SEQ ID NO: 70285

SEQ ID NO: 70290 - protein, 591 aa, Homo sapiens
MCNGRKTVLADPEPELYLDPFCPPGFSSQKFPMQHVLCNHPPWIFTCLCAEGNIQPGDPGPGDQEKQQQASEGRPWSDQAEGPEGEGAMPLFGRTKKRTLGAFSRPPQRQPVSSRNGLRGVELEASPAQSGNPEETDKLLKRIEVLGFGTVNCGECGLSFSKMTNLLSHQRIHSGEKPYVCGVCEKGFSLKKSLARHQKAHSGEKPIVCRECGRGFNRKSTLIIHERTHSGEKPYMCSECGRGFSQKSNLIIHQRTHSGEKPYVCRECGKGFSQKSAVVRHQRTHLEEKTIVCSDCGLGFSDRSNLISHQRTHSGEKPYACKECGRCFRQRTTLVNHQRTHSKEKPYVCGVCGHSFSQNSTLISHRRTHTGEKPYVCGVCGRGFSLKSHLNRHQNIHSGEKPIVCKDCGRGFSQQSNLIRHQRTHSGEKPMVCGECGRGFSQKSNLVAHQRTHSGERPYVCRECGRGFSHQAGLIRHKRKHSREKPYMCRQCGLGFGNKSALITHKRAHSEEKPCVCRECGQGFLQKSHLTLHQMTHTGEKPYVCKTCGRGFSLKSHLSRHRKTTSVHHRLPVQPDPEPCAGQPSDSLYSL

SEQ ID NO: 70291 - protein, 179 aa, Homo sapiens
MAFRDVAVDFTQDEWRLLSPAQRTLYREVMLENYSNLVSLGISFSKPELITQLEQGKETWREEKKCSPATCPADPEPELYLDPFCPPGFSSQKFPMQHVLCNHPPWIFTCLCAEGNIQPGDPGPGDQEKQQQASEGRPWSDQAEGPEGEGAMPLFGRTKKRTLGAFSRPPQRQPVSSRN

SEQ ID NO: 70292 - protein, 143 aa, Homo sapiens
MAFRDVAVDFTQDEWRLLSPAQRTLYREVMLENYSNLVSLGISFSKPELITQLEQGKETWREEKKCSPATCPADPEPELYLDPFCPPGFSSQKFPMQHVLCNHPPWIFTCLCAEGNIQPGDPGPGDQEKQQQASEGRPWSDQA

SEQ ID NO: 70293 - protein, 559 aa, Homo sapiens
MQHVLCNHPPWIFTCLCAEGNIQPGDPGPGDQEKQQQASEGRPWSDQAEGPEGEGAMPLFGRTKKRTLGAFSRPPQRQPVSSRNGLRGVELEASPAQSGNPEETDKLLKRIEVLGFGTVNCGECGLSFSKMTNLLSHQRIHSGEKPYVCGVCEKGFSLKKSLARHQKAHSGEKPIVCRECGRGFNRKSTLIIHERTHSGEKPYMCSECGRGFSQKSNLIIHQRTHSGEKPYVCRECGKGFSQKSAVVRHQRTHLEEKTIVCSDCGLGFSDRSNLISHQRTHSGEKPYACKECGRCFRQRTTLVNHQRTHSKEKPYVCGVCGHSFSQNSTLISHRRTHTGEKPYVCGVCGRGFSLKSHLNRHQNIHSGEKPIVCKDCGRGFSQQSNLIRHQRTHSGEKPMVCGECGRGFSQKSNLVAHQRTHSGERPYVCRECGRGFSHQAGLIRHKRKHSREKPYMCRQCGLGFGNKSALITHKRAHSEEKPCVCRECGQGFLQKSHLTLHQMTHTGEKPYVCKTCGRGFSLKSHLSRHRKTTSVHHRLPVQPDPEPCAGQPSDSLYSL

SEQ ID NO: 70294 - protein, 559 aa, Homo sapiens; identical to SEQ ID NO: 70293

SEQ ID NO: 70295 - protein, 427 aa, Homo sapiens
MTLVTAGGAWTGPGCWHEVKDEESSSEQSISIAVSHVNTSKAGLPAQTALPCDICGPILKDILHLDEHQGTHHGLKLHTCGACGRQFWFSANLHQYQKCYSIEQPLRRDKSEASIVKNCTVSKEPHPSEKPFTCKEEQKNFQATLGGCQQKAIHSKRKTHRSTESGDAFHGEQMHYKCSECGKAFSRKDTLVQHQRIHSGEKPYECSECGKAFSRKATLVQHQRIHTGERPYECSECGKTFSRKDNLTQHKRIHTGEMPYKCNECGKYFSHHSNLIVHQRVHNGARPYKCSDCGKVFRHKSTLVQHESIHTGENPYDCSDCGKSFGHKYTLIKHQRIHTESKPFECIECGKFFSRSSDYIAHQRVHTGERPFVCSKCGKDFIRTSHLVRHQRVHTGERPYECSECGKAYSLSSHLNRHQKVHTAGRL

SEQ ID NO: 70296 - protein, 494 aa, Homo sapiens
LRWNHRSRSSGLLGGSEVTEAGGCGRSRCSLCGVARQRRPRLRPRGRTTAVPGSRDLGPPRGSGWSTNCDGGGRGDGPGAGCWHEVKDEESSSEQSISIAVSHVNTSKAGLPAQTALPCDICGPILKDILHLDEHQGTHHGLKLHTCGACGRQFWFSANLHQYQKCYSIEQPLRRDKSEASIVKNCTVSKEPHPSEKPFTCKEEQKNFQATLGGCQQKAIHSKRKTHRSTESGDAFHGEQMHYKCSECGKAFSRKDTLVQHQRIHSGEKPYECSECGKAFSRKATLVQHQRIHTGERPYECSECGKTFSRKDNLTQHKRIHTGEMPYKCNECGKYFSHHSNLIVHQRVHNGARPYKCSDCGKVFRHKSTLVQHESIHTGENPYDCSDCGKSFGHKYTLIKHQRIHTESKPFECIECGKFFSRSSDYIAHQRVHTGERPFVCSKCGKDFIRTSHLVRHQRVHTGERPYECSECGKAYSLSSHLNRHQKVHTAGRL

SEQ ID NO: 70297 - protein, 347 aa, Homo sapiens
MWGMWETILVQCLHQYQKCYSIEQPLRRDKSEASIVKNCTVSKEPHPSEKPFTCKEEQKNFQATLGGCQQKAIHSKRKTHRSTESGDAFHGEQMHYKCSECGKAFSRKDTLVQHQRIHSGEKPYECSECGKAFSRKATLVQHQRIHTGERPYECSECGKTFSRKDNLTQHKRIHTGEMPYKCNECGKYFSHHSNLIVHQRVHNGARPYKCSDCGKVFRHKSTLVQHESIHTGENPYDCSDCGKSFGHKYTLIKHQRIHTESKPFECIECGKFFSRSSDYIAHQRVHTGERPFVCSKCGKDFIRTSHLVRHQRVHTGERPYECSECGKAYSLSSHLNRHQKVHTAGRL

SEQ ID NO: 70298 - protein, 658 aa, Homo sapiens
MTPGVRVSTDPEQVTFEDVVVGFSQEEWGQLKPAQRTLYRDVMLDTFRLLVSVGHWLPKPNVISLLEQEAELWAVESRLPQGVYPDLETRPKVKLSVLKQGISEEISNSVILVERFLWDGLWYCRGEDTEGHWEWSCESLESLAVPVAFTPVKTPVLEQWQRNGFGENISLNPDLPHQPMTPERQSPHTWGTRGKREKPDLNVLQKTCVKEKPYKCQECGKAFSHSSALIEHHRTHTGERPYECHECLKGFRNSSALTKHQRIHTGEKPYKCTQCGRTFNQIAPLIQHQRTHTGEKPYECSECGKSFSFRSSFSQHERTHTGEKPYECSECGKAFRQSIHLTQHLRIHTGEKPYQCGECGKAFSHSSSLTKHQRIHTGEKPYECHECGKAFTQITPLIQHQRTHTGEKPYECGECGKAFSQSTLLTEHRRIHTGEKPYGCNECGKTFSHSSSLSQHERTHTGEKPYECSQCGKAFRQSTHLTQHQRIHTGEKPYECNDCGKAFSHSSSLTKHQRIHTGEKPYECNQCGRAFSQLAPLIQHQRIHTGEKPYECNQCGRAFSQSSLLIEHQRIHTKEKPYGCNECGKSFSHSSSLSQHERTHTGEKPYECHDCGKSFRQSTHLTQHRRIHTGEKPYACRDCGKAFTHSSSLTKHQRTHTG

SEQ ID NO: 70299 - protein, 390 aa, Homo sapiens
MELGSRRRSVGCRCRGLCLAVRREQVTFEDVVVGFSQEEWGQLKPAQRTLYRDVMLDTFRLLVSVGHWLPKPNVISLLEQEAELWAVESRLPQGVYPDLETRPKVKLSVLKQGISEEISNSVILVERFLWDGLWYCRGEDTEGHWEWSCESLESLAVPVAFTPVKTPVLEQWQRNGFGENISLNPDLPHQPMTPERQSPHTWGTRGKREKPDLNVLQKTCVKEKPYKCQECGKAFSHSSALIEHHRTHTGERPYECHECLKGFRNSSALTKHQRIHTGEKPYKCTQCGRTFNQIAPLIQHQRTHTGEKPYECSECGKSFSFRSSFSQHERTHTGEKPYECSECGKAFRQSIHLTQHLRIHTGEKPYQCGECGKAFTHSSSLTKHQRTHTG

SEQ ID NO: 70300 - protein, 682 aa, Homo sapiens
MELGSRRRSVGCRCRGLCLAVRREQVTFEDVVVGFSQEEWGQLKPAQRTLYRDVMLDTFRLLVSVGHWLPKPNVISLLEQEAELWAVESRLPQGVYPEIKGHFQFLLLSDLETRPKVKLSVLKQGISEEISNSVILVERFLWDGLWYCRGEDTEGHWEWSCESLESLAVPVAFTPVKTPVLEQWQRNGFGENISLNPDLPHQPMTPERQSPHTWGTRGKREKPDLNVLQKTCVKEKPYKCQECGKAFSHSSALIEHHRTHTGERPYECHECLKGFRNSSALTKHQRIHTGEKPYKCTQCGRTFNQIAPLIQHQRTHTGEKPYECSECGKSFSFRSSFSQHERTHTGEKPYECSECGKAFRQSIHLTQHLRIHTGEKPYQCGECGKAFSHSSSLTKHQRIHTGEKPYECHECGKAFTQITPLIQHQRTHTGEKPYECGECGKAFSQSTLLTEHRRIHTGEKPYGCNECGKTFSHSSSLSQHERTHTGEKPYECSQCGKAFRQSTHLTQHQRIHTGEKPYECNDCGKAFSHSSSLTKHQRIHTGEKPYECNQCGRAFSQLAPLIQHQRIHTGEKPYECNQCGRAFSQSSLLIEHQRIHTKEKPYGCNECGKSFSHSSSLSQHERTHTGEKPYECHDCGKSFRQSTHLTQHRRIHTGEKPYACRDCGKAFTHSSSLTKHQRTHTG

SEQ ID NO: 70301 - protein, 658 aa, Homo sapiens; identical to SEQ ID NO: 70298

SEQ ID NO: 70302 - protein, 616 aa, Homo sapiens
MLDTFRLLVSVGHWLPKPNVISLLEQEAELWAVESRLPQGVYPDLETRPKVKLSVLKQGISEEISNSVILVERFLWDGLWYCRGEDTEGHWEWSCESLESLAVPVAFTPVKTPVLEQWQRNGFGENISLNPDLPHQPMTPERQSPHTWGTRGKREKPDLNVLQKTCVKEKPYKCQECGKAFSHSSALIEHHRTHTGERPYECHECLKGFRNSSALTKHQRIHTGEKPYKCTQCGRTFNQIAPLIQHQRTHTGEKPYECSECGKSFSFRSSFSQHERTHTGEKPYECSECGKAFRQSIHLTQHLRIHTGEKPYQCGECGKAFSHSSSLTKHQRIHTGEKPYECHECGKAFTQITPLIQHQRTHTGEKPYECGECGKAFSQSTLLTEHRRIHTGEKPYGCNECGKTFSHSSSLSQHERTHTGEKPYECSQCGKAFRQSTHLTQHQRIHTGEKPYECNDCGKAFSHSSSLTKHQRIHTGEKPYECNQCGRAFSQLAPLIQHQRIHTGEKPYECNQCGRAFSQSSLLIEHQRIHTKEKPYGCNECGKSFSHSSSLSQHERTHTGEKPYECHDCGKSFRQSTHLTQHRRIHTGEKPYACRDCGKAFTHSSSLTKHQRTHTG

SEQ ID NO: 70303 - protein, 670 aa, Homo sapiens
MTPGVRVSTDPEQVTFEDVVVGFSQEEWGQLKPAQRTLYRDVMLDTFRLLVSVGHWLPKPNVISLLEQEAELWAVESRLPQGVYPEIKGHFQFLLLSDLETRPKVKLSVLKQGISEEISNSVILVERFLWDGLWYCRGEDTEGHWEWSCESLESLAVPVAFTPVKTPVLEQWQRNGFGENISLNPDLPHQPMTPERQSPHTWGTRGKREKPDLNVLQKTCVKEKPYKCQECGKAFSHSSALIEHHRTHTGERPYECHECLKGFRNSSALTKHQRIHTGEKPYKCTQCGRTFNQIAPLIQHQRTHTGEKPYECSECGKSFSFRSSFSQHERTHTGEKPYECSECGKAFRQSIHLTQHLRIHTGEKPYQCGECGKAFSHSSSLTKHQRIHTGEKPYECHECGKAFTQITPLIQHQRTHTGEKPYECGECGKAFSQSTLLTEHRRIHTGEKPYGCNECGKTFSHSSSLSQHERTHTGEKPYECSQCGKAFRQSTHLTQHQRIHTGEKPYECNDCGKAFSHSSSLTKHQRIHTGEKPYECNQCGRAFSQLAPLIQHQRIHTGEKPYECNQCGRAFSQSSLLIEHQRIHTKEKPYGCNECGKSFSHSSSLSQHERTHTGEKPYECHDCGKSFRQSTHLTQHRRIHTGEKPYACRDCGKAFTHSSSLTKHQRTHTG

SEQ ID NO: 70304 - protein, 676 aa, Homo sapiens
  VARIANT 1: note = MOD_RES - Any amino acid
XRSVGCRCRGLCLAVRREQVTFEDVVVGFSQEEWGQLKPAQRTLYRDVMLDTFRLLVSVGHWLPKPNVISLLEQEAELWAVESRLPQGVYPEIKGHFQFLLLSDLETRPKVKLSVLKQGISEEISNSVILVERFLWDGLWYCRGEDTEGHWEWSCESLESLAVPVAFTPVKTPVLEQWQRNGFGENISLNPDLPHQPMTPERQSPHTWGTRGKREKPDLNVLQKTCVKEKPYKCQECGKAFSHSSALIEHHRTHTGERPYECHECLKGFRNSSALTKHQRIHTGEKPYKCTQCGRTFNQIAPLIQHQRTHTGEKPYECSECGKSFSFRSSFSQHERTHTGEKPYECSECGKAFRQSIHLTQHLRIHTGEKPYQCGECGKAFSHSSSLTKHQRIHTGEKPYECHECGKAFTQITPLIQHQRTHTGEKPYECGECGKAFSQSTLLTEHRRIHTGEKPYGCNECGKTFSHSSSLSQHERTHTGEKPYECSQCGKAFRQSTHLTQHQRIHTGEKPYECNDCGKAFSHSSSLTKHQRIHTGEKPYECNQCGRAFSQLAPLIQHQRIHTGEKPYECNQCGRAFSQSSLLIEHQRIHTKEKPYGCNECGKSFSHSSSLSQHERTHTGEKPYECHDCGKSFRQSTHLTQHRRIHTGEKPYACRDCGKAFTHSSSLTKHQRTHTG

SEQ ID NO: 70305 - protein, 540 aa, Homo sapiens
MDSVAFEDVDVNFTQEEWALLDPSQKNLYRDVMWETMRNLASIGKKWKDQNIKDHYKHRGRNLRSHMLERLYQTKDGSQRGGIFSQFANQNLSKKIPGVKLCESIVYGEVSMGQSSLNRHIKDHSGHEPKEYQEYGEKPDTRNQCWKPFSSHHSFRTHEIIHTGEKLYDCKECGKTFFSLKRIRRHIITHSGYTPYKCKVCGKAFDYPSRFRTHERSHTGEKPYECQECGKAFTCITSVRRHMIKHTGDGPYKCKVCGKPFHSLSSFQVHERIHTGEKPFKCKQCGKAFSCSPTLRIHERTHTGEKPYECKQCGKAFSYLPSLRLHERIHTGEKPFVCKQCGKAFRSASTFQIHERTHTGEKPYECKECGEAFSCIPSMRRHMIKHTGEGPYKCKVCGKPFHSLSPFRIHERTHTGEKPYVCKHCGKAFVSSTSIRIHERTHTGEKPYECKQCGKAFSYLNSFRTHEMIHTGEKPFECKRCGKAFRSSSSFRLHERTHTGQKPYHCKECGKAYSCRASFQRHMLTHAEDGPPYKCMWESL

SEQ ID NO: 70306 - protein, 474 aa, Homo sapiens
MLERLYQTKDGSQRGGIFSQFANQNLSKKIPGVKLCESIVYGEVSMGQSSLNRHIKDHSGHEPKEYQEYGEKPDTRNQCWKPFSSHHSFRTHEIIHTGEKLYDCKECGKTFFSLKRIRRHIITHSGYTPYKCKVCGKAFDYPSRFRTHERSHTGEKPYECQECGKAFTCITSVRRHMIKHTGDGPYKCKVCGKPFHSLSSFQVHERIHTGEKPFKCKQCGKAFSCSPTLRIHERTHTGEKPYECKQCGKAFSYLPSLRLHERIHTGEKPFVCKQCGKAFRSASTFQIHERTHTGEKPYECKECGEAFSCIPSMRRHMIKHTGEGPYKCKVCGKPFHSLSPFRIHERTHTGEKPYVCKHCGKAFVSSTSIRIHERTHTGEKPYECKQCGKAFSYLNSFRTHEMIHTGEKPFECKRCGKAFRSSSSFRLHERTHTGQKPYHCKECGKAYSCRASFQRHMLTHAEDGPPYKCMWESL

SEQ ID NO: 70307 - protein, 319 aa, Homo sapiens
MGPLTFMDVAIEFSLEEWQCLDTAQRNVYRHVMLENYRNLVFLDLITCLEQGKEPWNMKRHEMVVAKHSALCSRFAQDLWLEQNIKDSFQKVTLSRYGKYGHKNLQLRKGCKSVDECKGHQGGFNGLNQCLKITTSKIFQCNKYVKVMHKFSNSNRHKIRHTENKHFRCKECDKSLCMLSRLTQHKKIHTRENFYKCEECGKTFNWSTNLSKPKKIHTGEKPYKCEVCGKAFHQSSILTKHKIIRTGEKPYKCAHCGKAFKQSSHLTRHKIIHTEEKPYKCEQCGKVFKQSPTLTKHQIIYTGEEPYKCEECGKAFNLS

SEQ ID NO: 70308 - protein, 262 aa, Homo sapiens
MKRHEMVVAKHSALCSRFAQDLWLEQNIKDSFQKVTLSRYGKYGHKNLQLRKGCKSVDECKGHQGGFNGLNQCLKITTSKIFQCNKYVKVMHKFSNSNRHKIRHTENKHFRCKECDKSLCMLSRLTQHKKIHTRENFYKCEECGKTFNWSTNLSKPKKIHTGEKPYKCEVCGKAFHQSSILTKHKIIRTGEKPYKCAHCGKAFKQSSHLTRHKIIHTEEKPYKCEQCGKVFKQSPTLTKHQIIYTGEEPYKCEECGKAFNLS

SEQ ID NO: 70309 - protein, 262 aa, Homo sapiens; identical to SEQ ID NO: 70308

SEQ ID NO: 70310 - protein, 287 aa, Homo sapiens
MDVAIEFSLEEWQCLDTAQRNVYRHVMLENYRNLVFLALCSRFAQDLWLEQNIKDSFQKVTLSRYGKYGHKNLQLRKGCKSVDECKGHQGGFNGLNQCLKITTSKIFQCNKYVKVMHKFSNSNRHKIRHTENKHFRCKECDKSLCMLSRLTQHKKIHTRENFYKCEECGKTFNWSTNLSKPKKIHTGEKPYKCEVCGKAFHQSSILTKHKIIRTGEKPYKCAHCGKAFKQSSHLTRHKIIHTEEKPYKCEQCGKVFKQSPTLTKHQIIYTGEEPYKCEECGKAFNLS

SEQ ID NO: 70311 - protein, 293 aa, Homo sapiens
MGPLTFMDVAIEFSLEEWQCLDTAQRNVYRHVMLENYRNLVFLALCSRFAQDLWLEQNIKDSFQKVTLSRYGKYGHKNLQLRKGCKSVDECKGHQGGFNGLNQCLKITTSKIFQCNKYVKVMHKFSNSNRHKIRHTENKHFRCKECDKSLCMLSRLTQHKKIHTRENFYKCEECGKTFNWSTNLSKPKKIHTGEKPYKCEVCGKAFHQSSILTKHKIIRTGEKPYKCAHCGKAFKQSSHLTRHKIIHTEEKPYKCEQCGKVFKQSPTLTKHQIIYTGEEPYKCEECGKAFNLS

SEQ ID NO: 70312 - protein, 126 aa, Homo sapiens
MGPLTFMDVAIEFSLEEWQCLDTAQRNVYRHVMLENYRNLVFLDLITCLEQGKEPWNMKRHEMVVAKHSAVAFTFDLSGLNILSFQSILPFVSALYVMGNRNQCLQKHLEARNKDLCVLVLPKTFG

SEQ ID NO: 70313 - protein, 642 aa, Homo sapiens
MDSVSFEDVAVNFTLEEWALLDSSQKKLYEDVMQETFKNLVCLGKKWEDQDIEDDHRNQGKNRRCHMVERLCESRRGSKCGETTSQMPNVNINKETFTGAKPHECSFCGRDFIHHSSLNRHMRSHTGQKPNEYQEYEKQPCKCKAVGKTFSYHHCFRKHERTHTGVKPYECKQCGKAFIYYQPFQRHERTHAGQKPYECKQCGKTFIYYQSFQKHAHTGKKPYECKQCGKAFICYQSFQRHKRTHTGEKPYECKQCGKAFSCPTYFRTHERTHTGEKPYKCKECGKAFSFLSSFRRHKRTHSGEKPYECKECGKAFFYSASFRAHVIIHTGARPYKCKECGKAFNSSNSCRVHERTHIGEKPYECKRCGKSFSWSISLRLHERTHTGEKPYECKQCHKTFSFSSSLREHETTHTGEKPYECKQCGKTFSFSSSLQRHERTHNAEKPYECKQCGKAFRCSSYFRIHERSHTGEKPYECKQCGKVFIRSSSFRLHERTHTGEKPYECKLCGKTFSFSSSLREHEKIHTGNKPFECKQCGKAFLRSSQIRLHERTHTGEKPYQCKQCGKAFISSSKFRMHERTHTGEKPYRCKQCGKAFRFSSSVRIHERSHTGEKPYECKQCGKAFISSSHFRLHERTHMGEKV

SEQ ID NO: 70314 - protein, 457 aa, Homo sapiens
MSQGSVTFRDVAIDFSQEEWKWLQPAQRDLYRCVMLENYGHLVSLGLSISKPDVVSLLEQGKEPWLGKREVKRDLFSVSESSGEIKDFSPKNVIYDDSSQYLIMERILSQGPVYSSFKGGWKCKDHTEMLQENQGCIRKVTVSHQEALAQHMNISTVERPYGCHECGKTFGRRFSLVLHQRTHTGEKPYACKECGKTFSQISNLVKHQMIHTGKKPHECKDCNKTFSYLSFLIEHQRTHTGEKPYECTECGKAFSRASNLTRHQRIHIGKKQYICRKCGKAFSSGSELIRHQITHTGEKPYECIECGKAFRRFSHLTRHQSIHTTKTPYECNECRKAFRCHSFLIKHQRIHAGEKLYECDECGKVFTWHASLIQHTKSHTGEKPYACAECDKAFSRSFSLILHQRTHTGEKPYVCKVCNKSFSWSSNLAKHQRTHTLDNPYEYENSFNYHSFLTEHQ

SEQ ID NO: 70315 - protein, 116 aa, Homo sapiens
MSQGSVTFRDVAIDFSQEEWKWLQPAQRDLYRCVMLENYGHLVSLGLSISKPDVVSLLEQGKEPWLGKREVKRDLFSVSESSGEIKDFSPKNVIYDDSSQYLIMERILSQGPVYSS

SEQ ID NO: 70316 - protein, 227 aa, Homo sapiens
THTGEKPYACKECGKTFSQISNLVKHQMIHTGKKPHECKDCNKTFSYLSFLIEHQRTHTGEKPYECTECGKAFSRASNLTRHQRIHIGKKQYICRKCGKAFSSGSELIRHQITHTGEKPYECIECGKAFRRFSHLTRHQRIHAGEKLYECDECGKVFTWHASLIQHTKSHTGEKPYACAECDKAFSRSFSLILHQRTHTGEKPYVCKVCNKSFSWSSNLAKHQRTHT

SEQ ID NO: 70317 - protein, 354 aa, Homo sapiens
MERILSQGPVYSSFKGGWKCKDHTEMLQENQGCIRKVTVSHQEALAQHMNISTVERPYGCHECGKTFGRRFSLVLHQRTHTGEKPYACKECGKTFSQISNLVKHQMIHTGKKPHECKDCNKTFSYLSFLIEHQRTHTGEKPYECTECGKAFSRASNLTRHQRIHIGKKQYICRKCGKAFSSGSELIRHQITHTGEKPYECIECGKAFRRFSHLTRHQSIHTTKTPYECNECRKAFRCHSFLIKHQRIHAGEKLYECDECGKVFTWHASLIQHTKSHTGEKPYACAECDKAFSRSFSLILHQRTHTGEKPYVCKVCNKSFSWSSNLAKHQRTHTLDNPYEYENSFNYHSFLTEHQ

SEQ ID NO: 70318 - protein, 474 aa, Homo sapiens
MELLTFRDVAIEFSPEEWKCLDPDQQNLYRDVMLENYRNLVSLGVAISNPDLVTCLEQRKEPYNVKIHKIVARPPAMCSHFTQDHWPVQGIEDSFHKLILRRYEKCGHDNLQLRKGCKSLNECKLQKGGYNEFNECLSTTQSKILQCKASVKVVSKFSNSNKRKTRHTGEKHFKECGKSFQKFSHLTQHKVIHAGEKPYTCEECGKAFKWSLIFNEHKRIHTGEKPFTCEECGSIFTTSSHFAKHKIIHTGEKPYKCEECGKAFNRFTTLTKHKRIHAGEKPITCEECRKIFTSSSNFAKHKRIHTGEKPYKCEECGKAFNRSTTLTKHKRIHTGEKPYTCEECGKAFRQSSKLNEHKKVHTGERPYKCDECGKAFGRSRVLNEHKKIHTGEKPYKCEECGKAFRRSTDRSQHKKIHSADKPYKCKECDKAFKQFSLLSQHKKIHTVDKPYKCKDCDKAFKRFSHLNKHKKIHT

SEQ ID NO: 70319 - protein, 201 aa, Homo sapiens
MELLTFRDVAIEFSPEEWKCLDPDQQNLYRDVMLENYRNLVSLGVAISNPDLVTCLEQRKEPYNVKIHKIVARPPAMCSHFTQDHWPVQGIEDSFHKLILRRYEKCGHDNLQLRKGCKSLNECKLQKGGYNEFNECLSTTQSKILQCKASVKVVSKFSNSNKRKTRHTGEKHFKECGKSFQKFSHLTQHKNSSISMTTSPF

SEQ ID NO: 70320 - protein, 1687 aa, Homo sapiens
MTDPLLDSQPASSTGEMDGLCPELLLIPPPLSNRGILGPVQSPCPSRDPAPIPTEPGCLLVEATATEEGPGNMEIIVETVAGTLTPGAPGETPAPKLPPGEREPSQEAGTPLPGQETAEEENVEKEEKSDTQKDSQKAVDKGQGAQRLEGDVVSGTESLFKTHMCPECKRCFKKRTHLVEHLHLHFPDPSLQCPNCQKFFTSKSKLKTHLLRELGEKAHHCPLCHYSAVERNALNRHMASMHEDISNFYSDTYACPVCREEFRLSQALKEHLKSHTAAAAAEPLPLRCFQEGCSYAAPDRKAFIKHLKETHGVRAVECRHHSCPMLFATAEAMEAHHKSHYAFHCPHCDFACSNKHLFRKHKKQGHPGSEELRCTFCPFATFNPVAYQDHVGKMHAHEKIHQCPECNFATAHKRVLIRHMLLHTGEKPHKCELCDFTCRDVSYLSKHMLTHSNTKDYMCTECGYVTKWKHYLRVHMRKHAGDLRYQCNQCSYRCHRADQLSSHKLRHQGKSLMCEVCAFACKRKYELQKHMASQHHPGTPAPLYPCHYCSYQSRHKQAVLSHENCKHTRLREFHCALCDYRTFSNTTLLFHKRKAHGYVPGDQAWQLRYASQEPEGAMQGPTPPPDSEPSNQLSARPEGPGHEPGTVVDPSLDQALPEMSEEVNTGRQEGSEAPHGGDLGGSPSPAEVEEGSCTLHLEALGVELESVTEPPLEEVTETAPMEFRPLGLEGPDGLEGPELSSFEGIGTSDLSAEENPLLEKPVSEPSTNPPSLEEAPNNWVGTFKTTPPAETAPLPPLPESESLLKALRRQDKEQAEALVLEGRVQMVVIQGEGRAFRCPHCPFITRREKALNLHSRTGCQGRREPLLCPECGASFKQQRGLSTHLLKKCPVLLRKNKGLPRPDSPIPLQPVLPGTQASEDTESGKPPPASQEAELLLPKDAPLELPREPEETEEPLATVSGSPVPPAGNSLPTEAPKKHCFDPVPPAGNSSPTEAPKKHHLDPVPPAGNSSPTEALKKHRFEQGKFHCNSCPFLCSRLSSITSHVAEGCRGGRGGGGKRGTPQTQPDVSPLSNGDSAPPKNGSTESSSGDGDTVLVQKQKGARFSCPTCPFSCQQERALRTHQIRGCPLEESGELHCSLCPFTAPAATALRLHQKRRHPTAAPARGPRPHLQCGDCGFTCKQSRCMQQHRRLKHEGVKPHQCPFCDFSTTRRYRLEAHQSRHTGIGRIPCSSCPQTFGTNSKLRLHRLRVHDKTPTHFCPLCDYSGYLRHDITRHVNSCHQGTPAFACSQCEAQFSSETALKQHALRRHPEPAQPAPGSPAETTEGPLHCSRCGLLCPSPASLRGHTRKQHPRLECGACQEAFPSRLALDEHRRQQHFSHRCQLCDFAARERVGLVKHYLEQHEETSAAVAASDGDGDAGQPPLHCPFCDFTCRHQLVLDHHVKGHGGTRLYKCTDCAYSTKNRQKITWHSRIHTGEKPYHCHLCPYACADPSRLKYHMRIHKEERKYLCPECGYKCKWVNQLKYHMTKHTGLKPYQCPECEYCTNRADALRVHQETRHREARAFMCEQCGKAFKTRFLLRTHLRKHSEAKPYVCNVCHRAFRWAAGLRHHALTHTDRHPFFCRLCNYKAKQKFQVVKHVRRHHPDQADPNQGVGKDPTTPTVHLHDVQLEDPSPPAPAAPHTGPEG

SEQ ID NO: 70321 - protein, 14 aa, Homo sapiens
MTDPLLDSQPASST

SEQ ID NO: 70322 - protein, 1687 aa, Homo sapiens; identical to SEQ ID NO: 70320

SEQ ID NO: 70323 - protein, 26 aa, Homo sapiens
MTDPLLDSQPASSTGEMDGLCPELLL

SEQ ID NO: 70324 - protein, 607 aa, Homo sapiens
MLLAQINRDSQGMTEFPGGGMEAQHVTLCLTEAVTVADAKLIDGQVIQLEDGSAAYVQHVPIPKSTGDSLRLEDGQAVQLEDGTTAFIHHTSKDSYDQSALQAVQLEDGTTAYIHHAVQVPQSDTILAIQADGTVAGLHTGDATIDPDTISALEQYAAKVSIDGSESVAGTGMIGENEQEKKMQIVLQGHATRVTAKSQQSGEKAFRCEYDGCGKLYTTAHHLKVHERSHTGDRPYQCEHAGCGKAFATGYGLKSHVRTHTGEKPYRCSEDNCTKSFKTSGDLQKHIRTHTGERPFKCPFEGCGRSFTTSNIRKVHVRTHTGERPYYCTEPGCGRAFASATNYKNHVRIHTGEKPYVCTVPGCDKRFTEYSSLYKHHVVHTHSKPYNCNHCGKTYKQISTLAMHKRTAHNDTEPIEEEQEAFFEPPPGQGEDVLKGSQITYVTGVEGDDVVSTQVATVTQSGLSQQVTLISQDGTQHVNISQADMQAIGNTITMVTQDGTPITVPAHDAVISSAGTHSVAMVTAEGTEGEQVAIVAQDLAAFHTASSEMGHQQHSHHLVTTETRPLTLVATSNGTQIAVQLGEQPSLEEAIRIASRIQQGETPGLDD

SEQ ID NO: 70325 - protein, 638 aa, Homo sapiens
MLLAQINRDSQGMTEFPGGGMEAQHVTLCLTEAVTVADGDNLENMEGVSLQAVTLADGSTAYIQHNSKDAKLIDGQVIQLEDGSAAYVQHVPIPKSTGDSLRLEDGQAVQLEDGTTAFIHHTSKDSYDQSALQAVQLEDGTTAYIHHAVQVPQSDTILAIQADGTVAGLHTGDATIDPDTISALEQYAAKVSIDGSESVAGTGMIGENEQEKKMQIVLQGHATRVTAKSQQSGEKAFRCEYDGCGKLYTTAHHLKVHERSHTGDRPYQCEHAGCGKAFATGYGLKSHVRTHTGEKPYRCSEDNCTKSFKTSGDLQKHIRTHTGERPFKCPFEGCGRSFTTSNIRKVHVRTHTGERPYYCTEPGCGRAFASATNYKNHVRIHTGEKPYVCTVPGCDKRFTEYSSLYKHHVVHTHSKPYNCNHCGKTYKQISTLAMHKRTAHNDTEPIEEEQEAFFEPPPGQGEDVLKGSQITYVTGVEGDDVVSTQVATVTQSGLSQQVTLISQDGTQHVNISQADMQAIGNTITMVTQDGTPITVPAHDAVISSAGTHSVAMVTAEGTEGEQVAIVAQDLAAFHTASSEMGHQQHSHHLVTTETRPLTLVATSNGTQIAVQLGEQPSLEEAIRIASRIQQGETPGLDD

SEQ ID NO: 70326 - protein, 142 aa, Homo sapiens
MLLAQINRDSQGMTEFPGGGMEAQHVTLCLTEAVTVADGDNLENMEGVSLQAVTLADGSTAYIQHNSKDAKLIDGQVIQLEDGSAAYVQHVPIPKSRDSLRLEDGQAVQLEDGTTAFIHHTSKDSYDQSALQAVQLEDGTTA

SEQ ID NO: 70327 - protein, 84 aa, Homo sapiens
MLLAQINRDSQGMTEFPGGGMEAQHVTLCLTEAVTVADGDNLENMEGVSLQAVTLADGSTAYIQHNSKDAKLIDGQVIQLEDGS

SEQ ID NO: 70328 - protein, 73 aa, Homo sapiens
MLLAQINRDSQGMTEFPGGGMEAQHVTLCLTEAVTVADGDNLENMEGVSLQAVTLADGSTAYIQHNSKDAKLI

SEQ ID NO: 70329 - protein, 190 aa, Homo sapiens
MLLAQINRDSQGMTEFPGGGMEAQHVTLCLTEAVTVADGDNLENMEGVSLQAVTLADGSTAYIQHNSKDAKLIDGQVIQLEDGSAAYVQHVPIPKSTGDSLRLEDGQAVQLEDGTTAFIHHTSKDSYDQSALQAVQLEDGTTAYIHHAVQVPQSDTILAIQADGTVAGLHTGDATIDPDTISALEQYAAK

SEQ ID NO: 70330 - protein, 136 aa, Homo sapiens
MLLAQINRDSQGMTEFPGGGMEAQHVTLCLTEAVTVADGDNLENMEGVSLQAVTLADGSTAYIQHNSKDAKLIDGQVIQLEDGSAAYVQHVPIPKSTGDSLRLEDGQAVQLEDGTTAFIHHTSKDSYDQSALQAVQ

SEQ ID NO: 70331 - protein, 175 aa, Homo sapiens
MLLAQINRDSQGMTEFPGGGMEAQHVTLCLTEAVTVADGDNLENMEGVSLQAVTLADGSTAYIQHNSKDAKLIDGQVIQLEDGSAAYVQHVPIPKSTGDSLRLEDGQAVQLEDGTTAFIHHTSKDSYDQSALQAVQLEDGTTAYIHHAVQVPQSDTILAIQADGTVAGLHTGDAT

SEQ ID NO: 70332 - protein, 292 aa, Homo sapiens
MSHLSQQRIYSGENPFACKVCGKVFSHKSNLTEHEHFHTREKPFECNECGKAFSQKQYVIKHQNTHTGEKLFECNECGKSFSQKENLLTHQKIHTGEKPFECKDCGKAFIQKSNLIRHQRTHTGEKPFVCKECGKTFSGKSNLTEHEKIHIGEKPFKCSECGTAFGQKKYLIKHQNIHTGEKPYECNECGKAFSQRTSLIVHVRIHSGDKPYECNVCGKAFSQSSSLTVHVRSHTGEKPYGCNECGKAFSQFSTLALHLRIHTGKKPYQCSECGKAFSQKSHHIRHQKIHTH

SEQ ID NO: 70333 - protein, 292 aa, Homo sapiens; identical to SEQ ID NO: 70332

SEQ ID NO: 70334 - protein, 794 aa, Homo sapiens
MNIDDKLEGLFLKCGGIDEMQSSRTMVVMGGVSGQSTVSGELQDSVLQDRSMPHQEILAADEVLQESEMRQQDMISHDELMVHEETVKNDEEQMETHERLPQGLQYALNVPISVKQEITFTDVSEQLMRDKKQIREPVDLQKKKKRKQRSPAKILTINEDGSLGLKTPKSHVCEHCNAAFRTNYHLQRHVFIHTGEKPFQCSQCDMRFIQKYLLQRHEKIHTGEKPFRCDECGMRFIQKYHMERHKRTHSGEKPYQCEYCLQYFSRTDRVLKHKRMCHENHDKKLNRCAIKGGLLTSEEDSGFSTSPKDNSLPKKKRQKTEKKSSGMDKESALDKSDLKKDKNDYLPLYSSSTKVKDEYMVAEYAVEMPHSSVGGSHLEDASGEIHPPKLVLKKINSKRSLKQPLEQNQTISPLSTYEESKVSKYAFELVDKQALLDSEGNADIDQVDNLQEGPSKPVHSSTNYDDAMQFLKKKRYLQAASNNSREYALNVGTIASQPSVTQAAVASVIDESTTASILESQALNVEIKSNHDKNVIPDEVLQTLLDHYSHKANGQHEISFSVADTEVTSSISINSSEVPEVTPSENVGSSSQASSSDKANMLQEYSKFLQQALDRTSQNDAYLNSPSLNFVTDNQTLPNQPAFSSIDKQVYATMPINSFRSGMNSPLRTTPDKSHFGLIVGDSQHSFPFSGDETNHASATSTQDFLDQVTSQKKAEAQPVHQAYQMSSFEQPFRAPYHGSRAGIATQFSTANGQVNLRGPGTSAEFSEFPLVNVNDNRAGMTSSPDATTGQTFG

SEQ ID NO: 70335 - protein, 83 aa, Homo sapiens
MNIDDKLEGLFLKCGGIDEMQSSRTMVVMGGVSGQSTVSGELQDSVLQDRSMPHQEILAADEVLQESEMRQQDMISHDELMVH

SEQ ID NO: 70336 - protein, 144 aa, Homo sapiens
MKGEKPFQCSQCDMRFIQKYLLQRHEKIHTGEKPFRCDECGDETNHASATSTQDFLDQVTSQKKAEAQPVHQAYQMSSFEQPFRAPYHGSRAGIATQFSTANGQVNLRGPGTSAEFSEFPLVNVNDNRAGMTSSPDATTGQTFG

SEQ ID NO: 70337 - protein, 25 aa, Homo sapiens
MNIDDKLEGLFLKCGGIDEMQSSRT

SEQ ID NO: 70338 - protein, 794 aa, Homo sapiens; identical to SEQ ID NO: 70334

SEQ ID NO: 70339 - protein, 794 aa, Homo sapiens; identical to SEQ ID NO: 70334

SEQ ID NO: 70340 - protein, 794 aa, Homo sapiens; identical to SEQ ID NO: 70334

SEQ ID NO: 70341 - protein, 75 aa, Homo sapiens
MNIDDKLEGLFLKCGGIDEMQSSRTMVVMGGVSGQSTVSGELQDSVLQDRSMPHQEILAADEVLQESEMRQQDMI

SEQ ID NO: 70342 - protein, 454 aa, Homo sapiens
MNIDDKLEGLFLKCGGIDEMQSSRTMVVMGGVSGQSTVSGELQDSVLQDRSMPHQEILAADEVLQESEMRQQDMISHDELMVHEETVKNDEEQMETHERLPQGLQYALNVPISVKQEITFTDVSEQLMRDKKQIREPVDLQKKKKRKQRSPAKILTINEDGSLGLKTPKSHVCEHCNAAFRTNYHLQRHVFIHTGEKPFQCSQCDMRFIQKYLLQRHEKIHTGEKPFRCDECGMRFIQKYHMERHKRTHSGEKPYQCEYCLQYFSRTDRVLKHKRMCHENHDKKLNRCAIKGGLLTSEEDSGFSTSPKDNSLPKKKRQKTEKKSSGMDKESALDKSDLKKDKNDYLPLYSSSTKVKDEYMVAEYAVEMPHSSVGGSHLEDASGEIHPPKLVLKKINSKRSLKQPLEQNQTISPLSTYEESKFQSMLLNLWINRLYWTQKAMLTLIRLIICRRAQ

SEQ ID NO: 70343 - protein, 131 aa, Homo sapiens
MRFIQKYLLQRHEKIHTGEKPFRCDECGDETNHASATSTQDFLDQVTSQKKAEAQPVHQAYQMSSFEQPFRAPYHGSRAGIATQFSTANGQVNLRGPGTSAEFSEFPLVNVNDNRAGMTSSPDATTGQTFG

SEQ ID NO: 70344 - protein, 143 aa, Homo sapiens
KTHYNCGEHTKAFSGKHTLVQQQRTLTTERCYICSECGKSFSNKSNLIKHRRVHTGERPYECSECGKSFSQRSALLQHRGVHTGERPYECSECGKFFTYHSSLIKHQKVHSGSRPYECSECGKSFSQNSSLIEHHRVHTGERP

SEQ ID NO: 70345 - protein, 437 aa, Homo sapiens
MAAATLRTPTQGTVTFEDVAVHFSWEEWGLLDEAQRCLYRDVMLENLALLTSLDVHHQKQHLGEKHFRSNVGRALFVKTCTFHVSGEPSTCREVGKDFLAKLGFLHQQAAHTGEQSNSKSDGGAISHRGKTHYNCGEHTKAFSGKHTLVQQQRTLTTERCYICSECGKSFSKSYSLNDHWRLHTGEKPYECRECGKSFRQSSSLIQHRRVHTAVRPHECDECGKLFSNKSNLIKHRRVHTGERPYECSECGKSFSQRSALLQHRGVHTGERPYECSECGKFFTYHSSLIKHQKVHSGSRPYECSECGKSFSQNSSLIEHHRVHTGERPYKCSECGKSFSQRSALLQHRGVHTGERPYECSECGKFFPYSSSLRKHQRVHTGSRPYECSECGKSFTQNSGLIKHRRVHTGEKPYECTECGKSFSHNSSLIKHQRIHSR

SEQ ID NO: 70346 - protein, 437 aa, Homo sapiens; identical to SEQ ID NO: 70345

SEQ ID NO: 70347 - protein, 538 aa, Homo sapiens
MTTFKEAVTFKDVAVVFTEEELGLLDPAQRKLYRDVMLENFRNLLSVGHQPFHQDTCHFLREEKFWMMGTATQREGNSGGKIQTELESVPEAGAHEEWSCQQIWEQIAKDLTRSQDSIINNSQFFENGDVPSQVEAGLPTIHTGQKPSQGGKCKQSISDVPIFDLPQQLYSEEKSYTCDECGKSICYISALHVHQRVHVGEKLFMCDVCGKEFSQSSHLQTHQRVHTGEKPFKCEQCGKGFSRRSALNVHRKLHTGEKPYICEACGKAFIHDSQLKEHKRIHTGEKPFKCDICGKTFYFRSRLKSHSMVHTGEKPFRCDTCDKSFHQRSALNRHCMVHTGEKPYRCEQCGKGFIGRLDFYKHQVVHTGEKPYNCKECGKSFRWSSCLLNHQRVHSGEKSFKCEECGKGFYTNSQLSSHQRSHSGEKPYKCEECGKGYVTKFNLDLHQRVHTGERPYNCKECGKNFSRASSILNHKRLHCQKKPFKCEDCGKRLVHRTYRKDQPRDYSGENPSKCEDCGRRYKRRLNLDILLSLFLNDT

SEQ ID NO: 70348 - protein, 549 aa, Homo sapiens
MIKRSKVLVFCSKIMEEAVTFKDVAVVFTEEELGLLDPAQRKLYRDVMLENFRNLLSVGHQPFHQDTCHFLREEKFWMMGTATQREGNSGGKIQTELESVPEAGAHEEWSCQQIWEQIAKDLTRSQDSIINNSQFFENGDVPSQVEAGLPTIHTGQKPSQGGKCKQSISDVPIFDLPQQLYSEEKSYTCDECGKSICYISALHVHQRVHVGEKLFMCDVCGKEFSQSSHLQTHQRVHTGEKPFKCEQCGKGFSRRSALNVHRKLHTGEKPYICEACGKAFIHDSQLKEHKRIHTGEKPFKCDICGKTFYFRSRLKSHSMVHTGEKPFRCDTCDKSFHQRSALNRHCMVHTGEKPYRCEQCGKGFIGRLDFYKHQVVHTGEKPYNCKECGKSFRWSSCLLNHQRVHSGEKSFKCEECGKGFYTNSQLSSHQRSHSGEKPYKCEECGKGYVTKFNLDLHQRVHTGERPYNCKECGKNFSRASSILNHKRLHCQKKPFKCEDCGKRLVHRTYRKDQPRDYSGENPSKCEDCGRRYKRRLNLDILLSLFLNDT

SEQ ID NO: 70349 - protein, 230 aa, Homo sapiens
MVMSPPRLKQDYPQFIQDRNLPRVGSVNSPSVMFPSLIFLSSYTQKRSLIHVMSVEKASVTSQLFMFIRESTWERNSLCVMCVARNLVKAHICKLIRESTLERNHSNVSNVGKVSVVDQHLMFIVNYTQERNLTFVRHVGRPSFMIPSLRNIRESILGRNHSNVIYVVRPSILGQDLRAIPWFTQEKNHLGVIHVIRAFIRDQHLIGIAWSTQERNRTDVSSVEKALLVG

SEQ ID NO: 70350 - protein, 506 aa, Homo sapiens
MPANGTSPQRFPALIPGEPGRSFEGSVSFEDVAVDFTRQEWHRLDPAQRTMHKDVMLETYSNLASVGLCVAKPEMIFKLERGEELWILEEESSGHGYSGSLSLLCGNGSVGDNALRHDNDLLHHQKIQTLDQNVEYNGCRKAFHEKTGFVRRKRTPRGDKNFECHECGKAYCRKSNLVEHLRIHTGERPYECGECAKTFSARSYLIAHQKTHTGERPFECNECGKSFGRKSQLILHTRTHTGERPYECTECGKTFSEKATLTIHQRTHTGEKPYECSECGKTFRVKISLTQHHRTHTGEKPYECGECGKNFRAKKSLNQHQRIHTGEKPYECGECGKFFRMKMTLNNHQRTHTGEKPYQCNECGKSFRVHSSLGIHQRIHTGEKPYECNECGNAFYVKARLIEHQRMHSGEKPYECSECGKIFSMKKSLCQHRRTHTGEKPYECSECGNAFYVKVRLIEHQRIHTGERPFECQECGKAFCRKAHLTEHQRTHIGWSWRCTMKKASH

SEQ ID NO: 70351 - protein, 682 aa, Homo sapiens
MPSLRTRREEAEMELSVPGPSPWTPAAQARVRDAPAVTHPGSAACGTPCCSDTELEAICPHYQQPDCDTRTEDKEFLHKEDIHEDLESQAEISENYAGDVSQVPELGDLCDDVSERDWGVPEGRRLPQSLSQEGDFTPAAMGLLRGPLGEKDLDCNGFDSRFSLSPNLMACQEIPTEERPHPYDMGGQSFQHSVDLTGHEGVPTAESPLICNECGKTFQGNPDLIQRQIVHTGEASFMCDDCGKTFSQNSVLKNRHRSHMSEKAYQCSECGKAFRGHSDFSRHQSHHSSERPYMCNECGKAFSQNSSLKKHQKSHMSEKPYECNECGKAFRRSSNLIQHQRIHSGEKPYVCSECGKAFRRSSNLIKHHRTHTGEKPFECGECGKAFSQSAHLRKHQRVHTGEKPYECNDCGKPFSRVSNLIKHHRVHTGEKPYKCSDCGKAFSQSSSLIQHRRIHTGEKPHVCNVCGKAFSYSSVLRKHQIIHTGEKPYRCSVCGKAFSHSSALIQHQGVHTGDKPYACHECGKTFGRSSNLILHQRVHTGEKPYECTECGKTFSQSSTLIQHQRIHNGLKPHECNQCGKAFNRSSNLIHHQKVHTGEKPYTCVECGKGFSQSSHLIQHQIIHTGERPYKCSECGKAFSQRSVLIQHQRIHTGVKPYDCAACGKAFSQRSKLIKHQLIHTRE

SEQ ID NO: 70352 - protein, 682 aa, Homo sapiens; identical to SEQ ID NO: 70351

SEQ ID NO: 70353 - protein, 147 aa, Homo sapiens
MALTQVRLTFRDVAIEFSQEEWKCLDPAQRILYRDVMLENYWNLVSLGLCHFDMNIISMLEEGKEPWTVKSCVKIARKPRTPECVKGVVTDLLRRWKHWLLLLGICCPKPHGRVSSRLRLSRSLGHFFHSAFATFMGVCDKRVGSIF

SEQ ID NO: 70354 - protein, 818 aa, Homo sapiens
MALTQVRLTFRDVAIEFSQEEWKCLDPAQRILYRDVMLENYWNLVSLGLCHFDMNIISMLEEGKEPWTVKSCVKIARKPRTPECVKGVVTDIPPKCTIKDLLPKEKSSTEAVFHTVVLERHESPDIEDFSFKEPQKNVHDFECQWRDDTGNYKGVLMAQKEGKRDQRDRRDIENKLMNNQLGVSFHSHLPELQLFQGEGKMYECNQVEKSTNNGSSVSPLQQIPSSVQTHRSKKYHELNHFSLLTQRRKANSCGKPYKCNECGKAFTQNSNLTSHRRIHSGEKPYKCSECGKTFTVRSNLTIHQVIHTGEKPYKCHECGKVFRHNSYLATHRRIHTGEKPYKCNECGKAFRGHSNLTTHQLIHTGEKPFKCNECGKLFTQNSHLISHWRIHTGEKPYKCNECGKAFSVRSSLAIHQTIHTGEKPYKCNECGKVFRYNSYLGRHRRVHTGEKPYKCNECGKAFSMHSNLATHQVIHTGTKPFKCNECSKVFTQNSQLANHRRIHTGEKPYKCNECGKAFSVRSSLTTHQAIHSGEKPYKCIECGKSFTQKSHLRSHRGIHSGEKPYKCNECGKVFAQTSQLARHWRVHTGEKPYKCNDCGRAFSDRSSLTFHQAIHTGEKPYKCHECGKVFRHNSYLATHRRIHTGEKPYKCNECGKAFSMHSNLTTHKVIHTGEKPYKCNQCGKVFTQNSHLANHQRTHTGEKPYRCNECGKAFSVRSSLTTHQAIHTGKKPYKCNECGKVFTQNAHLANHRRIHTGEKPYRCTECGKAFRVRSSLTTHMAIHTGEKRYKCNECGKVFRQSSNLASHHRMHTGEKPYK

SEQ ID NO: 70355 - protein, 818 aa, Homo sapiens; identical to SEQ ID NO: 70354

SEQ ID NO: 70356 - protein, 818 aa, Homo sapiens; identical to SEQ ID NO: 70354

SEQ ID NO: 70357 - protein, 449 aa, Homo sapiens
MEFFISMSETIKYNDDDHKTLFLKTLNEQRLEGEFCDIAIVVEDVKFRAHRCVLAACSTYFKKLFKKLEVDSSSVIEIDFLRSDIFEEVLNYMYTAKISVKKEDVNLMMSSGQILGIRFLDKLCSQKRDVSSPDENNGQSKSKYCLKINRPIGDAADTQDDDVEEIGDQDDSPSDDTVEGTPPSQEDGKSPTTTLRVQEAILKELGSEEVRKVNCYGQEVESMETPESKDLGSQTPQALTFNDGMSEVKDEQTPGWTTAASDMKFEYLLYGHHREQIACQACGKTFSDEGRLRKHEKLHTADRPFVCEMCTKGFTTQAHLKEHLKIHTGYKPYSCEVCGKSFIRAPDLKKHERVHSNERPFACHMCDKAFKHKSHLKDHERRHRGEKPFVCGSCTKAFAKASDLKRHENNMHSERKQVTPSAIQSETEQLQAAAMAAEAEQQLETIACS

SEQ ID NO: 70358 - protein, 449 aa, Homo sapiens; identical to SEQ ID NO: 70357

SEQ ID NO: 70359 - protein, 485 aa, Homo sapiens
MATEPKKAAAQNSPEDEGLLIVKIEEEEFIHGQDTCLQRSELLKQELCRQLFRQFCYQDSPGPREALSRLRELCCQWLKPEIHTKEQILELLVLEQFLTILPGDLQAWVHEHYPESGEEAVTILEDLERGTDEAVLQVQAHEHGQEIFQKKVSPPGPALNVKLQPVETKAHFDSSEPQLLWDCDNESENSRSMPKLEIFEKIESQRIISGRISGYISEASGESQDICKSAGRVKRQWEKESGESQRLSSAQDEGFGKILTHKNTVRGEIISHDGCERRLNLNSNEFTHQKSCKHGTCDQSFKWNSDFINHQIIYAGEKNHQYGKSFKSPKLAKHAAVFSGDKTHQCNECGKAFRHSSKLARHQRIHTGERCYECNECGKSFAESSDLTRHRRIHTGERPFGCKECGRAFNLNSHLIRHQRIHTREKPYECSECGKTFRVSSHLIRHFRIHTGEKPYECSECGRAFSQSSNLSQHQRIHMRENLLM

SEQ ID NO: 70360 - protein, 412 aa, Homo sapiens
MSLGGSDTMLKGADTSESGAVIRGNYRLGLSKKSSLFSHQKHHVCPECGRGFCQRSDLIKHQRTHTGEKPYLCPECGRRFSQKASLSIHQRKHSGEKPYVCRECGRHFRYTSSLTNHKRIHSGERPFVCQECGRGFRQKIALLLHQRTHLEEKPFVCPECGRGFCQKASLLQHQSSHTGERPFLCLECGRSFRQQSLLLSHQVTHSGEKPYVCAECGHSFRQKVTLIRHQRTHTGEKPYLCPQCGRGFSQKVTLIGHQRTHTGEKPYLCPDCGRGFGQKVTLIRHQRTHTGEKPYLCPKCGRAFGFKSLLTRHQRTHSEEELYVDRVCGQGLGQKSHLISDQRTHSGEKPCICDECGRGFGFKSALIRHQRTHSGEKPYVCRECGRGFSQKSHLHRHRRTKSGHQLLPQEVF

SEQ ID NO: 70361 - protein, 96 aa, Homo sapiens
MSPGLLTTRKEALMAFRDVAVAFTQKEWKLLSSAQRTLYREVMLENYSHLVSLGIAFSKPKLIEQLEQGDEPWREENEHLLDLCPGRRITRSGVRD

SEQ ID NO: 70362 - protein, 603 aa, Homo sapiens
MSPGLLTTRKEALMAFRDVAVAFTQKEWKLLSSAQRTLYREVMLENYSHLVSLGIAFSKPKLIEQLEQGDEPWREENEHLLDLCPEPRTEFQPSFPHLVAFSSSQLLRQYALSGHPTQIFPSSSAGGDFQLEAPRCSSEKGESGETEGPDSSLRKRPSRISRTFFSPHQGDPVEWVEGNREGGTDLRLAQRMSLGGSDTMLKGADTSESGAVIRGNYRLGLSKKSSLFSHQKHHVCPECGRGFCQRSDLIKHQRTHTGEKPYLCPECGRRFSQKASLSIHQRKHSGEKPYVCRECGRHFRYTSSLTNHKRIHSGERPFVCQECGRGFRQKIALLLHQRTHLEEKPFVCPECGRGFCQKASLLQHQSSHTGERPFLCLECGRSFRQQSLLLSHQVTHSGEKPYVCAECGHSFRQKVTLIRHQRTHTGEKPYLCPQCGRGFSQKVTLIGHQRTHTGEKPYLCPDCGRGFGQKVTLIRHQRTHTGEKPYLCPKCGRAFGFKSLLTRHQRTHSEEELYVDRVCGQGLGQKSHLISDQRTHSGEKPCICDECGRGFGFKSALIRHQRTHSGEKPYVCRECGRGFSQKSHLHRHRRTKSGHQLLPQEVF

SEQ ID NO: 70363 - protein, 407 aa, Homo sapiens
MAAKMEITLSSNTEASSKQERHIIAKLEEKRGPPLQKNCPDPELCRQSFRRFCYQEVSGPQEALSQLRQLCRQWLQPELHTKEQILELLVMEQFLTILPPEIQARVRHRCPMSSKEIVTLVEDFHRASKKPKQWVAVCMQGQKVLLEKTGSQLGEQELPDFQPQTPRRDLRESSPAEPSQAGAYDRLSPHHWEKSPLLQEPTPKLAGTEAPRMRSDNKENPQQEGAKGAKPCAVSAGRSKGNGLQNPEPRGANMSEPRLSRRQVSSPNAQKPFAHYQRHCRVEYISSPLKSHPLRELKKSKGGKRSLSNRLQHLGHQPTRSAKKPYKCDDCGKSFTWNSELKRHKRVHTGERPYTCGECGNCFGRQSTLKLHQRIHTGEKPYQCGQCGKSFRQSSNLHQHHRLHHGD

SEQ ID NO: 70364 - protein, 234 aa, Homo sapiens
MAAKMEITLSSNTEASSKQERHIIAKLEEKRGPPLQKNCPDPELCRQSFRRFCYQEVSGPQEALSQLRQLCRQWLQPELHTKEQILELLVMEQFLTILPPEIQARVRHRCPMSSKEIVTLVEDFHRASKKPKQWVAVCMQGQKVLLEKTGSQLGEQELPDFQPQTPRRDLRESSPAEPSQAGAYDRLSPHHWEKSPLLQEPTPKLAGTELLIEKTDPNMATDELPCKLWLSFIA

SEQ ID NO: 70365 - protein, 711 aa, Homo sapiens
MPADVNLSQKPQVLGPEKQDGSCEASVSFEDVTVDFSREEWQQLDPAQRCLYRDVMLELYSHLFAVGYHIPNPEVIFRMLKEKEPRVEEAEVSHQRCQEREFGLEIPQKEISKKASFQKDMVGEFTRDGSWCSILEELRLDADRTKKDEQNQIQPMSHSAFFNKKTLNTESNCEYKDPGKMIRTRPHLASSQKQPQKCCLFTESLKLNLEVNGQNESNDTEQLDDVVGSGQLFSHSSSDACSKNIHTGETFCKGNQCRKVCGHKQSLKQHQIHTQKKPDGCSECGGSFTQKSHLFAQQRIHSVGNLHECGKCGKAFMPQLKLSVYLTDHTGDIPCICKECGKVFIQRSELLTHQKTHTRKKPYKCHDCGKAFFQMLSLFRHQRTHSREKLYECSECGKGFSQNSTLIIHQKIHTGERQYACSECGKAFTQKSTLSLHQRIHSGQKSYVCIECGQAFIQKAHLIVHQRSHTGEKPYQCHNCGKSFISKSQLDIHHRIHTGEKPYECSDCGKTFTQKSHLNIHQKIHTGERHHVCSECGKAFNQKSILSMHQRIHTGEKPYKCSECGKAFTSKSQFKEHQRIHTGEKPYVCTECGKAFNGRSNFHKHQITHTRERPFVCYKCGKAFVQKSELITHQRTHMGEKPYECLDCGKSFSKKPQLKVHQRIHTGERPYVCSECGKAFNNRSNFNKHQTTHTRDKSYKCSYSVKGFTKQ

SEQ ID NO: 70366 - protein, 321 aa, Homo sapiens
MAAGWLTTWSQNSVTFQEVAVDFSQEEWALLDPAQKNLYKDVMLENFRNLASVGYQLCRHSLISKVDQEQLKTDERGILQGDCADWETQLKPKDTIAMQNIPGGKTSNGINTNCVRTHSGEMPYECSDCGKAFIFQSSLKKHMRSHTGEKPYECDHCGKSFSQSSHLNVHKRTHTGEKPYDCKECGKAFTVPSSLQKHVRTHTGEKPYECSDCGKAFIDQSSLKKHTRSHTGEKPYECNQCGKSFSTGSYLIVHKRTHTGEKTYECKECGKAFRNSSCLRVHVRTHTGEKPYKCIQCEKAFSTSTNLIMHKRIHNGQKLHE

SEQ ID NO: 70367 - protein, 481 aa, Homo sapiens
MAAGWLTTWSQNSVTFQEVAVDFSQEEWALLDPAQKNLYKDVMLENFRNLASVGYQLCRHSLISKVDQEQLKTDERGILQGDCADWETQLKPKDTIAMQNIPGGKTSNGINTAENQPGEHSLECNHCGKFRKNTRFICTRYCKGEKCYKYIKYSKVFNHPSTLRSHVSIHIGEKTLEFTDCRKAFNQESSLRKHLRTPTGQKFQEYEQCDMSFSLHSSCSVREQIPTGEKGDECSDYGKISPLSVHTKTGSVEEGLECNEHEKTFTDPLSLQNCVRTHSGEMPYECSDCGKAFIFQSSLKKHMRSHTGEKPYECDHCGKSFSQSSHLNVHKRTHTGEKPYDCKECGKAFTVPSSLQKHVRTHTGEKPYECSDCGKAFIDQSSLKKHTRSHTGEKPYECNQCGKSFSTGSYLIVHKRTHTGEKTYECKECGKAFRNSSCLRVHVRTHTGEKPYKCIQCEKAFSTSTNLIMHKRIHNGQKLHE

SEQ ID NO: 70368 - protein, 120 aa, Homo sapiens
MAAGWLTTWSQNSVTFQEVAVDFSQEEWALLDPAQKNLYKDVMLENFRNLASVGYQLCRHSLISKVDQEQLKTDERGILQGDCADWETQLKPKDTIAMQNIPGGKTSNGINTNPHGREFL

SEQ ID NO: 70369 - protein, 321 aa, Homo sapiens; identical to SEQ ID NO: 70366

SEQ ID NO: 70370 - protein, 549 aa, Homo sapiens
MPVDLGQALGLLPSLAKAEDSQFSESDAALQEELSSPETARQLFRQFRYQVMSGPHETLKQLRKLCFQWLQPEVHTKEQILEILMLEQFLTILPGEIQMWVRKQCPGSGEEAVTLVESLKGDPQRLWQWISIQVLGQDILSEKMESPSCQVGEVEPHLEVVPQELGLENSSSGPGELLSHIVKEESDTEAELALAASQPARLEERLIRDQDLGASLLPAAPQEQWRQLDSTQKEQYWDLMLETYGKMVSGAGISHPKSDLTNSIEFGEELAGIYLHVNEKIPRPTCIGDRQENDKENLNLENHRDQELLHASCQASGEVPSQASLRGFFTEDEPGCFGEGENLPEALQNIQDEGTGEQLSPQERISEKQLGQHLPNPHSGEMSTMWLEEKRETSQKGQPRAPMAQKLPTCRECGKTFYRNSQLIFHQRTHTGETYFQCTICKKAFLRSSDFVKHQRTHTGEKPCKCDYCGKGFSDFSGLRHHEKIHTGEKPYKCPICEKSFIQRSNFNRHQRVHTGEKPYKCSHCGKSFSWSSSLDKHQRSHLGKKPFQ

SEQ ID NO: 70371 - protein, 549 aa, Homo sapiens; identical to SEQ ID NO: 70370

SEQ ID NO: 70372 - protein, 692 aa, Homo sapiens
MRACAGSTREAGSGAQDLSTLLCLEESMEEQDEKPPEPPKACAQDSFLPQEIIIKVEGEDTGSLTIPSQEGVNFKIVTVDFTREEQGTWNPAQRTLDRDVILENHRDLVSWDLATAVGKKDSTSKQRIFDEEPANGVKIERFTRDDPWLSSCEEVDDCKDQLEKQQEKQEILLQEVAFTQRKAVIHERVCKSDETGEKSGLNSSLFSSPVIPIRNHFHKHVSHAKKWHLNAAVNSHQKINENETLYENNECGKPPQSIHLIQFTRTQTKDKCYGFSDRIQSFCHGTPLHIHEKIHGGGKTFDFKECGQVLNPKISHNEQQRIPFEESQYKCSETSHSSSLTQNMRNNSEEKPFECNQCGKSFSWSSHLVAHQRTHTGEKPYECSECGKSFSRSSHLVSHQRTHTGEKPYRCNQCGKSFSQSYVLVVHQRTHTGEKPYECNQCGKSFRQSYKLIAHQRTHTGEKPYECNQCGKSFIQSYKLIAHQRIHTGEKPYECNQCGKSFSQSYKLVAHQRTHTGEKPFECNQCGKSFSWSSQLVAHQRTHTGEKPYECSECGKSFNRSSHLVMHQRIHTGEKPYECNQCGKSFSQSYVLVVHQRTHTGEKPYECSQCGKSFRQSSCLTQHQRTHTGEKPFECNQCGKTFSLSARLIVHQRTHTGEKPFTCIQCGKAFINSYKLIRHQATHTEEKLYECN

SEQ ID NO: 70373 - protein, 667 aa, Homo sapiens
MRACAGSTREAGSGAQDLSTLLCLEESMEEQDEKPPEPPKACAQEGVNFKIVTVDFTREEQGTWNPAQRTLDRDVILENHRDLVSWDLATAVGKKDSTSKQRIFDEEPANGVKIERFTRDDPWLSSCEEVDDCKDQLEKQQEKQEILLQEVAFTQRKAVIHERVCKSDETGEKSGLNSSLFSSPVIPIRNHFHKHVSHAKKWHLNAAVNSHQKINENETLYENNECGKPPQSIHLIQFTRTQTKDKCYGFSDRIQSFCHGTPLHIHEKIHGGGKTFDFKECGQVLNPKISHNEQQRIPFEESQYKCSETSHSSSLTQNMRNNSEEKPFECNQCGKSFSWSSHLVAHQRTHTGEKPYECSECGKSFSRSSHLVSHQRTHTGEKPYRCNQCGKSFSQSYVLVVHQRTHTGEKPYECNQCGKSFRQSYKLIAHQRTHTGEKPYECNQCGKSFIQSYKLIAHQRIHTGEKPYECNQCGKSFSQSYKLVAHQRTHTGEKPFECNQCGKSFSWSSQLVAHQRTHTGEKPYECSECGKSFNRSSHLVMHQRIHTGEKPYECNQCGKSFSQSYVLVVHQRTHTGEKPYECSQCGKSFRQSSCLTQHQRTHTGEKPFECNQCGKTFSLSARLIVHQRTHTGEKPFTCIQCGKAFINSYKLIRHQATHTEEKLYECN

SEQ ID NO: 70374 - protein, 615 aa, Homo sapiens
MPQLQYPEGYLAPNRCLVSNCGVNKMSNDELVGQNHGMEGEACIGGDVTFNDVAIDFTHEEWGWLSSAQRDLYKDVMVQNYENLVSVAGLSVTKPYVITLLEDGKEPWMMEKKLSKGMIPDWESRWENKELSTKKDNYDEDSPQTVIIEKVVKQSYEFSNSKKNLEYIEKLEGKHGSQVDHFRPAILTSRESPTADSVYKYNIFRSTFHSKSTLSEPQKISAEGNSHKYDILKKNLPKKSVIKNEKVNGGKKLLNSNKSGAAFSQGKSLTLPQTCNREKIYTCSECGKAFGKQSILNRHWRIHTGEKPYECRECGKTFSHGSSLTRHLISHSGEKPYKCIECGKAFSHVSSLTNHQSTHTGEKPYECMNCGKSFSRVSHLIEHLRIHTQEKLYECRICGKAFIHRSSLIHHQKIHTGEKPYECRECGKAFCCSSHLTRHQRIHTMEKQYECNKCLKVFSSLSFLVQHQSIHTEEKPFECQKCRKSFNQLESLNMHLRNHIRLKPYECSICGKAFSHRSSLLQHHRIHTGEKPYECIKCGKTFSCSSNLTVHQRIHTGEKPYKCNECGKAFSKGSNLTAHQRVHNGEKPNSVVSVEKPLDYMNHYTCEKSYRRETV

SEQ ID NO: 70375 - protein, 467 aa, Homo sapiens
MPQVTFNDVAIDFTHEEWGWLSSAQRDLYKDVMVQNYENLVSVGLSVTKPYVITLLEDGKEPWMMEKKLSKGMIPDWESRWENKELSTKKDNYDEDSPQTVIIEKVVKQSYEFSNSKKNLEYIEKLEGKHGSQVDHFRPAILTSRESPTADSVYKYNIFRSTFHSKSTLSEPQKISAEGNSHKYDILKKNLPKKSVIKNEKVNGGKKLLNSNKSGAAFSQGKSLTLPQTCNREKIYTCSECGKAFGKQSILNRHWRIHTGEKPYECRECGKTFSHGSSLTRHLISHSGEKPYKCIECGKAFSHVSSLTNHQSTHTGEKPYECMNCGKSFSRVSHLIEHLRIHTQEKLYECRICGKAFIHRSSLIHHQKIHTGEKPYECRECGKAFCCSSHLTRHQRIHTMEKQYECNKCLKVFSSLSFLVQHQSIHTEEKPFECQKCRKSFNQLESLNMHLRNHIETLRMQYMWESL

SEQ ID NO: 70376 - protein, 570 aa, Homo sapiens
MPQVTFNDVAIDFTHEEWGWLSSAQRDLYKDVMVQNYENLVSVGLSVTKPYVITLLEDGKEPWMMEKKLSKGMIPDWESRWENKELSTKKDNYDEDSPQTVIIEKVVKQSYEFSNSKKNLEYIEKLEGKHGSQVDHFRPAILTSRESPTADSVYKYNIFRSTFHSKSTLSEPQKISAEGNSHKYDILKKNLPKKSVIKNEKVNGGKKLLNSNKSGAAFSQGKSLTLPQTCNREKIYTCSECGKAFGKQSILNRHWRIHTGEKPYECRECGKTFSHGSSLTRHLISHSGEKPYKCIECGKAFSHVSSLTNHQSTHTGEKPYECMNCGKSFSRVSHLIEHLRIHTQEKLYECRICGKAFIHRSSLIHHQKIHTGEKPYECRECGKAFCCSSHLTRHQRIHTMEKQYECNKCLKVFSSLSFLVQHQSIHTEEKPFECQKCRKSFNQLESLNMHLRNHIRLKPYECSICGKAFSHRSSLLQHHRIHTGEKPYECIKCGKTFSCSSNLTVHQRIHTGEKPYKCNECGKAFSKGSNLTAHQRVHNGEKPNSVVSVEKPLDYMNHYTCEKSYRRETV

SEQ ID NO: 70377 - protein, 571 aa, Homo sapiens
MPQVTFNDVAIDFTHEEWGWLSSAQRDLYKDVMVQNYENLVSVAGLSVTKPYVITLLEDGKEPWMMEKKLSKGMIPDWESRWENKELSTKKDNYDEDSPQTVIIEKVVKQSYEFSNSKKNLEYIEKLEGKHGSQVDHFRPAILTSRESPTADSVYKYNIFRSTFHSKSTLSEPQKISAEGNSHKYDILKKNLPKKSVIKNEKVNGGKKLLNSNKSGAAFSQGKSLTLPQTCNREKIYTCSECGKAFGKQSILNRHWRIHTGEKPYECRECGKTFSHGSSLTRHLISHSGEKPYKCIECGKAFSHVSSLTNHQSTHTGEKPYECMNCGKSFSRVSHLIEHLRIHTQEKLYECRICGKAFIHRSSLIHHQKIHTGEKPYECRECGKAFCCSSHLTRHQRIHTMEKQYECNKCLKVFSSLSFLVQHQSIHTEEKPFECQKCRKSFNQLESLNMHLRNHIRLKPYECSICGKAFSHRSSLLQHHRIHTGEKPYECIKCGKTFSCSSNLTVHQRIHTGEKPYKCNECGKAFSKGSNLTAHQRVHNGEKPNSVVSVEKPLDYMNHYTCEKSYRRETV

SEQ ID NO: 70378 - protein, 639 aa, Homo sapiens
MTPASASGEDSGSFYSWQKAKREQGLVTFEDVAVDFTQEEWQYLNPPQRTLYRDVMLETYSNLVFVGQQVTKPNLILKLEVEECPAEGKIPFWNFPEVCQVDEQIERQHQDDQDKCLLMQVGFSDKKTIITKSARDCHEFGNILHLSTNLVASIQRPDKHESFGNNMVDNLDLFSRSSAENKYDNGCAKLFFHTEYEKTNPGMKPYGYKECGKGLRRKKGLSLHQRIKNGEKPFECTACRKTFSKKSHLIVHWRTHTGEKPFGCTECGKAFSQKSQLIIHLRTHTGERPFECPECGKAFREKSTVIIHYRTHTGEKPYECNECGKAFTQKSNLIVHQKTHTGEKTYECTKCGESFIQKLDLIIHHSTHTGKKPHECNECKKTFSDKSTLIIHQRTHTGEKPHKCTECGKSFNEKSTLIVHQRTHTGEKPYECDVCGKTFTQKSNLGVHQRTHSGEKPFECNECEKAFSQKSYLMLHQRGHTGEKPYECNECEKAFSQKSYLIIHQRTHTEEKPYKCNECGKAFREKSKLIIHQRIHTGEKPYECPVCWKAFSQKSQLIIHQRTHTGEKPYACTECGKAFREKSTFTVHQRTHTGEKPYKCTECGKAFTQKSNLIVHQRTHAGKKAHGRGHTRKSKFMAH

SEQ ID NO: 70379 - protein, 620 aa, Homo sapiens
MAKPQGLVTFEDVAVDFTQEEWQYLNPPQRTLYRDVMLETYSNLVFVGQQVTKPNLILKLEVEECPAEGKIPFWNFPEVCQVDEQIERQHQDDQDKCLLMQVGFSDKKTIITKSARDCHEFGNILHLSTNLVASIQRPDKHESFGNNMVDNLDLFSRSSAENKYDNGCAKLFFHTEYEKTNPGMKPYGYKECGKGLRRKKGLSLHQRIKNGEKPFECTACRKTFSKKSHLIVHWRTHTGEKPFGCTECGKAFSQKSQLIIHLRTHTGERPFECPECGKAFREKSTVIIHYRTHTGEKPYECNECGKAFTQKSNLIVHQKTHTGEKTYECTKCGESFIQKLDLIIHHSTHTGKKPHECNECKKTFSDKSTLIIHQRTHTGEKPHKCTECGKSFNEKSTLIVHQRTHTGEKPYECDVCGKTFTQKSNLGVHQRTHSGEKPFECNECEKAFSQKSYLMLHQRGHTGEKPYECNECEKAFSQKSYLIIHQRTHTEEKPYKCNECGKAFREKSKLIIHQRIHTGEKPYECPVCWKAFSQKSQLIIHQRTHTGEKPYACTECGKAFREKSTFTVHQRTHTGEKPYKCTECGKAFTQKSNLIVHQRTHAGKKAHGRGHTRKSKFMAH

SEQ ID NO: 70380 - protein, 639 aa, Homo sapiens; identical to SEQ ID NO: 70378

SEQ ID NO: 70381 - protein, 751 aa, Homo sapiens
MEDLSSPDSTLLQGGHNLLSSASFQEAVTFKDVIVDFTQEEWKQLDPGQRDLFRDVTLENYTHLVSIGLQVSKPDVISQLEQGTEPWIMEPSIPVGTCADWETRLENSVSAPEPDISEEELSPEVIVEKHKRDDSWSSNLLESWEYEGSLERQQANQQTLPKEIKVTEKTIPSWEKGPVNNEFGKSVNVSSNLVTQEPSPEETSTKRSIKQNSNPVKKEKSCKCNECGKAFSYCSALIRHQRTHTGEKPYKCNECEKAFSRSENLINHQRIHTGDKPYKCDQCGKGFIEGPSLTQHQRIHTGEKPYKCDECGKAFSQRTHLVQHQRIHTGEKPYTCNECGKAFSQRGHFMEHQKIHTGEKPFKCDECDKTFTRSTHLTQHQKIHTGEKTYKCNECGKAFNGPSTFIRHHMIHTGEKPYECNECGKAFSQHSNLTQHQKTHTGEKPYDCAECGKSFSYWSSLAQHLKIHTGEKPYKCNECGKAFSYCSSLTQHRRIHTREKPFECSECGKAFSYLSNLNQHQKTHTQEKAYECKECGKAFIRSSSLAKHERIHTGEKPYQCHECGKTFSYGSSLIQHRKIHTGERPYKCNECGRAFNQNIHLTQHKRIHTGAKPYECAECGKAFRHCSSLAQHQKTHTEEKPYQCNKCEKTFSQSSHLTQHQRIHTGEKPYKCNECDKAFSRSTHLTEHQNTHTGEKPYNCNECRKTFSQSTYLIQHQRIHSGEKPFGCNDCGKSFRYRSALNKHQRLHPGI

SEQ ID NO: 70382 - protein, 667 aa, Homo sapiens
MEDLSSPDSTLLQGGHNLLSSASFQEAVTFKDVIVDFTQEEWKQLDPGQRDLFRDVTLENYTHLVSIGLQVSKPDVISQLEQGTEPWIMEPSIPVGTCADWETRLENSVSAPEPDISEEELSPEVIVEKHKRDDSWSSNLLESWEYEGSLERQQANQQTLPKEIKVTEKTIPSWEKGPVNNEFGKSVNVSSNLVTQEPSPEETSTKRSIKQNSNPVKKEKSCKCNECGKAFSYCSALIRHQRTHTGEKPYKCNECEKAFSRSENLINHQRIHTGDKPYKCDQCGKGFIEGPSLTQHQRIHTGEKPYKCDECGKAFSQRTHLVQHQRIHTGEKPYTCNECGKAFSQRGHFMEHQKIHTGEKPFKCDECDKTFTRSTHLTQHQKIHTGEKTYKCNECGKAFNGPSTFIRHHMIHTGEKPYECNECGKAFSQHSNLTQHQKTHTQEKAYECKECGKAFIRSSSLAKHERIHTGEKPYQCHECGKTFSYGSSLIQHRKIHTGERPYKCNECGRAFNQNIHLTQHKRIHTGAKPYECAECGKAFRHCSSLAQHQKTHTEEKPYQCNKCEKTFSQSSHLTQHQRIHTGEKPYKCNECDKAFSRSTHLTEHQNTHTGEKPYNCNECRKTFSQSTYLIQHQRIHSGEKPFGCNDCGKSFRYRSALNKHQRLHPGI

SEQ ID NO: 70383 - protein, 751 aa, Homo sapiens; identical to SEQ ID NO: 70381

SEQ ID NO: 70384 - protein, 77 aa, Homo sapiens
KAFSQRTHLVQHQRIHTGEKPYTCNECGKAFSQRGHFMEHQKIHTGEKPFKCDECDKTFTRSTHLTTSKNSYWRKNL

SEQ ID NO: 70385 - protein, 584 aa, Homo sapiens
MMENYGNLVSLDVLNRDKDEEPTVKQEIEEIEEEVEPQGVIVTRIKSEIDQDPMGRETFELVGRLDKQRGIFLWEIPRESLTQEQRMFRENTNIIRKRPNSEEKCHKCEECGKGFVRKAHFIQHQRVHTGEKPFQCNECGKSFSRSSFVIEHQRIHTGERPYECNYCGKTFSVSSTLIRHQRIHTGERPYQCNQCKQSFSQRRSLVKHQRIHTGEKPHKCSDCGKAFSWKSHLIEHQRTHTGEKPYHCTKCKKSFSRNSLLVEHQRIHTGERPHKCGECGKAFRLSTYLIQHQKIHTGEKPFLCIECGKSFSRSSFLIEHQRIHTGERPYQCKECGKSFSQLCNLTRHQRIHTGDKPHKCEECGKAFSRSSGLIQHQRIHTREKTYPYNETKESFDPNCSLVIQQEVYPKEKSYKCDECGKTFSVSAHLVQHQRIHTGEKPYLCTVCGKSFSRSSFLIEHQRIHTGERPYLCRQCGKSFSQLCNLIRHQGVHTGNKPHKCDECGKAFSRNSGLIQHQRIHTGEKPYKCEKCDKSFSQQRSLVNHQKIHAEVKTQETHECDACGEAFNCRISLIQHQKLHTAWMQ

SEQ ID NO: 70386 - protein, 626 aa, Homo sapiens
MASPSPPPESKGLLTFEDVAVFFTQEEWDYLDPAQRSLYKDVMMENYGNLVSLDVLNRDKDEEPTVKQEIEEIEEEVEPQGVIVTRIKSEIDQDPMGRETFELVGRLDKQRGIFLWEIPRESLTQEQRMFRENTNIIRKRPNSEEKCHKCEECGKGFVRKAHFIQHQRVHTGEKPFQCNECGKSFSRSSFVIEHQRIHTGERPYECNYCGKTFSVSSTLIRHQRIHTGERPYQCNQCKQSFSQRRSLVKHQRIHTGEKPHKCSDCGKAFSWKSHLIEHQRTHTGEKPYHCTKCKKSFSRNSLLVEHQRIHTGERPHKCGECGKAFRLSTYLIQHQKIHTGEKPFLCIECGKSFSRSSFLIEHQRIHTGERPYQCKECGKSFSQLCNLTRHQRIHTGDKPHKCEECGKAFSRSSGLIQHQRIHTREKTYPYNETKESFDPNCSLVIQQEVYPKEKSYKCDECGKTFSVSAHLVQHQRIHTGEKPYLCTVCGKSFSRSSFLIEHQRIHTGERPYLCRQCGKSFSQLCNLIRHQGVHTGNKPHKCDECGKAFSRNSGLIQHQRIHTGEKPYKCEKCDKSFSQQRSLVNHQKIHAEVKTQETHECDACGEAFNCRISLIQHQKLHTAWMQ

SEQ ID NO: 70387 - protein, 612 aa, Homo sapiens
MASPSPPPESKEEWDYLDPAQRSLYKDVMMENYGNLVSLDVLNRDKDEEPTVKQEIEEIEEEVEPQGVIVTRIKSEIDQDPMGRETFELVGRLDKQRGIFLWEIPRESLTQEQRMFRENTNIIRKRPNSEEKCHKCEECGKGFVRKAHFIQHQRVHTGEKPFQCNECGKSFSRSSFVIEHQRIHTGERPYECNYCGKTFSVSSTLIRHQRIHTGERPYQCNQCKQSFSQRRSLVKHQRIHTGEKPHKCSDCGKAFSWKSHLIEHQRTHTGEKPYHCTKCKKSFSRNSLLVEHQRIHTGERPHKCGECGKAFRLSTYLIQHQKIHTGEKPFLCIECGKSFSRSSFLIEHQRIHTGERPYQCKECGKSFSQLCNLTRHQRIHTGDKPHKCEECGKAFSRSSGLIQHQRIHTREKTYPYNETKESFDPNCSLVIQQEVYPKEKSYKCDECGKTFSVSAHLVQHQRIHTGEKPYLCTVCGKSFSRSSFLIEHQRIHTGERPYLCRQCGKSFSQLCNLIRHQGVHTGNKPHKCDECGKAFSRNSGLIQHQRIHTGEKPYKCEKCDKSFSQQRSLVNHQKIHAEVKTQETHECDACGEAFNCRISLIQHQKLHTAWMQ

SEQ ID NO: 70388 - protein, 458 aa, Homo sapiens
MAAMPLKAQYQEMVTFEDVAVHFTKTEWTGLSPAQRALYRSVMLENFGNLTALGYPVPKPALISLLERGDMAWGLEAQDDPPAERTKNVCKDVETNIDSESTLIQGISEERDGMMSHGQLKSVPQRTDFPETRNVEKHQDIPTVKNIQGKVPRIPCARKPFICEECGKSFSYFSYYARHQRIHTGEKPFECSECGKAFNGNSSLIRHQRIHTGERPYQCEECGRAFNDNANLIRHQRIHSGDRPYYCTECGNSFTSSSEFVIHQRIHTGEKPYECNECGKAFVGNSPLLRHQKIHTGEKPYECNECGKSFGRTSHLSQHQRIHTGEKPYSCKVCGQAFNFHTKLTRHQRIHSEEKPFDCVDCGKAFSAQEQLKRHLRIHTQESSYVCDECGKALTSKRNLHQHQRIHTGEKPYECSKYEKAFGTSSQLGHLEHVYSGEKPVLDICRFGLPEFFTPFYW

SEQ ID NO: 70389 - protein, 578 aa, Homo sapiens
MAEESRKPSAPSPPDQTPEEDLVIVKVEEDHGWDQESSLHESNPLGQEVFRLRFRQLRYQETLGPREALIQLRALCHQWLRPDLNTKEQILELLVLEQFLTILPEELQTLVKEHQLENGEEVVTLLEDLERQIDILGRPVSARVHGHRVLWEEVVHSASAPEPPNTQLQSEATQHKSPVPQESQERAMSTSQSPTRSQKGSSGDQEMTATLLTAGFQTLEKIEDMAVSLIREEWLLDPSQKDLCRDNRPENFRNMFSLGGETRSENRELASKQVISTGIQPHGETAAKCNGDVIRGLEHEEARDLLGRLERQRGNPTQERRHKCDECGKSFAQSSGLVRHWRIHTGEKPYQCNVCGKAFSYRSALLSHQDIHNKVKRYHCKECGKAFSQNTGLILHQRIHTGEKPYQCNQCGKAFSQSAGLILHQRIHSGERPYECNECGKAFSHSSHLIGHQRIHTGEKPYECDECGKTFRRSSHLIGHQRSHTGEKPYKCNECGRAFSQKSGLIEHQRIHTGERPYKCKECGKAFNGNTGLIQHLRIHTGEKPYQCNECGKAFIQRSSLIRHQRIHSGEKSESISV

SEQ ID NO: 70390 - protein, 578 aa, Homo sapiens; identical to SEQ ID NO: 70389

SEQ ID NO: 70391 - protein, 158 aa, Homo sapiens
MAEESRKPSAPSPPDQTPEEDLVIVKVEEDHGWDQESSLHESNPLGQEVFRLRFRQLRYQETLGPREALIQLRALCHQWLRPDLNTKEQILELLVLEQFLTILPEELQTLVKEHQLENGEEVVTLLEDLERQIDILGRPVSRRRSQLAYMDIGYSGRR

SEQ ID NO: 70392 - protein, 394 aa, Homo sapiens
MNTNSKEVLSLGVQVPEAWEELLTMKVEAKSHLQWQESRLKRSNPLAREIFRRHFRQLCYQETPGPREALTRLQELCYQWLRPHVSTKEQILDLLVLEQFLSILPKELQGWVREHCPESGEEAVILLEDLERELDEPQHEMVAHRHRQEVLCKEMVPLAEQTPLTLQSQPKEPQLTCDSAQKCHSIGETDEVTKTEDRELVLRKDCPKIVEPHGKMFNEQTWEVSQQDPSHGEVGEHKDRIERQWGNLLGEGQHKCDECGKSFTQSSGLIRHQRIHTGERPYECNECGKAFSRSSGLFNHRGIHNIQKRYHCKECGKVFSQSAGLIQHQRIHKGEKPYQCSQCSKSYSRRSFLIEHQRSHTGERPHQCIECGKSFNRHCNLIRHQKIHTVAELV

SEQ ID NO: 70393 - protein, 41 aa, Homo sapiens
MNTNSKEVLSLGVQVPEAWEELLTMKVEAKSHLQWQESRLK

SEQ ID NO: 70394 - protein, 394 aa, Homo sapiens; identical to SEQ ID NO: 70392

SEQ ID NO: 70395 - protein, 445 aa, Homo sapiens
MNTNSKEVLSLGVQVPEAWEELLTMKVEAKSHLQWQESRLKRSNPLAREIFRRHFRQLCYQETPGPREALTRLQELCYQWLRPHVSTKEQILDLLVLEQFLSILPKELQGWVREHCPESGEEAVILLEDLERELDEPQHEMVAHRHRQEVLCKEMVPLAEQTPLTLQSQPKEPQLTCDSAQKCHSIGETDLIRSLRRRAVLIPLGAHLFSTDTFLFSKPVVIPQLKGGGETWPNNRGVLRDEVTKTEDRELVLRKDCPKIVEPHGKMFNEQTWEVSQQDPSHGEVGEHKDRIERQWGNLLGEGQHKCDECGKSFTQSSGLIRHQRIHTGERPYECNECGKAFSRSSGLFNHRGIHNIQKRYHCKECGKVFSQSAGLIQHQRIHKGEKPYQCSQCSKSYSRRSFLIEHQRSHTGERPHQCIECGKSFNRHCNLIRHQKIHTVAELV

SEQ ID NO: 70396 - protein, 606 aa, Homo sapiens
MTLLTFRDVAIEFSLEEWKCLDLAQQNLYRDVMLENYRNLFSVGLTVCKPGLITCLEQRKEPWNVKRQEAADGHPEMGFHHATQACLELLGSSDLPASASQSAGITGVNHRAQPGLNVSVDKFTAMSSHFTQDLLPEQGIQDAFPKRILRGYGNCGLDNLYLRKDWESLDECKLQKDYNGLNQCSSTTHSKIFQYNKYVKIFDNFSNLHRRNISNTGEKPFKCQECGKSFQMLSFLTEHQKIHTGKKFQKCGECGKTFIQCSHFTEPENIDTGEKPYKCQECNNVIKTCSVLTKNRIYAGGEHYRCEEFGKVFNQCSHLTEHEHGTEEKPCKYEECSSVFISCSSLSNQQMILAGEKLSKCETWYKGFNHSPNPSKHQRNEIGGKPFKCEECDSIFKWFSDLTKHKRIHTGEKPYKCDECGKAYTQSSHLSEHRRIHTGEKPYQCEECGKVFRTCSSLSNHKRTHSEEKPYTCEECGNIFKQLSDLTKHKKTHTGEKPYKCDECGKNFTQSSNLIVHKRIHTGEKPYKCEECGRVFMWFSDITKHKKTHTGEKPYKCDECGKNFTQSSNLIVHKRIHTGEKPYKCEKCGKAFTQFSHLTVHESIHT

SEQ ID NO: 70397 - protein, 561 aa, Homo sapiens
MAGAQTLLTFRDVAIEFSLEEWKCLDLAQQNLYRDVMLENYRNLFSVGLTVCKPGLITCLEQRKEPWNVKRQEAADGHPAMSSHFTQDLLPEQGIQDAFPKRILRGYGNCGLDNLYLRKDWESLDECKLQKDYNGLNQCSSTTHSKIFQYNKYVKIFDNFSNLHRRNISNTGEKPFKCQECGKSFQMLSFLTEHQKIHTGKKFQKCGECGKTFIQCSHFTEPENIDTGEKPYKCQECNNVIKTCSVLTKNRIYAGGEHYRCEEFGKVFNQCSHLTEHEHGTEEKPCKYEECSSVFISCSSLSNQQMILAGEKLSKCETWYKGFNHSPNPSKHQRNEIGGKPFKCEECDSIFKWFSDLTKHKRIHTGEKPYKCDECGKAYTQSSHLSEHRRIHTGEKPYQCEECGKVFRTCSSLSNHKRTHSEEKPYTCEECGNIFKQLSDLTKHKKTHTGEKPYKCDECGKNFTQSSNLIVHKRIHTGEKPYKCEECGRVFMWFSDITKHKKTHTGEKPYKCDECGKNFTQSSNLIVHKRIHTGEKPYKCEKCGKAFTQFSHLTVHESIHT

SEQ ID NO: 70398 - protein, 557 aa, Homo sapiens
MTLLTFRDVAIEFSLEEWKCLDLAQQNLYRDVMLENYRNLFSVGLTVCKPGLITCLEQRKEPWNVKRQEAADGHPAMSSHFTQDLLPEQGIQDAFPKRILRGYGNCGLDNLYLRKDWESLDECKLQKDYNGLNQCSSTTHSKIFQYNKYVKIFDNFSNLHRRNISNTGEKPFKCQECGKSFQMLSFLTEHQKIHTGKKFQKCGECGKTFIQCSHFTEPENIDTGEKPYKCQECNNVIKTCSVLTKNRIYAGGEHYRCEEFGKVFNQCSHLTEHEHGTEEKPCKYEECSSVFISCSSLSNQQMILAGEKLSKCETWYKGFNHSPNPSKHQRNEIGGKPFKCEECDSIFKWFSDLTKHKRIHTGEKPYKCDECGKAYTQSSHLSEHRRIHTGEKPYQCEECGKVFRTCSSLSNHKRTHSEEKPYTCEECGNIFKQLSDLTKHKKTHTGEKPYKCDECGKNFTQSSNLIVHKRIHTGEKPYKCEECGRVFMWFSDITKHKKTHTGEKPYKCDECGKNFTQSSNLIVHKRIHTGEKPYKCEKCGKAFTQFSHLTVHESIHT

SEQ ID NO: 70399 - protein, 629 aa, Homo sapiens
MTLLTFRDVAIEFSLEEWKCLDLAQQNLYRDVMLENYRNLFSVGLTVCKPGLITCLEQRKEPWNVKRQEAADGHPEMGFHHATQACLELLGSSDLPASASQSAGITGVNHRAQPGLNVSVDKFTALCSPGVLQTVKWFLEFRCIFSLAMSSHFTQDLLPEQGIQDAFPKRILRGYGNCGLDNLYLRKDWESLDECKLQKDYNGLNQCSSTTHSKIFQYNKYVKIFDNFSNLHRRNISNTGEKPFKCQECGKSFQMLSFLTEHQKIHTGKKFQKCGECGKTFIQCSHFTEPENIDTGEKPYKCQECNNVIKTCSVLTKNRIYAGGEHYRCEEFGKVFNQCSHLTEHEHGTEEKPCKYEECSSVFISCSSLSNQQMILAGEKLSKCETWYKGFNHSPNPSKHQRNEIGGKPFKCEECDSIFKWFSDLTKHKRIHTGEKPYKCDECGKAYTQSSHLSEHRRIHTGEKPYQCEECGKVFRTCSSLSNHKRTHSEEKPYTCEECGNIFKQLSDLTKHKKTHTGEKPYKCDECGKNFTQSSNLIVHKRIHTGEKPYKCEECGRVFMWFSDITKHKKTHTGEKPYKCDECGKNFTQSSNLIVHKRIHTGEKPYKCEKCGKAFTQFSHLTVHESIHT

SEQ ID NO: 70400 - protein, 561 aa, Homo sapiens; identical to SEQ ID NO: 70397

SEQ ID NO: 70401 - protein, 610 aa, Homo sapiens
MAGAQTLLTFRDVAIEFSLEEWKCLDLAQQNLYRDVMLENYRNLFSVGLTVCKPGLITCLEQRKEPWNVKRQEAADGHPEMGFHHATQACLELLGSSDLPASASQSAGITGVNHRAQPGLNVSVDKFTAMSSHFTQDLLPEQGIQDAFPKRILRGYGNCGLDNLYLRKDWESLDECKLQKDYNGLNQCSSTTHSKIFQYNKYVKIFDNFSNLHRRNISNTGEKPFKCQECGKSFQMLSFLTEHQKIHTGKKFQKCGECGKTFIQCSHFTEPENIDTGEKPYKCQECNNVIKTCSVLTKNRIYAGGEHYRCEEFGKVFNQCSHLTEHEHGTEEKPCKYEECSSVFISCSSLSNQQMILAGEKLSKCETWYKGFNHSPNPSKHQRNEIGGKPFKCEECDSIFKWFSDLTKHKRIHTGEKPYKCDECGKAYTQSSHLSEHRRIHTGEKPYQCEECGKVFRTCSSLSNHKRTHSEEKPYTCEECGNIFKQLSDLTKHKKTHTGEKPYKCDECGKNFTQSSNLIVHKRIHTGEKPYKCEECGRVFMWFSDITKHKKTHTGEKPYKCDECGKNFTQSSNLIVHKRIHTGEKPYKCEKCGKAFTQFSHLTVHESIHT

SEQ ID NO: 70402 - protein, 131 aa, Homo sapiens
MAGAQTLLTFRDVAIEFSLEEWKCLDLAQQNLYRDVMLENYRNLFSVGLTVCKPGLITCLEQRKEPWNVKRQEAADGHPAMSSHFTQDLLPEQGIQDAFPKRILRGYGNCGLDNLYLRKDWESLDECKLQK

SEQ ID NO: 70403 - protein, 115 aa, Homo sapiens
MAGAQTLLTFRDVAIEFSLEEWKCLDLAQQNLYRDVMLENYRNLFSVGLTVCKPGLITCLEQRKEPWNVKRQEAADGHPEMGFHHATQACLELLGSSDLPASASQSAGITGVNHR

SEQ ID NO: 70404 - protein, 426 aa, Homo sapiens
MAAVSPTTRCQESVTFEDVAVVFTDEEWSRLVPIQRDLYKEVMLENYNSIVSLGLPVPQPDVIFQLKRGDKPWMVDLHGSEEREWPESVSLDWETKPEIHDASDKKSEGSLRECLGRQSPLCPKFEVHTPNGRMGTEKQSPSGETRKKSLSRDKGLRRRRSALSREILTKERHQECSDCGKTFFDHSSLTRHQRTHTGEKPYDCRECGKAFSHRSSLSRHLMSHTGESPYECSVCSKAFFDRSSLTVHQRIHTGEKPFQCNECGKAFFDRSSLTRHQRIHTGESPYECHQCGKAFSQKSILTRHQLIHTGRKPYECNECGKAFYGVSSLNRHQKAHAGDPRYQCNECGKAFFDRSSLTQHQKIHTGDKPYECSECGKAFSQRCRLTRHQRVHTGEKPFECTVCGKVFSSKSSVIQHQRRYAKQGID

SEQ ID NO: 70405 - protein, 384 aa, Homo sapiens
MLENYNSIVSLGLPVPQPDVIFQLKRGDKPWMVDLHGSEEREWPESVSLDWETKPEIHDASDKKSEGSLRECLGRQSPLCPKFEVHTPNGRMGTEKQSPSGETRKKSLSRDKGLRRRRSALSREILTKERHQECSDCGKTFFDHSSLTRHQRTHTGEKPYDCRECGKAFSHRSSLSRHLMSHTGESPYECSVCSKAFFDRSSLTVHQRIHTGEKPFQCNECGKAFFDRSSLTRHQRIHTGESPYECHQCGKAFSQKSILTRHQLIHTGRKPYECNECGKAFYGVSSLNRHQKAHAGDPRYQCNECGKAFFDRSSLTQHQKIHTGDKPYECSECGKAFSQRCRLTRHQRVHTGEKPFECTVCGKVFSSKSSVIQHQRRYAKQGID

SEQ ID NO: 70406 - protein, 346 aa, Homo sapiens
MLENYNSIVSLDWETKPEIHDASDKKSEGSLRECLGRQSPLCPKFEVHTPNGRMGTEKQSPSGETRKKSLSRDKGLRRRRSALSREILTKERHQECSDCGKTFFDHSSLTRHQRTHTGEKPYDCRECGKAFSHRSSLSRHLMSHTGESPYECSVCSKAFFDRSSLTVHQRIHTGEKPFQCNECGKAFFDRSSLTRHQRIHTGESPYECHQCGKAFSQKSILTRHQLIHTGRKPYECNECGKAFYGVSSLNRHQKAHAGDPRYQCNECGKAFFDRSSLTQHQKIHTGDKPYECSECGKAFSQRCRLTRHQRVHTGEKPFECTVCGKVFSSKSSVIQHQRRYAKQGID

SEQ ID NO: 70407 - protein, 439 aa, Homo sapiens
MAAVSPTTRCQESVTFEDVAVVFTDEEWSRLVPIQRDLYKEVMLENYNSIVSLGLPVPQPDVIFQLKRGDKPWMVDLHGSEEREWPESVSLAQEKNCICFLFVPDWETKPEIHDASDKKSEGSLRECLGRQSPLCPKFEVHTPNGRMGTEKQSPSGETRKKSLSRDKGLRRRRSALSREILTKERHQECSDCGKTFFDHSSLTRHQRTHTGEKPYDCRECGKAFSHRSSLSRHLMSHTGESPYECSVCSKAFFDRSSLTVHQRIHTGEKPFQCNECGKAFFDRSSLTRHQRIHTGESPYECHQCGKAFSQKSILTRHQLIHTGRKPYECNECGKAFYGVSSLNRHQKAHAGDPRYQCNECGKAFFDRSSLTQHQKIHTGDKPYECSECGKAFSQRCRLTRHQRVHTGEKPFECTVCGKVFSSKSSVIQHQRRYAKQGID

SEQ ID NO: 70408 - protein, 536 aa, Homo sapiens
MMFQDSVAFEDVAVSFTQEEWALLDPSQKNLYRDVMQETFKNLTSVGKTWKVQNIEDEYKNPRRNLSLMREKLCESKESHHCGESFNQIADDMLNRKTLPGITPCESSVCGEVGTGHSSLNTHIRADTGHKSSEYQEYGENPYRNKECKKAFSYLDSFQSHDKACTKEKPYDGKECTETFISHSCIQRHRVMHSGDGPYKCKFCGKAFYFLNLCLIHERIHTGVKPYKCKQCGKAFTRSTTLPVHERTHTGVNADECKECGNAFSFPSEIRRHKRSHTGEKPYECKQCGKVFISFSSIQYHKMTHTGEKPYECKQCGKAFRCGSHLQKHGRTHTGEKPYECRQCGKAFRCTSDLQRHEKTHTEDKPYGCKQCGKGFRCASQLQIHERTHSGEKPHECKECGKVFKYFSSLRIHERTHTGEKPHECKQCGKAFRYFSSLHIHERTHTGDKPYECKVCGKAFTCSSSIRYHERTHTGEKPYECKHCGKAFISNYIRYHERTHTGEKPYQCKQCGKAFIVPVHVENMKELIPLIDEKSF

SEQ ID NO: 70409 - protein, 532 aa, Homo sapiens
MMFQDSVAFEDVAVSFTQEEWALLDPSQKNLYRDVMQETFKNLTSVGKTWKVQNIEDEYKNPRRNLSLMREKLCESKESHHCGESFNQIADDMLNRKTLPGITPCESSVCGEVGTGHSSLNTHIRADTGHKSSEYQEYGENPYRNKECKKAFSYLDSFQSHDKACTKEKPYDGKECTETFISHSCIQRHRVMHSGDGPYKCKFCGKAFYFLNLCLIHERIHTGVKPYKCKQCGKAFTRSTTLPVHERTHTGVNADECKECGNAFSFPSEIRRHKRSHTGEKPYECKQCGKVFISFSSIQYHKMTHTGEKPYECKQCGKAFRCGSHLQKHGRTHTGEKPYECRQCGKAFRCTSDLQRHEKTHTEDKPYGCKQCGKGFRCASQLQIHERTHSGEKPHECKECGKVFKYFSSLRIHERTHTGEKPHECKQCGKAFRYFSSLHIHERTHTGDKPYECKVCGKAFTCSSSIRYHERTHTGEKPYECKHCGKAFISNYIRYHERTHTGEKPYQCKQCGKAFIRASSCREHERTHTINR

SEQ ID NO: 70410 - protein, 394 aa, Homo sapiens
MMAAKVVPMPPKPKQSFILRVPPDSKLGQDLLRDATNGPKTIHQLVLEHFLTFLPKPSLVQPSQKVKETLVIMKDVSSSLQNRVHPRPLVKLLPKGVQKEQETVSLYLKANPELVVFEDLNVFHCQEECVSLDPTQQLTSEKEDDSSVGEMMLLAVNGSNPEGEDPEREPVENEDYREKSSDDDEMDSSLVSQQPPDNQEKERLNTSIPQKRKMRNLLVTIENDTPLEELSKYVDISIIALTRNRRTRRWYTCPLCGKQFNESSYLISHQRTHTGEKPYDCNHCGKSFNHKTNLNKHERIHTGEKPYSCSQCGKNFRQNSHRSRHEGIHIREKIFKCPECGKTFPKNEEFVLHLQSHEAERPYGCKKCGRRFGRLSNCTRHEKTHSACKTRKQK

SEQ ID NO: 70411 - protein, 395 aa, Homo sapiens
MMAAKVVPMPPKPKQSFILRVPPDSKLGQDLLRDATNGPKTIHQLVLEHFLTFLPKPSLVQPSQKVKETLVIMKDVSSSLQNRVHPRPLVKLLPKGVQKEQETVSLYLKANPEELVVFEDLNVFHCQEECVSLDPTQQLTSEKEDDSSVGEMMLLAVNGSNPEGEDPEREPVENEDYREKSSDDDEMDSSLVSQQPPDNQEKERLNTSIPQKRKMRNLLVTIENDTPLEELSKYVDISIIALTRNRRTRRWYTCPLCGKQFNESSYLISHQRTHTGEKPYDCNHCGKSFNHKTNLNKHERIHTGEKPYSCSQCGKNFRQNSHRSRHEGIHIREKIFKCPECGKTFPKNEEFVLHLQSHEAERPYGCKKCGRRFGRLSNCTRHEKTHSACKTRKQK

SEQ ID NO: 70412 - protein, 394 aa, Homo sapiens
MMAAKVVPMPPKPKQSFILRVPPDSKLGQDLLRDATNGPKTIHQLVLEHFLTFLPKPSLVQPSQKVKETLVIMKDVSSSLQNRVHPRPLVKLLPKGVQKEQETVSLYLKANPEELVVFEDLNVFHCQEECVSLDPTQQLTSEKEDDSSVGEMMLLVNGSNPEGEDPEREPVENEDYREKSSDDDEMDSSLVSQQPPDNQEKERLNTSIPQKRKMRNLLVTIENDTPLEELSKYVDISIIALTRNRRTRRWYTCPLCGKQFNESSYLISHQRTHTGEKPYDCNHCGKSFNHKTNLNKHERIHTGEKPYSCSQCGKNFRQNSHRSRHEGIHIREKIFKCPECGKTFPKNEEFVLHLQSHEAERPYGCKKCGRRFGRLSNCTRHEKTHSACKTRKQK

SEQ ID NO: 70413 - protein, 394 aa, Homo sapiens; identical to SEQ ID NO: 70412

SEQ ID NO: 70414 - protein, 395 aa, Homo sapiens; identical to SEQ ID NO: 70411

SEQ ID NO: 70415 - protein, 648 aa, Homo sapiens
MATAVEPEDQDLWEEEGILMVKLEDDFTCRPESVLQRDDPVLETSHQNFRRFRYQEAASPREALIRLRELCHQWLRPERRTKEQILELLVLEQFLTVLPGELQSWVRGQRPESGEEAVTLVEGLQKQPRRPRRWVTVHVHGQEVLSEETVHLGVEPESPNELQDPVQSSTPEQSPEETTQSPDLGAPAEQRPHQEEELQTLQESEVPVPEDPDLPAERSSGDSEMVALLTALSQGLVTFKDVAVCFSQDQWSDLDPTQKEFYGEYVLEEDCGIVVSLSFPIPRPDEISQVREEEPWVPDIQEPQETQEPEILSFTYTGDRSKDEEECLEQEDLSLEDIHRPVLGEPEIHQTPDWEIVFEDNPGRLNERRFGTNISQVNSFVNLRETTPVHPLLGRHHDCSVCGKSFTCNSHLVRHLRTHTGEKPYKCMECGKSYTRSSHLARHQKVHKMNAPYKYPLNRKNLEETSPVTQAERTPSVEKPYRCDDCGKHFRWTSDLVRHQRTHTGEKPFFCTICGKSFSQKSVLTTHQRIHLGGKPYLCGECGEDFSEHRRYLAHRKTHAAEELYLCSECGRCFTHSAAFAKHLRGHASVRPCRCNECGKSFSRRDHLVRHQRTHTGEKPFTCPTCGKSFSRGYHLIRHQRTHSEKTS

SEQ ID NO: 70416 - protein, 648 aa, Homo sapiens; identical to SEQ ID NO: 70415

SEQ ID NO: 70417 - protein, 648 aa, Homo sapiens; identical to SEQ ID NO: 70415

SEQ ID NO: 70418 - protein, 554 aa, Homo sapiens
MSADGGGIQDTQDKETPPEVPDRGHPHQEMPSKLGEAVPSGDTQESLHIKMEPEEPHSEGASQEDGAQGAWGWAPLSHGSKEKALFLPGGALPSPRIPVLSREGRTRDRQMAAALLTAWSQMPVTFEDVALYLSREEWGRLDHTQQNFYRDVLQKKNGLSLGFPFSRPFWAPQAHGKGEASGSSRQAGDEKEWRGACTGAVEVGQRVQTSSVAALGNVKPFRTRAGRVQWGVPQCAQEAACGRSSGPAKDSGQPAEPDRTPDAAPPDPSPTEPQEYRVPEKPNEEEKGAPESGEEGLAPDSEVGRKSYRCEQCGKGFSWHSHLVTHRRTHTGEKPYACTDCGKRFGRSSHLIQHQIIHTGEKPYTCPACRKSFSHHSTLIQHQRIHTGEKPYVCDRCAKRFTRRSDLVTHQGTHTGAKPHKCPICAKCFTQSSALVTHQRTHTGVKPYPCPECGKCFSQRSNLIAHNRTHTGEKPYHCLDCGKSFSHSSHLTAHQRTHRGVRPYACPLCGKSFSRRSNLHRHEKIHTTGPKALAMLMLGAAAAGALATPPPAPT

SEQ ID NO: 70419 - protein, 554 aa, Homo sapiens; identical to SEQ ID NO: 70418

SEQ ID NO: 70420 - protein, 279 aa, Homo sapiens
MSADGGGIQDTQDKETPPEVPDRGHPHQEMPSKLGEAVPSGDTQESLHIKMEPEEPHSEGASQEDGAQGAWGWAPLSHGSKEKALFLPGGALPSPRIPVLSREGRTRDRQMAAALLTAWSQMPVTFEDVALYLSREEWGRLDHTQQNFYRDVLQKKNGLSLGFPFSRPFWAPQAHGKGEASGSSRQAGDEKEWRGACTGAVEVGQRVQTSSVAALGNVKPFRTRAGRVQWGVPQCAQEAACGRSSGPAKDSGQPAEPDRTPDAAPPDPSPTEPQEYRVP

SEQ ID NO: 70421 - protein, 118 aa, Homo sapiens
MSADGGGIQDTQDKETPPEVPDRGHPHQEMPSKLGEAVPSGDTQESLHIKMEPEEPHSEGASQEDGAQGAWGWAPLSHGSKEKALFLPGGALPSPRIPVLSREGRTRDRQMAAALLTA

SEQ ID NO: 70422 - protein, 463 aa, Homo sapiens
MGRKKKKQLKPWCWYCNRDFDDEKILIQHQKAKHFKCHICHKKLYTGPGLAIHCMQVHKETIDAVPNAIPGRTDIELEIYGMEGIPEKDMDERRRLLEQKTQESQKKKQQDDSDEYDDDDSAASTSFQPQPVQPQQGYIPPMAQPGLPPVPGAPGMPPGIPPLMPGVPPLMPGMPPVMPGMPPGLHHQRKYTQSFCGENIMMPMGGMMPPGPGIPPLMPGMPPGMPPPVPRPGIPPMTQAQAVSAPGILNRPPAPTATVPAPQPPVTKPLFPSAGQAQAAVQGPVGTDFKPLNSTPATTTEPPKPTFPAYTQSTASTTSTTNSTAAKPAASITSKPATLTTTSATSKLIHPDEDISLEERRAQLPKYQRNLPRPGQAPIGNPPVGPIGGMMPPQPGIPQQQGMRPPMPPHGQYGGHHQGMPGYLPGAMPPYGQGPPMVPPYQGGPPRPPMGMRPPVMSQGGRY

SEQ ID NO: 70423 - protein, 395 aa, Homo sapiens
MGRKKKKQLKPWCWYCNRDFDDEKILIQHQKAKHFKCHICHKKLYTGLPPVPGAPGMPPGIPPLMPGVPPLMPGMPPVMPGMPPGLHHQRKYTQSFCGENIMMPMGGMMPPGPGIPPLMPGMPPGMPPPVPRPGIPPMTQAQAVSAPGILNRPPAPTATVPAPQPPVTKPLFPSAGQMGTPVTSSSTASSNSESLSASSKALFPSTAQAQAAVQGPVGTDFKPLNSTPATTTEPPKPTFPAYTQSTASTTSTTNSTAAKPAASITSKPATLTTTSATSKLIHPDEDISLEERRAQLPKYQRNLPRPGQAPIGNPPVGPIGGMMPPQPGIPQQQGMRPPMPPHGQYGGHHQGMPGYLPGAMPPYGQGPPMVPPYQGGPPRPPMGMRPPVMSQGGRY

SEQ ID NO: 70424 - protein, 478 aa, Homo sapiens
MGRKKKKQLKPWCWYCNRDFDDEKILIQHQKAKHFKCHICHKKLYTGPGLAIHCMQVHKETIDAVPNAIPGRTDIELEIYGMEGIPEKDMDERRRLLEQKTQESQKKKQQDDSDEYDDDDSAASTSFQPQPVQPQQGYIPPMAQPGLPPVPGAPGMPPGIPPLMPGVPPLMPGMPPVMPGMPPGMMPMGGMMPPGPGIPPLMPGMPPGMPPPVPRPGIPPMTQAQAVSAPGILNRPPAPTATVPAPQPPVTKPLFPSAGQMGTPVTSSSTASSNSESLSASSKALFPSTAQAQAAVQGPVGTDFKPLNSTPATTTEPPKPTFPAYTQSTASTTSTTNSTAAKPAASITSKPATLTTTSATSKLIHPDEDISLEERRAQLPKYQRNLPRPGQAPIGNPPVGPIGGMMPPQPGIPQQQGMRPPMPPHGQYGGHHQGMPGYLPGAMPPYGQGPPMVPPYQGGPPRPPMGMRPPVMSQGGRY

SEQ ID NO: 70425 - protein, 494 aa, Homo sapiens
MGRKKKKQLKPWCWYCNRDFDDEKILIQHQKAKHFKCHICHKKLYTGPGLAIHCMQVHKETIDAVPNAIPGRTDIELEIYGMEGIPEKDMDERRRLLEQKTQESQKKKQQDDSDEYDDDDSAASTSFQPQPVQPQQGYIPPMAQPGLPPVPGAPGMPPGIPPLMPGVPPLMPGMPPVMPGMPPGLHHQRKYTQSFCGENIMMPMGGMMPPGPGIPPLMPGMPPGMPPPVPRPGIPPMTQAQAVSAPGILNRPPAPTATVPAPQPPVTKPLFPSAGQMGTPVTSSSTASSNSESLSASSKALFPSTAQAQAAVQGPVGTDFKPLNSTPATTTEPPKPTFPAYTQSTASTTSTTNSTAAKPAASITSKPATLTTTSATSKLIHPDEDISLEERRAQLPKYQRNLPRPGQAPIGNPPVGPIGGMMPPQPGIPQQQGMRPPMPPHGQYGGHHQGMPGYLPGAMPPYGQGPPMVPPYQGGPPRPPMGMRPPVMSQGGRY

SEQ ID NO: 70426 - protein, 447 aa, Homo sapiens
MGRKKKKQLKPWCWYCNRDFDDEKILIQHQKAKHFKCHICHKKLYTGPGLAIHCMQVHKETIDAVPNAIPGRTDIELEIYGMEGIPEKDMDERRRLLEQKTQESQKKKQQDDSDEYDDDDSAASTSFQPQPVQPQQGYIPPMAQPGLPPVPGAPGMPPGIPPLMPGVPPLMPGMPPVMPGMPPGMMPMGGMMPPGPGIPPLMPGMPPGMPPPVPRPGIPPMTQAQAVSAPGILNRPPAPTATVPAPQPPVTKPLFPSAGQAQAAVQGPVGTDFKPLNSTPATTTEPPKPTFPAYTQSTASTTSTTNSTAAKPAASITSKPATLTTTSATSKLIHPDEDISLEERRAQLPKYQRNLPRPGQAPIGNPPVGPIGGMMPPQPGIPQQQGMRPPMPPHGQYGGHHQGMPGYLPGAMPPYGQGPPMVPPYQGGPPRPPMGMRPPVMSQGGRY

SEQ ID NO: 70427 - protein, 496 aa, Homo sapiens
NTVMGRKKKKQLKPWCWYCNRDFDDEKILIQHQKAKHFKCHICHKKLYTGPGLAIHCMQVHKETIDAVPNAIPGRTDIELEIYGMEGIPEKDMDERRRLLEQKTQESQKKKQQDDSDEYDDDDSAASTSFQPQPVQPQQGYIPPMAQPGLPPVPGAPGMPPGIPPLMPGVPPLMPGMPPVMPGMPPGLHHQRKYTQSFCGENIMMPMGGMMPPGPGIPPLMPGMPPGMPPPVPRPGIPPMTQAQAVSAPGILNRPPAPTATVPAPQPPVTKPLFPSAGQMGTPVTSSSTASSNSESLSASSKALFPSTAQAQAAVQGPVGTDFKPLNSTPATTTEPPKPTFPAYTQSTASTTSTTNSTAAKPAASITSKPATLTTTSATSKLIHPDEDISLEERRAQLPKYQRNLPRPGQAPIGNPPVGPIGGMMPPQPGIPQQQGMRPPMPPHGQYGGHHQGMPGYLPGAMPPYGQGPPMVPPYQGGPPRPPMGMRPPVMSQGLP

SEQ ID NO: 70428 - protein, 1280 aa, Homo sapiens
MGSLTFRDVAIEFSLEEWQCLDTAQQNLYRNVMLENYRNLVFLGIAAFKPDLIIFLEEGKESWNMKRHEMVEESPVICSHFAQDLWPEQGIEDSFQKVILRRYEKCGHENLHLKIGYTNVDECKVHKEGYNKLNQSLTTTQSKVFQRGKYANVFHKCSNSNRHKIRHTGKKHLQCKEYVRSFCMLSHLSQHKRIYTRENSYKCEEGGKAFNWSSTLTYYKSAHTGEKPYRCKECGKAFSKFSILTKHKVIHTGEKSYKCEECGKAFNQSAILTKHKIIHTGEKPNKCEECGKAFSKVSTLTTHKAIHAGEKPYKCKECGKAFSKVSTLITHKAIHAGEKPYKCKECGKAFSKFSILTKHKVIHTGEKPYKCEECGKAYKWPSTLSYHKKIHTGEKPYKCEECGKGFSMFSILTKHEVIHTGEKPYKCEECGKAFNWSSNLMEHKKIHTGETPYKCEECGKGFSMFSILTKHKVIHNGEKPYKCEECDKATHAGEKPYKCEECGKAFNWSSNLMEHKRIHTGEKPYKCEECGKSFSTFSILTKHKVIHTGEKPYKCEECGKAYKWSSTLSYHKKIHTVEKPYKCEECGKAFNQSAILIKHKRIHTGEKPYKCEECGKTFSKVSTLTTHKAIHAGEKPYKCKECGKTFIKVSTLTTHKAIHAGEKPYKCKECGKAFSKFSILTKHKVIHTGEKPYKCEECGKAFNWSSNLMEHKRIHTGEKPYKCEECGKSFSTFSVLTKHKVIHTGEKPYKCEECGKAYKWSSTLSYHKKIHTVEKPYKCEECGKAFNRSAILIKHKRIHTDEKPYKCEECGKTFSKVSTLTTHKAIHAGEKPYKCKECGKAFSKFSILTKHKVIHTGEKPYKCEECGKAYKWPSTLSYHKKIHTGEKPYKCEECGKGFSMFSILTKHEVIHTGEKPYKCEECGKAFSWLSVFSKHKKTHAGEKFYKCEACGKAYKSSSTLSYHKKIHTEEKPYKYEECGKGFSTFSILTKHKVIHTGEKPYKCEECGKAFNWSSNLMEHKKIHTGETPYKCEECDKAFSWPSSLTEHKATHAGEKPYKCEECGKAFSWPSRLTEHKATHAGEEPYKCEECGKAFNWSSNLMEHKRIHTGEKPYKCEECGKSFSTFSILTKHKVIHTGEKPYKCEECGKAYKWSSTLSYHKKIHTVEKPYKCEECGKGFVMFSILAKHKVIHTGEKLYKCEECGKAYKWPSTLRYHKKIHTGEKPYKCEECGKAFSTFSILTKHKVIHTGEKPYKCEECGKAFSWLSVFSKHKKIHTGEKL

SEQ ID NO: 70429 - protein, 40 aa, Homo sapiens
GKGFSMFSILTKHKATHAGEKPYKCEECGKAFNWSSNLME

SEQ ID NO: 70430 - protein, 1167 aa, Homo sapiens [sequence omitted]

SEQ ID NO: 70431 - protein, 495 aa, Homo sapiens
MAESAPARHRRKRRSTPLTSSTLPSQATEKSSYFQTTEISLWTVVAAIQAVEKKMESQAARLQSLEGRTGTAEKKLADCEKMAVEFGNQLEGKWAVLGTLLQEYGLLQRRLENVENLLRNRNFWILRLPPGSKGEAPKVSRSLENDGVCFTEQEWENLEDWQKELYRNVMESNYETLVSLKVLGQTEGEAELGTEMLGDLEEEGPGGAHPAGGVMIKQELQYTQEGPADLPGEFSCIAEEQAFLSPEQTELWGGQGSSVLLETGPGDSTLEEPVGSRVPSSSRTVGCPKQKSHRQVQLDQECGQGLKLKKDTSRPYECSECEITFRYKQQLATHLRSHSGWGSCTPEEPEESLRPRPRLKPQTKKAKLHQCDVCLRSFSCKVSLVTHQRCHLQEGPSAGQHVQERFSPNSLVALPGHIPWRKSRSSLICGYCGKSFSHPSDLVRHQRIHTGERPYSCTECEKSFVQKQHLLQHQKIHQRERGGLALEPGRPNGLL

SEQ ID NO: 70432 - protein, 459 aa, Homo sapiens
MAAPLEAQDQAPGEGEGLLIVKVEDSSWEQESAQHEDGRDSEACRQRFRQFCYGDVHGPHEAFSQLWELCCRWLRPELRTKEQILELLVLEQFLTVLPGEIQGWVREQHPGSGEEAVALVEDLQKQPVKAWRQDVPSEEAEPEAAGRGSQATGPPPTVGARRRPSVPQEQHSHSAQPPALLKEGRPGETTDTCFVSGVHGPVALGDIPFYFSREEWGTLDPAQRDLFWDIKRENSRNTTLGFGLKGQSEKSLLQEMVPVVPGQTGSDVTVSWSPEEAEAWESENRPRAALGPVVGARRGRPPTRRRQFRDLAAEKPHSCGQCGKRFRWGSDLARHQRTHTGEKPHKCPECDKSFRSSSDLVRHQGVHTGEKPFSCSECGKSFSRSAYLADHQRIHTGEKPFGCSDCGKSFSLRSYLLDHRRVHTGERPFGCGECDKSFKQRAHLIAHQSLHAKMAQPVG

SEQ ID NO: 70433 - protein, 301 aa, Homo sapiens
MCPRRRRNPRLQAGDPRPRGLPRRWGHGGGRLFPRSSTAIAGPVALGDIPFYFSREEWGTLDPAQRDLFWDIKRENSRNTTLGFGLKGQSEKSLLQEMVPVVPGQTGSDVTVSWSPEEAEAWESENRPRAALGPVVGARRGRPPTRRRQFRDLAAEKPHSCGQCGKRFRWGSDLARHQRTHTGEKPHKCPECDKSFRSSSDLVRHQGVHTGEKPFSCSECGKSFSRSAYLADHQRIHTGEKPFGCSDCGKSFSLRSYLLDHRRVHTGERPFGCGECDKSFKQRAHLIAHQSLHAKMAQPVG

SEQ ID NO: 70434 - protein, 606 aa, Homo sapiens
MAVTFEDVTIIFTWEEWKFLDSSQKRLYREVMWENYTNVMSVENWNESYKSQEEKFRYLEYENFSYWQGWWNAGAQMYENQNYGETVQGTDSKDLTQQDRSQCQEWLILSTQVPGYGNYELTFESKSLRNLKYKNFMPWQSLETKTTQDYGREIYMSGSHGFQGGRYRLGISRKNLSMEKEQKLIVQHSYIPVEEALPQYVGVICQEDLLRDSMEEKYCGCNKCKGIYYWNSRCVFHKRNQPGENLCQCSICKACFSQRSDLYRHPRNHIGKKLYGCDEVDGNFHQSSGVHFHQRVHIGEVPYSCNACGKSFSQISSLHNHQRVHTEEKFYKIECDKDLSRNSLLHIHQRLHIGEKPFKCNQCGKSFNRSSVLHVHQRVHTGEKPYKCDECGKGFSQSSNLRIHQLVHTGEKSYKCEDCGKGFTQRSNLQIHQRVHTGEKPYKCDDCGKDFSHSSDLRIHQRVHTGEKPYTCPECGKGFSKSSKLHTHQRVHTGEKPYKCEECGKGFSQRSHLLIHQRVHTGEKPYKCHDCGKGFSHSSNLHIHQRVHTGEKPYQCAKCGKGFSHSSALRIHQRVHAGEKPYKCREYYKGFDHNSHLHNNHRRGNL

SEQ ID NO: 70435 - protein, 606 aa, Homo sapiens; identical to SEQ ID NO: 70434

SEQ ID NO: 70436 - protein, 517 aa, Homo sapiens
MQPLSKLMAISKPRNLSLREQREVLRADMSWQQETNPVVETHDSEASRQKFRHFQYLKVSGPHEALSQLWELCLQWLRPEIHTKKQIIELLVLEQFLAILPEEVRTWVNLQHPNNSKDMVTLIEDVIEMLEDEDMPCKDSALQMGSIKEKMKAGSRTGKPQEPVTFKDVVVEFSKEEWGQLDSAVKNLYRNVMLENFRNLNSLRKAHLLSKPFESLKLESKKKRWIMEKEIPRKTIFDMKSISGEESSHGVIMTRLTESGHPSSDAWKGENWLYRNQKKWDINLPQEAFIPETIYTEEEDFECSENKKSFDINSVSSICAIQVGIPSRKGSPKCDKFKTYFKFNLDSVGKQHSEYEYGNDLSLSTDIRHQKSHTTMNSYECYQCGKAFCRSSSLIRHQIIHTGEKPYKCSECGRFFNRRTNLTKHQKLHAEAKACTSNKCGKAFSKSEDSNNPTLHFGNNFYQCVNCGKSFNRSSSLIRHQMIHTGEKPFKCKECSKAFNRSSNLVKHQKLHTRDKS

SEQ ID NO: 70437 - protein, 517 aa, Homo sapiens; identical to SEQ ID NO: 70436

SEQ ID NO: 70438 - protein, 304 aa, Homo sapiens
MQPLSKLMAISKPRNLSLREQREVLRADMSWQQETNPVVETHDSEASRQKFRHFQYLKVSGPHEALSQLWELCLQWLRPEIHTKKQIIELLVLEQFLAILPEEVRTWVNLQHPNNSKDMVTLIEDVIEMLEDEDMPCKDSALQMGSIKEKMKAGSRTGKPQEPVTFKDVVVEFSKEEWGQLDSAVKNLYRNVMLENFRNLNSLRKAHLLSKPFESLKLESKKKRWIMEKEIPRKTIFDMKSISGEESSHGVIMTRLTESGHPSSDAWKDGVSLLLPRLEYNDAVSAHCNLHLWVQVILLPQPPE

SEQ ID NO: 70439 - protein, 1048 aa, Homo sapiens
MQSKVTGNMPTQSLLMYMDGPEVIGSSLGSPMEMEDALSMKGTAVVPFRATQEKNVIQIEGYMPLDCMFCSQTFTHSEDLNKHVLMQHRPTLCEPAVLRVEAEYLSPLDKSQVRTEPPKEKNCKENEFSCEVCGQTFRVAFDVEIHMRTHKDSFTYGCNMCGRRFKEPWFLKNHMRTHNGKSGARSKLQQGLESSPATINEVVQVHAAESISSPYKICMVCGFLFPNKESLIEHRKVHTKKTAFGTSSAQTDSPQGGMPSSREDFLQLFNLRPKSHPETGKKPVRCIPQLDPFTTFQAWQLATKGKVAICQEVKESGQEGSTDNDDSSSEKELGETNKGSCAGLSQEKEKCKHSHGEAPSVDADPKLPSSKEKPTHCSECGKAFRTYHQLVLHSRVHKKDRRAGAESPTMSVDGRQPGTCSPDLAAPLDENGAVDRGEGGSEDGSEDGLPEGIHLDKNDDGGKIKHLTSSRECSYCGKFFRSNYYLNIHLRTHTGEKPYKCEFCEYAAAQKTSLRYHLERHHKEKQTDVAAEVKNDGKNQDTEDALLTADSAQTKNLKRFFDGAKDVTGSPPAKQLKEMPSVFQNVLGSAVLSPAHKDTQDFHKNAADDSADKVNKNPTPAYLDLLKKRSAVETQANNLICRTKADVTPPPDGSTTHNLEVSPKEKQTETAADCRYRPSVDCHEKPLNLSVGALHNCPAISLSKSLIPSITCPFCTFKTFYPEVLMMHQRLEHKYNPDVHKNCRNKSLLRSRRTGCPPALLGKDVPPLSSFCKPKPKSAFPAQSKSLPSAKGKQSPPGPGKAPLTSGIDSSTLAPSNLKSHRPQQNVGVQGAATRQQQSEMFPKTSVSPAPDKTKRPETKLKPLPVAPSQPTLGSSNINGSIDYPAKNDSPWAPPGRDYFCNRSASNTAAEFGEPLPKRLKSSVVALDVDQPGANYRRGYDLPKYHMVRGITSLLPQDCVYPSQALPPKPRFLSSSEVDSPNVLTVQKPYGGSGPLYTCVPAGSPASSSTLEGKRPVSYQHLSNSMAQKRNYENFIGNAHYRPNDKKT

SEQ ID NO: 70440 - protein, 1048 aa, Homo sapiens; identical to SEQ ID NO: 70439

SEQ ID NO: 70441 - protein, 221 aa, Homo sapiens
MFPKTSVSPAPDKTKRPETKLKPLPVAPSQPTLGSSNINGSIDYPAKNDSPWAPPGRDYFCNRSASNTAAEFGEPLPKRLKSSVVALDVDQPGANYRRGYDLPKYHMVRGITSLLPQDCVYPSQALPPKPRFLSSSEVDSPNVLTVQKPYGGSGPLYTCVPAGSPASSSTLEGLGGCQCLLPMKLNFTSSFEKRMVKATEISCDCTVHKTYEESARNTTVV

SEQ ID NO: 70442 - protein, 95 aa, Homo sapiens
MQSKVTGNMPTQSLLMYMDGPEVIGSSLGSPMEMEDALSMKGTAVVPFRATQEKNVIQIEGYMPLDCMFCSQTFTHSEDLNKHVLMQHRPTLCEP

SEQ ID NO: 70443 - protein, 722 aa, Homo sapiens
MEGSRPRAPSGHLAPSPPAFDGELDLQRYSNGPAVSAGSLGMGAVSWSESRAGERRFPCPVCGKRFRFNSILALHLRAHPGAQAFQCPHCGHRAAQRALLRSHLRTHQPERPRSPAARLLLELEERALLREARLGRARSSGGMQATPATEGLARPQAPSSSAFRCPYCKGKFRTSAERERHLHILHRPWKCGLCSFGSSQEEELLHHSLTAHGAPERPLAATSAAPPPQPQPQPPPQPEPRSVPQPEPEPEPEREATPTPAPAAPEEPPAPPEFRCQVCGQSFTQSWFLKGHMRKHKASFDHACPVCGRCFKEPWFLKNHMKVHASKLGPLRAPGPASGPARAPQPPDLGLLAYEPLGPALLLAPAPTPAERREPPSLLGYLSLRAGEGRPNGEGAEPGPGRSFGGFRPLSSALPARARRHRAEEPEEEEEVVEAEEETWARGRSLGSLASLHPRPGEGPGHSASAAGAQARSTATQEENGLLVGGTRPEGGRGATGKDCPFCGKSFRSAHHLKVHLRVHTGERPYKCPHCDYAGTQSGSLKYHLQRHHREQRSGAGPGPPPEPPPPSQRGSAPQSGAKPSPQPATWVEGASSPRPPSSGAGPGSRRKPASPGRTLRNGRGGEAEPLDLSLRAGPGGEAGPGGALHRCLFCPFATGAPELMALHLQVHHSRRARGRRPPQADASPPYARVPSGETPPSPSQEGEEGSGLSRPGEAGLGGQER

SEQ ID NO: 70444 - protein, 722 aa, Homo sapiens; identical to SEQ ID NO: 70443

SEQ ID NO: 70445 - protein, 722 aa, Homo sapiens; identical to SEQ ID NO: 70443

SEQ ID NO: 70446 - protein, 107 aa, Homo sapiens
MEGSRPRAPSGHLAPSPPAFDGELDLQRYSNGPAVSAGSLGMGAVSWSESRAGERRFPCPVCGKRFRFNSILALHLRAHPGAQAFQCPHCGHRAAQRALLRSHLRTH

SEQ ID NO: 70447 - protein, 211 aa, Homo sapiens
MEGSRPRAPSGHLAPSPPAFDGELDLQRYSNGPAVSAGSLGMGAVSWSESRAGERRFPCPVCGKRFRFNSILALHLRAHPGAQAFQCPHCGHRAAQRALLRSHLRTHQPERPRSPAARLLLELEERALLREARLGRARSSGGMQATPATEGLARPQAPSSSAFRCPYCKGKFRTSAERERHLHILHRPWKCGLCSFGSSQEEELLHHSLTA

SEQ ID NO: 70448 - protein, 31 aa, Homo sapiens
MEGSRPRAPSGHLAPSPPAFDGELDLQRYSN

SEQ ID NO: 70449 - protein, 111 aa, Homo sapiens
MEGSRPRAPSGHLAPSPPAFDGELDLQRYSNGPAVSAGSLGMGAVSWSESRAGERRFPCPVCGKRFRFNSILALHLRAHPGAQAFQCPHCGHRAAQRALLRSHLRTHQPER

SEQ ID NO: 70450 - protein, 224 aa, Homo sapiens
MRLAKPKAGISRSSSQGKAYENKRKTGRQRQKWGMTIRFDSSFSRLRRSLDDKPYKCTECEKSFSQSSTLFQHQKIHTGKKSHKCADCGKSFFQSSNLIQHRRIHTGEKPYKCDECGESFKQSSNLIQHQRIHTGEKPYQCDECGRCFSQSSHLIQHQRTHTGEKPYQCSECGKCFSQSSHLRQHMKVHKEEKPRKTRGKNIRVKTHLPSWKAGTGRKSVAGLR

SEQ ID NO: 70451 - protein, 78 aa, Homo sapiens
MTTFKEAMTFKDVAVVFTEEELGLLDLAQRKLYRDVMLENFRNLLSVGHQAFHRDTFHFLREEKIWMMKTAIQREGNS

SEQ ID NO: 70452 - protein, 707 aa, Homo sapiens
MTTFKEAMTFKDVAVVFTEEELGLLDLAQRKLYRDVMLENFRNLLSVGHQAFHRDTFHFLREEKIWMMKTAIQREGNSGDKIQTEMETVSEAGTHQEWSFQQIWEKIASDLTRSQDLMINSSQFSKEGDFPCQTEAGLSVIHTRQKSSQGNGYKPSFSDVSHFDFHQQLHSGEKSHTCDECGKNFCYISALRIHQRVHMGEKCYKCDVCGKEFSQSSHLQTHQRVHTGEKPFKCVECGKGFSRRSALNVHHKLHTGEKPYNCEECGKAFIHDSQLQEHQRIHTGEKPFKCDICGKSFCGRSRLNRHSMVHTAEKPFRCDTCDKSFRQRSALNSHRMIHTGEKPYKCEECGKGFICRRDLYTHHMVHTGEKPYNCKECGKSFRWASCLLKHQRVHSGEKPFKCEECGKGFYTNSQCYSHQRSHSGEKPYKCVECGKGYKRRLDLDFHQRVHTGEKLYNCKECGKSFSRAPCLLKHERLHSGEKPFQCEECGKRFTQNSHLHSHQRVHTGEKPYKCEKCGKGYNSKFNLDMHQKVHTGERPYNCKECGKSFGWASCLLKHQRLHSGEKPFKCEECGKRFTQNSQLHSHQRVHTGEKPYKCDECGKGFSWSSTRLTHQRRHSRETPLKCEQHGKNIVQNSFSKVQEKVHSVEKPYKCEDCGKGYNRRLNLDMHQRVHMGEKTWKCRECDMCFSQASSLRLHQNVHVGEKP

SEQ ID NO: 70453 - protein, 643 aa, Homo sapiens
MLENYGNVASLGFPLLKPAVISQLEGGSELGGSSPLAAGTGLQGLQTDIQTDNDLTKEMYEGKENVSFELQRDFSQETDFSEASLLEKQQEVHSAGNIKKEKSNTIDGTVKDETSPVEECFFSQSSNSYQCHTITGEQPSGCTGLGKSISFDTKLVKHEIINSEERPFKCEELVEPFRCDSQLIQHQENNTEEKPYQCSECGKAFSINEKLIWHQRLHSGEKPFKCVECGKSFSYSSHYITHQTIHSGEKPYQCKMCGKAFSVNGSLSRHQRIHTGEKPYQCKECGNGFSCSSAYITHQRVHTGEKPYECNDCGKAFNVNAKLIQHQRIHTGEKPYECNECGKGFRCSSQLRQHQSIHTGEKPYQCKECGKGFNNNTKLIQHQRIHTGEKPYECTECGKAFSVKGKLIQHQRIHTGEKPYECNECGKAFRCNSQFRQHLRIHTGEKPYECNECGKAFSVNGKLMRHQRIHTGEKPFECNECGRCFTSKRNLLDHHRIHTGEKPYQCKECGKAFSINAKLTRHQRIHTGEKPFKCMECEKAFSCSSNYIVHQRIHTGEKPFQCKECGKAFHVNAHLIRHQRSHTGEKPFRCVECGKGFSFSSDYIIHQTVHTWKKPYMCSVCGKAFRFSFQLSQHQSVHSEGKS

SEQ ID NO: 70454 - protein, 415 aa, Homo sapiens
CGKAFSINEKLIWHQRLHSGEKPFKCVECGKSFSYSSHYITHQTIHSGEKPYQCKMCGKAFSVNGSLSRHQRIHTGEKPYQCKECGNGFSCSSAYITHQRVHTGEKPYECNDCGKAFNVNAKLIQHQRIHTGEKPYECNECGKGFRCSSQLRQHQSIHTGEKPYQCKECGKGFNNNTKLIQHQRIHTGEKPYECNECGKAFRCNSQFRQHLRIHTGEKPYECNECGKAFSVNGKLMRHQRIHTGEKPFECNECGRCFTSKRNLLDHHRIHTGEKPYQCKECGKAFSINAKLTRHQRIHTGEKPFKCMECEKAFSCSSNYIVHQRIHTGEKPFQCKECGKAFHVNAHLIRHQRSHTGEKPFRCVECGKGFSFSSDYIIHQTVHTWKKPYMCSVCGKAFRFSFQLSQHQSVHSEGKS

SEQ ID NO: 70455 - protein, 643 aa, Homo sapiens; identical to SEQ ID NO: 70453

SEQ ID NO: 70456 - protein, 643 aa, Homo sapiens; identical to SEQ ID NO: 70453

SEQ ID NO: 70457 - protein, 585 aa, Homo sapiens
MYEGKENVSFELQRDFSQETDFSEASLLEKQQEVHSAGNIKKEKSNTIDGTVKDETSPVEECFFSQSSNSYQCHTITGEQPSGCTGLGKSISFDTKLVKHEIINSEERPFKCEELVEPFRCDSQLIQHQENNTEEKPYQCSECGKAFSINEKLIWHQRLHSGEKPFKCVECGKSFSYSSHYITHQTIHSGEKPYQCKMCGKAFSVNGSLSRHQRIHTGEKPYQCKECGNGFSCSSAYITHQRVHTGEKPYECNDCGKAFNVNAKLIQHQRIHTGEKPYECNECGKGFRCSSQLRQHQSIHTGEKPYQCKECGKGFNNNTKLIQHQRIHTGEKPYECTECGKAFSVKGKLIQHQRIHTGEKPYECNECGKAFRCNSQFRQHLRIHTGEKPYECNECGKAFSVNGKLMRHQRIHTGEKPFECNECGRCFTSKRNLLDHHRIHTGEKPYQCKECGKAFSINAKLTRHQRIHTGEKPFKCMECEKAFSCSSNYIVHQRIHTGEKPFQCKECGKAFHVNAHLIRHQRSHTGEKPFRCVECGKGFSFSSDYIIHQTVHTWKKPYMCSVCGKAFRFSFQLSQHQSVHSEGKS

SEQ ID NO: 70458 - protein, 585 aa, Homo sapiens; identical to SEQ ID NO: 70457

SEQ ID NO: 70459 - protein, 1845 aa, Homo sapiens
MGLCGLLERCWLHHDPDGVLTLNAENTNYAYQVPNFHKCEICLLSFPKESQFQRHMRDHERNDKPHRCDQCPQTFNVEFNLTLHKCTHSGEDPTCPVCNKKFSRVASLKAHIMLHEKEENLICSECGDEFTLQSQLAVHMEEHRQELAGTRQHACKACKKEFETSSELKEHMKTHYKIRVSSTRSYNRNIDRSGFTYSCPHCGKTFQKPSQLTRHIRIHTGERPFKCSECGKAFNQKGALQTHMIKHTGEKPHACAFCPAAFSQKGNLQSHVQRVHSEVKNGPTYNCTECSCVFKSLGSLNTHISKMHMGGPQNSTSSTETAHVLTATLFQTLPLQQTEAQATSASSQPSSQAVSDVIQQLLELSEPAPVESGQSPQPGQQLSITVGINQDILQQALENSGLSSIPAAAHPNDSCHAKTSAPHAQNPDVSSVSNEQTDPTDAEQEKEQESPEKLDKKEKKMIKKKSPFLPGSIREENGVRWHVCPYCAKEFRKPSDLVRHIRIHTHEKPFKCPQCFRAFAVKSTLTAHIKTHTGIKAFKCQYCMKSFSTSGSLKVHIRLHTGVRPFACPHCDKKFRTSGHRKTHIASHFKHTELRKMRHQRKPAKVRVGKTNIPVPDIPLQEPILITDLGLIQPIPKNQFFQSYFNNNFVNEADRPYKCFYCHRAYKKSCHLKQHIRSHTGEKPFKCSQCGRGFVSAGVLKAHIRTHTGLKSFKCLICNGAFTTGGSLRRHMGIHNDLRPYMCPYCQKTFKTSLNCKKHMKTHRYELAQQLQQHQQAASIDDSTVDQQSMQASTQMQVEIESDELPQTAEVVAANPEAMLDLEPQHVVGTEEAGLGQQLADQPLEADEDGFVAPQDPLRGHVDQFEEQSPAQQSFEPAGLPQGFTVTDTYHQQPQFPPVQQLQDSSTLESQALSTSFHQQSLLQAPSSDGMNVTTRLIQESSQEELDLQAQGSQFLEDNEDQSRRSYRCDYCNKGFKKSSHLKQHVRSHTGEKPYKCKLCGRGFVSSGVLKSHEKTHTGVKAFSCSVCNASFTTNGSLTRHMATHMSMKPYKCPFCEEGFRTTVHCKKHMKRHQTVPSAVSATGETEGGDICMEEEEEHSDRNASRKSRPEVITFTEEETAQLAKIRPQESATVSEKVLVQSAAEKDRISELRDKQAELQDEPKHANCCTYCPKSFKKPSDLVRHVRIHTGEKPYKCDECGKSFTVKSTLDCHVKTHTGQKLFSCHVCSNAFSTKGSLKVHMRLHTGAKPFKCPHCELRFRTSGRRKTHMQFHYKPDPKKARKPMTRSSSEGLQPVNLLNSSSTDPNVFIMNNSVLTGQFDQNLLQPGLVGQAILPASVSAGGDLTVSLTDGSLATLEGIQLQLAANLVGPNVQISGIDAASINNITLQIDPSILQQTLQQGNLLAQQLTGEPGLAPQNSSLQTSDSTVPASVVIQPISGLSLQPTVTSANLTIGPLSEQDSVLTTNSSGTQDLTQVMTSQGLVSPSGGPHEITLTINNSSLSQVLAQAAGPTATSSSGSPQEITLTISELNTTSGSLPSTTPMSPSAISTQNLVMSSSGVGGDASVTLTLADTQGMLSGGLDTVTLNITSQGQQFPALLTDPSLSGQGGAGSPQVILVSHTPQSASAACEEIAYQVAGVSGNLAPGNQPEKEGRAHQCLECDRAFSSAAVLMHHSKEVHGRERIHGCPVCRKAFKRATHLKEHMQTHQAGPSLSSQKPRVFKCDTCEKAFAKPSQLERHSRIHTGERPFHCTLCEKAFNQKSALQVHMKKHTGERPYKCAYCVMGFTQKSNMKLHMKRAHSYAGALQESAGHPEQDGEELSRTLHLEEVVQEAAGEWQALTHVF

SEQ ID NO: 70460 - protein, 1558 aa, Homo sapiens
MGLCGLLERCWLHHDPDGVLTLNAENTNYAYQVPNFHKCEICLLSFPKESQFQRHMRDHERNDKPHRCDQCPQTFNVEFNLTLHKCTHSGEDPTCPVCNKKFSRVASLKAHIMLHEKEENLICSECGDEFTLQSQLAVHMEEHRQELAGTRQHACKACKKEFETSSELKEHMKTHYKIRVSSTRSYNRNIDRSGFTYSCPHCGKTFQKPSQLTRHIRIHTGERPFKCSECGKAFNQKGALQTHMIKHTGEKPHACAFCPAAFSQKGNLQSHVQRVHSEVKNGPTYNCTECSCVFKSLGSLNTHISKMHMGGPQNSTSSTETAHVLTATLFQTLPLQQTEAQATSASSQPSSQAVSDVIQQLLELSEPAPVESGQSPQPGQQLSITVGINQDILQQALENSGLSSIPAAAHPNDSCHAKTSAPHAQNPDVSSVSNEQTDPTDAEQEKEQESPEKLDKKEKKMIKKKSPFLPGSIREENGVRWHVCPYCAKEFRKPSDLVRHIRIHTHEKPFKCPQCFRAFAVKSTLTAHIKTHTGIKAFKCQYCMKSFSTSGSLKVHIRLHTGVRPFACPHCDKKFRTSGHRKTHIASHFKHTELRKMRHQRKPAKVRVGKTNIPVPDIPLQEPILITDLGLIQPIPKNQFFQSYFNNNFVNEADRPYKCFYCHRAYKKSCHLKQHIRSHTGEKPFKCSQCGRGFVSAGVLKAHIRTHTGLKSFKCLICNGAFTTGGSLRRHMGIHNDLRPYMCPYCQKTFKTSLNCKKHMKTHRYELAQQLQQHQQAASIDDSTVDQQSMQASTQMQVEIESDELPQTAEVVAANPEAMLDLEPQHVVGTEEAGLGQQLADQPLEADEDGFVAPQDPLRGHVDQFEEQSPAQQSFEPAGLPQGFTVTDTYHQQPQFPPVQQLQDSSTLESQALSTSFHQQSLLQAPSSDGMNVTTRLIQESSQEELDLQAQGSQFLEDNEDQSRRSYRCDYCNKGFKKSSHLKQHVRSHTGEKPYKCKLCGRGFVSSGVLKSHEKTHTGVKAFSCSVCNASFTTNGSLTRHMATHMSMKPYKCPFCEEGFRTTVHCKKHMKRHQTVPSAVSATGETEGGDICMEEEEEHSDRNASRKSRPEVITFTEEETAQLAKIRPQESATVSEKVLVQSAAEKDRISELRDKQAELQDEPKHANCCTYCPKSFKKPSDLVRHVRIHTGEKPYKCDECGKSFTVKSTLDCHVKTHTGQKLFSCHVCSNAFSTKGSLKVHMRLHTGAKPFKCPHCELRFRTSGRRKTHMQFHYKPDPKKARKPMTRSSSEGLQPVNLLNSSSTDPNVFIMNNSVLTGQFDQNLLQPGLVGQAILPASVSAGGDLTVSLTDGSLATLEGIQLQLAANLVGPNVQISGIDAASINNITLQIDPSILQQTLQQGNLLAQQLTGEPGLAPQNSSLQTSDSTVPASVVIQPISGLSLQPTVTSANLTIGPLSEQDSVLTTNSSGTQDLTQVMTSQGLVSPSGGPHEITLTINNSSLSQVLAQAAGPTATSSSGSPQEITLTISGSRSVQHSVGPQECGSVEALYLENSSDKT

SEQ ID NO: 70461 - protein, 1558 aa, Homo sapiens; identical to SEQ ID NO: 70460

SEQ ID NO: 70462 - protein, 531 aa, Homo sapiens
MCPKGYEDSMEFPDHSRHLLQCLSEQRHQGFLCDCTVLVGDAQFRAHRAVLASCSMYFHLFYKDQLDKRDIVHLNSDIVTAPAFALLLEFMYEGKLQFKDLPIEDVLAAASYLHMYDIVKVCKKKLKEKATTEADSTKKEEDASSCSDKVESLSDGSSHIAGDLPSDEDEGEDEKLNILPSKRDLAAEPGNMWMRLPSDSAGIPQAGGEAEPHATAAGKTVASPCSSTESLSQRSVTSVRDSADVDCVLDLSVKSSLSGVENLNSSYFSSQDVLRSNLVQVKVEKEASCDESDVGTNDYDMEHSTVKESVSTNNRVQYEPAHLAPLREDSVLRELDREDKASDDEMMTPESERVQVEGGMESSLLPYVSNILSPAGQIFMCPLCNKVFPSPHILQIHLSTHFREQDGIRSKPAADVNVPTCSLCGKTFSCMYTLKRHERTHSGEKPYTCTQCGKSFQYSHNLSRHAVVHTREKPHACKWCERRFTQSGDLYRHIRKFHCELVNSLSVKSEALSLPTVRDWTLEDSSQELWK

SEQ ID NO: 70463 - protein, 487 aa, Homo sapiens
MCPKGYEDSMEFPDHSRHLLQCLSEQRHQGFLCDCTVLVGDAQFRAHRAVLASCSMYFHLFYKDQLDKRDIVHLNSDIVTAPAFALLLEFMYEGKLQFKDLPIEDVLAAASYLHMYDIVKVCKKKLKEKATTEADSTKKEEDASSCSDKVESLSDGSSHIAGDLPSDEDEGEDEKLNILPSKRDLAAEPGNMWMRLPSDSAGIPQAGGEAEPHATAAGKTVASPCSSTESLSQRSVTSVRDSADVDCVLDLSVKSSLSGVENLNSSYFSSQDVLRSNLVQVKVEKEASCDESDVGTNDYDMEHSTVKESVSTNNRVQYEPAHLAPLREDSVLRELDREDKASDDEMMTPESERVQVEGGMESSLLPYVSNILSPAGQIFMCPLCNKVFPSPHILQIHLSTHFREQDGIRSKPAADVNVPTCSLCGKTFSCMYTLKRHERTHSGEKPYTCTQCGKSFQYSHNLSRLQVVRAQVHAVRGPVQTHSQVPL

SEQ ID NO: 70464 - protein, 458 aa, Homo sapiens
MASTITGSQDCIVNHRGEVDGEPELDISPCQQWGEASSPISRNRDSVMTLQSGCFENIESETYLPLKVSSQIDTQDSSVKFCKNEPQDHQESRRLFVMEESTERKVIKGESCSENLQVKLVSDGQELASPLLNGEATCQNGQLKESLDPIDCNCKDIHGWKSQVVSCSQQRAHTEEKPCDHNNCGKILNTSPDGHPYEKIHTAEKQYECSQCGKNFSQSSELLLHQRDHTEEKPYKCEQCGKGFTRSSSLLIHQAVHTDEKPYKCDKCGKGFTRSSSLLIHHAVHTGEKPYKCDKCGKGFSQSSKLHIHQRVHTGEKPYECEECGMSFSQRSNLHIHQRVHTGERPYKCGECGKGFSQSSNLHIHRCIHTGEKPYQCYECGKGFSQSSDLRIHLRVHTGEKPYHCGKCGKGFSQSSKLLIHQRVHTGEKPYECSKCGKGFSQSSNLHIHQRVHKKDPR

SEQ ID NO: 70465 - protein, 458 aa, Homo sapiens; identical to SEQ ID NO: 70464

SEQ ID NO: 70466 - protein, 458 aa, Homo sapiens; identical to SEQ ID NO: 70464

SEQ ID NO: 70467 - protein, 458 aa, Homo sapiens; identical to SEQ ID NO: 70464

SEQ ID NO: 70468 - protein, 458 aa, Homo sapiens; identical to SEQ ID NO: 70464

SEQ ID NO: 70469 - protein, 368 aa, Homo sapiens
MSAQSVEEDSILIIPTPDEEEKILRVKLEEDPDGEEGSSIPWNHLPDPEIFRQRFRQFGYQDSPGPREAVSQLRELCRLWLRPETHTKEQILELVVLEQFVAILPKELQTWVRDHHPENGEEAVTVLEDLESELDDPGQPVSLRRRKREVLVEDMVSQEEAQGLPSSELDAVENQLKWASWELHSLRHCDDDGRTENGALAPKQELPSALESHEVPGTLNMGVPQIFKYGETCFPKGRFERKRNPSRKKQHICDECGKHFSQGSALILHQRIHSGEKPYGCVECGKAFSRSSILVQHQRVHTGEKPYKCLECGKAFSQNSGLINHQRIHTGEKPYECVQCGKSYSQSSNLFRHQRRHNAEKLLNVVKV

SEQ ID NO: 70470 - protein, 368 aa, Homo sapiens; identical to SEQ ID NO: 70469

SEQ ID NO: 70471 - protein, 456 aa, Homo sapiens
MNKFQGPVTLKDVIVEFTKEEWKLLTPAQRTLYKDVMLENYSHLVSVGYHVNKPNAVFKLKQGKEPWILEVEFPHRGFPEDLWSIHDLEARYQESQAGNSRNGELTKHQKTHTTEKACECKECGKFFCQKSALIVHQHTHSKGKSYDCDKCGKSFSKNEDLIRHQKIHTRDKTYECKECKKIFYHLSSLSRHLRTHAGEKPYECNQCEKSFYQKPHLTEHQKTHTGEKPFECTECGKFFYVKAYLMVHQKTHTGEKPYECKECGKAFSQKSHLTVHQRMHTGEKPYKCKECGKFFSRNSHLKTHQRSHTGEKPYECKECRKCFYQKSALTVHQRTHTGEKPFECNKCGKTFYYKSDLTKHQRKHTGEKPYECTECGKSFAVNSVLRLHQRTHTGEKPYACKECGKSFSQKSHFIIHQRKHTGEKPYECQECGETFIQKSQLTAHQKTHTKKRNAEK

SEQ ID NO: 70472 - protein, 420 aa, Homo sapiens
MLENYSHLVSVGYHVNKPNAVFKLKQGKEPWILEVEFPHRGFPEDLWSIHDLEARYQESQAGNSRNGELTKHQKTHTTEKACECKECGKFFCQKSALIVHQHTHSKGKSYDCDKCGKSFSKNEDLIRHQKIHTRDKTYECKECKKIFYHLSSLSRHLRTHAGEKPYECNQCEKSFYQKPHLTEHQKTHTGEKPFECTECGKFFYVKAYLMVHQKTHTGEKPYECKECGKAFSQKSHLTVHQRMHTGEKPYKCKECGKFFSRNSHLKTHQRSHTGEKPYECKECRKCFYQKSALTVHQRTHTGEKPFECNKCGKTFYYKSDLTKHQRKHTGEKPYECTECGKSFAVNSVLRLHQRTHTGEKPYACKECGKSFSQKSHFIIHQRKHTGEKPYECQECGETFIQKSQLTAHQKTHTKKRNAEK

SEQ ID NO: 70473 - protein, 499 aa, Homo sapiens
MGPLQFRDVAIEFSLEEWHCLDTAQRNLYRDVMLENYRNLVFLGIVVSKPDLVTCLEQGKKPLTMERHEMIAKPPVMSSHFAQDLWPENIQNSFQIGMLRRYEECRHDNLQLKKGCKSVGEHKVHKGGYNGLNQCLTTTQKEIFQCDKYGKVFHKFSNSNTYKTRHTGINLFKCIICGKAFKRSSTLTTHKKIHTGEKPYRCEECGKAFNQSANLTTHKRIHTGEKPYRCEECGKAFKQSSNLTTHKKIHTGEKPYKCEECGKAFNRSTDLTTHKIVHTGEKPYKCEECGKAFKHPSHVTTHKKIHTRGKPYNCEECGKSFKHCSNLTIHKRIHTGEKPYKCEECGKAFHLSSHLTTHKILHTGEKPYRCRECGKAFNHSTTLFSHEKIHTGEKPYKCDECGKTFTWPSILSKHKRTHTGEKPYKCEECGKSFTASSTLTTHKRIHTGEKPYKCEECGKAFNWSSDLNKHKKIHIERKPYIVKNVTDLLNVPPLLISIR

SEQ ID NO: 70474 - protein, 499 aa, Homo sapiens; identical to SEQ ID NO: 70473

SEQ ID NO: 70475 - protein, 91 aa, Homo sapiens
MPGPPRSLEMGLLTFRDVAIEFSLEEWQHLDIAQQNLYRNVMLENYRNLAFLGIAVSKPDLITCLEQGKEPWNMKRHEMVDEPPGLDFSLL

SEQ ID NO: 70476 - protein, 574 aa, Homo sapiens
MCPHFAQDLWPEQGMEDSFQKAILRRYGKYGHENLQLRKGCKSVDEYKVNKEGYNGLNQCFTTAQSKVFQCDKYLKVFYKFLNSNRPKIRHTEKKSFKCKKRVKLFCMLSHKTQHKSIYHREKSYKCKECGKTFNWSSTLTNHRKIYTEEKPYKCEEYNKSPKQLSTLTTHEIIHAGEKLYKCEECGEAFNRSSNLTTHKIIHTGEKPYKCEECGKAFIWSSTLTEHKKIHTRKKPYKCEECGKAFIWSSTLTRHKRMHTGEKPYKCEECGKAFSQSSTLTTHKIIHTGEKRYKCLECGKAFKQLSTLTTHKIIHVGEKLYKCEECGKGFNRSSNLTTHKIIHTGEKPYKCEECGKAFIWSSTLTKHKRIHTREKPYKCEECGKAFIWSSTLTRHKRMHTGEKPYKCEECGKSFSQSSTLTTHKIIHTGEKPYKCEECGKAFNWSSTLTKHKIIHTEEKPYKCEKCGKAFKQSSILTNHKRIHTGEKPYKCEECGKSFNRSSTFTKHKVIHTGVKPYKCEECGKAFFWSSTLTKHKRIHTGEQPYKWEKFGKAFNRSSHLTTDKITHWREILQV

SEQ ID NO: 70477 - protein, 659 aa, Homo sapiens
MPGPPRSLEMGLLTFRDVAIEFSLEEWQHLDIAQQNLYRNVMLENYRNLAFLGIAVSKPDLITCLEQGKEPWNMKRHEMVDEPPGMCPHFAQDLWPEQGMEDSFQKAILRRYGKYGHENLQLRKGCKSVDEYKVNKEGYNGLNQCFTTAQSKVFQCDKYLKVFYKFLNSNRPKIRHTEKKSFKCKKRVKLFCMLSHKTQHKSIYHREKSYKCKECGKTFNWSSTLTNHRKIYTEEKPYKCEEYNKSPKQLSTLTTHEIIHAGEKLYKCEECGEAFNRSSNLTTHKIIHTGEKPYKCEECGKAFIWSSTLTEHKKIHTRKKPYKCEECGKAFIWSSTLTRHKRMHTGEKPYKCEECGKAFSQSSTLTTHKIIHTGEKRYKCLECGKAFKQLSTLTTHKIIHVGEKLYKCEECGKGFNRSSNLTTHKIIHTGEKPYKCEECGKAFIWSSTLTKHKRIHTREKPYKCEECGKAFIWSSTLTRHKRMHTGEKPYKCEECGKSFSQSSTLTTHKIIHTGEKPYKCEECGKAFNWSSTLTKHKIIHTEEKPYKCEKCGKAFKQSSILTNHKRIHTGEKPYKCEECGKSFNRSSTFTKHKVIHTGVKPYKCEECGKAFFWSSTLTKHKRIHTGEQPYKWEKFGKAFNRSSHLTTDKITHWREILQV

SEQ ID NO: 70478 - protein, 351 aa, Homo sapiens
MPGPPRSLEMGLLTFRDVAIEFSLEEWQHLDIAQQNLYRNVMLENYRNLAFLGIAVSKPDLITCLEQGKEPWNMKRHEMVDEPPGMCPHFAQDLWPEQGMEDSFQKAILRRYGKYGHENLQLRKGCKSVDEYKVNKEGYNGLNQCFTTAQSKVFQCDKYLKVFYKFLNSNRPKIRHTEKKSFKCKKRVKLFCMLSHKTQHKSIYHREKSYKCKECGKTFNWSSTLTNHRKIYTEEKPYKCEEYNKSPKQLSTLTTHEIIHAGEKLYKCEECGEAFNRSSTFTKHKVIHTGVKPYKCEECGKAFFWSSTLTKHKRIHTGEQPYKWEKFGKAFNRSSHLTTDKITHWREILQV

SEQ ID NO: 70479 - protein, 627 aa, Homo sapiens
MAAAELTAPAQGIVTFEDVAVYFSWKEWGLLDEAQKCLYHDVMLENLTLTTSLGGSGAGDEEAPYQQSTSPQRVSQVRIPKALPSPQKTNPCEICGPVLRQILHLVEHQGTHHGQKLYTDGACRKQLQFTAYLHQHQKQHVGQKHFRSNGGRDMFLSSCTFEVSGKPFTCKEVGKDFLVRSRFLQQQAAHTRKKSNRTKSAVAFHSVKNHYNWGECVKAFSYKHVRVQHQGDLIRERSYMCSECGKSFSTSCSLSDHLRVHTSEKPYTCGECGKSYRQSSSLITHRRIHTGVRPHQCDECGKLFNRKYDLLIHQRVHTGERPYKCSECGKSFSHSSSLITHQRIHTGMRPYECSECGKSFIHSSSLITHQRVHTGTRPYMCSECGKSFSQSCHLIKHRRLHIGEGPYECSECGKLFTYRSRFFQHQRVHTGVRSHECHECGKLFSRKFDLIVHERVHTGERPYECSECGKSFTCKSYLISHWKVHTGARPYECGECGKSFTHSSTLLQHQRVHTGERPYECNECGKFFSQSSSLIRHRRSHTGERPYECSECWKSFSNHSSLVKHRRVHTGERPYECSECGKSFSQSSNLTNHQRIHSGERPYECSDCGKFFTFNSNLLKHQNVHKG

SEQ ID NO: 70480 - protein, 535 aa, Homo sapiens
MGPLTIRDVTVEFSLEEWHCLDTAQQNLYRDVMLENYRNLVFLGIAVSKPDLITCLEQGKEPCNMKRHEMVAKPPVMCSHIAEDLCPERDIKYFFQKVILRRYDKCEHENLQLRKGCKSVDECKVCKGGYNGLNQCLITTQSKMYQCDKYVKVFYKFSNSDRHKIRHTEKKTCKCKECGKAFNQSSALTRHKMTHTGEKPYKCEECGKAFNRSSHLTQHKVIHTREKPYKCEECGKAFNRSSHITQHKRIHNREKPFKYDECCKAFKWSSALTTLTQHKRIHTGEKPYKCEECGKAFNQSSALTRHKMIHTGEKPFQCEECGKAFNRSSHLTQHKIIHTKEKPYKCEECGKAFNRSSHLTKHKRIHTREKAYKCDEYCKAFNWSSALTTLTQHKIIHTGEKPYKCEECGKAFNRSSYLIRHKIIHTGEKPYKCEECGKAFNQSSHLTQHKIIHTGEKPYKCEECGKAFNRSSHLSQHKIIHTGEKPYKCEECGKPFNRFSYLTVHKRIHAGENPNKYEECGKACNHSSNLTKHNS

SEQ ID NO: 70481 - protein, 563 aa, Homo sapiens
MGPLTIRDVTVEFSLEEWHCLDTAQQNLYRDVMLENYRNLVFLGIAVSKPDLITCLEQGKEPCNMKRHEMVAKPPVMCSHIAEDLCPERDIKYFFQKVILRRYDKCEHENLQLRKGCKSVDECKVCKGGYNGLNQCLITTQSKMYQCDKYVKVFYKFSNSDRHKIRHTEKKTCKCKECGKSFCMLSQLTRHKRIHIRENSHKCEECGKAFNQSSALTRHKMTHTGEKPYKCEECGKAFNRSSHLTQHKVIHTREKPYKCEECGKAFNRSSHITQHKRIHNREKPFKYDECCKAFKWSSALTTLTQHKRIHTGEKPYKCEECGKAFNQSSALTRHKMIHTGEKPFQCEECGKAFNRSSHLTQHKIIHTKEKPYKCEECGKAFNRSSHLTKHKRIHTREKAYKCDEYCKAFNWSSALTTLTQHKIIHTGEKPYKCEECGKAFNRSSYLIRHKIIHTGEKPYKCEECGKAFNQSSHLTQHKIIHTGEKPYKCEECGKAFNRSSHLSQHKIIHTGEKPYKCEECGKPFNRFSYLTVHKRIHAGENPNKYEECGKACNHSSNLTKHNS

SEQ ID NO: 70482 - protein, 563 aa, Homo sapiens; identical to SEQ ID NO: 70481

SEQ ID NO: 70483 - protein, 533 aa, Homo sapiens
MATSFRTASCWGLLSFKDISMEFTWDEWQLLDSTQKYLYRDVILENYHNLISVGYHGTKPDLIFKLEQGEDPWIINAKISRQSCPDGWEEWYQNNQDELESIERSYACSVLGRLNLSKTHDSSRQRLYNTRGKSLTQNSAPSRSYLRKNPDKFHGYEEPYFLKHQRAHSIEKNCVCSECGKAFRCKSQLIVHLRIHTGERPYECSKCERAFSAKSNLNAHQRVHTGEKPYSCSECEKVFSFRSQLIVHQEIHTGGKPYGCSECGKAYSWKSQLLLHQRSHTGVKPYECSECGKAFSLKSPFVVHQRTHTGVKPHKCSECGKAFRSKSYLLVHIRMHTGEKPYQCSDCGKAFNMKTQLIVHQGVHTGNNPYQCGECGKAFGRKEQLTAHLRAHAGEKPYGCSECGKAFSSKSYLVIHRRTHTGERPYECSLCERAFCGKSQLIIHQRTHSTEKPYECNECEKAYPRKASLQIHQKTHSGEKPFKCSECGKAFTQKSSLSEHQRVHTGEKPWKCSECGKSFCWNSGLRIHRKTHK

SEQ ID NO: 70484 - protein, 513 aa, Homo sapiens
MEFTWDEWQLLDSTQKYLYRDVILENYHNLISVGYHGTKPDLIFKLEQGEDPWIINAKISRQSCPDGWEEWYQNNQDELESIERSYACSVLGRLNLSKTHDSSRQRLYNTRGKSLTQNSAPSRSYLRKNPDKFHGYEEPYFLKHQRAHSIEKNCVCSECGKAFRCKSQLIVHLRIHTGERPYECSKCERAFSAKSNLNAHQRVHTGEKPYSCSECEKVFSFRSQLIVHQEIHTGGKPYGCSECGKAYSWKSQLLLHQRSHTGVKPYECSECGKAFSLKSPFVVHQRTHTGVKPHKCSECGKAFRSKSYLLVHIRMHTGEKPYQCSDCGKAFNMKTQLIVHQGVHTGNNPYQCGECGKAFGRKEQLTAHLRAHAGEKPYGCSECGKAFSSKSYLVIHRRTHTGERPYECSLCERAFCGKSQLIIHQRTHSTEKPYECNECEKAYPRKASLQIHQKTHSGEKPFKCSECGKAFTQKSSLSEHQRVHTGEKPWKCSECGKSFCWNSGLRIHRKTHK

SEQ ID NO: 70485 - protein, 412 aa, Homo sapiens
MIGMLESLQHESDLLQHDQIHTGEKPYECNECRKTFSLKQNLVEHKKMHTGEKSHECTECGKVCSRVSSLTLHLRSHTGKKAYKCNKCGKAFSQKENFLSHQKHHTGEKPYECEKVSIQMPTIIRHQKNHTGTKPYACKECGKAFNGKAYLTEHEKIHTGEKPFECNQCGRAFSQKQYLIKHQNIHTGKKPFKCSECGKAFSQKENLIIHQRIHTGEKPYECKGCGKAFIQKSSLIRHQRSHTGEKPYTCKECGKAFSGKSNLTEHEKIHIGEKPYKCNECGTIFRQKQYLIKHHNIHTGEKPYECNKCGKAFSRITSLIVHVRIHTGDKPYECKVCGKAFCQSSSLTVHMRSHTGEKPYGCNECGKAFSQFSTLALHMRIHTGEKPYQCSECGKAFSQKSHHIRHQRIHTH

SEQ ID NO: 70486 - protein, 412 aa, Homo sapiens; identical to SEQ ID NO: 70485

SEQ ID NO: 70487 - protein, 627 aa, Homo sapiens
MAAAVLTDRAQVSVTFDDVAVTFTKEEWGQLDLAQRTLYQEVMLENCGLLVSLGCPVPKAELICHLEHGQEPWTRKEDLSQDTCPGDKGKPKTTEPTTCEPALSEGISLQGQVTQGNSVDSQLGQAEDQDGLSEMQEGHFRPGIDPQEKSPGKMSPECDGLGTADGVCSRIGQEQVSPGDRVRSHNSCESGKDPMIQEEENNFKCSECGKVFNKKHLLAGHEKIHSGVKPYECTECGKTFIKSTHLLQHHMIHTGERPYECMECGKAFNRKSYLTQHQRIHSGEKPYKCNECGKAFTHRSNFVLHNRRHTGEKSFVCTECGQVFRHRPGFLRHYVVHSGENPYECLECGKVFKHRSYLMWHQQTHTGEKPYECSECGKVFLESAALIHHYVIHTGEKPFECLECGKAFNHRSYLKRHQRIHTGEKPFVCSECGKAFTHCSTFILHKRAHTGEKPFECKECGKAFSNRKDLIRHFSIHTGEKPYECVECGKAFTRMSGLTRHKRIHSGEKPYECVECGKSFCWSTNLIRHAIIHTGEKPYKCSECGKAFSRSSSLTQHQRMHTGKNPISVTDVGRPFTSGQTSVTLRELLLGKDFLNVTTEANILPEETSSSASDQPYQRETPQVSSL

SEQ ID NO: 70488 - protein, 627 aa, Homo sapiens; identical to SEQ ID NO: 70487

SEQ ID NO: 70489 - protein, 549 aa, Homo sapiens
MLENYKNLATVGYQLFKPSLISWLEQEESRTVQRGDFQASEWKVQLKTKELALQQDVLGEPTSSGIQMIGSHNGGEVSDVKQCGDVSSEHSCLKTHVRTQNSENTFECYLYGVDFLTLHKKTSTGEQRSVFSQCGKAFSLNPDVVCQRTCTGEKAFDCSDSGKSFINHSHLQGHLRTHNGESLHEWKECGRGFIHSTDLAVRIQTHRSEKPYKCKECGKGFRYSAYLNIHMGTHTGDNPYECKECGKAFTRSCQLTQHRKTHTGEKPYKCKDCGRAFTVSSCLSQHMKIHVGEKPYECKECGIAFTRSSQLTEHLKTHTAKDPFECKICGKSFRNSSCLSDHFRIHTGIKPYKCKDCGKAFTQNSDLTKHARTHSGERPYECKECGKAFARSSRLSEHTRTHTGEKPFECVKCGKAFAISSNLSGHLRIHTGEKPFECLECGKAFTHSSSLNNHMRTHSAKKPFTCMECGKAFKFPTCVNLHMRIHTGEKPYKCKQCGKSFSYSNSFQLHERTHTGEKPYECKECGKAFSSSSSFRNHERRHADERLSA

SEQ ID NO: 70490 - protein, 549 aa, Homo sapiens; identical to SEQ ID NO: 70489

SEQ ID NO: 70491 - protein, 549 aa, Homo sapiens; identical to SEQ ID NO: 70489

SEQ ID NO: 70492 - protein, 743 aa, Homo sapiens
MGLLTFRDVAVEFSLEEWEHLEPAQKNLYQDVMLENYRNLVSLGLVVSKPDLITFLEQRKEPWNVKSEETVAIQPDVFSHYNKDLLTEHCTEASFQKVISRRHGSCDLENLHLRKRWKREECEGHNGCYDEKTFKYDQFDESSVESLFHQQILSSCAKSYNFDQYRKVFTHSSLLNQQEEIDIWGKHHIYDKTSVLFRQVSTLNSYRNVFIGEKNYHCNNSEKTLNQSSSPKNHQENYFLEKQYKCKEFEEVFLQSMHGQEKQEQSYKCNKCVEVCTQSLKHIQHQTIHIRENSYSYNKYDKDLSQSSNLRKQIIHNEEKPYKCEKCGDSLNHSLHLTQHQIIPTEEKPCKWKECGKVFNLNCSLYLTKQQQIDTGENLYKCKACSKSFTRSSNLIVHQRIHTGEKPYKCKECGKAFRCSSYLTKHKRIHTGEKPYKCKECGKAFNRSSCLTQHQTTHTGEKLYKCKVCSKSYARSSNLIMHQRVHTGEKPYKCKECGKVFSRSSCLTQHRKIHTGENLYKCKVCAKPFTCFSNLIVHERIHTGEKPYKCKECGKAFPYSSHLIRHHRIHTGEKPYKCKACSKSFSDSSGLTVHRRTHTGEKPYTCKECGKAFSYSSDVIQHRRIHTGQRPYKCEECGKAFNYRSYLTTHQRSHTGERPYKCEECGKAFNSRSYLTTHRRRHTGERPYKCDECGKAFSYRSYLTTHRRSHSGERPYKCEECGKAFNSRSYLIAHQRSHTREKL

SEQ ID NO: 70493 - protein, 279 aa, Homo sapiens
MGLLTFRDVAVEFSLEEWEHLEPAQKNLYQDVMLENYRNLVSLGLVVSKPDLLTEHCTEASFQKVISRRHGSCDLENLHLRKRWKREECEGHNGCYDEKTFKYDQFDESSVESLFHQQILSSCAKSYNFDQYRKVFTHSSLLNQQEEIDIWGKHHIYDKTSVLFRQVSTLNSYRNVFIGEKNYHCNNSEKTLNQSSSPKNHQENYFLEKQYKCKEFEEVFLQSMHGQEKQEQSYKCNKCVEVCTQSLKHIQHQTIHIRENSYSYNKYDKDLSQSSNLRK

SEQ ID NO: 70494 - protein, 947 aa, Homo sapiens
MATRVRTASIWVPPLQERNSSWDRIRKLQGQESILGQGTPGLQPLPGTPRQKQKSRRIEKVLEWLFISQEQPKITKSWGPLSFMDVFVDFTWEEWQLLDPAQKCLYRSVMLENYSNLVSLGYQHTKPDIIFKLEQGEELCMVQAQVPNQTCPNTVWKIDDLMDWHQENKDKLGSTAKSFECTTFGKLCLLSTKYLSRQKPHKCGTHGKSLKYIDFTSDYARNNPNGFQVHGKSFFHSKHEQTVIGIKYCESIESGKTVNKKSQLMCQQMYMGEKPFGCSCCEKAFSSKSYLLVHQQTHAEEKPYGCNECGKDFSSKSYLIVHQRIHTGEKLHECSECRKTFSFHSQLVIHQRIHTGENPYECCECGKVFSRKDQLVSHQKTHSGQKPYVCNECGKAFGLKSQLIIHERIHTGEKPYECNECQKAFNTKSNLMVHQRTHTGEKPYVCSDCGKAFTFKSQLIVHQGIHTGVKPYGCIQCGKGFSLKSQLIVHQRSHTGMKPYVCNECGKAFRSKSYLIIHTRTHTGEKLHECNNCGKAFSFKSQLIIHQRIHTGENPYECHECGKAFSRKYQLISHQRTHAGEKPYECTDCGKAFGLKSQLIIHQRTHTGEKPFECSECQKAFNTKSNLIVHQRTHTGEKPYSCNECGKAFTFKSQLIVHKGVHTGVKPYGCSQCAKTFSLKSQLIVHQRSHTGVKPYGCSECGKAFRSKSYLIIHMRTHTGEKPHECRECGKSFSFNSQLIVHQRIHTGENPYECSECGKAFNRKDQLISHQRTHAGEKPYGCSECGKAFSSKSYLIIHMRTHSGEKPYECNECGKAFIWKSLLIVHERTHAGVNPYKCSQCEKSFSGKLRLLVHQRMHTREKPYECSECGKAFIRNSQLIVHQRTHSGEKPYGCNECGKTFSQKSILSAHQRTHTGEKPCKCTECGKAFCWKSQLIMHQRTHVDDKH

SEQ ID NO: 70495 - protein, 358 aa, Homo sapiens
MDAKSLTAWSRTLVTFKDVFVDFTREEWKLLDTAQQIVYRNVMLENYKNLVSLGYQLTKPDVILRLEKGEEPWLVEREIHQETHPDSETAFEIKSSVSSRSIFKDKQSCDIKMEGMARNDLWYLSLEEVWKCRDQLDKYQENPERHLSIPRVLSLPARHTKLTVGMATRVRTASIWVPPLQERNSSWDRIRKLQGQESILGQGTPGLQPLPGTPRQKQKSRRIEKVLEWLFISQEQPKITKSWGPLSFMDVFVDFTWEEWQLLDPAQKCLYRSVMLENYSNLVSLGYQHTKPDIIFKLEQGEELCMVQAQVPNQTCPILKAGKSKAKVLAGLVSGEGLLCASKMTPCCCILWRHSLEN

SEQ ID NO: 70496 - protein, 167 aa, Homo sapiens
MATRVRTASIWVPPLQERNSSWDRIRKLQGQESILGQGTPGLQPLPGTPRQKQKSRRIEKVLEWLFISQEQPKITKSWGTNTPNLISSSSWNKEKSCVWCRPKFQIRPVQTQSGKLMILWIGIRKIKTSWEVRQKALNALHLENYVFLVQSIFQDKNLINVARMERV

SEQ ID NO: 70497 - protein, 786 aa, Homo sapiens
MDWHQENKDKLGSTAKSFECTTFGKLCLLSTKYLSRQKPHKCGTHGKSLKYIDFTSDYARNNPNGFQVHGKSFFHSKHEQTVIGIKYCESIESGKTVNKKSQLMCQQMYMGEKPFGCSCCEKAFSSKSYLLVHQQTHAEEKPYGCNECGKDFSSKSYLIVHQRIHTGEKLHECSECRKTFSFHSQLVIHQRIHTGENPYECCECGKVFSRKDQLVSHQKTHSGQKPYVCNECGKAFGLKSQLIIHERIHTGEKPYECNECQKAFNTKSNLMVHQRTHTGEKPYVCSDCGKAFTFKSQLIVHQGIHTGVKPYGCIQCGKGFSLKSQLIVHQRSHTGMKPYVCNECGKAFRSKSYLIIHTRTHTGEKLHECNNCGKAFSFKSQLIIHQRIHTGENPYECHECGKAFSRKYQLISHQRTHAGEKPYECTDCGKAFGLKSQLIIHQRTHTGEKPFECSECQKAFNTKSNLIVHQRTHTGEKPYSCNECGKAFTFKSQLIVHKGVHTGVKPYGCSQCAKTFSLKSQLIVHQRSHTGVKPYGCSECGKAFRSKSYLIIHMRTHTGEKPHECRECGKSFSFNSQLIVHQRIHTGENPYECSECGKAFNRKDQLISHQRTHAGEKPYGCSECGKAFSSKSYLIIHMRTHSGEKPYECNECGKAFIWKSLLIVHERTHAGVNPYKCSQCEKSFSGKLRLLVHQRMHTREKPYECSECGKAFIRNSQLIVHQRTHSGEKPYGCNECGKTFSQKSILSAHQRTHTGEKPCKCTECGKAFCWKSQLIMHQRTHVDDKH

SEQ ID NO: 70498 - protein, 947 aa, Homo sapiens; identical to SEQ ID NO: 70494

SEQ ID NO: 70499 - protein, 730 aa, Homo sapiens
MDWHQENKDKLGSTAKSFECTTFGKLCLLSTKYLSRQKPHKCGTHGKSLKYIDFTSDYARNNPNGFQVHGKSFFHSKHEQTVIGIKYCESIESGKTVNKKSQLMCQQMYMGEKPFGCSCCEKAFSSKSYLLVHQQTHAEEKPYGCNECGKDFSSKSYLIVHQRIHTGEKLHECSECRKTFSFHSQLVIHQRIHTGENPYECCECGKVFSRKDQLVSHQKTHSGQKPYVCNECGKAFGLKSQLIIHERIHTGEKPYECNECQKAFNTKSNLMVHQRTHTGEKPYVCSDCGKAFTFKSQLIVHQGIHTGVKPYGCIQCGKGFSLKSQLIVHQRSHTGMKPYVCNECGKAFRSKSYLIIHTRTHTGEKLHECNNCGKAFSFKSQLIIHQRIHTGENPYECHECGKAFSRKYQLISHQRTHAGEKPYECTDCGKAFGLKSQLIIHQRTHTGEKPFECSECQKAFNTKSNLIVHQRTHTGEKPYSCNECGKAFTFKSQLIVHKGVHTGVKPYGCSQCAKTFSLKSQLIVHQRSHTGVKPYGCSECGKAFRSKSYLIIHMRTHTGEKPHECRECGKSFSFNSQLIVHQRIHTGENPYECSECGKAFNRKDQLISHQRTHAGEKPYGCSECGKAFSSKSYLIIHMRTHSGEKPYECNECGKAFIWKSLLIVHERTHAGVNPYKCSQCEKSFSGKLRLLVHQRMHTREKPYECTECGKAFCWKSQLIMHQRTHVDDKH

SEQ ID NO: 70500 - protein, 100 aa, Homo sapiens
MATRVRTASIWGTNTPNLISSSSWNKEKSCVWCRPKFQIRPVQTQSGKLMILWIGIRKIKTSWEVRQKALNALHLENYVFLVQSIFQDKNLINVARMERV

SEQ ID NO: 70501 - protein, 126 aa, Homo sapiens
MATRVRTASIWGPLSFMDVFVDFTWEEWQLLDPAQKCLYRSVMLENYSNLVSLGYQHTKPDIIFKLEQGEELCMVQAQVPNQTCPILKAGKSKAKVLAGLVSGEGLLCASKMTPCCCILWRHSLEN

SEQ ID NO: 70502 - protein, 68 aa, Homo sapiens
MATRVRTASIWTQSGKLMILWIGIRKIKTSWEVRQKALNALHLENYVFLVQSIFQDKNLINVARMERV

SEQ ID NO: 70503 - protein, 167 aa, Homo sapiens; identical to SEQ ID NO: 70496

SEQ ID NO: 70504 - protein, 126 aa, Homo sapiens; identical to SEQ ID NO: 70501

SEQ ID NO: 70505 - protein, 652 aa, Homo sapiens
MASRLPTAWSCEPVTFEDVTLGFTPEEWGLLDLKQKSLYREVMLENYRNLVSVEHQLSKPDVVSQLEEAEDFWPVERGIPQDTIPEYPELQLDPKLDPLPAESPLMNIEVVEVLTLNQEVAGPRNAQIQALYAEDGSLSADAPSEQVQQQGKHPGDPEAARQRFRQFRYKDMTGPRELDQLRELCHQWLQPKARSKEQILELLVLEQFLGALPVKLRTWVESQHPENCQEVVALVEGVTWMSEEEVLPAGQPAEGTTCCLEVTAQQEEKQEDAAICPVTVLPEEPVTFQDVAVDFSREEWGLLGPTQRTEYRDVMLETFGHLVSVGWETTLENKELAPNSDIPEEEPAPSLKVQESSRDCALSSTLEDTLQGGVQEVQDTVLKQMESAQEKDLPQKKHFDNRESQANSGALDTNQVSLQKIDNPESQANSGALDTNQVLLHKIPPRKRLRKRDSQVKSMKHNSRVKIHQKSCERQKAKEGNGCRKTFSRSTKQITFIRIHKGSQVCRCSECGKIFRNPRYFSVHKKIHTGERPYVCQDCGKGFVQSSSLTQHQRVHSGERPFECQECGRTFNDRSAISQHLRTHTGAKPYKCQDCGKAFRQSSHLIRHQRTHTGERPYACNKCGKAFTQSSHLIGHQRTHNRTKRKKKQPTS

SEQ ID NO: 70506 - protein, 620 aa, Homo sapiens
MASRLPTAWSCEPVTFEDVTLGFTPEEWGLLDLKQKSLYREVMLENYRNLVSVEYPELQLDPKLDPLPAESPLMNIEVVEVLTLNQEVAGPRNAQIQALYAEDGSLSADAPSEQVQQQGKHPGDPEAARQRFRQFRYKDMTGPRELDQLRELCHQWLQPKARSKEQILELLVLEQFLGALPVKLRTWVESQHPENCQEVVALVEGVTWMSEEEVLPAGQPAEGTTCCLEVTAQQEEKQEDAAICPVTVLPEEPVTFQDVAVDFSREEWGLLGPTQRTEYRDVMLETFGHLVSVGWETTLENKELAPNSDIPEEEPAPSLKVQESSRDCALSSTLEDTLQGGVQEVQDTVLKQMESAQEKDLPQKKHFDNRESQANSGALDTNQVSLQKIDNPESQANSGALDTNQVLLHKIPPRKRLRKRDSQVKSMKHNSRVKIHQKSCERQKAKEGNGCRKTFSRSTKQITFIRIHKGSQVCRCSECGKIFRNPRYFSVHKKIHTGERPYVCQDCGKGFVQSSSLTQHQRVHSGERPFECQECGRTFNDRSAISQHLRTHTGAKPYKCQDCGKAFRQSSHLIRHQRTHTGERPYACNKCGKAFTQSSHLIGHQRTHNRTKRKKKQPTS

SEQ ID NO: 70507 - protein, 547 aa, Homo sapiens
MNIEVVEVLTLNQEVAGPRNAQIQALYAEDGSLSADAPSEQVQQQGKHPGDPEAARQRFRQFRYKDMTGPRELDQLRELCHQWLQPKARSKEQILELLVLEQFLGALPVKLRTWVESQHPENCQEVVALVEGVTWMSEEEVLPAGQPAEGTTCCLEVTAQQEEKQEDAAICPVTVLPEEPVTFQDVAVDFSREEWGLLGPTQRTEYRDVMLETFGHLVSVGWETTLENKELAPNSDIPEEEPAPSLKVQESSRDCALSSTLEDTLQGGVQEVQDTVLKQMESAQEKDLPQKKHFDNRESQANSGALDTNQVSLQKIDNPESQANSGALDTNQVLLHKIPPRKRLRKRDSQVKSMKHNSRVKIHQKSCERQKAKEGNGCRKTFSRSTKQITFIRIHKGSQVCRCSECGKIFRNPRYFSVHKKIHTGERPYVCQDCGKGFVQSSSLTQHQRVHSGERPFECQECGRTFNDRSAISQHLRTHTGAKPYKCQDCGKAFRQSSHLIRHQRTHTGERPYACNKCGKAFTQSSHLIGHQRTHNRTKRKKKQPTS

SEQ ID NO: 70508 - protein, 450 aa, Homo sapiens
MAASKTQGAVARMQEDRDGSCSTVGGVGYGDSKDCILEPLSLPESPGGTTTLEGSPSVPCIFCEEHFPVAEQDKLLKHMIIEHKIVIADVKLVADFQRYILYWRKRFTEQPITDFCSVIRINSTAPFEEQENYFLLCDVLPEDRILREELQKQRLREILEQQQQERNDTNFHGVCMFCNEEFLGNRSVILNHMAREHAFNIGLPDNIVNCNEFLCTLQKKLDNLQCLYCEKTFRDKNTLKDHMRKKQHRKINPKNREYDRFYVINYLELGKSWEEVQLEDDRELLDHQEDDWSDWEEHPASAVCLFCEKQAETIEKLYVHMEDAHEFDLLKIKSELGLNFYQQVKLVNFIRRQVHQCRCYGCHVKFKSKADLRTHMEETKHTSLLPDRKTWDQLEYYFPTYENDTLLCTLSDSESDLTAQEQNENVPIISEDTSKLYALKQSSILNQLLL

SEQ ID NO: 70509 - protein, 290 aa, Homo sapiens
MAASKTQGAVARMQEDRDGSCSTVGGVGYGDSKDCILEPLSLPESPGGTTTLEGSPSVPCIFCEEHFPVAEQDKLLKHMIIEHKIVIADVKLVADFQRYILYWRKRFTEQPITDFCSVIRINSTAPFEEQENYFLLCDVLPEDRILREELQKQRLREILEQQQQERNDTNFHGVCMFCNEEFLGNRSVILNHMAREHAFNIGLPDNIVNCNEFLCTLQKKLDNLQCLYCEKTFRDKNTLKDHMRKKQHRKINPKNREYDRFYVINYLVRLSFHNLKFDCSTANKIFLRTN

SEQ ID NO: 70510 - protein, 475 aa, Homo sapiens
MSRRKAGSAPRRVEPAPAANPDDEMEMQDLVIELKPEPDAQPQQAPRLGPFSPKEVSSAGRFGGEPHHSPGPMPAGAALLALGPRNPWTLWTPLTPNYPDRQPWTDKHPDLLTCGRCLQTFPLEAITAFMDHKKLGCQLFRGPSRGQGSEREELKALSCLRCGKQFTVAWKLLRHAQWDHGLSIYQTESEAPEAPLLGLAEVAAAVSAVVGPAAEAKSPRASGSGLTRRSPTCPVCKKTLSSFSNLKVHMRSHTGERPYACDQCPYACAQSSKLNRHKKTHRQVPPQSPLMADTSQEQASAAPPEPAVHAAAPTSTLPCSGGEGAGAAATAGVQEPGAPGSGAQAGPGGDTWGAITTEQRTDPANSQKASPKKMPKSGGKSRGPGGSCEFCGKHFTNSSNLTVHRRSHTGERPYTCEFCNYACAQSSKLNRHRRMHGMTPGSTRFECPHCHVPFGLRATLDKHLRQKHPEAAGEA

SEQ ID NO: 70511 - protein, 451 aa, Homo sapiens
MEMQDLVIELKPEPDAQPQQAPRLGPFSPKEVSSAGRFGGEPHHSPGPMPAGAALLALGPRNPWTLWTPLTPNYPDRQPWTDKHPDLLTCGRCLQTFPLEAITAFMDHKKLGCQLFRGPSRGQGSEREELKALSCLRCGKQFTVAWKLLRHAQWDHGLSIYQTESEAPEAPLLGLAEVAAAVSAVVGPAAEAKSPRASGSGLTRRSPTCPVCKKTLSSFSNLKVHMRSHTGERPYACDQCPYACAQSSKLNRHKKTHRQVPPQSPLMADTSQEQASAAPPEPAVHAAAPTSTLPCSGGEGAGAAATAGVQEPGAPGSGAQAGPGGDTWGAITTEQRTDPANSQKASPKKMPKSGGKSRGPGGSCEFCGKHFTNSSNLTVHRRSHTGERPYTCEFCNYACAQSSKLNRHRRMHGMTPGSTRFECPHCHVPFGLRATLDKHLRQKHPEAAGEA

SEQ ID NO: 70512 - protein, 446 aa, Homo sapiens
METQADLVSQEPQALLDSALPSKVPAFSDKDSLGDEMLAAALLKAKSQELVTFEDVAVYFIRKEWKRLEPAQRDLYRDVMLENYGNVFSLDRETRTENDQEISEDTRSHGVLLGRFQKDISQGLKFKEAYEREVSLKRPLGNSPGERLNRKMPDFGQVTVEEKLTPRGERSEKYNDFGNSFTVNSNLISHQRLPVGDRPHKCDECSKSFNRTSDLIQHQRIHTGEKPYECNECGKAFSQSSHLIQHQRIHTGEKPYECSDCGKTFSCSSALILHRRIHTGEKPYECNECGKTFSWSSTLTHHQRIHTGEKPYACNECGKAFSRSSTLIHHQRIHTGEKPYECNECGKAFSQSSHLYQHQRIHTGEKPYECMECGGKFTYSSGLIQHQRIHTGENPYECSECGKAFRYSSALVRHQRIHTGEKPLNGIGMSKSSLRVTTELNIREST

SEQ ID NO: 70513 - protein, 446 aa, Homo sapiens; identical to SEQ ID NO: 70512

SEQ ID NO: 70514 - protein, 131 aa, Homo sapiens
METQADLVSQEPQALLDSALPSKVPAFSDKDSLGDEMLAAALLKAKSQELVTFEDVAVYFIRKEWKRLEPAQRDLYRDVMLENYGNVFSLDWIHVCLTTQKVMLAWLTGTLSVAKGLCSSELASVEPPDTF

SEQ ID NO: 70515 - protein, 104 aa, Homo sapiens
METQADLVSQEPQALLDSALPSKVPAFSDKDSLGDEMLAAALLKAKSQELVTFEDVAVYFIRKEWKRLEPAQRDLYRDVMLENYGNVFSLDRETRTENDQEISE

SEQ ID NO: 70516 - protein, 446 aa, Homo sapiens; identical to SEQ ID NO: 70512

SEQ ID NO: 70517 - protein, 185 aa, Homo sapiens
METQADLVSQEPQALLDSALPSKVPAFSDKDSLGDEMLAAALLKAKSQELVTFEDVAVYFIRKEWKRLEPAQRDLYRDVMLENYGNVFSLDRETRTENDQEISEDTRSHGVLLGRFQKDISQGLKFKEAYEREVSLKRPLGNSPGERLNRKMPDFGQVTVEEKLTPRGERSEKYNDFGNSFTVNS

SEQ ID NO: 70518 - protein, 185 aa, Homo sapiens; identical to SEQ ID NO: 70517

SEQ ID NO: 70519 - protein, 502 aa, Homo sapiens
MGTENKEVIPKEEISEESEPHGSLLEKFPKVVYQGHEFGAGCEEDMLEGHSRESMEEVIEQMSPQERDFPSGLMIFKKSPSSEKDRENNESERGCSPSPNLVTHQGDTTEGVSAFATSGQNFLEILESNKTQRSSVGEKPHTCKECGKAFNQNSHLIQHMRVHSGEKPFECKECGKTFGTNSSLRRHLRIHAGEKPFACNECGKAFIQSSHLIHHHRIHTGERPYKCEECGKAFSQNSALILHQRIHTGEKPYECNECGKTFRVSSQLIQHQRIHTEERYHECNECGKAFKHSSGLIRHQKIHTGEKPYLCNECGKGFGQSSELIRHQRIHTGDKPYECNECGKTFGQNSEIIRHIRIHTGEKPYVCKECGKAFRGNSELLRHERIHTGEKPYECFECGKAFRRTSHLIVHQRIHTGEKPHQCNECARTFWDNSELLLHQKIHIGEKPYECSECEKTFSQHSQLIIHQRIHTGEKPYECQECQKTFSRSSHLLRHQSVHCME

SEQ ID NO: 70520 - protein, 604 aa, Homo sapiens
MMKSQGLVSFKDVAVDFTQEEWQQLDPSQRTLYRDVMLENYSHLVSMGYPVSKPDVISKLEQGEEPWIIKGDISNWIYPDEYQADGRQDRKSNLHNSQSCILGTVSFHHKILKGVTRDGSLCSILKVCQGDGQLQRFLENQDKLFRQVTFVNSKTVTEASGHKYNPLGKIFQECIETDISIQRFHKYDAFKKNLKPNIDLPSCYKSNSRKKPDQSFGGGKSSSQSEPNSNLEKIHNGVIPFDDNQCGNVFRNTQSLIQYQNVETKEKSCVCVTCGKAFAKKSQLIVHQRIHTGKKPYDCGACGKAFSEKFHLVVHQRTHTGEKPYDCSECGKAFSQKSSLIIHQRVHTGEKPYECSECGKAFSQKSPLIIHQRIHTGEKPYECRECGKAFSQKSQLIIHHRAHTGEKPYECTECGKAFCEKSHLIIHKRIHTGEKPYKCAQCEEAFSRKTELITHQLVHTGEKPYECTECGKTFSRKSQLIIHQRTHTGEKPYKCSECGKAFCQKSHLIGHQRIHTGEKPYICTECGKAFSQKSHLPGHQRIHTGEKPYICAECGKAFSQKSDLVLHQRIHTGERPYQCAICGKAFIQKSQLTVHQRIHTVVKS

SEQ ID NO: 70521 - protein, 604 aa, Homo sapiens [sequence omitted]

SEQ ID NO: 70522 - protein, 568 aa, Homo sapiens
MLENYSHLVSMGYPVSKPDVISKLEQGEEPWIIKGDISNWIYPDEYQADGRQDRKSNLHNSQSCILGTVSFHHKILKGVTRDGSLCSILKVCQGDGQLQRFLENQDKLFRQVTFVNSKTVTEASGHKYNPLGKIFQECIETDISIQRFHKYDAFKKNLKPNIDLPSCYKSNSRKKPDQSFGGGKSSSQSEPNSNLEKIHNGVIPFDDNQCGNVFRNTQSLIQYQNVETKEKSCVCVTCGKAFAKKSQLIVHQRIHTGKKPYDCGACGKAFSEKFHLVVHQRTHTGEKPYDCSECGKAFSQKSSLIIHQRVHTGEKPYECSECGKAFSQKSPLIIHQRIHTGEKPYECRECGKAFSQKSQLIIHHRAHTGEKPYECTECGKAFCEKSHLIIHKRIHTGEKPYKCAQCEEAFSRKTELITHQLVHTGEKPYECTECGKTFSRKSQLIIHQRTHTGEKPYKCSECGKAFCQKSHLIGHQRIHTGEKPYICTECGKAFSQKSHLPGHQRIHTGEKPYICAECGKAFSQKSDLVLHQRIHTGERPYQCAICGKAFIQKSQLTVHQRIHTVVKS

SEQ ID NO: 70523 - protein, 620 aa, Homo sapiens
MVPAETSSSGLLEEQKMMKSQGLVSFKDVAVDFTQEEWQQLDPSQRTLYRDVMLENYSHLVSMGYPVSKPDVISKLEQGEEPWIIKGDISNWIYPDEYQADGRQDRKSNLHNSQSCILGTVSFHHKILKGVTRDGSLCSILKVCQGDGQLQRFLENQDKLFRQVTFVNSKTVTEASGHKYNPLGKIFQECIETDISIQRFHKYDAFKKNLKPNIDLPSCYKSNSRKKPDQSFGGGKSSSQSEPNSNLEKIHNGVIPFDDNQCGNVFRNTQSLIQYQNVETKEKSCVCVTCGKAFAKKSQLIVHQRIHTGKKPYDCGACGKAFSEKFHLVVHQRTHTGEKPYDCSECGKAFSQKSSLIIHQRVHTGEKPYECSECGKAFSQKSPLIIHQRIHTGEKPYECRECGKAFSQKSQLIIHHRAHTGEKPYECTECGKAFCEKSHLIIHKRIHTGEKPYKCAQCEEAFSRKTELITHQLVHTGEKPYECTECGKTFSRKSQLIIHQRTHTGEKPYKCSECGKAFCQKSHLIGHQRIHTGEKPYICTECGKAFSQKSHLPGHQRIHTGEKPYICAECGKAFSQKSDLVLHQRIHTGERPYQCAICGKAFIQKSQLTVHQRIHTVVKS

SEQ ID NO: 70524 - protein, 659 aa, Homo sapiens
MAAAVLMDRVQSCVTFEDVFVYFSREEWELLEEAQRFLYRDVMLENFALVATLGFWCEAEHEAPSEQSVSVEGVSQVRTAESGLFQKAHPCEMCDPLLKDILHLAEHQGSHLTQKLCTRGLCRRRFSFSANFYQHQKQHNGENCFRGDDGGASFVKSCTVHMLGRSFTCREEGMDLPDSSGLFQHQTTYNRVSPCRRTECMESFPHSSSLRQHQGDYDGQMLFSCGDEGKAFLDTFTLLDSQMTHAEVRPFRCLPCGNVFKEKSALINHRKIHSGEISHVCKECGKAFIHLHHLKMHQKFHTGKRHYTCSECGKAFSRKDTLVQHQRVHTGERSYDCSECGKAYSRSSHLVQHQRIHTGERPYKCNKCGKAFSRKDTLVQHQRFHTGERPYECSECGKFFSQSSHLIEHWRIHTGARPYECIECGKFFSHNSSLIKHRRVHTGARSYVCSKCGKAFGCKDTLVQHQIIHTGARPYECSECGKAFSRKDTLVQHQKIHTGERPYECGECGKFFSHSSNLIVHQRIHTGAKPYECNECGKCFSHNSSLILHQRVHTGARPYVCSECGKAYISSSHLVQHKKVHTGARPYECSECGKFFSRNSGLILHQRVHTGEKPYVCSECGKAYSRSSHLVRHQKAHTGERAHECNSFGGPLAASLKLV

SEQ ID NO: 70525 - protein, 659 aa, Homo sapiens; identical to SEQ ID NO: 70524

SEQ ID NO: 70526 - protein, 706 aa, Homo sapiens
MAAAVLMDRVQSCVTFEDVFVYFSREEWELLEEAQRFLYRDVMLENFALVATLAFIFPVPCSCAVGGGRKPWVPDRADITAATVKETYRGHGPAEWELEEGFWCEAEHEAPSEQSVSVEGVSQVRTAESGLFQKAHPCEMCDPLLKDILHLAEHQGSHLTQKLCTRGLCRRRFSFSANFYQHQKQHNGENCFRGDDGGASFVKSCTVHMLGRSFTCREEGMDLPDSSGLFQHQTTYNRVSPCRRTECMESFPHSSSLRQHQGDYDGQMLFSCGDEGKAFLDTFTLLDSQMTHAEVRPFRCLPCGNVFKEKSALINHRKIHSGEISHVCKECGKAFIHLHHLKMHQKFHTGKRHYTCSECGKAFSRKDTLVQHQRVHTGERSYDCSECGKAYSRSSHLVQHQRIHTGERPYKCNKCGKAFSRKDTLVQHQRFHTGERPYECSECGKFFSQSSHLIEHWRIHTGARPYECIECGKFFSHNSSLIKHRRVHTGARSYVCSKCGKAFGCKDTLVQHQIIHTGARPYECSECGKAFSRKDTLVQHQKIHTGERPYECGECGKFFSHSSNLIVHQRIHTGAKPYECNECGKCFSHNSSLILHQRVHTGARPYVCSECGKAYISSSHLVQHKKVHTGARPYECSECGKFFSRNSGLILHQRVHTGEKPYVCSECGKAYSRSSHLVRHQKAHTGERAHECNSFGGPLAASLKLV

SEQ ID NO: 70527 - protein, 595 aa, Homo sapiens
MAALSPTFATSTQDSTCLQDSEFPVSSKDHSCPQNLDLFVCSGLEPHTPSVGSQESVTFQDVAVDFTEKEWPLLDSSQRKLYKDVMLENYSNLTSLGYQVGKPSLISHLEQEEEPRTEERGAHQGACADWETPSKTKWSLLMEDIFGKETPSGVTMERAGLGEKSTEYAHLFEVFGMDPHLTQPMGRHAGKRPYHRRDYGVAFKGRPHLTQHMSMYDGRKMHECHQCQKAFTTSASLTRHRRIHTGEKPYECSDCGKAFNDPSALRSHARTHLKEKPFDCSQCGNAFRTLSALKIHMRVHTGERPYKCDQCGKAYGRSCHLIAHKRTHTGERPYECHDCGKAFQHPSHLKEHVRNHTGEKPYACTQCGKAFRWKSNFNLHKKNHMVEKTYECKECGKSFGDLVSRRKHMRIHIVKKPVECRQCGKTFRNQSILKTHMNSHTGEKPYGCDLCGKAFSASSNLTAHRKIHTQERRYECAACGKVFGDYLSRRRHMSVHLVKKRVECRQCGKAFRNQSTLKTHMRSHTGEKPYECDHCGKAFSIGSNLNVHRRIHTGEKPYECLVCGKAFSDHSSLRSHVKTHRGEKLFVSSVWKRLQ

SEQ ID NO: 70528 - protein, 563 aa, Homo sapiens
MAALSPTFATSTQDSTCLQDSEFPVSSKDHSCPQNLDLFVCSGLEPHTPSVGSQESVTFQDVAVDFTEKEWPLLDSSQRKLYKDVMLENYSNLTSLDWETPSKTKWSLLMEDIFGKETPSGVTMERAGLGEKSTEYAHLFEVFGMDPHLTQPMGRHAGKRPYHRRDYGVAFKGRPHLTQHMSMYDGRKMHECHQCQKAFTTSASLTRHRRIHTGEKPYECSDCGKAFNDPSALRSHARTHLKEKPFDCSQCGNAFRTLSALKIHMRVHTGERPYKCDQCGKAYGRSCHLIAHKRTHTGERPYECHDCGKAFQHPSHLKEHVRNHTGEKPYACTQCGKAFRWKSNFNLHKKNHMVEKTYECKECGKSFGDLVSRRKHMRIHIVKKPVECRQCGKTFRNQSILKTHMNSHTGEKPYGCDLCGKAFSASSNLTAHRKIHTQERRYECAACGKVFGDYLSRRRHMSVHLVKKRVECRQCGKAFRNQSTLKTHMRSHTGEKPYECDHCGKAFSIGSNLNVHRRIHTGEKPYECLVCGKAFSDHSSLRSHVKTHRGEKLFVSSVWKRLQ

SEQ ID NO: 70529 - protein, 122 aa, Homo sapiens
MNFSSHRRRLPSPPLPRSYSQSSTSTQDSTCLQDSEFPVSSKDHSCPQNLDLFVCSGLEPHTPSVGSQESVTFQDVAVDFTEKEWPLLDSSQRKLYKDVMLENYSNLTSLGKASAISPLIHP

SEQ ID NO: 70530 - protein, 273 aa, Homo sapiens
MFGFPTATLLDCHGRYAQNVAFFNVMTEAHHKYDHSEATGSSSWDIQNSFRREKLEQKSPDSKTLQEDSPGVRQRVYECQECGKSFRQKGSLTLHERIHTGQKPFECTHCGKSFRAKGNLVTHQRIHTGEKPYQCKECGKSFSQRGSLAVHERLHTGQKPYECAICQRSFRNQSNLAVHRRVHSGEKPYRCDQCGKAFSQKGSLIVHIRVHTGLKPYACTQCRKSFHTRGNCILHGKIHTGETPYLCGQCGKSFTQRGSLAVHQRSCSQRLTL

SEQ ID NO: 70531 - protein, 273 aa, Homo sapiens; identical to SEQ ID NO: 70530

SEQ ID NO: 70532 - protein, 509 aa, Homo sapiens
MALSQGLLTFRDVAIEFSQEEWKCLDPAQRTLYRDVMLENYRNLVSLDISSKCMMNTLSSTGQGNTEVIHTGTLQRQASYHIGAFCSQEIEKDIHDFVFQWQEDETNDHEAPMTEIKKLTSSTDRYDQRHAGNKPIKGQLESRFHLHLRRHRRIHTGEKPYKCEECEKVFSCKSHLEIHRIIHTGEKPYKCKVCDKAFKHDSHLAKHTRIHRGDKHYTCNECGKVFDQKATLACHHRSHTGEKPYKCNECGKTFSQTSHLVYHHRLHTGEKPYKCNECGKTFARNSVLVIHKAVHTAEKPYKCNECGKVFKQRATLAGHRRVHTGEKPYRCEECDKVFSRKSHLERHRRIHTGEKPYKCKVCDKAFRSDSRLAEHQRVHTGERPYTCNECGKVFSTKAYLACHQKLHTGEKLYECEECDKVYIRKSHLERHRRIHTGEKPHKCGDCGKAFNSPSHLIRHQRIHTGQKSYKCHQCGKVFSLRSLLAEHQKIPFGDNCFKCNEYSKPSSIN

SEQ ID NO: 70533 - protein, 509 aa, Homo sapiens; identical to SEQ ID NO: 70532

SEQ ID NO: 70534 - protein, 402 aa, Homo sapiens
MYTSEEKCNQRTQKRKIYNVCPRKGKKIFIHMHEIIQIDGHIYQCLECKQNFCENLALIMCERTHTGEKPYKCDMCEKTFVQSSDLTSHQRIHNYEKPYKCSKCEKSFWHHLALSGHQRTHAGKKFYTCDICGKNFGQSSDLLVHQRSHTGEKPYLCSECDKCFSRSTNLIRHRRTHTGEKPFKCLECEKAFSGKSDLISHQRTHTGERPYKCNKCEKSYRHRSAFIVHKRVHTGEKPYKCGACEKCFGQKSDLIVHQRVHTGEKPYKCLECMRSFTRSANLIRHQATHTHTFKCLEYEKSFNCSSDLIVHQRIHMEEKPHQWSACESGFLLGMDFVAQQKMRTQTEELHYKYTVCDKSFHQSSALLQHQTVHIGEKPFVCNVSEKGLELSPPHASEASQMS

SEQ ID NO: 70535 - protein, 402 aa, Homo sapiens; identical to SEQ ID NO: 70534

SEQ ID NO: 70536 - protein, 26 aa, Homo sapiens
MYTSEEKCNQRTQKRKIYNVCPRKGK

SEQ ID NO: 70537 - protein, 406 aa, Homo sapiens
MASTEEQYDLKIVKVEEDPIWDQETHLRGNNFSGQEASRQLFRQFCYQETPGPREALSRLRELCHQWLRPEIHTKEQILELLVLEQFLTILPEELQAWVREHHPESGEEAVAVVEDLEQELSEPGNQAPDHEHGHSEVLLEDVEHLKVKQEPTDIQLQPMVTQLRYESFCLHQFQEQDGESIPENQELASKQEILKEMEHLGDSKLQRDVSLDSKYRETCKRDSKAEKQQAHSTGERRHRCNECGKSFTKSSVLIEHQRIHTGEKPYECEECGKAFSRRSSLNEHRRSHTGEKPYQCKECGKAFSASNGLTRHRRIHTGEKPYECKVCGKAFLLSSCLVQHQRIHTGEKRYQCRECGKAFIQNAGLFQHLRVHTGEKPYQCSQCSKLFSKRTLLKKHQKIHTGERP

SEQ ID NO: 70538 - protein, 406 aa, Homo sapiens; identical to SEQ ID NO: 70537

SEQ ID NO: 70539 - protein, 406 aa, Homo sapiens; identical to SEQ ID NO: 70537

SEQ ID NO: 70540 - protein, 107 aa, Homo sapiens
MASTEEQYDLKIVKVEEDPIWDQETHLRGNNFSGQEASRQLFRQFCYQETPGPREALSRLRELCHQWLRPEIHTKEQILELLVLEQFLTILPEELQAWVREHHPESG

SEQ ID NO: 70541 - protein, 78 aa, Homo sapiens
MASTEEQYDLKIVKVEEDPIWDQETHLRGNNFSGQEASRQLFRQFCYQETPGPREALSRLRELCHQWLRPEIHTKEQI

SEQ ID NO: 70542 - protein, 406 aa, Homo sapiens; identical to SEQ ID NO: 70537

SEQ ID NO: 70543 - protein, 17 aa, Homo sapiens
MASTEEQYDLKIVKVEE

SEQ ID NO: 70544 - protein, 155 aa, Homo sapiens
MASTEEQYDLKIVKVEEDPIWDQETHLRGNNFSGQEASRQLFRQFCYQETPGPREALSRLRELCHQWLRPEIHTKEQILELLVLEQFLTILPEELQAWVREHHPESGEEAVAVVEDLEQELSEPGNQAPDHEHGHSEVLLEDVEHLKVKQEPTDI

SEQ ID NO: 70545 - protein, 24 aa, Homo sapiens
MASTEEQYDLKIVKVEEDPIWDQE

SEQ ID NO: 70546 - protein, 103 aa, Homo sapiens
MASTEEQYDLKIVKVEEDPIWDQETHLRGNNFSGQEASRQLFRQFCYQETPGPREALSRLRELCHQWLRPEIHTKEQILELLVLEQFLTILPEELQAWVREHH

SEQ ID NO: 70547 - protein, 148 aa, Homo sapiens
MASTEEQYDLKIVKVEEDPIWDQETHLRGNNFSGQEASRQLFRQFCYQETPGPREALSRLRELCHQWLRPEIHTKEQILELLVLEQFLTILPEELQAWVREHHPESGEEAVAVVEDLEQELSEPGNQAPDHEHGHSEVLLEDVEHLKV

SEQ ID NO: 70548 - protein, 217 aa, Homo sapiens
MASTEEQYDLKIVKVEEDPIWDQETHLRGNNFSGQEASRQLFRQFCYQETPGPREALSRLRELCHQWLRPEIHTKEQILELLVLEQFLTILPEELQAWVREHHPESGEEAVAVVEDLEQELSEPGNQAPDHEHGHSEVLLEDVEHLKVKQEPTDIQLQPMVTQLRYESFCLHQFQEQDGESIPENQELASKQEILKEMEHLGDSKLQRDVSLDSKYR

SEQ ID NO: 70549 - protein, 320 aa, Homo sapiens
MPKKKTGARKKAENRREREKQLRASRSTIDLAKHPCNASMECDKCQRRQKNRAFCYFCNSVQKLPICAQCGKTKCMMKSSDCVIKHAGVYSTGLAMVGAICDFCEAWVCHGRKCLSTHACACPLTDAECVECERGVWDHGGRIFSCSFCHNFLCEDDQFEHQASCQVLEAETFKCVSCNRLGQHSCLRCKACFCDDHTRSKVFKQEKGKQPPCPKCGHETQETKDLSMSTRSLKFGRQTGGEEGDGASGYDAYWKNLSSDKYGDTSYHDEEEDEYEAEDDEEEEDEGRKDSDTESSDLFTNLNLGRTYASGYAHYEEQEN

SEQ ID NO: 70550 - protein, 260 aa, Homo sapiens
MPQWNVTSVRGKTKCMMKSSDCVIKHAGVYSTGLAMVGAICDFCEAWVCHGRKCLSTHACACPLTDAECVECERGVWDHGGRIFSCSFCHNFLCEDDQFEHQASCQVLEAETFKCVSCNRLGQHSCLRCKACFCDDHTRSKVFKQEKGKQPPCPKCGHETQETKDLSMSTRSLKFGRQTGGEEGDGASGYDAYWKNLSSDKYGDTSYHDEEEDEYEAEDDEEEEDEGRKDSDTESSDLFTNLNLGRTYASGYAHYEEQEN

SEQ ID NO: 70551 - protein, 140 aa, Homo sapiens
MPKKKTGARKKAENRREREKQLRASRSTIDLAKHPCNASMECDKCQRRQKNRAFCYFCNSVQKLPICAQCGKTKCMMKSSDCVIKHAGVYSTGLAMVGAICDFCEAWVCHGRKCLSTHACACPLTDAECVECERGVWDHG

SEQ ID NO: 70552 - protein, 153 aa, Homo sapiens
MPKKKTGARKKAENRREREKQLRASRSTIDLAKHPCNASMECDKCQRRQKNRAFCYFCNSVQKLPICAQCGKTKCMMKSSDCVIKHAGVYSTGLAMVGAICDFCEAWVCHGRKCLSTHACACPLTDAECVECERGVWDHGGRIFSCSFCHNFL

SEQ ID NO: 70553 - protein, 229 aa, Homo sapiens
MPKKKTGARKKAENRREREKQLRASRSTIDLAKHPCNASMECDKCQRRQKNRAFCYFCNSVQKLPICAQCGKTKCMMKSSDCVIKHAGVYSTGLAMVGAICDFCEAWVCHGRKCLSTHACACPLTDAECVECERGVWDHGGRIFSCSFCHNFLCEDDQFEHQASCQVLEAETFKCVSCNRLGQHSCLRCKACFCDDHTRSKVFKQEKGKQPPCPKCGHETQETKDLSMS

SEQ ID NO: 70554 - protein, 463 aa, Homo sapiens
MAQGLVTFADVAIDFSQEEWACLNSAQRDLYWDVMLENYSNLVSLDLESAYENKSLPTEKNIHEIRASKRNSDRRSKSLGRNWICEGTLERPQRSRGRYVNQMIINYVKRPATREGTPPRTHQRHHKENSFECKDCGKAFSRGYQLSQHQKIHTGEKPYECKECKKAFRWGNQLTQHQKIHTGEKPYECKDCGKAFRWGSSLVIHKRIHTGEKPYECKDCGKAFRRGDELTQHQRFHTGEKDYECKDCGKTFSRVYKLIQHKRIHSGEKPYECKDCGKAFICGSSLIQHKRIHTGEKPYECQECGKAFTRVNYLTQHQKIHTGEKPHECKECGKAFRWGSSLVKHERIHTGEKPYKCTECGKAFNCGYHLTQHERIHTGETPYKCKECGKAFIYGSSLVKHERIHTGVKPYGCTECGKSFSHGHQLTQHQKTHSGAKSYECKECGKACNHLNHLREHQRIHNS

SEQ ID NO: 70555 - protein, 463 aa, Homo sapiens; identical to SEQ ID NO: 70554

SEQ ID NO: 70556 - protein, 463 aa, Homo sapiens; identical to SEQ ID NO: 70554

SEQ ID NO: 70557 - protein, 63 aa, Homo sapiens
MAQGLVTFADVAIDFSQEEWACLNSAQRDLYWDVMLENYSNLVSLDLESAYENKSLPTEKNIH

SEQ ID NO: 70558 - protein, 85 aa, Homo sapiens
MAQGLVTFADVAIDFSQEEWACLNSAQRDLYWDVMLENYSNLVSLDLESAYENKSLPTEKNIHEIRASKRNSDRRSKSLGRNWIC

SEQ ID NO: 70559 - protein, 66 aa, Homo sapiens
MAQGLVTFADVAIDFSQEEWACLNSAQRDLYWDVMLENYSNLVSLDLESAYENKSLPTEKNIHEIR

SEQ ID NO: 70560 - protein, 64 aa, Homo sapiens
MAQGLVTFADVAIDFSQEEWACLNSAQRDLYWDVMLENYSNLVSLDLESAYENKSLPTEKNIHE

SEQ ID NO: 70561 - protein, 177 aa, Homo sapiens
MAQGLVTFADVAIDFSQEEWACLNSAQRDLYWDVMLENYSNLVSLDLESAYENKSLPTEKNIHEIRASKRNSDRRSKSLGRNWICEGTLERPQRSRGRYVNQMIINYVKRPATREGTPPRTHQRHHKENSFECKDCGKAFSRGYQLSQHQKIHTGEKPYECKECKKAFRWGNQLTQH

SEQ ID NO: 70562 - protein, 87 aa, Homo sapiens
MAQGLVTFADVAIDFSQEEWACLNSAQRDLYWDVMLENYSNLVSLDLESAYENKSLPTEKNIHEIRASKRNSDRRSKSLGRNWICEG

SEQ ID NO: 70563 - protein, 47 aa, Homo sapiens
MAQGLVTFADVAIDFSQEEWACLNSAQRDLYWDVMLENYSNLVSLDL

SEQ ID NO: 70564 - protein, 463 aa, Homo sapiens; identical to SEQ ID NO: 70554

SEQ ID NO: 70565 - protein, 105 aa, Homo sapiens
MAQGLVTFADVAIDFSQEEWACLNSAQRDLYWDVMLENYSNLVSLDLESAYENKSLPTEKNIHEIRASKRNSDRRSKSLGRNWICEGTLERPQRSRGRYVNQMII

SEQ ID NO: 70566 - protein, 463 aa, Homo sapiens; identical to SEQ ID NO: 70554

SEQ ID NO: 70567 - protein, 463 aa, Homo sapiens; identical to SEQ ID NO: 70554

SEQ ID NO: 70568 - protein, 98 aa, Homo sapiens
MAQGLVTFADVAIDFSQEEWACLNSAQRDLYWDVMLENYSNLVSLDLESAYENKSLPTEKNIHEIRASKRNSDRRSKSLGRNWICEGTLERPQRSRGR

SEQ ID NO: 70569 - protein, 463 aa, Homo sapiens; identical to SEQ ID NO: 70554

SEQ ID NO: 70570 - protein, 167 aa, Homo sapiens
MAQGLVTFADVAIDFSQEEWACLNSAQRDLYWDVMLENYSNLVSLDLESAYENKSLPTEKNIHEIRASKRNSDRRSKSLGRNWICEGTLERPQRSRGRYVNQMIINYVKRPATREGTPPRTHQRHHKENSFECKDCGKAFSRGYQLSQHQKIHTGEKPYECKECKKA

SEQ ID NO: 70571 - protein, 100 aa, Homo sapiens
MAQGLVTFADVAIDFSQEEWACLNSAQRDLYWDVMLENYSNLVSLDLESAYENKSLPTEKNIHEIRASKRNSDRRSKSLGRNWICEGTLERPQRSRGRYV

SEQ ID NO: 70572 - protein, 665 aa, Homo sapiens
MESVTFEDVAVEFIQEWALLDSARRSLCKYRMLDQCRTLASRGTPPCKPSCVSQLGQRAEPKATERGILRATGVAWESQLKPEELPSMQDLLEEASSRDMQMGPGLFLRMQLVPSIEERETPLTREDRPALQEPPWSLGCTGLKAAMQIQRVVIPVPTLGHRNPWVARDSAVPARDPAWLQEDKVEEEAMAPGLPTACSQEPVTFADVAVVFTPEEWVFLDSTQRSLYRDVMLENYRNLASVADQLCKPNALSYLEERGEQWTTDRGVLSDTCAEPQCQPQEAIPSQDTFTEILSIDVKGEQPQPGEKLYKYNELEKPFNSIEPLFQYQRIHAGEASCECQEIRNSFFQSAHLIVPEKIRSGDKSYACNKCEKSFRYSSDLIRHEKTHTAEKCFDCQECGQAFKYSSNLRRHMRTHTGEKPFECSQCGKTFTRNFNLILHQRNHTGEKPYECKDCGKAFNQPSSLRSHVRTHTGEKPFECSQCGKAFREHSSLKTHLRTHTREKPYECNQCGKPFRTSTHLNVHKRIHTGEKLYECATCGQVLSRLSTLKSHMRTHTGEKPYVCQECGRAFSEPSSLRKHARTHSGKKPYACQECGRAFGQSSHLIVHVRTHSAGRPYQCNQCEKAFRHSSSLTVHKRTHVGRETIRNGSLPLSMSHPYCGPLAN

SEQ ID NO: 70573 - protein, 182 aa, Homo sapiens
MESVTFEDVAVEFIQEWALLDSARRSLCKYRMLDQCRTLASRGTPPCKPSCVSQLGQRAEPKATERGILRATGVAWESQLKPEELPSMQDLLEEASSRDMQMGPGLFLRMQLVPSIEERETPLTREDRPALQEPPWSLGCTLPLLSLLLPSCPEPPLVLLDSSSAPDRHLGSTLDTEARGIP

SEQ ID NO: 70574 - protein, 556 aa, Homo sapiens
MQLVPSIEERETPLTREDRPALQEPPWSLGCTGLKAAMQIQRVVIPVPTLGHRNPWVARDSAVPARDPAWLQEDKVEEEAMAPGLPTACSQEPVTFADVAVVFTPEEWVFLDSTQRSLYRDVMLENYRNLASVADQLCKPNALSYLEERGEQWTTDRGVLSDTCAEPQCQPQEAIPSQDTFTEILSIDVKGEQPQPGEKLYKYNELEKPFNSIEPLFQYQRIHAGEASCECQEIRNSFFQSAHLIVPEKIRSGDKSYACNKCEKSFRYSSDLIRHEKTHTAEKCFDCQECGQAFKYSSNLRRHMRTHTGEKPFECSQCGKTFTRNFNLILHQRNHTGEKPYECKDCGKAFNQPSSLRSHVRTHTGEKPFECSQCGKAFREHSSLKTHLRTHTREKPYECNQCGKPFRTSTHLNVHKRIHTGEKLYECATCGQVLSRLSTLKSHMRTHTGEKPYVCQECGRAFSEPSSLRKHARTHSGKKPYACQECGRAFGQSSHLIVHVRTHSAGRPYQCNQCEKAFRHSSSLTVHKRTHVGRETIRNGSLPLSMSHPYCGPLAN

SEQ ID NO: 70575 - protein, 303 aa, Homo sapiens
MESVTFEDVAVEFIQEWALLDSARRSLCKYRMLDQCRTLASRGTPPCKPSCVSQLGQRAEPKATERGILRATGVAWESQLKPEELPSMQDLLEEASSRDMQMGPGLFLRMQLVPSIEERETPLTREDRPALQEPPWSLGCTGLKAAMQIQRVVIPVPTLGHRNPWVARDSAVPARDPAWLQEDKVEEEAMAPGLPTACSQEPVTFADVAVVFTPEEWVFLDSTQRSLYRDVMLENYRNLASVADQLCKPNALSYLEERGEQWTTDRGVLSDTCAEPQCQPQEAIPSQDTFTEILSIDVKGPPN

SEQ ID NO: 70576 - protein, 1119 aa, Homo sapiens
AAEERGWRPRRCRSQRGTWLRKPRSEVPRPYAPLSGSPPIRWRRTRWRAAATRPLGLAGPRSPLRAAWVWAPSRVRRQQRRRGRPGAGRGIDDLEEDSDYNPAEDEPRGRQLRLQRPTPSTPRPRRRPGRPRKLPRLEISDLPDGVEGEPLVSSQSGQSPPEPQDPEAPSSSGPGHLVAMGKVSRTPVEAGVSQSDAENAAPSCPDEHDTLPRRRGRPSRRFLGKKYRKYYYKSPKPLLRPFLCRICGSRFLSHEDLRFHVNSHEAGDPQLFKCLQCSYRSRRWSSLKEHMFNHVGSKPYKCDECSYTSVYRKDVIRHAAVHSRDRKKRPDPTPKLSSFPCPVCGRVYPMQKRLTQHMKTHSTEKPHMCDKCGKSFKKRYTFKMHLLTHIQAVANRRFKCEFCEFVCEDKKALLNHQLSHVSDKPFKCSFCPYRTFREDFLLSHVAVKHTGAKPFACEYCHFSTRHKKNLRLHVRCRHASSFEEWGRRHPEEPPSRRRPFFSLQQIEELKQQHSAAPGPPPSSPGPPEIPPEATTFQSSEAPSLLCSDTLGGATIIYQQGAEESTAMATQTALDLLLNMSAQRELGGTALQVAVVKSEDVEAGLASPGGQPSPEGATPQVVTLHVAEPGGGAAAESQLGPPDLPQITLAPGPFGGTGYSVITAPPMEEGTSAPGTPYSEEPAGEAAQAVVVSDTLKEAGTHYIMATDGTQLHHIELTADGSISFPSPDALASGAKWPLLQCGGLPRDGPEPPSPAKTHCVGDSQSSASSPPATSKALGLAVPPSPPSAATAASKKFSCKICAEAFPGRAEMESHKRAHAGPGAFKCPDCPFSARQWPEVRAHMAQHSSLRPHQCSQCSFASKNKKDLRRHMLTHTKEKPFACHLCGQRFNRNGHLKFHIQRLHSPDGRKSGTPTARAPTQTPTQTIILNSDDETLATLHTALQSSHGVLGPERLQQALSQEHIIVAQEQTVTNQEEAAYIQEITTADGQTVQHLVTSDNQVQYIISQDGVQHLLPQEYVVVPEGHHIQVQEGQITHIQYEQGAPFLQESQIQYVPVSPGQQLVTQAQLEAAAHSAVTAVADAAMAQAQGLFGTDETVPEHIQQLQHQGIEYDVITLADD

SEQ ID NO: 70577 - protein, 1342 aa, Homo sapiens
MEENEVESSSDAAPGPGRPEEPSESGLGVGTSEAVSADSSDAAAAPGQAEADDSGVGQSSDRGSRSQEEVSESSSSADPLPNSYLPDSSSVSHGPVAGVTGGPPALVHSSALPDPNMLVSDCTASSSDLGSAIDKIIESTIGPDLIQNCITVTSAEDGGAETTRYLILQGPDDGAPMTSPMSSSTLAHSLAAIEALADGPTSTSTCLEAQGGPSSPVQLPPASGAEEPDLQSLEAMMEVVVVQQFKCKMCQYRSSTKATLLRHMRERHFRPVAAAAAAAGKKGRLRKWSTSTKSQEEEGPEEEDDDDIVDAGAIDDLEEDSDYNPAEDEPRGRQLRLQRPTPSTPRPRRRPGRPRKLPRLEISDLPDGVEGEPLVSSQSGQSPPEPQDPEAPSSSGPGHLVAMGKVSRTPVEAGVSQSDAENAAPSCPDEHDTLPRRRGRPSRRFLGKKYRKYYYKSPKPLLRPFLCRICGSRFLSHEDLRFHVNSHEAGDPQLFKCLQCSYRSRRWSSLKEHMFNHVGSKPYKCDECSYTSVYRKDVIRHAAVHSRDRKKRPDPTPKLSSFPCPVCGRVYPMQKRLTQHMKTHSTEKPHMCDKCGKSFKKRYTFKMHLLTHIQAVANRRFKCEFCEFVCEDKKALLNHQLSHVSDKPFKCSFCPYRTFREDFLLSHVAVKHTGAKPFACEYCHFSTRHKKNLRLHVRCRHASSFEEWGRRHPEEPPSRRRPFFSLQQIEELKQQHSAAPGPPPSSPGPPEIPPEATTFQSSEAPSLLCSDTLGGATIIYQQGAEESTAMATQTALDLLLNMSAQRELGGTALQVAVVKSEDVEAGLASPGGQPSPEGATPQVVTLHVAEPGGGAAAESQLGPPDLPQITLAPGPFGGTGYSVITAPPMEEGTSAPGTPYSEEPAGEAAQAVVVSDTLKEAGTHYIMATDGTQLHHIELTADGSISFPSPDALASGAKWPLLQCGGLPRDGPEPPSPAKTHCVGDSQSSASSPPATSKALGLAVPPSPPSAATAASKKFSCKICAEAFPGRAEMESHKRAHAGPGAFKCPDCPFSARQWPEVRAHMAQHSSLRPHQCSQCSFASKNKKDLRRHMLTHTKEKPFACHLCGQRFNRNGHLKFHIQRLHSPDGRKSGTPTARAPTQTPTQTIILNSDDETLATLHTALQSSHGVLGPERLQQALSQEHIIVAQEQTVTNQEEAAYIQEITTADGQTVQHLVTSDNQVQYIISQDGVQHLLPQEYVVVPEGHHIQVQEGQITHIQYEQGAPFLQESQIQYVPVSPGQQLVTQAQLEAAAHSAVTAVADAAMAQAQGLFGTDETVPEHIQQLQHQGIEYDVITLADD

SEQ ID NO: 70578 - protein, 1187 aa, Homo sapiens
MATSSMPESERNVATKASGAPMTSPMSSSTLAHSLAAIEALADGPTSTSTCLEAQGGPSSPVQLPPASGAEEPDLQSLEAMMEVVVVQQFKCKMCQYRSSTKATLLRHMRERHFRPVAAAAAAAGKKGRLRKWSTSTKSQEEEGPEEEDDDDIVDAGAIDDLEEDSDYNPAEDEPRGRQLRLQRPTPSTPRPRRRPGRPRKLPRLEISDLPDGVEGEPLVSSQSGQSPPEPQDPEAPSSSGPGHLVAMGKVSRTPVEAGVSQSDAENAAPSCPDEHDTLPRRRGRPSRRFLGKKYRKYYYKSPKPLLRPFLCRICGSRFLSHEDLRFHVNSHEAGDPQLFKCLQCSYRSRRWSSLKEHMFNHVGSKPYKCDECSYTSVYRKDVIRHAAVHSRDRKKRPDPTPKLSSFPCPVCGRVYPMQKRLTQHMKTHSTEKPHMCDKCGKSFKKRYTFKMHLLTHIQAVANRRFKCEFCEFVCEDKKALLNHQLSHVSDKPFKCSFCPYRTFREDFLLSHVAVKHTGAKPFACEYCHFSTRHKKNLRLHVRCRHASSFEEWGRRHPEEPPSRRRPFFSLQQIEELKQQHSAAPGPPPSSPGPPEIPPEATTFQSSEAPSLLCSDTLGGATIIYQQGAEESTAMATQTALDLLLNMSAQRELGGTALQVAVVKSEDVEAGLASPGGQPSPEGATPQVVTLHVAEPGGGAAAESQLGPPDLPQITLAPGPFGGTGYSVITAPPMEEGTSAPGTPYSEEPAGEAAQAVVVSDTLKEAGTHYIMATDGTQLHHIELTADGSISFPSPDALASGAKWPLLQCGGLPRDGPEPPSPAKTHCVGDSQSSASSPPATSKALGLAVPPSPPSAATAASKKFSCKICAEAFPGRAEMESHKRAHAGPGAFKCPDCPFSARQWPEVRAHMAQHSSLRPHQCSQCSFASKNKKDLRRHMLTHTKEKPFACHLCGQRFNRNGHLKFHIQRLHSPDGRKSGTPTARAPTQTPTQTIILNSDDETLATLHTALQSSHGVLGPERLQQALSQEHIIVAQEQTVTNQEEAAYIQEITTADGQTVQHLVTSDNQVQYIISQDGVQHLLPQEYVVVPEGHHIQVQEGQITHIQYEQGAPFLQESQIQYVPVSPGQQLVTQAQLEAAAHSAVTAVADAAMAQAQGLFGTDETVPEHIQQLQHQGIEYDVITLADD

SEQ ID NO: 70579 - protein, 109 aa, Homo sapiens
MLENYSNLVSVGYCVHKPEVIFRLQQGEEPWKQEEEFPSQSFPEMGFHHVPAGLKLLSSSDPPALASQSGRITGMSHSIPPVMGSFKFTTSIFTCVGLFRFFFFYLSWF

SEQ ID NO: 70580 - protein, 138 aa, Homo sapiens
MNKVEQKSQESVSFKDVTVGFTQEEWQHLDPSQRALYRDVMLENYSNLVSVGYCVHKPEVIFRLQQGEEPWKQEEEFPSQSFPEVWTADHLKERSQENQSKHLWEVVFINNEMLTKEQGDVIGIPFNVDAPEMLMPLD

SEQ ID NO: 70581 - protein, 810 aa, Homo sapiens
MNKVEQKSQESVSFKDVTVGFTQEEWQHLDPSQRALYRDVMLENYSNLVSVGYCVHKPEVIFRLQQGEEPWKQEEEFPSQSFPVWTADHLKERSQENQSKHLWEVVFINNEMLTKEQGDVIGIPFNVDVSSFPSRKMFCQCDSCGMSFNTVSELVISKINYLGKKSDEFNACGKLLLNIKHDETHTQEKNEVLKNRNTLSHHEETLQHEKIQTLEHNFEYSICQETLLEKAVFNTQKRENAEENNCDYNEFGRTLCDSSSLLFHQISPSRDNHYEFSDCEKFLCVKSTLSKPHGVSMKHYDCGESGNNFRRKLCLSHLQKGDKGEKHFECNECGKAFWEKSHLTRHQRVHTGQKPFQCNECEKAFWDKSNLTKHQRSHTGEKPFECNECGKAFSHKSALTLHQRTHTGEKPYQCNACGKTFCQKSDLTKHQRTHTGLKPYECYECGKSFRVTSHLKVHQRTHTGEKPFECLECGKSFSEKSNLTQHQRIHIGDKSYECNACGKTFYHKSLLTRHQIIHTGWKPYECYECGKTFCLKSDLTVHQRTHTGQKPFACPECGKFFSHKSTLSQHYRTHTGEKPYECHECGKIFYNKSYLTKHNRTHTGEKPYECNECGKAFYQKSQLTQHQRIHIGEKPYKCNECGKAFCHKSALIVHQRTHTQEKPYKCNECGKSFCVKSGLIFHERKHTGEKPYECNECGKFFRHKSSLTVHHRAHTGEKSCQCNECGKIFYRKSELAQHQRSHTGEKPYECNTCRKTFSQKSNLIVHQRRHIGENLMNEMDIRNFQPQVSLHNASEYSHCGESPDDILNVQ

SEQ ID NO: 70582 - protein, 811 aa, Homo sapiens
MNKVEQKSQESVSFKDVTVGFTQEEWQHLDPSQRALYRDVMLENYSNLVSVGYCVHKPEVIFRLQQGEEPWKQEEEFPSQSFPEVWTADHLKERSQENQSKHLWEVVFINNEMLTKEQGDVIGIPFNVDVSSFPSRKMFCQCDSCGMSFNTVSELVISKINYLGKKSDEFNACGKLLLNIKHDETHTQEKNEVLKNRNTLSHHEETLQHEKIQTLEHNFEYSICQETLLEKAVFNTQKRENAEENNCDYNEFGRTLCDSSSLLFHQISPSRDNHYEFSDCEKFLCVKSTLSKPHGVSMKHYDCGESGNNFRRKLCLSHLQKGDKGEKHFECNECGKAFWEKSHLTRHQRVHTGQKPFQCNECEKAFWDKSNLTKHQRSHTGEKPFECNECGKAFSHKSALTLHQRTHTGEKPYQCNACGKTFCQKSDLTKHQRTHTGLKPYECYECGKSFRVTSHLKVHQRTHTGEKPFECLECGKSFSEKSNLTQHQRIHIGDKSYECNACGKTFYHKSLLTRHQIIHTGWKPYECYECGKTFCLKSDLTVHQRTHTGQKPFACPECGKFFSHKSTLSQHYRTHTGEKPYECHECGKIFYNKSYLTKHNRTHTGEKPYECNECGKAFYQKSQLTQHQRIHIGEKPYKCNECGKAFCHKSALIVHQRTHTQEKPYKCNECGKSFCVKSGLIFHERKHTGEKPYECNECGKFFRHKSSLTVHHRAHTGEKSCQCNECGKIFYRKSELAQHQRSHTGEKPYECNTCRKTFSQKSNLIVHQRRHIGENLMNEMDIRNFQPQVSLHNASEYSHCGESPDDILNVQ

SEQ ID NO: 70583 - protein, 817 aa, Homo sapiens
MANATRRGSGVEQKSQESVSFKDVTVGFTQEEWQHLDPSQRALYRDVMLENYSNLVSVGYCVHKPEVIFRLQQGEEPWKQEEEFPSQSFPVWTADHLKERSQENQSKHLWEVVFINNEMLTKEQGDVIGIPFNVDVSSFPSRKMFCQCDSCGMSFNTVSELVISKINYLGKKSDEFNACGKLLLNIKHDETHTQEKNEVLKNRNTLSHHEETLQHEKIQTLEHNFEYSICQETLLEKAVFNTQKRENAEENNCDYNEFGRTLCDSSSLLFHQISPSRDNHYEFSDCEKFLCVKSTLSKPHGVSMKHYDCGESGNNFRRKLCLSHLQKGDKGEKHFECNECGKAFWEKSHLTRHQRVHTGQKPFQCNECEKAFWDKSNLTKHQRSHTGEKPFECNECGKAFSHKSALTLHQRTHTGEKPYQCNACGKTFCQKSDLTKHQRTHTGLKPYECYECGKSFRVTSHLKVHQRTHTGEKPFECLECGKSFSEKSNLTQHQRIHIGDKSYECNACGKTFYHKSLLTRHQIIHTGWKPYECYECGKTFCLKSDLTVHQRTHTGQKPFACPECGKFFSHKSTLSQHYRTHTGEKPYECHECGKIFYNKSYLTKHNRTHTGEKPYECNECGKAFYQKSQLTQHQRIHIGEKPYKCNECGKAFCHKSALIVHQRTHTQEKPYKCNECGKSFCVKSGLIFHERKHTGEKPYECNECGKFFRHKSSLTVHHRAHTGEKSCQCNECGKIFYRKSELAQHQRSHTGEKPYECNTCRKTFSQKSNLIVHQRRHIGENLMNEMDIRNFQPQVSLHNASEYSHCGESPDDILNVQ

SEQ ID NO: 70584 - protein, 810 aa, Homo sapiens; identical to SEQ ID NO: 70581

SEQ ID NO: 70585 - protein, 138 aa, Homo sapiens; identical to SEQ ID NO: 70580

SEQ ID NO: 70586 - protein, 778 aa, Homo sapiens
MNKVDQKFQGSVSFKDVTVGFTQEEWQHLDPSQRALYRDVMLENYSNLVSVGYCAHKPEVIFRLEQGEEPWRLEEEFPSQSFPEVWTADHLKERSQENQSKHLWEVVFINNEMLTKEQGNVIGIPFNMDVSSFPSRKMFCQYDSRGMSFNTVSELVISKINYLGKKSDEFNACGKLLLNIKHDETHTREKNEVLKNRNTLSHRENTLQHEKIQTLDHNFEYSICQETLLEKAVFNTRKRENAEENNCDYNEFGRTFCDSSSLLFHQIPPSKDSHYEFSDCEKFLCVKSTLSKHDGVPVKHYDCGESGNNFRRKLCLSQLQKGDKGEKHFECNECGKAFWEKSHLTRHQRVHTGEKHFQCNQCGKTFWEKSNLTKHQRSHTGEKPFECNECGKAFSHKSALTLHQRTHTGEKPYQCNACGKTFYQKSDLTKHQRTHTGQKPYECYECGKSFCMNSHLTVHQRTHTGEKPFECLECGKSFCQKSHLTQHQRTHIGDKPYECNACGKTFYHKSVLTRHQIIHTGLKPYECYECGKTFCLKSDLTIHQRTHTGEKPFACPECGKFFSHKSTLSQHYRTHTGEKPYECHECGKIFYNKSYLTKHNRTHTGEKPYECNECGKTFCQKSQLTQHQRIHIGEKPYECNECGKAFCHKSALIVHQRTHTQEKPYKCNECGKSFCVKSGLILHERKHTGEKPYECNECGKSFSHKSSLTVHHRAHTGEKSCQCNECGKIFYRKSDLAKHQRSHTGEKPYECNTCRKTFSQKSNLIVHQRTHIGEKPYE

SEQ ID NO: 70587 - protein, 744 aa, Homo sapiens
MNKVDQKFQGSVSFKDVTVGFTQEEWQHLDPSQRALYRDVMLENYSNLVSVGTADHLKERSQENQSKHLWEVVFINNEMLTKEQGNVIGIPFNMDVSSFPSRKMFCQYDSRGMSFNTVSELVISKINYLGKKSDEFNACGKLLLNIKHDETHTREKNEVLKNRNTLSHRENTLQHEKIQTLDHNFEYSICQETLLEKAVFNTRKRENAEENNCDYNEFGRTFCDSSSLLFHQIPPSKDSHYEFSDCEKFLCVKSTLSKHDGVPVKHYDCGESGNNFRRKLCLSQLQKGDKGEKHFECNECGKAFWEKSHLTRHQRVHTGEKHFQCNQCGKTFWEKSNLTKHQRSHTGEKPFECNECGKAFSHKSALTLHQRTHTGEKPYQCNACGKTFYQKSDLTKHQRTHTGQKPYECYECGKSFCMNSHLTVHQRTHTGEKPFECLECGKSFCQKSHLTQHQRTHIGDKPYECNACGKTFYHKSVLTRHQIIHTGLKPYECYECGKTFCLKSDLTIHQRTHTGEKPFACPECGKFFSHKSTLSQHYRTHTGEKPYECHECGKIFYNKSYLTKHNRTHTGEKPYECNECGKTFCQKSQLTQHQRIHIGEKPYECNECGKAFCHKSALIVHQRTHTQEKPYKCNECGKSFCVKSGLILHERKHTGEKPYECNECGKSFSHKSSLTVHHRAHTGEKSCQCNECGKIFYRKSDLAKHQRSHTGEKPYECNTCRKTFSQKSNLIVHQRTHIGEKPYE

SEQ ID NO: 70588 - protein, 560 aa, Homo sapiens
MLLLLSDQLLLTALRKPNPQAMAALFLSAPPQAEVTFEDVAVYLSREEWGRLGPAQRGLYRDVMLETYGNLVSLGVGPAGPKPGVISQLERGDEPWVLDVQGTSGKEHLRVNSPALGTRTEYKELTSQETFGEEDPQGSEPVEACDHISKSEGSLEKLVEQRGPRAVTLTNGESSRESGGNLRLLSRPVPDQRPHKCDICEQSFEQRSYLNNHKRVHRSKKTNTVRNSGEIFSANLVVKEDQKIPTGKKLHYCSYCGKTFRYSANLVKHQRLHTEEKPYKCDECGKAFSQSCEFINHRRMHSGEIPYRCDECGKTFTRRPNLMKHQRIHTGEKPYKCGECGKHFSAYSSLIYHQRIHTGEKPYKCNDCGKAFSDGSILIRHRRTHTGEKPFECKECGKGFTQSSNLIQHQRIHTGEKPYKCNECEKAFIQKTKLVEHQRSHTGEKPYECNDCGKVFSQSTHLIQHQRIHTGEKPYKCSECGKAFHNSSRLIHHQRLHHGEKPYRCSDCKKAFSQSTYLIQHRRIHTGEKPYKCSECGKAFRHSSNMCQHQRIHLREDFSM

SEQ ID NO: 70589 - protein, 539 aa, Homo sapiens
MAALFLSAPPQAEVTFEDVAVYLSREEWGRLGPAQRGLYRDVMLETYGNLVSLGVGPAGPKPGVISQLERGDEPWVLDVQGTSGKEHLRVNSPALGTRTEYKELTSQETFGEEDPQGSEPVEACDHISKSEGSLEKLVEQRGPRAVTLTNGESSRESGGNLRLLSRPVPDQRPHKCDICEQSFEQRSYLNNHKRVHRSKKTNTVRNSGEIFSANLVVKEDQKIPTGKKLHYCSYCGKTFRYSANLVKHQRLHTEEKPYKCDECGKAFSQSCEFINHRRMHSGEIPYRCDECGKTFTRRPNLMKHQRIHTGEKPYKCGECGKHFSAYSSLIYHQRIHTGEKPYKCNDCGKAFSDGSILIRHRRTHTGEKPFECKECGKGFTQSSNLIQHQRIHTGEKPYKCNECEKAFIQKTKLVEHQRSHTGEKPYECNDCGKVFSQSTHLIQHQRIHTGEKPYKCSECGKAFHNSSRLIHHQRLHHGEKPYRCSDCKKAFSQSTYLIQHRRIHTGEKPYKCSECGKAFRHSSNMCQHQRIHLREDFSM

SEQ ID NO: 70590 - protein, 519 aa, Homo sapiens
MYLIRESHASGSSSVTSSCSLPSESPTLRQWRPCSCLPHPRPGVISQLERGDEPWVLDVQGTSGKEHLRVNSPALGTRTEYKELTSQETFGEEDPQGSEPVEACDHISKSEGSLEKLVEQRGPRAVTLTNGESSRESGGNLRLLSRPVPDQRPHKCDICEQSFEQRSYLNNHKRVHRSKKTNTVRNSGEIFSANLVVKEDQKIPTGKKLHYCSYCGKTFRYSANLVKHQRLHTEEKPYKCDECGKAFSQSCEFINHRRMHSGEIPYRCDECGKTFTRRPNLMKHQRIHTGEKPYKCGECGKHFSAYSSLIYHQRIHTGEKPYKCNDCGKAFSDGSILIRHRRTHTGEKPFECKECGKGFTQSSNLIQHQRIHTGEKPYKCNECEKAFIQKTKLVEHQRSHTGEKPYECNDCGKVFSQSTHLIQHQRIHTGEKPYKCSECGKAFHNSSRLIHHQRLHHGEKPYRCSDCKKAFSQSTYLIQHRRIHTGEKPYKCSECGKAFRHSSNMCQHQRIHLREDFSM

SEQ ID NO: 70591 - protein, 527 aa, Homo sapiens
MTAELREAMALAPWGPVKVKKEEEEEENFPGQASSQQVHSENIKVWAPVQGLQTGLDGSEEEEKGQNISWDMAVVLKATQEAPAASTLGSYSLPGTLAKSEILETHGTMNFLGAETKNLQLLVPKTEICEEAEKPLIISERIQKADPQGPELGEACEKGNMLKRQRIKREKKDFRQVIVNDCHLPESFKEEENQKCKKSGGKYSLNSGAVKNPKTQLGQKPFTCSVCGKGFSQSANLVVHQRIHTGEKPFECHECGKAFIQSANLVVHQRIHTGQKPYVCSKCGKAFTQSSNLTVHQKIHSLEKTFKCNECEKAFSYSSQLARHQKVHITEKCYECNECGKTFTRSSNLIVHQRIHTGEKPFACNDCGKAFTQSANLIVHQRSHTGEKPYECKECGKAFSCFSHLIVHQRIHTAEKPYDCSECGKAFSQLSCLIVHQRIHSGDLPYVCNECGKAFTCSSYLLIHQRIHNGEKPYTCNECGKAFRQRSSLTVHQRTHTGEKPYECEKCGAAFISNSHLMRHHRTHLVE

SEQ ID NO: 70592 - protein, 134 aa, Homo sapiens
MTAELREAMALAPWGPVKVKKEEEEEENFPGQASSQQVHSENIKVWAPVQGLQTGLDGSEEEEKGQNISWDMAVVLKATQEAPAASTLGSYSLPGTLAKSEILETHGTMNFLGAETKNLQLLVPKTEICEEAEK

SEQ ID NO: 70593 - protein, 112 aa, Homo sapiens
MTAELREAMALAPWGPVKVKKEEEEEENFPGQASSQQVHSENIKVWAPVQGLQTGLDGSEEEEKGQNISWDMAVVLKATQEAPAASTLGSYSLPGTLAKSEILETHGTMNFL

SEQ ID NO: 70594 - protein, 367 aa, Homo sapiens [sequence omitted]

SEQ ID NO: 70595 - protein, 326 aa, Homo sapiens
MDLTAIYESLLSLSPDVPVPSDHGGTESSPGWGSSGPWSLSPSDSSPSGVTSRLPGRSTSLVEGRSCGWVPPPPGFAPLAPRLGPELSPSPTSPTATSTTPSRYKTELCRTFSESGRCRYGAKCQFAHGLGELRQANRHPKYKTELCHKFYLQGRCPYGSRCHFIHNPSEDLAAPGHPPVLRQSISFSGLPSGRRTSPPPPGLAGPSLSSSSFSPSSSPPPPGDLPLSPSAFSAAPGTPLARRDPTPVCCPSCRRATPISVWGPLGGLVRTPSVQSLGSDPDEYASSGSSLGGSDSPVFEAGVFAPPQPVAAPRRLPIFNRISVSE

SEQ ID NO: 70596 - protein, 338 aa, Homo sapiens
MTTTLVSATIFDLSEVLCKGNKMLNYSAPSAGGCLLDRKAVGTPAGGGFPRRHSVTLPSSKFHQNQLLSSLKGEPAPALSSRDSRFRDRSFSEGGERLLPTQKQPGGGQVNSSRYKTELCRPFEENGACKYGDKCQFAHGIHELRSLTRHPKYKTELCRTFHTIGFCPYGPRCHFIHNAEERRALAGARDLSADRPRLQHSFSFAGFPSAAATAAATGLLDSPTSITPPPILSADDLLGSPTLPDGTNNPFAFSSQELASLFAPSMGLPGGGSPTTFLFRPMSESPHMFDSPPSPQDSLSDQEGYLSSSSSSHSGSDSPTLDNSRRLPIFSRLSISDD

SEQ ID NO: 70597 - protein, 166 aa, Homo sapiens
MNTYTRSASFTPKTFTFPLAQNRTSHPTTTSKLKYLGRPSPRRDALQANGEGPEVGPGTEEPAHRLPVGSGSAGEAAASLGTARVRSGRAECTAKLAGDGHARLASAFLHRRAALPPPLGTCRPRLGEGGSAPALGPSPRRGRRVSEGLRDSLPPLGSLTLGKSPK

SEQ ID NO: 70598 - protein, 321 aa, Homo sapiens
MTTTLVSATIFDLSEVLCKGNKMLNYSAPSAGGCLLDRKAVGTPAGGGFPRRHSVTLPSSKFHQNQLLSSLKGEPAPALSSRDSRFRDRSFSEGGERLLPTQKQPFEENGACKYGDKCQFAHGIHELRSLTRHPKYKTELCRTFHTIGFCPYGPRCHFIHNAEERRALAGARDLSADRPRLQHSFSFAGFPSAAATAAATGLLDSPTSITPPPILSADDLLGSPTLPDGTNNPFAFSSQELASLFAPSMGLPGGGSPTTFLFRPMSESPHMFDSPPSPQDSLSDQEGYLSSSSSSHSGSDSPTLDNSRRLPIFSRLSISDD

SEQ ID NO: 70599 - protein, 338 aa, Homo sapiens; identical to SEQ ID NO: 70596

SEQ ID NO: 70600 - protein, 494 aa, Homo sapiens
MSTTLLSAFYDVDFLCKTEKSLANLNLNNMLDKKAVGTPVAAAPSSGFAPGFLRRHSASNLHALAHPAPSPGSCSPKFPGAANGSSCGSAAAGGPTSYGTLKEPSGGGGTALLNKENKFRDRSFSENGDRSQHLLHLQQQQKGGGGSQINSTRYKTELCRPFEESGTCKYGEKCQFAHGFHELRSLTRHPKYKTELCRTFHTIGFCPYGPRCHFIHNADERRPAPSGGASGDLRAFGTRDALHLGFPREPRPKLHHSLSFSGFPSGHHQPPGGLESPLLLDSPTSRTPPPPSCSSASSCSSSASSCSSASAASTPSGAPTCCASAAAAAAAALLYGTGGAEDLLAPGAPCAACSSASCANNAFAFGPELSSLITPLAIQTHNFAAVAAAAYYRSQQQQQQQGLAPPAQPPAPPSATLPAGAAAPPSPPFSFQLPRRLSDSPVFDAPPSPPDSLSDRDSYLSGSLSSGSLSGSESPSLDPGRRLPIFSRLSISDD

SEQ ID NO: 70601 - protein, 216 aa, Homo sapiens
MSALGQITITVSRCWNTERNQTDKNPCLHGAYLQLRETVKNKSTHLKKPLMKQAPPWKDHLTFQPLHPAERKTQVWRWQSGNSSDLETTSSASPWPTGSNRDVVLNTLAESCCGLSELITAPPYAGVSIQGFSQIWVLFPFCGGTFHHNEKDVLGLQDFERESVSTSQSRNISLLTLGQLQNCVIGKLTIIDLLTEHLLGVRHGVICFPWGLPSSS

SEQ ID NO: 70602 - protein, 407 aa, Homo sapiens
MQQKAFEESRYPWQESFENVAVCLPLRCPRCGDHTRFRSLSSLRAHLEFSHSYEERTLLTKCSLFPSLKDTDLVTSSELLKPGKLQSSGNVVKQKPSYVNLYSISHEHSKDRKPFEVVAERPVSYVQTYTAMDLHADSLDGTRSGPGLPTSDTKASFEAHVREKFNRMVEAVDRTIEKRIDKLTKELAQKTAELLEVRAAFVQLTQKKQEVQRRERALNRQVDVAVEMIAVLRQRLTESEEELLRKEEEVVTFNHFLEAAAEKEVQGKARLQDFIENLLQRVELAEKQLEYYQSQQASGFVRDLSGHVLTDISSNRKPKCLSRGHPHSVCNHPDLKAHFHPKGRNHLKKAKDDRASMQPAKAIHEQAESSRDLCRPPKKGELLGFGRKGNIRPKMAKKKPTAIVNII

SEQ ID NO: 70603 - protein, 333 aa, Homo sapiens
MQQKAFEESRYPWQESFENVAVCLPLRCPRCGDHTRFRSLSSLRAHLEFSHSYEERTLLTKCSLFPSLKDTDLVTSSELLKPGKLQSSGNVVKQKPSYVNLYSISHEHSKDRKPFEVVAERPVSYVQTYTAMDLHADSLDGTRSGPGLPTSDTKASFEAHVREKFNRMVEAVDRTIEKRIDKLTKELAQKTAELLEVRAAFVQLTQKKQEVQRRERALNRQVDVAVEMIAVLRQRLTESEEELLRKEEEVVTFNHFLEAAAEKEVQGKARLQDFIENLLQRVELAEKQLEYYQSQQASGFVRDLSGHVSWKGAGEARLVCQNDLELEESAIVE

SEQ ID NO: 70604 - protein, 462 aa, Homo sapiens
MQQKAFEESRYPWQESFENVAVCLPLRCPRCGDHTRFRSLSSLRAHLEFSHSYEERTLLTKCSLFPSLKDTDLVTSSELLKPGKLQSSGNVVKQKPSYVNLYSISHEHSKDRKPFEVVAERPVSYVQTYTAMDLHADSLDGTRSGPGLPTSDTKASFEAHVREKFNRMVEAVDRTIEKRIDKLTKELAQKTAELLEVRAAFVQLTQKKQEVQRRERALNRQVDVAVEMIAVLRQRLTESEEELLRKEEEVVTFNHFLEAAAEKEVQGKARLQDFIENLLQRVELAEKQLEYYQSQQASGFVRDLSGHVSWKGAGEARLVCQNDLELEIFGHINHHLSGLKDSHCLVFLQAPPVPWIILASFLWILGNPWTSSTATAGFSQIWVLFPFCGGTFHHNEKDVLGLQDFERESVSTSQSRNISLLTLGQLQNCVIGKLTIIDLLTEHLLGVRHGVICFPWGLPSSS

SEQ ID NO: 70605 - protein, 53 aa, Homo sapiens
MQQKAFEESRYPWQESFENVAVCLPLRCPRCGDHTRFRSLSSLRAHLEFSHSY

SEQ ID NO: 70606 - protein, 630 aa, Homo sapiens
MSVSSGVQILTKPETVDRRRSAETTKEAGRPLEMAVSEPEASAAEWKQLDPAQSNLYNDVMLENYCNQASMGCQAPKPDMISKLEKGEAPWLGKGKRPSQGCPSKIARPKQKETDGKVQKDDDQLENIQKSQNKLLREVAVKKKTQAKKNGSDCGSLGKKNNLHKKHVPSKKRLLKFESCGKILKQNLDLPDHSRNCVKRKSDAAKEHKKSFNHSLSDTRKGKKQTGKKHEKLSSHSSSDKCNKTGKKHDKLCCHSSSHIKQDKIQTGEKHEKSPSLSSSTKHEKPQACVKPYECNQCGKVLSHKQGLIDHQRVHTGEKPYECNECGIAFSQKSHLVVHQRTHTGEKPYECIQCGKAHGHKHALTDHLRIHTGEKPYECAECGKTFRHSSNLIQHVRSHTGEKPYECKECGKSFRYNSSLTEHVRTHTGEIPYECNECGKAFKYSSSLTKHMRIHTGEKPFECNECGKAFSKKSHLIIHQRTHTKEKPYKCNECGKAFGHSSSLTYHMRTHTGESPFECNQCGKGFKQIEGLTQHQRVHTGEKPYECNECGKAFSQKSHLIVHQRTHTGEKPYECNECEKAFNAKSQLVIHQRSHTGEKPYECNECGKTFKQNASLTKHVKTHSEDKSHE

SEQ ID NO: 70607 - protein, 645 aa, Homo sapiens
MSVSSGVQILTKPETVDRRRSAETTKEAGRPLEMAVSEPEASAAVSVTFKHVTMAFTQKEWKQLDPAQSNLYNDVMLENYCNQASMGCQAPKPDMISKLEKGEAPWLGKGKRPSQGCPSKIARPKQKETDGKVQKDDDQLENIQKSQNKLLREVAVKKKTQAKKNGSDCGSLGKKNNLHKKHVPSKKRLLKFESCGKILKQNLDLPDHSRNCVKRKSDAAKEHKKSFNHSLSDTRKGKKQTGKKHEKLSSHSSSDKCNKTGKKHDKLCCHSSSHIKQDKIQTGEKHEKSPSLSSSTKHEKPQACVKPYECNQCGKVLSHKQGLIDHQRVHTGEKPYECNECGIAFSQKSHLVVHQRTHTGEKPYECIQCGKAHGHKHALTDHLRIHTGEKPYECAECGKTFRHSSNLIQHVRSHTGEKPYECKECGKSFRYNSSLTEHVRTHTGEIPYECNECGKAFKYSSSLTKHMRIHTGEKPFECNECGKAFSKKSHLIIHQRTHTKEKPYKCNECGKAFGHSSSLTYHMRTHTGESPFECNQCGKGFKQIEGLTQHQRVHTGEKPYECNECGKAFSQKSHLIVHQRTHTGEKPYECNECEKAFNAKSQLVIHQRSHTGEKPYECNECGKTFKQNASLTKHVKTHSEDKSHE

SEQ ID NO: 70608 - protein, 631 aa, Homo sapiens
MSVSSGVQILTKPETVDRRRSAETTKEAGRPLEMAVSEPEASAAKEWKQLDPAQSNLYNDVMLENYCNQASMGCQAPKPDMISKLEKGEAPWLGKGKRPSQGCPSKIARPKQKETDGKVQKDDDQLENIQKSQNKLLREVAVKKKTQAKKNGSDCGSLGKKNNLHKKHVPSKKRLLKFESCGKILKQNLDLPDHSRNCVKRKSDAAKEHKKSFNHSLSDTRKGKKQTGKKHEKLSSHSSSDKCNKTGKKHDKLCCHSSSHIKQDKIQTGEKHEKSPSLSSSTKHEKPQACVKPYECNQCGKVLSHKQGLIDHQRVHTGEKPYECNECGIAFSQKSHLVVHQRTHTGEKPYECIQCGKAHGHKHALTDHLRIHTGEKPYECAECGKTFRHSSNLIQHVRSHTGEKPYECKECGKSFRYNSSLTEHVRTHTGEIPYECNECGKAFKYSSSLTKHMRIHTGEKPFECNECGKAFSKKSHLIIHQRTHTKEKPYKCNECGKAFGHSSSLTYHMRTHTGESPFECNQCGKGFKQIEGLTQHQRVHTGEKPYECNECGKAFSQKSHLIVHQRTHTGEKPYECNECEKAFNAKSQLVIHQRSHTGEKPYECNECGKTFKQNASLTKHVKTHSEDKSHE

SEQ ID NO: 70609 - protein, 550 aa, Homo sapiens
MPLQGSVSFKDVTVDFTQEEWQQLDPAQKALYRDVMLENYCHFVSVGFHMAKPDMIRKLEQGEELWTQRIFPSYSYLEEDGKTEDVLVKFKEYQDRHSRPLIFINHKKLIKERSNIYGKTFTLGKNRISKTILCEYKPDGKVLKNISELVIRNISPIKEKFGDSTGWEKSLLNTKHEKIHPAVNLHKQTERVLSGKQELIQHQKVQAPEQPFDHNECEKSFLMKGMLFTHTRAHRGERTFEYNKDGIAFIEKSSLSVHPSNLMEKKPSAYNKYGKFLCRKPVFIMPQRPQTEEKPFHCPYCGNNFRRKSYLIEHQRIHTGEKPYVCNQCGKAFRQKTALTLHEKTHIEGKPFICIDCGKSFRQKATLTRHHKTHTGEKAYECPQCGSAFRKKSYLIDHQRTHTGEKPYQCNECGKAFIQKTTLTVHQRTHTGEKPYICNECGKSFCQKTTLTLHQRIHTGEKPYICNECGKSFRQKAILTVHHRIHTGEKSNGCPQCGKAFSRKSNLIRHQKTHTGEKPYECKQCGKFFSCKSNLIVHQKTHKVETTGIQ

SEQ ID NO: 70610 - protein, 549 aa, Homo sapiens
MSQGSVSFKDVTVDFTQEEWQQLDPAQKALYRDVMLENYCHFVSVGFHMAKPDMIRKLEQGEELWTQRIFPSYSYLEEDGKTEDVLVKFKEYQDRHSRPLIFINHKKLIKERSNIYGKTFTLGKNRISKTILCEYKPDGKVLKNISELVIRNISPIKEKFGDSTGWEKSLLNTKHEKIHPAVNLHKQTERVLSGKQELIQHQKVQAPEQPFDHNECEKSFLMKGMLFTHTRAHRGERTFEYNKDGIAFIEKSSLSVHPSNLMEKKPSAYNKYGKFLCRKPVFIMPQRPQTEEKPFHCPYCGNNFRRKSYLIEHQRIHTGEKPYVCNQCGKAFRQKTALTLHEKTHIEGKPFICIDCGKSFRQKATLTRHHKTHTGEKAYECPQCGSAFRKKSYLIDHQRTHTGEKPYQCNECGKAFIQKTTLTVHQRTHTGEKPYICNECGKSFCQKTTLTLHQRIHTGEKPYICNECGKSFRQKAILTVHHRIHTGEKSNGCPQCGKAFSRKSNLIRHQKTHTGEKPYECKQCGKFFSCKSNLIVHQKTHKVETTGIQ

SEQ ID NO: 70611 - protein, 500 aa, Homo sapiens
MEESHFNSNPYFWPSIPTVSGQIENTMFINKMKDQLLPEKGCGLAPPHYPTLLTVPASVSLPSGISMDTESKSDQLTPHSQASVTQNITVVPVPSTGLMTAGPGLVITSPSGSLVTTASSAQTFPISAPMIVSALPPGSQALQVVPDLSKKVASTLTEEGGGGGGGGGSVAPKPPRGRKKKRMLESGLPEMNDPYVLSPEDDDDHQKDGKTYRCRMCSLTFYSKSEMQIHSKSHTETKPHKCPHCSKTFANSSYLAQHIRIHSGAKPYSCNFCEKSFRQLSHLQQHTRIHTGDRPYKCAHPGCEKAFTQLSNLQSHRRQHNKDKPFKCHNCHRAYTDAASLEVHLSTHTVKHAKVYTCTICSRAYTSETYLMKHMRKHNPPDLQQQVQAAAAAAAVAQAQAQAQAQAQAQAQAQAQAQASQASQQQQQQQQQQQQQQQQPPPHFQSPGAAPQGGGGGDSNPNPPPQCSFDLTPYKTAEHHKDICLTVTTSTIQVEHLASS

SEQ ID NO: 70612 - protein, 577 aa, Homo sapiens
MEESHFNSNPYFWPSIPTVSGQIENTMFINKMKDQLLPEKGCGLAPPHYPTLLTVPASVSLPSGISMDTESKSDQLTPHSQASVTQNITVVPVPSTGLMTAGVSCSQRWRREGSQSRGPGLVITSPSGSLVTTASSAQTFPISAPMIVSALPPGSQALQVVPDLSKKVASTLTEEGGGGGGGGGSVAPKPPRGRKKKRMLESGLPEMNDPYVLSPEDDDDHQKDGKTYRCRMCSLTFYSKSEMQIHSKSHTETKPHKCPHCSKTFANSSYLAQHIRIHSGAKPYSCNFCEKSFRQLSHLQQHTRIHSKMHTETIKPHKCPHCSKTFANTSYLAQHLRIHSGAKPYNCSYCQKAFRQLSHLQQHTRIHTGDRPYKCAHPGCEKAFTQLSNLQSHRRQHNKDKPFKCHNCHRAYTDAASLEVHLSTHTVKHAKVYTCTICSRAYTSETYLMKHMRKHNPPDLQQQVQAAAAAAAVAQAQAQAQAQAQAQAQAQAQAQASQASQQQQQQQQQQQQQQQQPPPHFQSPGAAPQGGGGGDSNPNPPPQCSFDLTPYKTAEHHKDICLTVTTSTIQVEHLASS

SEQ ID NO: 70613 - protein, 516 aa, Homo sapiens
MEESHFNSNPYFWPSIPTVSGQIENTMFINKMKDQLLPEKGCGLAPPHYPTLLTVPASVSLPSGISMDTESKSDQLTPHSQASVTQNITVVPVPSTGLMTAGVSCSQRWRREGSQSRGPGLVITSPSGSLVTTASSAQTFPISAPMIVSALPPGSQALQVVPDLSKKVASTLTEEGGGGGGGGGSVAPKPPRGRKKKRMLESGLPEMNDPYVLSPEDDDDHQKDGKTYRCRMCSLTFYSKSEMQIHSKSHTETKPHKCPHCSKTFANSSYLAQHIRIHSGAKPYSCNFCEKSFRQLSHLQQHTRIHTGDRPYKCAHPGCEKAFTQLSNLQSHRRQHNKDKPFKCHNCHRAYTDAASLEVHLSTHTVKHAKVYTCTICSRAYTSETYLMKHMRKHNPPDLQQQVQAAAAAAAVAQAQAQAQAQAQAQAQAQAQAQASQASQQQQQQQQQQQQQQQQPPPHFQSPGAAPQGGGGGDSNPNPPPQCSFDLTPYKTAEHHKDICLTVTTSTIQVEHLASS

SEQ ID NO: 70614 - protein, 516 aa, Homo sapiens; identical to SEQ ID NO: 70613

SEQ ID NO: 70615 - protein, 577 aa, Homo sapiens; identical to SEQ ID NO: 70612

SEQ ID NO: 70616 - protein, 335 aa, Homo sapiens
MEESHFNSNPYFWPSIPTVSGQIENTMFINKMKDQLLPEKGCGLAPPHYPTLLTVPASVSLPSGISMDTESKSDQLTPHSQASVTQNITVVPVPSTGLMTAGVSCSQRWRREGSQSRGPGLVITSPSGSLVTTASSAQTFPISAPMIVSALPPGSQALQVVPDLSKKVASTLTEEGGGGGGGGGSVAPKPPRGRKKKRMLESGLPEMNDPYVLSPEDDDDHQKDGKTYRSEGNCGTGNGQSLGLMDSVPGSTTNLLCDPGCRMCSLTFYSKSEMQIHSKSHTETKPHKCPHCSKTFANSSYLAQHIRIHSGAKPYSCNFCEKSFRQLSHLQQHTR

SEQ ID NO: 70617 - protein, 277 aa, Homo sapiens
MEESHFNSNPYFWPSIPTVSGQIENTMFINKMKDQLLPEKGCGLAPPHYPTLLTVPASVSLPSGISMDTESKSDQLTPHSQASVTQNITVVPVPSTGLMTAGPGLVITSPSGSLVTTASSAQTFPISAPMIVSALPPGSQALQVVPDLSKKVASTLTEEGGGGGGGGGSVAPKPPRGRKKKRMLESGLPEMNDPYVLSPEDDDDHQKDGKTYRCRMCSLTFYSKSEMQIHSKSHTETKPHKCPHCSKTFANSSYLAQHIRIHSGAKPYSCNFCEKSF

SEQ ID NO: 70618 - protein, 461 aa, Homo sapiens
MEESHFNSNPYFWPSIPTVSGQIENTMFINKMKDQLLPEKGCGLAPPHYPTLLTVPASVSLPSGISMDTESKSDQLTPHSQASVTQNITVVPVPSTGLMTAALQVVPDLSKKVASTLTEEGGGGGGGGGSVAPKPPRGRKKKRMLESGLPEMNDPYVLSPEDDDDHQKDGKTYRCRMCSLTFYSKSEMQIHSKSHTETKPHKCPHCSKTFANSSYLAQHIRIHSGAKPYSCNFCEKSFRQLSHLQQHTRIHTGDRPYKCAHPGCEKAFTQLSNLQSHRRQHNKDKPFKCHNCHRAYTDAASLEVHLSTHTVKHAKVYTCTICSRAYTSETYLMKHMRKHNPPDLQQQVQAAAAAAAVAQAQAQAQAQAQAQAQAQAQAQASQASQQQQQQQQQQQQQQQQPPPHFQSPGAAPQGGGGGDSNPNPPPQCSFDLTPYKTAEHHKDICLTVTTSTIQVEHLASS

SEQ ID NO: 70619 - protein, 386 aa, Homo sapiens
MILGSLSRAGPLPLLRQPPIMQPPLDLKQILPFPLEPAPTLGLFSNYSTMDPVQKAVLSHTFGGPLLKTKRPVISCNICQIRFNSQSQAEAHYKGNRHARRVKGIEAAKTRGREPGVREPGDPAPPGSTPTNGDGVAPRPVSMENGLGPAPGSPEKQPGSPSPPSIPETGQGVTKGEGGTPAPASLPGGSKEEEEKAKRLLYCALCKVAVNSLSQLEAHNKGTKHKTILEARSGLGPIKAYPRLGPPTPGEPEAPAQDRTFHCEICNVKVNSEVQLKQHISSRRHRDGVAGKPNPLLSRHKKSRGAGELAGTLTFSKELPKSLAGGLLPSPLAVAAVMAAAAGSPLSLRPAPAAPLLQGPPITHPLLHPAPGPIRTAHGPILFSPY

SEQ ID NO: 70620 - protein, 305 aa, Homo sapiens
MILGSLSRAGPLPLLRQPPIMQPPLDLKQILPFPLEPAPTLGLFSNYSTMDPVQKAVLSHTFGGPLLKTKRPVISCNICQIRFNSQSQAEAHYKGNRHARRVKGIEAAKTRGREPGVREPGDPAPPGSTPTNGDGVAPRPGTKHKTILEARSGLGPIKAYPRLGPPTPGEPEAPAQDRTFHCEICNVKVNSEVQLKQHISSRRHRDGVAGKPNPLLSRHKKSRGAGELAGTLTFSKELPKSLAGGLLPSPLAVAAVMAAAAGSPLSLRPAPAAPLLQGPPITHPLLHPAPGPIRTAHGPILFSPY

SEQ ID NO: 70621 - protein, 366 aa, Homo sapiens
MQPPLDLKQILPFPLEPAPTLGLFSNYSTMDPVQKAVLSHTFGGPLLKTKRPVISCNICQIRFNSQSQAEAHYKGNRHARRVKGIEAAKTRGREPGVREPGDPAPPGSTPTNGDGVAPRPVSMENGLGPAPGSPEKQPGSPSPPSIPETGQGVTKGEGGTPAPASLPGGSKEEEEKAKRLLYCALCKVAVNSLSQLEAHNKGTKHKTILEARSGLGPIKAYPRLGPPTPGEPEAPAQDRTFHCEICNVKVNSEVQLKQHISSRRHRDGVAGKPNPLLSRHKKSRGAGELAGTLTFSKELPKSLAGGLLPSPLAVAAVMAAAAGSPLSLRPAPAAPLLQGPPITHPLLHPAPGPIRTAHGPILFSPY

SEQ ID NO: 70622 - protein, 232 aa, Homo sapiens
MQPPLDLKQILPFPLEPAPTLGLFSNYSTMDPVQKAVLSHTFGGPLLKTKRPVISCNICQIRFNSQSQAEAHYKGNRHARRVKGIEAAKTRGREPGVREPGDPAPPGSTPTNGDGVAPRPVSMENGLGPAPGSPEKQPGSPSPPSIPETGQGVTKGEGGTPAPASLPGGSKEEEEKAKRLLYCALCKVAVNSLSQLEAHNKGTKHKTILEARSGLGPIKAYPRLGPPTPGEP

SEQ ID NO: 70623 - protein, 366 aa, Homo sapiens; identical to SEQ ID NO: 70621

SEQ ID NO: 70624 - protein, 165 aa, Homo sapiens
MQPPLDLKQILPFPLEPAPTLGLFSNYSTMDPVQKAVLSHTFGGPLLKTKRPVISCNICQIRFNSQSQAEAHYKGNRHARRVKGIEAAKTRGREPGVREPGDPAPPGSTPTNGDGVAPRPVSMENGLGPAPGSPEKQPGSPSPPSIPETGQGVTKGEGGTPAPAS

SEQ ID NO: 70625 - protein, 145 aa, Homo sapiens
MQPPLDLKQILPFPLEPAPTLGLFSNYSTMDPVQKAVLSHTFGGPLLKTKRPVISCNICQIRFNSQSQAEAHYKGNRHARRVKGIEAAKTRGREPGVREPGDPAPPGSTPTNGDGVAPRPVSMENGLGPAPGSPEKQPGSPSPPS

SEQ ID NO: 70626 - protein, 366 aa, Homo sapiens; identical to SEQ ID NO: 70621

SEQ ID NO: 70627 - protein, 285 aa, Homo sapiens
MQPPLDLKQILPFPLEPAPTLGLFSNYSTMDPVQKAVLSHTFGGPLLKTKRPVISCNICQIRFNSQSQAEAHYKGNRHARRVKGIEAAKTRGREPGVREPGDPAPPGSTPTNGDGVAPRPGTKHKTILEARSGLGPIKAYPRLGPPTPGEPEAPAQDRTFHCEICNVKVNSEVQLKQHISSRRHRDGVAGKPNPLLSRHKKSRGAGELAGTLTFSKELPKSLAGGLLPSPLAVAAVMAAAAGSPLSLRPAPAAPLLQGPPITHPLLHPAPGPIRTAHGPILFSPY

SEQ ID NO: 70628 - protein, 369 aa, Homo sapiens
MMQPSLDIKPFMSFPVDSSSAVGLFPNFNTMDPVQKAVINHTFGVSIPPKKKQVISCNVCQLRFNSDSQAEAHYKGSKHAKKVKALDATKNKPKMVPSKDSAKANPSCSITPITGNNSDKSEDKGKLKASSSSQPSSSESGSFLLKSGTTPLPPGAATSPSKSTNGAPGTVVESEEEKAKKLLYCSLCKVAVNSLSQLEAHNTGSKHKTMVEARNGAGPIKSYPRPGSRLKMQNGSKGSGLQNKTFHCEICDVHVNSEIQLKQHISSRRHKDRVAGKPLKPKYSPYNKLQRSPSILAAKLAFQKDMMKPLAPAFLSSPLAAAAAVSSALSLPPRPSASLFQAPAIPPALLRPGHGPIRATPASILFAPY

SEQ ID NO: 70629 - protein, 395 aa, Homo sapiens
MWSGLPSRGSTCHTTTLPALVRTPTLMMQPSLDIKPFMSFPVDSSSAVGLFPNFNTMDPVQKAVINHTFGVSIPPKKKQVISCNVCQLRFNSDSQAEAHYKGSKHAKKVKALDATKNKPKMVPSKDSAKANPSCSITPITGNNSDKSEDKGKLKASSSSQPSSSESGSFLLKSGTTPLPPGAATSPSKSTNGAPGTVVESEEEKAKKLLYCSLCKVAVNSLSQLEAHNTGSKHKTMVEARNGAGPIKSYPRPGSRLKMQNGSKGSGLQNKTFHCEICDVHVNSEIQLKQHISSRRHKDRVAGKPLKPKYSPYNKLQRSPSILAAKLAFQKDMMKPLAPAFLSSPLAAAAAVSSALSLPPRPSASLFQAPAIPPALLRPGHGPIRATPASILFAPY

SEQ ID NO: 70630 - protein, 369 aa, Homo sapiens; identical to SEQ ID NO: 70628

SEQ ID NO: 70631 - protein, 471 aa, Homo sapiens
MNMANFLRGFEEKGIKNDRPEDQLSKEKKKILFSFCEVCNIQLNSAAQAQVHSNGKSHRKRVKQLSDGQPPPPAQASPSSNSSTGSTCHTTTLPALVRTPTLMMQPSLDIKPFMSFPVDSSSAVGLFPNFNTMDPVQKAVINHTFGVSIPPKKKQVISCNVCQLRFNSDSQAEAHYKGSKHAKKVKALDATKNKPKMVPSKDSAKANPSCSITPITGNNSDKSEDKGKLKASSSSQPSSSESGSFLLKSGTTPLPPGAATSPSKSTNGAPGTVVESEEEKAKKLLYCSLCKVAVNSLSQLEAHNTGSKHKTMVEARNGAGPIKSYPRPGSRLKMQNGSKGSGLQNKTFHCEICDVHVNSEIQLKQHISSRRHKDRVAGKPLKPKYSPYNKLQRSPSILAAKLAFQKDMMKPLAPAFLSSPLAAAAAVSSALSLPPRPSASLFQAPAIPPALLRPGHGPIRATPASILFAPY

SEQ ID NO: 70632 - protein, 31 aa, Homo sapiens
MNMANFLRGFEEKGIKNDRPEDQLSKEKKKI

SEQ ID NO: 70633 - protein, 138 aa, Homo sapiens
MLGSTCHTTTLPALVRTPTLMMQPSLDIKPFMSFPVDSSSAVGLFPNFNTKRRGLFETNKFCQMDPVQKAVINHTFGVSIPPKKKQVISCNVCQLRFNSDSQAEAHYKGSKHAKKVKALDATKNKPKMVPSKDSAKAN

SEQ ID NO: 70634 - protein, 75 aa, Homo sapiens
MNMANFLRGFEEKGIKNDRPEDQLSKEKKKILFSFCEVCNIQLNSAAQAQVHSNGKSHRKRVKQLSDGQPPPPAQ

SEQ ID NO: 70635 - protein, 263 aa, Homo sapiens
MMQPSLDIKPFMSFPVDSSSAVGLFPNFNTMDPVQKAVINHTFGVSIPPKKKQVISCNVCQLRFNSDSQAEAHYKGSKHAKKVKALDATKNKPKMVPSKDSAKANPSCSITPITGNNSDKSEDKGKLKASSSSQPSSSESGSFLLKSGTTPLPPGAATSPSKSTNGAPGTVVESEEEKAKKLLYCSLCKVAVNSLSQLEAHNTGSKHKTMVEARNGAGPIKSYPRPGSRLKMQNGSKGSGLQNKTFHCEICDVHVNSEIQLKQ

SEQ ID NO: 70636 - protein, 333 aa, Homo sapiens
MSAKLGKSSSLLTQTSEECNGILTEKMEEEEQTCDPDSSLHWSSSYSPETFRQQFRQFGYQDSPGPHEALSRLWELCHLWLRPEVHTKEQILELLVLEQFLAILPKELQAWVQKHHPENGEETVTMLEDVERELDGPKQIFFGRRKDMIAEKLAPSEITEELPSSQLMPVKKQLQGASWELQSLRPHDEDIKTTNVKSASRQKTSLGIELHCNVSNILHMNGSQSSTYRGTYEQDGRFEKRQGNPSWKKQQKCDECGKIFSQSSALILHQRIHSGKKPYACDECAKAFSRSAILIQHRRTHTDSKYEHAIAEAQKNMYFKTRLKCPRSLSGGR

SEQ ID NO: 70637 - protein, 335 aa, Homo sapiens
MSAKLGKSSSLLTQTSEECNGILTEKMEEEEQTCDPDSSLHWSSSYSPETFRQQFRQFGYQDSPGPHEALSRLWELCHLWLRPEVHTKEQILELLVLEQFLAILPKELQAWVQKHHPENGEETVTMLEDVERELDGPKQIFFGRRKDMIAEKLAPSEITEELPSSQLMPVKKQLQGASWELQSLRPHDEDIKTTNVKSASRQKTSLGIELHCNVSNILHMNGSQSSTYRGTYEQDGRFEKRQGNPSWKKQQKCDECGKIFSQSSALILHQRIHSGKKPYACDECAKAFSRSAILIQHRRTHTGEKPYKCHDCGKAFSQSSNLFRHRKRHIRKKVP

SEQ ID NO: 70638 - protein, 275 aa, Homo sapiens
MAVESGVISTLIPQDPPEQELILVKVEDNFSWDEKFKQNGSTQSCQELFRQQFRKFCYQETPGPREALSRLQELCYQWLMPELHTKEQILELLVLEQFLSILPEELQIWVQQHNPESGEEAVTLLEDLEREFDDPGQQVPASPQGPAVPWKDLTCLRASQESTDIHLQPLKTQLKSWKPCLSPKSDCENSETATKEGISEEKSQGLPQEPSFRGIKLSRPPKASSAIRWECVSPGSFPGDIIAAEATHSTISCFAINTLPATILPSKNVNRKYFS

SEQ ID NO: 70639 - protein, 534 aa, Homo sapiens
MAVESGVISTLIPQDPPEQELILVKVEDNFSWDEKFKQNGSTQSCQELFRQQFRKFCYQETPGPREALSRLQELCYQWLMPELHTKEQILELLVLEQFLSILPEELQIWVQQHNPESGEEAVTLLEDLEREFDDPGQQVPASPQGPAVPWKDLTCLRASQESTDIHLQPLKTQLKSWKPCLSPKSDCENSETATKEGISEEKSQGLPQEPSFRGISEHESNLVWKQGSATGEKLRSPSQGGSFSQVIFTNKSLGKRDLYDEAERCLILTTDSIMCQKVPPEERPYRCDVCGHSFKQHSSLTQHQRIHTGEKPYKCNQCGKAFSLRSYLIIHQRIHSGEKAYECSECGKAFNQSSALIRHRKIHTGEKACKCNECGKAFSQSSYLIIHQRIHTGEKPYECNECGKTFSQSSKLIRHQRIHTGERPYECNECGKAFRQSSELITHQRIHSGEKPYECSECGKAFSLSSNLIRHQRIHSGEEPYQCNECGKTFKRSSALVQHQRIHSGDEAYICNECGKAFRHRSVLMRHQRVHTIK

SEQ ID NO: 70640 - protein, 245 aa, Homo sapiens
MAVESGVISTLIPQDPPEQELILVKVEDNFSWDEKFKQNGSTQSCQELFRQQFRKFCYQETPGPREALSRLQELCYQWLMPELHTKEQILELLVLEQFLSILPEELQIWVQQHNPESGEEAVTLLEDLEREFDDPGQQVPASPQGPAVPWKDLTCLRASQESTDIHLQPLKTQLKSWKPCLSPKSELSRPPKASSAIRWECVSPGSFPGDIIAAEATHSTISCFAINTLPATILPSKNVNRKYFS

SEQ ID NO: 70641 - protein, 779 aa, Homo sapiens
MAANGDSPPWSPALAAEGRGSSCEASVSFEDVTVDFSKEEWQHLDPAQRRLYWDVTLENYSHLLSVGYQIPKSEAAFKLEQGEGPWMLEGEAPHQSCSGEAIGKMQQQGIPGGIFFHCERFDQPIGEDSLCSILEELWQDNDQLEQRQENQNNLLSHVKVLIKERGYEHKNIEKIIHVTTKLVPSIKRLHNCDTILKHTLNSHNHNRNSATKNLGKIFGNGNNFPHSPSSTKNENAKTGANSCEHDHYEKHLSHKQAPTHHQKIHPEEKLYVCTECVMGFTQKSHLFEHQRIHAGEKSRECDKSNKVFPQKPQVDVHPSVYTGEKPYLCTQCGKVFTLKSNLITHQKIHTGQKPYKCSECGKAFFQRSDLFRHLRIHTGEKPYECSECGKGFSQNSDLSIHQKTHTGEKHYECNECGKAFTRKSALRMHQRIHTGEKPYVCADCGKAFIQKSHFNTHQRIHTGEKPYECSDCGKSFTKKSQLHVHQRIHTGEKPYICTECGKVFTHRTNLTTHQKTHTGEKPYMCAECGKAFTDQSNLIKHQKTHTGEKPYKCNGCGKAFIWKSRLKIHQKSHIGERHYECKDCGKAFIQKSTLSVHQRIHTGEKPYVCPECGKAFIQKSHFIAHHRIHTGEKPYECSDCGKCFTKKSQLRVHQKIHTGEKPNICAECGKAFTDRSNLITHQKIHTREKPYECGDCGKTFTWKSRLNIHQKSHTGERHYECSKCGKAFIQKATLSMHQIIHTGKKPYACTECQKAFTDRSNLIKHQKMHSGEKRYKASD

SEQ ID NO: 70642 - protein, 779 aa, Homo sapiens; identical to SEQ ID NO: 70641

SEQ ID NO: 70643 - protein, 789 aa, Homo sapiens
MGTLPHGPRPWLQRDVAAHVSADHAALNSIVSLQASVSFEDVTVDFSKEEWQHLDPAQRRLYWDVTLENYSHLLSVGYQIPKSEAAFKLEQGEGPWMLEGEAPHQSCSGEAIGKMQQQGIPGGIFFHCERFDQPIGEDSLCSILEELWQDNDQLEQRQENQNNLLSHVKVLIKERGYEHKNIEKIIHVTTKLVPSIKRLHNCDTILKHTLNSHNHNRNSATKNLGKIFGNGNNFPHSPSSTKNENAKTGANSCEHDHYEKHLSHKQAPTHHQKIHPEEKLYVCTECVMGFTQKSHLFEHQRIHAGEKSRECDKSNKVFPQKPQVDVHPSVYTGEKPYLCTQCGKVFTLKSNLITHQKIHTGQKPYKCSECGKAFFQRSDLFRHLRIHTGEKPYECSECGKGFSQNSDLSIHQKTHTGEKHYECNECGKAFTRKSALRMHQRIHTGEKPYVCADCGKAFIQKSHFNTHQRIHTGEKPYECSDCGKSFTKKSQLHVHQRIHTGEKPYICTECGKVFTHRTNLTTHQKTHTGEKPYMCAECGKAFTDQSNLIKHQKTHTGEKPYKCNGCGKAFIWKSRLKIHQKSHIGERHYECKDCGKAFIQKSTLSVHQRIHTGEKPYVCPECGKAFIQKSHFIAHHRIHTGEKPYECSDCGKCFTKKSQLRVHQKIHTGEKPNICAECGKAFTDRSNLITHQKIHTREKPYECGDCGKTFTWKSRLNIHQKSHTGERHYECSKCGKAFIQKATLSMHQIIHTGKKPYACTECQKAFTDRSNLIKHQKMHSGEKRYKASD

SEQ ID NO: 70644 - protein, 178 aa, Homo sapiens
MGTLPHGPRPWLQRDVAAHVSADHAALNSIVSLQASVSFEDVTVDFSKEEWQHLDPAQRRLYWDVTLENYSHLLSVGYQIPKSEAAFKLEQGEGPWMLEGEAPHQSCSGEAIGKMQQQGIPGGIFFHCERFDQPIGEDSLCSILEELWQDNDQLEQRQENQNNLLSHVKVLIKERGYE

SEQ ID NO: 70645 - protein, 1284 aa, Homo sapiens
MHKKRVEEGEASDFSLAWDSSVTAAGGLEGEPECDQKTSRALEDRNSVTSQEERNEDDEDMEDESIYTCDHCQQDFESLADLTDHRAHRCPGDGDDDPQLSWVASSPSSKDVASPTQMIGDGCDLGLGEEEGGTGLPYPCQFCDKSFIRLSYLKRHEQIHSDKLPFKCTYCSRLFKHKRSRDRHIKLHTGDKKYHCHECEAAFSRSDHLKIHLKTHSSSKPFKCTVCKRGFSSTSSLQSHMQAHKKNKEHLAKSEKEAKKDDFMCDYCEDTFSQTEELEKHVLTRHPQLSEKADLQCIHCPEVFVDENTLLAHIHQAHANQKHKCPMCPEQFSSVEGVYCHLDSHRQPDSSNHSVSPDPVLGSVASMSSATPDSSASVERGSTPDSTLKPLRGQKKMRDDGQGWTKVVYSCPYCSKRDFNSLAVLEIHLKTIHADKPQQSHTCQICLDSMPTLYNLNEHVRKLHKNHAYPVMQFGNISAFHCNYCPEMFADINSLQEHIRVSHCGPNANPSDGNNAFFCNQCSMGFLTESSLTEHIQQAHCSVGSAKLESPVVQPTQSFMEVYSCPYCTNSPIFGSILKLTKHIKENHKNIPLAHSKKSKAEQSPVSSDVEVSSPKRQRLSASANSISNGEYPCNQCDLKFSNFESFQTHLKLHLELLLRKQACPQCKEDFDSQESLLQHLTVHYMTTSTHYVCESCDKQFSSVDDLQKHLLDMHTFVLYHCTLCQEVFDSKVSIQVHLAVKHSNEKKMYRCTACNWDFRKEADLQVHVKHSHLGNPAKAHKCIFCGETFSTEVELQCHITTHSKKYNCKFCSKAFHAIILLEKHLREKHCVFDAATENGTANGVPPMATKKAEPADLQGMLLKNPEAPNSHEASEDDVDASEPMYGCDICGAAYTMEVLLQNHRLRDHNIRPGEDDGSRKKAEFIKGSHKCNVCSRTFFSENGLREHLQTHRGPAKHYMCPICGERFPSLLTLTEHKVTHSKSLDTGTCRICKMPLQSEEEFIEHCQMHPDLRNSLTGFRCVVCMQTVTSTLELKIHGTFHMQKLAGSSAASSPNGQGLQKLYKCALCLKEFRSKQDLVKLDVNGLPYGLCAGCMARSANGQVGGLAPPEPADRPCAGLRCPECSVKFESAEDLESHMQVDHRDLTPETSGPRKGTQTSPVPRKKTYQCIKCQMTFENEREIQIHVANHMIEEGINHECKLCNQMFDSPAKLLCHLIEHSFEGMGGTFKCPVCFTVFVQANKLQQHIFAVHGQEDKIYDCSQCPQKFFFQTELQNHTMSQHAQ

SEQ ID NO: 70646 - protein, 1167 aa, Homo sapiens
MIGDGCDLGLGEEEGGTGLPYPCQFCDKSFIRLSYLKRHEQIHSDKLPFKCTYCSRLFKHKRSRDRHIKLHTGDKKYHCHECEAAFSRSDHLKIHLKTHSSSKPFKCTVCKRGFSSTSSLQSHMQAHKKNKEHLAKSEKEAKKDDFMCDYCEDTFSQTEELEKHVLTRHPQLSEKADLQCIHCPEVFVDENTLLAHIHQAHANQKHKCPMCPEQFSSVEGVYCHLDSHRQPDSSNHSVSPDPVLGSVASMSSATPDSSASVERGSTPDSTLKPLRGQKKMRDDGQGWTKVVYSCPYCSKRDFNSLAVLEIHLKTIHADKPQQSHTCQICLDSMPTLYNLNEHVRKLHKNHAYPVMQFGNISAFHCNYCPEMFADINSLQEHIRVSHCGPNANPSDGNNAFFCNQCSMGFLTESSLTEHIQQAHCSVGSAKLESPVVQPTQSFMEVYSCPYCTNSPIFGSILKLTKHIKENHKNIPLAHSKKSKAEQSPVSSDVEVSSPKRQRLSASANSISNGEYPCNQCDLKFSNFESFQTHLKLHLELLLRKQACPQCKEDFDSQESLLQHLTVHYMTTSTHYVCESCDKQFSSVDDLQKHLLDMHTFVLYHCTLCQEVFDSKVSIQVHLAVKHSNEKKMYRCTACNWDFRKEADLQVHVKHSHLGNPAKAHKCIFCGETFSTEVELQCHITTHSKKYNCKFCSKAFHAIILLEKHLREKHCVFDAATENGTANGVPPMATKKAEPADLQGMLLKNPEAPNSHEASEDDVDASEPMYGCDICGAAYTMEVLLQNHRLRDHNIRPGEDDGSRKKAEFIKGSHKCNVCSRTFFSENGLREHLQTHRGPAKHYMCPICGERFPSLLTLTEHKVTHSKSLDTGTCRICKMPLQSEEEFIEHCQMHPDLRNSLTGFRCVVCMQTVTSTLELKIHGTFHMQKLAGSSAASSPNGQGLQKLYKCALCLKEFRSKQDLVKLDVNGLPYGLCAGCMARSANGQVGGLAPPEPADRPCAGLRCPECSVKFESAEDLESHMQVDHRDLTPETSGPRKGTQTSPVPRKKTYQCIKCQMTFENEREIQIHVANHMIEEGINHECKLCNQMFDSPAKLLCHLIEHSFEGMGGTFKCPVCFTVFVQANKLQQHIFAVHGQEDKIYDCSQCPQKFFFQTELQNHTMSQHAQ

SEQ ID NO: 70647 - protein, 1284 aa, Homo sapiens; identical to SEQ ID NO: 70645

SEQ ID NO: 70648 - protein, 809 aa, Homo sapiens
MGPLTFMDVAIEFCLEEWQCLDIAQQNLYRNVMLENYRNLVFLGIAVSKPDLITCLEQEKEPWEPMRRHEMVAKPPVMCSHFTQDFWPEQHIKDPFQKATLRRYKNCEHKNVHLKKDHKSVDECKVHRGGYNGFNQCLPATQSKIFLFDKCVKAFHKFSNSNRHKISHTEKKLFKCKECGKSFCMLPHLAQHKIIHTRVNFCKCEKCGKAFNCPSIITKHKRINTGEKPYTCEECGKVFNWSSRLTTHKKNYTRYKLYKCEECGKAFNKSSILTTHKIIRTGEKFYKCKECAKAFNQSSNLTEHKKIHPGEKPYKCEECGKAFNWPSTLTKHKRIHTGEKPYTCEECGKAFNQFSNLTTHKRIHTAEKFYKCTECGEAFSRSSNLTKHKKIHTEKKPYKCEECGKAFKWSSKLTEHKLTHTGEKPYKCEECGKAFNWPSTLTKHNRIHTGEKPYKCEVCGKAFNQFSNLTTHKRIHTAEKPYKCEECGKAFSRSSNLTKHKKIHIEKKPYKCEECGKAFKWSSKLTEHKITHTGEKPYKCEECGKAFNHFSILTKHKRIHTGEKPYKCEECGKAFTQSSNLTTHKKIHTGEKFYKCEECGKAFTQSSNLTTHKKIHTGGKPYKCEECGKAFNQFSTLTKHKIIHTEEKPYKCEECGKAFKWSSTLTKHKIIHTGEKPYKCEECGKAFKLSSTLSTHKIIHTGEKPYKCEKCGKAFNRSSNLIEHKKIHTGEQPYKCEECGKAFNYSSHLNTHKRIHTKEQPYKCKECGKAFNQYSNLTTHNKIHTGEKLYKPEDVTVILTTPQTFSNIK

SEQ ID NO: 70649 - protein, 808 aa, Homo sapiens
GPLTFMDVAIEFCLEEWQCLDIAQQNLYRNVMLENYRNLVFLGIAVSKPDLITCLEQEKEPWEPMRRHEMVAKPPVMCSHFTQDFWPEQHIKDPFQKATLRRYKNCEHKNVHLKKDHKSVDECKVHRGGYNGFNQCLPATQSKIFLFDKCVKAFHKFSNSNRHKISHTEKKLFKCKECGKSFCMLPHLAQHKIIHTRVNFCKCEKCGKAFNCPSIITKHKRINTGEKPYTCEECGKVFNWSSRLTTHKKNYTRYKLYKCEECGKAFNKSSILTTHKIIRTGEKFYKCKECAKAFNQSSNLTEHKKIHPGEKPYKCEECGKAFNWPSTLTKHKRIHTGEKPYTCEECGKAFNQFSNLTTHKRIHTAEKFYKCTECGEAFSRSSNLTKHKKIHTEKKPYKCEECGKAFKWSSKLTEHKLTHTGEKPYKCEECGKAFNWPSTLTKHNRIHTGEKPYKCEVCGKAFNQFSNLTTHKRIHTAEKPYKCEECGKAFSRSSNLTKHKKIHIEKKPYKCEECGKAFKWSSKLTEHKITHTGEKPYKCEECGKAFNHFSILTKHKRIHTGEKPYKCEECGKAFTQSSNLTTHKKIHTGEKFYKCEECGKAFTQSSNLTTHKKIHTGGKPYKCEECGKAFNQFSTLTKHKIIHTEEKPYKCEECGKAFKWSSTLTKHKIIHTGEKPYKCEECGKAFKLSSTLSTHKIIHTGEKPYKCEKCGKAFNRSSNLIEHKKIHTGEQPYKCEECGKAFNYSSHLNTHKRIHTKEQPYKCKECGKAFNQYSNLTTHNKIHTGEKLYKPEDVTVILTTPQTFSNIK

SEQ ID NO: 70650 - protein, 803 aa, Homo sapiens
MDVAIEFCLEEWQCLDIAQQNLYRNVMLENYRNLVFLGIAVSKPDLITCLEQEKEPWEPMRRHEMVAKPPVMCSHFTQDFWPEQHIKDPFQKATLRRYKNCEHKNVHLKKDHKSVDECKVHRGGYNGFNQCLPATQSKIFLFDKCVKAFHKFSNSNRHKISHTEKKLFKCKECGKSFCMLPHLAQHKIIHTRVNFCKCEKCGKAFNCPSIITKHKRINTGEKPYTCEECGKVFNWSSRLTTHKKNYTRYKLYKCEECGKAFNKSSILTTHKIIRTGEKFYKCKECAKAFNQSSNLTEHKKIHPGEKPYKCEECGKAFNWPSTLTKHKRIHTGEKPYTCEECGKAFNQFSNLTTHKRIHTAEKFYKCTECGEAFSRSSNLTKHKKIHTEKKPYKCEECGKAFKWSSKLTEHKLTHTGEKPYKCEECGKAFNWPSTLTKHNRIHTGEKPYKCEVCGKAFNQFSNLTTHKRIHTAEKPYKCEECGKAFSRSSNLTKHKKIHIEKKPYKCEECGKAFKWSSKLTEHKITHTGEKPYKCEECGKAFNHFSILTKHKRIHTGEKPYKCEECGKAFTQSSNLTTHKKIHTGEKFYKCEECGKAFTQSSNLTTHKKIHTGGKPYKCEECGKAFNQFSTLTKHKIIHTEEKPYKCEECGKAFKWSSTLTKHKIIHTGEKPYKCEECGKAFKLSSTLSTHKIIHTGEKPYKCEKCGKAFNRSSNLIEHKKIHTGEQPYKCEECGKAFNYSSHLNTHKRIHTKEQPYKCKECGKAFNQYSNLTTHNKIHTGEKLYKPEDVTVILTTPQTFSNIK

SEQ ID NO: 70651 - protein, 570 aa, Homo sapiens
MENLKSGVYPLKEASGCPGADRNLLVYSFYEKGPLTFRDVAIEFSLEEWQCLDTAQQDLYRKVMLENYRNLVFLAGIAVSKPDLITCLEQGKEPWNMKRHAMVDQPPVTYSHFAQDLWPEQGIKDSFQEVILRRYGKCGHEDLQLRTGCKSVDECNLHKECYDELNQCLTTTQSEIFQYDKYVNVFYKFSNPNIQKIRHTGKKPFKCKKCDKSFCMLLHLTQHKRIHIRENSYQCEECGKVFNWFSTLTRHRRIHTGEKPYKCEQCGKAFKQSSTLTTHKIIHTGEKPYRCEECGKTFNRSSHLTTHKRIHTGEKPYRCEECGRAFNRSSHLTTHKIIHTGEKPYKCEECGKAFNQSSTLTTHKIIHAGEKPYKCEECGKAFYRFSYLTKHKIIHTGEKFYKCEECGKGFNWSSTLTKHKRIHTGEKPYKCEQCGKAFNESSNLTAHKIIHTGEKPYKCEECGKAFNRSPKLTAHKVIHSGEKPYKCEECGKAFNQFSNLTKHKITHIGDTSYKYLECDKAFSQSSTLTKHKVIHTGEKPYNCEEYGKAFNQSSNLIEQSNSYWRETLQM

SEQ ID NO: 70652 - protein, 470 aa, Homo sapiens
MAATLLMAGSQAPVTFEDMAMYLTREEWRPLDAAQRDLYRDVMQENYGNVVSLDFEIRSENEVNPKQEISEDVQFGTTSERPAENAEENPESEEGFESGDRSERQWGDLTAEEWVSYPLQPVTDLLVHKEVHTGIRYHICSHCGKAFSQISDLNRHQKTHTGDRPYKCYECGKGFSRSSHLIQHQRTHTGERPYDCNECGKSFGRSSHLIQHQTIHTGEKPHKCNECGKSFCRLSHLIQHQRTHSGEKPYECEECGKSFSRSSHLAQHQRTHTGEKPYECNECGRGFSERSDLIKHYRVHTGERPYKCDECGKNFSQNSDLVRHRRAHTGEKPYHCNECGENFSRISHLVQHQRTHTGEKPYECNACGKSFSRSSHLITHQKIHTGEKPYECNECWRSFGERSDLIKHQRTHTGEKPYECVQCGKGFTQSSNLITHQRVHTGEKPYECTECEKSFSRSSALIKHKRVHTD

SEQ ID NO: 70653 - protein, 470 aa, Homo sapiens; identical to SEQ ID NO: 70652

SEQ ID NO: 70654 - protein, 302 aa, Homo sapiens
MAATLLMAGSQAPVTFEDMAMYLTREEWRPLDAAQRDLYRDVMQENYGNVVSLDFEIRSENEVNPKQEISEDVQFGTTSERPAENAEENPESEEGFESGDRSERQWGDLTAEEWVSYPLQPVTDLLVHKEVHTGIRYHICSHCGKAFSQISDLNRHQKTHTGDRPYKCYECGKGFSRSSHLIQHQRTHTGERPYDCNECGKSFGRSSHLIQHQTIHTGEKPHKCNECGKSFCRLSHLIQHQRTHSGEKPYECEECGKSFSRSSHLAQHQRTHTGEKPYECTECEKSFSRSSALIKHKRVHTD

SEQ ID NO: 70655 - protein, 615 aa, Homo sapiens
MDSVAFEDVAVNFTHEEWALLGPSQKNLYRDVMRETIRNLNCIGMKWENQNIDDQHQNLRRNPRCDVVERFGKSKDGSQCGETLSQIRNSIVNKNTPARVDACGSSVNGEVIMGHSSLNCYIRVDTGHKHRECHEYAEKSYTHKQCGKGLSYRHSFQTCERPHTGKKPYDCKECGKTFSSPGNLRRHMVVKGGDGPYKCELCGKAFFWPSLLRMHERTHTGEKPYECKQCSKAFPVYSSYLRHEKIHTGEKPYECKQCSKAFPDYSSYLRHERTHTGEKPYKCKQCGKAFSVSGSLRVHERIHTGEKPYTCKQCGKAFCHLGSFQRHMIMHSGDGPHKCKICGKGFDFPGSARIHEGTHTLEKPYECKQCGKLLSHRSSFRRHMMAHTGDGPHKCTVCGKAFDSPSVFQRHERTHTGEKPYECKQCGKAFRTSSSLRKHETTHTGEQPYKCKCGKAFSDLFSFQSHETTHSEEEPYECKECGKAFSSFKYFCRHERTHSEEKSYECQICGKAFSRFSYLKTHERTHTAEKPYECKQCRKAFFWPSFLLRHERTHTGERPYECKHCGKAFSRSSFCREHERTHTGEKPYECKECGKAFSSLSSFNRHKRTHWKDIL

SEQ ID NO: 70656 - protein, 663 aa, Homo sapiens
MALCYGTFWGYPKMLEAANLMEGLVDIGPWVTLPRGQPEVLEWGLPKDQDSVAFEDVAVNFTHEEWALLGPSQKNLYRDVMRETIRNLNCIGMKWENQNIDDQHQNLRRNPRCDVVERFGKSKDGSQCGETLSQIRNSIVNKNTPARVDACGSSVNGEVIMGHSSLNCYIRVDTGHKHRECHEYAEKSYTHKQCGKGLSYRHSFQTCERPHTGKKPYDCKECGKTFSSPGNLRRHMVVKGGDGPYKCELCGKAFFWPSLLRMHERTHTGEKPYECKQCSKAFPVYSSYLRHEKIHTGEKPYECKQCSKAFPDYSSYLRHERTHTGEKPYKCKQCGKAFSVSGSLRVHERIHTGEKPYTCKQCGKAFCHLGSFQRHMIMHSGDGPHKCKICGKGFDFPGSARIHEGTHTLEKPYECKQCGKLLSHRSSFRRHMMAHTGDGPHKCTVCGKAFDSPSVFQRHERTHTGEKPYECKQCGKAFRTSSSLRKHETTHTGEQPYKCKCGKAFSDLFSFQSHETTHSEEEPYECKECGKAFSSFKYFCRHERTHSEEKSYECQICGKAFSRFSYLKTHERTHTAEKPYECKQCRKAFFWPSFLLRHERTHTGERPYECKHCGKAFSRSSFCREHERTHTGEKPYECKECGKAFSSLSSFNRHKRTHWKDIL

SEQ ID NO: 70657 - protein, 637 aa, Homo sapiens
MALCYGTFWGYPKMLEAANLMEGLVDIGPWVTLPRGQPEVLEWGLPKDQDSVAFEDVAVNFTHEEWALLGPSQKNLYRDVMRETIRNLNCIGMKWENQNIDDQHQNLRRNPRCDVVERFGKSKDGSQCGETLSQIRNSIVNKNTPARVDACGSSVNGEVIMGHSSLNCYIRVDTGHKHRECHEYAEKSYTHKQCGKGLSYRHSFQTCERPHTGKKPYDCKECGKTFSSPGNLRRHMVVKGGDGPYKCELCGKAFFWPSLLRMHERTHTGEKPYECKQCSKAFPVYSSYLRHEKIHTGEKPYECKQCSKAFPDYSSYLRHERTHTGEKPYKCKQCGKAFSVSGSLRVHERIHTGEKPYTCKQCGKAFCHLGSFQRHMIMHSGDGPHKCKICGKGFDFPGSARIHEGTHTLEKPYECKQCGKLLSHRSSFRRHMMAHTGDGPHKCTVCGKAFDSPSVFQRHERTHTGEKPYECKQCGKAFRTSSSLRKHETTHTGEQPYKCKCGKAFSDLFSFQSHETTHSEEEPYECKECGKAFSSFKYFCRHERTHSEEKSYECQICGKAFSRFSYLKTHERTHTAEKPYECKQCRKAFFWPSFLLRHERTHTGERPYECKHCGKAFSRSSFCREHERTHTGEKPYE

SEQ ID NO: 70658 - protein, 589 aa, Homo sapiens
MDSVAFEDVAVNFTHEEWALLGPSQKNLYRDVMRETIRNLNCIGMKWENQNIDDQHQNLRRNPRCDVVERFGKSKDGSQCGETLSQIRNSIVNKNTPARVDACGSSVNGEVIMGHSSLNCYIRVDTGHKHRECHEYAEKSYTHKQCGKGLSYRHSFQTCERPHTGKKPYDCKECGKTFSSPGNLRRHMVVKGGDGPYKCELCGKAFFWPSLLRMHERTHTGEKPYECKQCSKAFPVYSSYLRHEKIHTGEKPYECKQCSKAFPDYSSYLRHERTHTGEKPYKCKQCGKAFSVSGSLRVHERIHTGEKPYTCKQCGKAFCHLGSFQRHMIMHSGDGPHKCKICGKGFDFPGSARIHEGTHTLEKPYECKQCGKLLSHRSSFRRHMMAHTGDGPHKCTVCGKAFDSPSVFQRHERTHTGEKPYECKQCGKAFRTSSSLRKHETTHTGEQPYKCKCGKAFSDLFSFQSHETTHSEEEPYECKECGKAFSSFKYFCRHERTHSEEKSYECQICGKAFSRFSYLKTHERTHTAEKPYECKQCRKAFFWPSFLLRHERTHTGERPYECKHCGKAFSRSSFCREHERTHTGEKPYE

SEQ ID NO: 70659 - protein, 540 aa, Homo sapiens
MGIVEKASSSSDSVTFEDVAVNFTQEEWTLLDPSQKKLYRDVMWETFRNLATIGTKQKEWNIEEQYKNQGRNLRNHMVERLCESKEGSHGGEGFSQIANLSLNKKTPSGGKLWESSVCGKVLSHHSSLNRHIRSYTRHKLYKCQEYGEKPYKCKKCGKPFSYLQSFKKHKRTHSAGIVYKCKACGKAFSCQRSFQIHGRTHTGDKPFKCKECGKAFRYHQSAQKHEKAHTGEKPYKCKECGKPFIYRHSARAHERNHTVQKRYECKQCGKTYISSVGFQAHERTHTGEKPYECKKCGKVFVYHNSAQRHEKTHTGEKPYKCKECGKAFSYHCTAQKHERNHTAQKHYECKLCGKTYLSPLGFQAHESTHTGDKPFECKKCGKAFRYYYSAQRHERTHTGEKPYKCKECGKAFYCCSSARRHERMHTAKKQYECKKCGKTYITLAGFQIHERTHTGEKPYECKQCGKAFSSSSYIHIHERIHTGEKPYECKECGKPFSFLTGFRVHMRMHTGEKPYKCKDCGNAFIWRASLQYHVKKVHAE

SEQ ID NO: 70660 - protein, 615 aa, Homo sapiens; identical to SEQ ID NO: 70655

SEQ ID NO: 70661 - protein, 327 aa, Homo sapiens
MEVAVPVKQEAEGLALDSPWHRFRRFHLGDAPGPREALGLLRALCRDWLRPEVHTKEQMLELLVLEQFLSALPADTQAWVCSRQPQSGEEAVALLEELWGPAASPDGSSATRVPQDVTQGPGATGGKEDSGMIPLAGTAPGAEGPAPGDSQAVRPYKQEPSSPPLAPGLPAFLAAPGTTSCPECGKTSLKPAHLLRHRQSHSGEKPHACPECGKAFRRKEHLRRHRDTHPGSPGSPGPALRPLPAREKPHACCECGKTFYWREHLVRHRKTHSGARPFACWECGKGFGRREHVLRHQRIHGRAAASAQGAVAPGPDGGGPFPPWPLG

SEQ ID NO: 70662 - protein, 518 aa, Homo sapiens
MAVALGCAIQASLNQGSVFQEYDTDCEVFRQRFRQFQYREAAGPHEAFNKLWELCCQWLKPKMRSKEQILELLVLEQFLTILPTEIETWVREHCPENRERVVSLIEDLQRELEIPEQQVDMHDMLLEELAPVGTAHIPPTMHLESPALQVMGPAQEAPVAEAWIPQAGPPELNYGATGECQNFLDPGYPLPKLDMNFSLENREEPWVKELQDSKEMKQLLDSKIGFEIGIENEEDTSKQKKMETMYPFIVTLEGNALQGPILQKDYVQLENQWETPPEDLQTDLAKLVDQQNPTLGETPENSNLEEPLNPKPHKKKSPGEKPHRCPQCGKCFARKSQLTGHQRIHSGEEPHKCPECGKRFLRSSDLYRHQRLHTGERPYECTVCKKRFTRRSHLIGHQRTHSEEETYKCLECGKSFCHGSSLKRHLKTHTGEKPHRCHNCGKSFSRLTALTLHQRTHTEERPFKCNYCGKSFRQRPSLVIHLRIHTGEKPYKCTHCSKSFRQRAGLIMHQVTHFRGLI

SEQ ID NO: 70663 - protein, 127 aa, Homo sapiens
MAVALGCAIQASLNQGSVFQEYDTDCEVFRQRFRQFQYREAAGPHEAFNKLWELCCQWLKPKMRSKEQILELLVLEQFLTILPTEIETWVREHCPENRERVVSLIEDLQRELEIPEQQTFAAEYSHY

SEQ ID NO: 70664 - protein, 164 aa, Homo sapiens
MAVALGCAIQASLNQGSVFQEYDTDCEVFRQRFRQFQYREAAGPHEAFNKLWELCCQWLKPKMRSKEQILELLVLEQFLTILPTEIETWVREHCPENRERVVSLIEDLQRELEIPEQQVRKECGIFVIGPKEVAEAAGTRPHICLYVIPQPQDFSRVLFLFLFC

SEQ ID NO: 70665 - protein, 682 aa, Homo sapiens
MTKSKEAVTFKDVAVVFSEEELQLLDLAQRKLYRDVMLENFRNVVSVGHQSTPDGLPQLEREEKLWMMKMATQRDNSSGAKNLKEMETLQEVGLRYLPHEELFCSQIWQQITRELIKYQDSVVNIQRTGCQLEKRDDLHYKDEGFSNQSSHLQVHRVHTGEKPYKGEHCVKSFSWSSHLQINQRAHAGEKPYKCEKCDNAFRRFSSLQAHQRVHSRAKSYTNDASYRSFSQRSHLPHHQRVPTGENPYKYEECGRNVGKSSHCQAPLIVHTGEKPYKCEECGVGFSQRSYLQVHLKVHTGKKPYKCEECGKSFSWRSRLQAHERIHTGEKPYKCNACGKSFSYSSHLNIHCRIHTGEKPYKCEECGKGFSVGSHLQAHQISHTGEKPYKCEECGKGFCRASNLLDHQRGHTGEKPYQCDACGKGFSRSSDFNIHFRVHTGEKPYKCEECGKGFSQASNLLAHQRGHTGEKPYKCGTCGKGFSRSSDLNVHCRIHTGEKPYKCERCGKAFSQFSSLQVHQRVHTGEKPYQCAECGKGFSVGSQLQAHQRCHTGEKPYQCEECGKGFCRASNFLAHRGVHTGEKPYRCDVCGKRFRQRSYLQAHQRVHTGERPYKCEECGKVFSWSSYLQAHQRVHTGEKPYKCEECGKGFSWSSSLIIHQRVHADDEGDKDFPSSEDSHRKTR

SEQ ID NO: 70666 - protein, 538 aa, Homo sapiens
MTKSKEAVTFKDVAVVFSEEELQLLDLAQRKLYRDVMLENFRNVVSVGHQSTPDGLPQLEREEKLWMMKMATQRDNSSGAKNLKEMETLQEVGLRYLPHEELFCSQIWQQITRELIKYQDSVVNIQRTGCQLEKRDDLHYKDEGFSNQSSHLQVHRVHTGEKPYKGEHCVKSFSWSSHLQINQRAHAGEKPYKCEKCDNAFRRFSSLQAHQRVHSRAKSYTNDASYRSFSQRSHLPHHQRVPTGENPYKYEECGRNVGKSSHCQAPLIVHTGEKPYKCEECGVGFSQRSYLQVHLKVHTGKKPYKCEECGKSFSWRSRLQAHERIHTGEKPYKCNACGKSFSYSSHLNIHCRIHTGEKPYKCEECGKGFSVGSHLQAHQISHTGEKPYKCEECGKGFCRASNLLDHQRGHTGEKPYQCDACGKGFSRSSDFNIHFRVHTGKNPINVRSVARASARPQIFWPIKEATLERNPTNVVHVGRASVGAQILMYTVESTQERNPINARGVVRPSVSSPAFRCIREFTLERNHISVQSVGRASV

SEQ ID NO: 70667 - protein, 562 aa, Homo sapiens
MAAAWMAPAQESVTFEDVAVTFTQEEWGQLDVTQRALYVEVMLETCGLLVALGDSTKPETVEPIPSHLALPEEVSLQEQLAQGVPRYSYLGQAMDQDGPSEMQEYFLRPGTDPQSEKLHGKMSLEHEGLATADGICSMMIQNQVSPEDALYGFDSYGPVTDSLIHEGENSYKFEEMFNENCFLVQHEQILPRVKPYDCPECGKAFGKSKHLLQHHIIHTGEKPYKCLECGKDFNRRSHLTRHQRTHNGDKPFVCSECGRTFNRGSHLTRHQRVHSGEKPFVCNECGKAFTYRSNFVLHNKSHNEKKPFACSECGKGFYESTALIQHFIIHTGERPFKCLECGKAFNCRSHLKQHERIHTGEKPFVCSQCGKAFTHYSTYVLHERAHTGEKPFECKECGKAFSIRKDLIRHFNIHTGEKPYECLQCGKAFTRMSGLTRHQWIHTGEKPYVCIQCGKAFCRTTNLIRHFSIHTGEKPYECVECGKAFNRRSPLTRHQRIHTAEKSHEPIQSGNVSCESTDLIQHSIIHTESSPVSAVNMETPSIAAHSSSLDINGFIVEETLPL

SEQ ID NO: 70668 - protein, 521 aa, Homo sapiens
MLETCGLLVALGDSTKPETVEPIPSHLALPEEVSLQEQLAQGVPRYSYLGQAMDQDGPSEMQEYFLRPGTDPQSEKLHGKMSLEHEGLATADGICSMMIQNQVSPEDALYGFDSYGPVTDSLIHEGENSYKFEEMFNENCFLVQHEQILPRVKPYDCPECGKAFGKSKHLLQHHIIHTGEKPYKCLECGKDFNRRSHLTRHQRTHNGDKPFVCSECGRTFNRGSHLTRHQRVHSGEKPFVCNECGKAFTYRSNFVLHNKSHNEKKPFACSECGKGFYESTALIQHFIIHTGERPFKCLECGKAFNCRSHLKQHERIHTGEKPFVCSQCGKAFTHYSTYVLHERAHTGEKPFECKECGKAFSIRKDLIRHFNIHTGEKPYECLQCGKAFTRMSGLTRHQWIHTGEKPYVCIQCGKAFCRTTNLIRHFSIHTGEKPYECVECGKAFNRRSPLTRHQRIHTAEKSHEPIQSGNVSCESTDLIQHSIIHTESSPVSAVNMETPSIAAHSSSLDINGFIVEETLPL

SEQ ID NO: 70669 - protein, 540 aa, Homo sapiens
MAHELVMFRDVAIDVSQEEWECLNPAQRNLYKEVMLENYSNLVSLGLSVSKPAVISSLEQGKEPWMVVREETGRWCPDLASRDEPQKLSPKRDIYETELSQWVNMEEFKSHSPERSIFSAIWEGNCHFEQHQGQEEGYFRQLMINHENMPIFSQHTLLTQEFYDREKISECKKCRKIFSYHLFFSHHKRTHSKELSECKECTEIVNTPCLFKQQTIQNGDKCNECKECWKAFVHCSQLKHLRIHNGEKRYECNECGKAFNYGSELTLHQRIHTGEKPYECKECGKAFRQRSQLTQHQRLHTGEKPYECKQCGKAFIRGFQLTEHLRLHTGEKPYECKECGKTFRHRSHLTIHQRIHTGEKPYECRECGKAFSYHSSFSHHQKIHSGKKPYECHECGKAFCDGLQLTLHQRIHTGEKPYECKECGKTFRQCSHLKRHQRIHTGEKPHECMICGKAFRLHSHLIQHQRIHTGEKPYECKECGKAFSYHSSFSHHQRIHSGKKPYQCGKAFNHRLQLNLHQTLHTGEKPVRFPLLPPHPSLAS

SEQ ID NO: 70670 - protein, 246 aa, Homo sapiens
MVVREETGRWCPGTWKTWGFHNNFLDNNEATDINADLASRDEPQKLSPKRDIYETELSQWVNMEEFKSHSPERSIFSAIWEGNCHFEQHQGQEEGYFRQLMINHENMPIFSQHTLLTQEFYDREKISECKKCRKIFSYHLFFSHHKCSHLKRHQRIHTGEKPHECMICGKAFRLHSHLIQHQRIHTGEKPYECKECGKAFSYHSSFSHHQRIHSGKKPYQCGKAFNHRLQLNLHQTLHTGEKPVRF

SEQ ID NO: 70671 - protein, 563 aa, Homo sapiens
MAHELVMFRDVAIDVSQEEWECLNPAQRNLYKEVMLENYSNLVSLGLSVSKPAVISSLEQGKEPWMVVREETGRWCPGTWKTWGFHNNFLDNNEATDINADLASRDEPQKLSPKRDIYETELSQWVNMEEFKSHSPERSIFSAIWEGNCHFEQHQGQEEGYFRQLMINHENMPIFSQHTLLTQEFYDREKISECKKCRKIFSYHLFFSHHKRTHSKELSECKECTEIVNTPCLFKQQTIQNGDKCNECKECWKAFVHCSQLKHLRIHNGEKRYECNECGKAFNYGSELTLHQRIHTGEKPYECKECGKAFRQRSQLTQHQRLHTGEKPYECKQCGKAFIRGFQLTEHLRLHTGEKPYECKECGKTFRHRSHLTIHQRIHTGEKPYECRECGKAFSYHSSFSHHQKIHSGKKPYECHECGKAFCDGLQLTLHQRIHTGEKPYECKECGKTFRQCSHLKRHQRIHTGEKPHECMICGKAFRLHSHLIQHQRIHTGEKPYECKECGKAFSYHSSFSHHQRIHSGKKPYQCGKAFNHRLQLNLHQTLHTGEKPVRFPLLPPHPSLAS

SEQ ID NO: 70672 - protein, 258 aa, Homo sapiens
EKRYECNECGKAFNYGSELTLHQRIHTGEKPYECKECGKAFRQRSQLTQHQRLHTGEKPYECKQCGKAFIRGFQLTEHLRLHTGEKPYECKECGKTFRHRSHLTIHQRIHTGEKPYECRECGKAFSYHSSFSHHQKIHSGKKPYECHECGKAFCDGLQLTLHQRIHTGEKPYECKECGKTFRQCSHLKRHQRIHTGEKPHECMICGKAFRLHSHLIQHQRIHTGEKPYECKECGKAFSYHSSFSHHQRIHSDATTAIS

SEQ ID NO: 70673 - protein, 436 aa, Homo sapiens
MEEFKSHSPERSIFSAIWEGNCHFEQHQGQEEGYFRQLMINHENMPIFSQHTLLTQEFYDREKISECKKCRKIFSYHLFFSHHKRTHSKELSECKECTEIVNTPCLFKQQTIQNGDKCNECKECWKAFVHCSQLKHLRIHNGEKRYECNECGKAFNYGSELTLHQRIHTGEKPYECKECGKAFRQRSQLTQHQRLHTGEKPYECKQCGKAFIRGFQLTEHLRLHTGEKPYECKECGKTFRHRSHLTIHQRIHTGEKPYECRECGKAFSYHSSFSHHQKIHSGKKPYECHECGKAFCDGLQLTLHQRIHTGEKPYECKECGKTFRQCSHLKRHQRIHTGEKPHECMICGKAFRLHSHLIQHQRIHTGEKPYECKECGKAFSYHSSFSHHQRIHSGKKPYQCGKAFNHRLQLNLHQTLHTGEKPVRFPLLPPHPSLAS

SEQ ID NO: 70674 - protein, 563 aa, Homo sapiens; identical to SEQ ID NO: 70671

SEQ ID NO: 70675 - protein, 595 aa, Homo sapiens
MRETLEALSSLGFSVGQPEMAPQSEPREGSHNAQEQMSSSREERALGVCSGHEAPTPEEGAHTEQAEAPCRGQACSAQKAQPVGTCPGEEWMIRKVKVEDEDQEAEEEVEWPQHLSLLPSPFPAPDLGHLAAAYKLEPGAPGALSGLALSGWGPMPEKPYGCGECERRFRDQLTLRLHQRLHRGEGPCACPDCGRSFTQRAHMLLHQRSHRGERPFPCSECDKRFSKKAHLTRHLRTHTGERPYPCAECGKRFSQKIHLGSHQKTHTGERPFPCTECEKRFRKKTHLIRHQRIHTGERPYQCAQCARSFTHKQHLVRHQRVHQTAGPARPSPDSSASPHSTAPSPTPSFPGPKPFACSDCGLSFGWKKNLATHQCLHRSEGRPFGCDECALGATVDAPAAKPLASAPGGPGCGPGSDPVVPQRAPSGERSFFCPDCGRGFSHGQHLARHPRVHTGERPFACTQCDRRFGSRPNLVAHSRAHSGARPFACAQCGRRFSRKSHLGRHQAVHTGSRPHACAVCARSFSSKTNLVRHQAIHTGSRPFSCPQCGKSFSRKTHLVRHQLIHGEAAHAAPDAALAAPAWSAPPEVAPPPLFF

SEQ ID NO: 70676 - protein, 3925 aa, Homo sapiens
MPGERPRGAPPPTMTGDLQPRQVASSPGHPSQPPLEDNTPATRTTKGAREAGGQAQAMELPEAQPRQARDGELKPPSLRGQAPSSTPGKRGSPQTPPGRSPLQAPSRLAGRAEGSPPQRYILGIASSRTKPTLDETPENPQLEAAQLPEVDTPQGPGTGAPLRPGLPRTEAQPAAEELGFHRCFQEPPSSFTSTNYTSPSATPRPPAPGPPQSRGTSPLQPGSYPEYQASGADSWPPAAENSFPGANFGVPPAEPEPIPKGSRPGGSPRGVSFQFPFPALHGASTKPFPADVAGHAFTNGPLVFAFHQPQGAWPEEAVGTGPAYPLPTQPAPSPLPCYQGQPGGLNRHSDLSGALSSPGAAHSAPRPFSDSLHKSLTKILPERPPSAQDGLGSTRGPPSSLPQRHFPGQAYRASGVDTSPGPPDTELAAPGPPPARLPQLWDPTAAPYPTPPGGPLAATRSMFFNGQPSPGQRLCLPQSAPLPWPQVLPTARPSPHGMEMLSRLPFPAGGPEWQGGSQGALGTAGKTPGPREKLPAVRSSQGGSPALFTYNGMTDPGAQPLFFGVAQPQVSPHGTPSLPPPRVVGASPSESPLPSPATNTAGSTCSSLSPMSSSPANPSSEESQLPGPLGPSAFFHPPTHPQETGSPFPSPEPPHSLPTHYQPEPAKAFPFPADGLGAEGAFQCLEETPFPHEGPEVGRGGLQGFPRAPPPYPTHHFSLSSASLDQLDVLLTCRQCDRNYSSLAAFLAHRQFCGLLLARAKDGHQRSPGPPGLPSPPAAPRVPADAHAGLLSHAKTFLLAGDAQAEGKDDPLRTGFLPSLAATPFPLPASDLDMEDDAKLDSLITEALNGMEYQSDNPEIDSSFIDVFADEEPSGPRGPSSGHPLKSKAGVTPESKAPPPLPAATPDPQTPRPGDRGCPARGRPKTRSLGLAPTEADAPSQGRQQRRGKQLKLFRKDLDSGGAAEGSGSGGGGRASGLRPRRNDGLGERPPPRPRRPRTQAPGSRADPAPRVPRAAALPEETRSSRRRRLPPRKDPRKRKARGGAWGKELILKIVQQKNRLREYDFASESEEDEQPPPRGPGFRGRRGRGEKRKEVELTQGPREDEPQKPRKAARQEAGGDGAPANPEEPGGSRPGPGRSPQARGPSRSLETGAAAREGGPKCADRPSVAPKDPLQVPTNTETSEETRPSLDFPQEAKEPETAEESAPDSTEFTEALRSPPAACAGEMGASPGLLIPEQPPPSRHDTGTPKPSGSLANTAPHGSSPTPGVGSLLGGPGGTQAPVSHNSKDPPARQPGEFLAPVANPSSTACPKPSVLSSKISSFGCDPAGFNRDPLGVPVAKKGPQPYSSPHSELFLGPKDLAGCFLEELHPKPSARDAPPASSSCLCQDGEDAGSLEPQLPRSPPGTAETEPGRAASPPTLESSSLFPDLPVDRFDPPLYGSLSANRDSGLPFACADPPQKTVPSDPPYPSFLLLEEVSPMLPSHFPDLSGGKVLSKTCPPERTVVPGAAPSLPGKGSGCSVALMSHLSEDELEIQKLVTELESQLQRSKDTRGAPRELAEAESVGRVELGTGTEPPSQRRTCQATVPHEDTFSAADLTRVGESTAHREGAESAVATVEAVQGRPGGTWPCPASFHPGHAALLPCAQEDLVSGAPFSPRGANFHFQPVQKAGASKTGLCQAEGDSRPPQDVCLPEPSKQPGPQLDAGSLAKCSPDQELSFPKNKEAASSQESEDSLRLLPCEQRGGFLPEPGTADQPHRGAPAPEAFGSPAVHLAPDLAFQGDGAPPLDATWPFGASPSHAAQGHSAGRAGGHLHPTAGRPGFEGNEFAPAGASSLTAPRGREAWLVPVPSPACVSNTHPSRRSQDPALSPPIRQLQLPGPGVAKSKDGILGLQELTPAAQSPPRVNPSGLEGGTVEGGKVACGPAQGSPGGVQVTTLPAVAGHQLGLEADGHWGLLGQAEKTQGQGTANQLQPENGVSPGGTDNHASVNASPKTALTGPTEGAVLLEKCKGSRAAMSLQEEAEPTPSPPSPNRESLALALTAAHSRSGSEGRTPERASSPGLNKPLLATGDSPAPSVGDLAACAPSPTSAAHMPCSLGPLPREDPLTSPSRAQGGLGGQLPASPSCRDPPGPQQLLACSPAWAPLEEADGVQATTDTGAEDSPVAPPSLTTSPCDPKEALAGCLLQGEGSPLEDPSSWPPGSVSAVTCTHSGDTPKDSTLRIPEDSRKEKLWESPGRATSPPLAGAVSPSVAVRATGLSSTPTGDEAQAGRGLPGPDPQSRGAPPHTNPDRMPRGHSSYSPSNTARLGHREGQAVTAVPTEPPTLQGAGPDSPACLEGEMGTSSKEPEDPGTPETGRSGATKMPRVTCPSTGLGLGRTTAPSSTASDFQSDSPQSHRNASHQTPQGDPLGPQDLKQRSRGYKKKPASTENGQWKGQAPHGPVTCEVCAASFRSGPGLSRHKARKHRPHPGAPAEPSPAALPAQQPLEPLAQKCQPPRKKSHRVSGKERPNHSRGDPSHVTQPPPAQGSKEVLRAPGSPHSQQLHPPSPTEHEVDVKTPASKPRPDQAREDELHPKQAEKREGRRWRREPTVDSPSHSEGKSNKKRGKLRGRRLREESILPVSADVISDGRGSRPSPAMASYAASPSHCLSVEGGPEADGEQPPRLATLGPGVMEGAAETDQEALCAGETGAQKPPGDRMLCPGRMDGAALGEQPTGQKGASARGFWGPRETKALGVCKESGSEPAEDSSRAHSRSEEGVWEENTPPLGPLGFPETSSSPADSTTSSCLQGLPDNPDTQGGVQGPEGPTPDASGSSAKDPPSLFDDEVSFSQLFPPGGRLTRKRNPHVYGKRCEKPVLPLPTQPSFEEGGDPTLGPARLPTDLSDSSSLCLCHEDPWEDEDPAGLPESFLLDGFLNSRVPGIDPWAPGLSLWALEPSREAGAEKLPSHCPEDDRPEAIPELHMVPAAWRGLEMPAPADDSSSSLGDVSPEPPSLERERCDGGLPGNTHLLPLRATDFEVLSTKFEMQDLCFLGPFEDPVGLPGPSFLDFEGTASSQGPQSRRTEEAAGAGRAQGRGRPAKGRRASYKCKVCFQRFRSLGELDLHKLAHTPAPPPTCYMCVERRFGSRELLRGHLQERHAQSKAGPWACGMCLKEVADVWMYNEHLREHAVRFARRGQARRSLGDLPGGLEGSSAVAHLLNSITEPAPKHHRGKRSAGKAAGSPGDPWGQEGEAKKDSPGERAKPRARSTPSNPDGAATPDSASATALADAGSPGPPRTTPSPSPDPWAGGEPLLQATPVHEACKDPSRDCHHCGKRFPKPFKLQRHLAVHSPQRVYLCPRCPRVYPEHGELLAHLGGAHGLLERPELQHTPLYACELCATVMRIIKKSFACSSCNYTFAKKEQFDRHMNKHLRGGRQPFAFRGVRRPGAPGQKARALEGTLPSKRRRVAMPGSAPGPGEDRPPPRGSSPILSEGSLPALLHLCSEVAPSTTKGWPETLERPVDPVTHPIRGCELPSNHQECPPPSLSPFPAALADGRGDCALDGALERPENEASPGSPGPLLQQALPLGASLPRPGARGQDAEGKRAPLVFSGKRRAPGARGRCAPDHFQEDHLLQKEKEVSSSHMVSEGGPRGTFHKGSATKPAGCQSSSKDRSAASTPSKALKFPVHPRKAVGSLAPGELARGTENGMKPATPKAKPGPSSQGSGSPRPGTKTGGGSQPQPASGQLQSETATTPAKPSFPSRSPAPERLPARAQAKSCTKGPREAGEQGPHGSLGPKEKGESSTKRKKGQVPGPARSESVGSFGRAPSAPDKPPRTPRKQATPSRVLPTKPKPNSQNKPRPPPSEQRKAEPGHTQRKDRLGKAFPQGRPLLRPPKRGTAVHGAEPAEPHTHRTAEAQSDLLSQLFGQRLTGFKIPLKKDASE

SEQ ID NO: 70677 - protein, 492 aa, Homo sapiens
MLCDEKAQKRRKRKAKESGMALPQGHLTFRDVAIEFSQAEWKCLDPAQRALYKDVMLENYRNLVSLGSSYALGSNAEDKPIKKQLGVSFHLHLSELELFPDERVINGCNQVENFINHSSSVSCLQEMSSSVKTPIFNRNDFDDSSFLPQEQKVHLREKPYECNEHSKVFRVSSSLTKHQVIHTVEKPYKCNSCGKVFSRNSHLAEHCRIHTGEKPYKCNVCGKVFSYNSNFARHQRIHTREKPYECNECGKVFSNNSYLARHQRIHAEEKPYKCNECGKGFSHKSSLANHWRIYTGEKPYKCDECGKAFYRIALLVRHQKIHTGEKPYKCNECGKVFIQNSHLAQHWRIHTGEKPYKCNECGKVFNQLSNLARHRRIHTGEKPYKCNECGKAFSEYSGLSAHLVIHTGEKPYKCSECGKAFRHKLSLTNHQRIHTGERPYKCNECGKVFNRIAHLARHRKIHTGEKPYKCNECGKAFSRISYLAQHWTIHMG

SEQ ID NO: 70678 - protein, 458 aa, Homo sapiens
MLEQRREPWSGESEVKIAKNSDGRECIKGVNTGSSYALGSNAEDKPIKKQLGVSFHLHLSELELFPDERVINGCNQVENFINHSSSVSCLQEMSSSVKTPIFNRNDFDDSSFLPQEQKVHLREKPYECNEHSKVFRVSSSLTKHQVIHTVEKPYKCNSCGKVFSRNSHLAEHCRIHTGEKPYKCNVCGKVFSYNSNFARHQRIHTREKPYECNECGKVFSNNSYLARHQRIHAEEKPYKCNECGKGFSHKSSLANHWRIYTGEKPYKCDECGKAFYRIALLVRHQKIHTGEKPYKCNECGKVFIQNSHLAQHWRIHTGEKPYKCNECGKVFNQLSNLARHRRIHTGEKPYKCNECGKAFSEYSGLSAHLVIHTGEKPYKCSECGKAFRHKLSLTNHQRIHTGERPYKCNECGKVFNRIAHLARHRKIHTGEKPYKCNECGKAFSRISYLAQHWTIHMG

SEQ ID NO: 70679 - protein, 178 aa, Homo sapiens
FPQTRKRIAWSEGHAAARLTSKESCCEKAQKRRKRKAKESGMALPQGHLTFRDVAIEFSQAEWKCLDPAQRALYKDVMLENYRNLVSLGISLPDLNINSMLEQRREPWSGESEVKIAKNSDGRECIKGVNTGSSYALGSNAEDKPIKKQLGVSFHLHLSELELFPDERVINGCNQVEN

SEQ ID NO: 70680 - protein, 535 aa, Homo sapiens
MLCDEKAQKRRKRKAKESGMALPQGHLTFRDVAIEFSQAEWKCLDPAQRALYKDVMLENYRNLVSLGISLPDLNINSMLEQRREPWSGESEVKIAKNSDGRECIKGVNTGSSYALGSNAEDKPIKKQLGVSFHLHLSELELFPDERVINGCNQVENFINHSSSVSCLQEMSSSVKTPIFNRNDFDDSSFLPQEQKVHLREKPYECNEHSKVFRVSSSLTKHQVIHTVEKPYKCNSCGKVFSRNSHLAEHCRIHTGEKPYKCNVCGKVFSYNSNFARHQRIHTREKPYECNECGKVFSNNSYLARHQRIHAEEKPYKCNECGKGFSHKSSLANHWRIYTGEKPYKCDECGKAFYRIALLVRHQKIHTGEKPYKCNECGKVFIQNSHLAQHWRIHTGEKPYKCNECGKVFNQLSNLARHRRIHTGEKPYKCNECGKAFSEYSGLSAHLVIHTGEKPYKCSECGKAFRHKLSLTNHQRIHTGERPYKCNECGKVFNRIAHLARHRKIHTGEKPYKCNECGKAFSRISYLAQHWTIHMG

SEQ ID NO: 70681 - protein, 535 aa, Homo sapiens; identical to SEQ ID NO: 70680

SEQ ID NO: 70682 - protein, 587 aa, Homo sapiens
MPTALCPRVLAPKESEEPRKMRSPPGENPSPQGELPSPESSRRLFRRFRYQEAAGPREALQRLWDLCGGWLRPERHTKEQILELLVLEQFLAILPREIQSWVRAQEPESGEQAVAAVEALEREPGRPWQWLKHCEDPVVIDDGDSPLDQEQEQLPVEPHSDLAKNQDAQPITLAQCLGLPSRPPSQLSGDPVLQDAFLLQEENVRDTQQVTTLQLPPSRVSPFKDMILCFSEEDWSLLDPAQTGFYGEFIIGEDYGVSMPPNDLAAQPDLSQGEENEPRVPELQDLQGKEVPQVSYLDSPSLQPFQVEERRKREELQVPEFQACPQTVVPQNTYPAGGNPRSLENSLDEEVTIEIVLSSSGDEDSQHGPYCTEELGSPTEKQRSLPASHRSSTEAGGEVQTSKKSYVCPNCGKIFRWRVNFIRHLRSRREQEKPHECSVCGELFSDSEDLDGHLESHEAQKPYRCGACGKSFRLNSHLLSHRRIHLQPDRLQPVEKREQAASEDADKGPKEPLENGKAKLSFQCCECGKAFQRHDHLARHRSHFHLKDKARPFQCRYCVKSFTQNYDLLRHERLHMKRRSKQALNSY

SEQ ID NO: 70683 - protein, 623 aa, Homo sapiens
MPTALCPRVLAPKESEEPRKMRSPPGENPSPQGELPSPESSRRLFRRFRYQEAAGPREALQRLWDLCGGWLRPERHTKEQILELLVLEQFLAILPREIQSWVRAQEPESGEQAVAAVEALEREPGRPWQWLKHCEDPVVIDDGDSPLDQEQEQLPVEPHSDLAKNQDAQPITLAQCLGLPSRPPSQLSGDPVLQDAFLLQEENVRDTQQVTTLQLPPRIFQFNNHRSNGYILEMLGSGGKKAQIISVLSQIYVSRVSPFKDMILCFSEEDWSLLDPAQTGFYGEFIIGEDYGVSMPPNDLAAQPDLSQGEENEPRVPELQDLQGKEVPQVSYLDSPSLQPFQVEERRKREELQVPEFQACPQTVVPQNTYPAGGNPRSLENSLDEEVTIEIVLSSSGDEDSQHGPYCTEELGSPTEKQRSLPASHRSSTEAGGEVQTSKKSYVCPNCGKIFRWRVNFIRHLRSRREQEKPHECSVCGELFSDSEDLDGHLESHEAQKPYRCGACGKSFRLNSHLLSHRRIHLQPDRLQPVEKREQAASEDADKGPKEPLENGKAKLSFQCCECGKAFQRHDHLARHRSHFHLKDKARPFQCRYCVKSFTQNYDLLRHERLHMKRRSKQALNSY

SEQ ID NO: 70684 - protein, 609 aa, Homo sapiens
MSTAPSLSALRSSKHSGGGGGGGGGGGADPAWTSALSGNSSGPGPGSSPAGSTKPFVHAVPPSDPLRQANRLPIKVLKMLTARTGHILHPEYLQPLPSTPVSPIELDAKKSPLALLAQTCSQIGKPDPSPSSKLSSVASNGGGAGGAGGGAAGDKDTKSGPLKLSDIGVEDKSSFKPYSKPGSDKKEPGGGGGGGGGGGGGGGGVSSEKSGFRVPSATCQPFTPRTGSPSSSASAEGGPTGLAHGRISCGGGINVDVNQHPDGGPGGKALGSDCGGSSGSSSGSGPSAPTSSSVLGSGLVAPVSPYKPGQTVFPLPPAGMTYPGSLAGAYAGYPPQFLPHGVALDPTKPGSLVGAQLAAAAAGSLGCSKPAGSSPLAGASPPSVMTASLCRDPYCLSYHCASHLAGAAAASASCAHDPAAAAAALKSGYPLVYPTHPLHGVHSSLTAAAAAGATPPSLAGHPLYPYGFMLPNDPLPHICNWVSANGPCDKRFATSEELLSHLRTHTAFPGTDKLLSGYPSSSSLASAAAAAMACHMHIPTSGAPGSPGTLALRSPHHALGLSSRYHPYSKSPLPTPGAPVPVPAATGPYYSPYALYGQRLTTASALGYQ

SEQ ID NO: 70685 - protein, 646 aa, Homo sapiens
MSTAPSLSALRSSKHSGGGGGGGGGGGADPAWTSALSGNSSGPGPGSSPAGSTKPFVHAVPPSDPLRQANRLPIKVLKMLTARTGHILHPEYLQPLPSTPVSPIELDAKKSPLALLAQTCSQIGKPDPSPSSKLSSVASNGGGAGGAGGGAAGDKDTKSGPLKLSDIGVEDKSSFKPYSKPGSDKKEPGGGGGGGGGGGGGGGGVSSEKSGFRVPSATCQPFTPRTGSPSSSASACSPGGMLSSAGGAPEGKDDKKDTDVGGGGKGTGGASAEGGPTGLAHGRISCGGGINVDVNQHPDGGPGGKALGSDCGGSSGSSSGSGPSAPTSSSVLGSGLVAPVSPYKPGQTVFPLPPAGMTYPGSLAGAYAGYPPQFLPHGVALDPTKPGSLVGAQLAAAAAGSLGCSKPAGSSPLAGASPPSVMTASLCRDPYCLSYHCASHLAGAAAASASCAHDPAAAAAALKSGYPLVYPTHPLHGVHSSLTAAAAAGATPPSLAGHPLYPYGFMLPNDPLPHICNWVSANGPCDKRFATSEELLSHLRTHTAFPGTDKLLSGYPSSSSLASAAAAAMACHMHIPTSGAPGSPGTLALRSPHHALGLSSRYHPYSKSPLPTPGAPVPVPAATGPYYSPYALYGQRLTTASALGYQ

SEQ ID NO: 70686 - protein, 646 aa, Homo sapiens; identical to SEQ ID NO: 70685

SEQ ID NO: 70687 - protein, 541 aa, Homo sapiens
MPRRKQSHPQPVKCEGVKVDTEDSLDEGPGALVLESDLLLGQDLEFEEEEEEEEGDGNSDQLMGFERDSEGDSLGARPGLPYGLSDDESGGGRALSAESEVEEPARGPGEARGERPGPACQLCGGPTGEGPCCGAGGPGGGPLLPPRLLYSCRLCTFVSHYSSHLKRHMQTHSGEKPFRCGRCPYASAQLVNLTRHTRTHTGEKPYRCPHCPFACSSLGNLRRHQRTHAGPPTPPCPTCGFRCCTPRPARPPSPTEQEGAVPRRPEDALLLPDLSLHVPPGGASFLPDCGQLRGEGEGLCGTGSEPLPELLFPWTCRGCGQELEEGEGSRLGAAMCGRCMRGEAGGGASGGPQGPSDKGFACSLCPFATHYPNHLARHMKTHSGEKPFRCARCPYASAHLDNLKRHQRVHTGEKPYKCPLCPYACGNLANLKRHGRIHSGDKPFRCSLCNYSCNQSMNLKRHMLRHTGEKPFRCATCAYTTGHWDNYKRHQKVHGHGGAGGPGLSASEGWAPPHSPPSVLSSRGPPALGTAGSRAVHTDSS

SEQ ID NO: 70688 - protein, 479 aa, Homo sapiens
MGFERDSEGDSLGARPGLPYGLSDDESGGGRALSAESEVEEPARGPGEARGERPGPACQLCGGPTGEGPCCGAGGPGGGPLLPPRLLYSCRLCTFVSHYSSHLKRHMQTHSGEKPFRCGRCPYASAQLVNLTRHTRTHTGEKPYRCPHCPFACSSLGNLRRHQRTHAGPPTPPCPTCGFRCCTPRPARPPSPTEQEGAVPRRPEDALLLPDLSLHVPPGGASFLPDCGQLRGEGEGLCGTGSEPLPELLFPWTCRGCGQELEEGEGSRLGAAMCGRCMRGEAGGGASGGPQGPSDKGFACSLCPFATHYPNHLARHMKTHSGEKPFRCARCPYASAHLDNLKRHQRVHTGEKPYKCPLCPYACGNLANLKRHGRIHSGDKPFRCSLCNYSCNQSMNLKRHMLRHTGEKPFRCATCAYTTGHWDNYKRHQKVHGHGGAGGPGLSASEGWAPPHSPPSVLSSRGPPALGTAGSRAVHTDSS

SEQ ID NO: 70689 - protein, 1311 aa, Homo sapiens
MSRRKQAKPRSLKDPNCKLEDKTEDGEALDCKKRPEDGEELEDEAVHSCDSCLQVFESLSDITEHKINQCQLTDGVDVEDDPTCSWPASSPSSKDQTSPSHGEGCDFGEEEGGPGLPYPCQFCDKSFSRLSYLKHHEQSHSDKLPFKCTYCSRLFKHKRSRDRHIKLHTGDKKYHCSECDAAFSRSDHLKIHLKTHTSNKPYKCAICRRGFLSSSSLHGHMQVHERNKDGSQSGSRMEDWKMKDTQKCSQCEEGFDFPEDLQKHIAECHPECSPNEDRAALQCVYCHELFVEETSLMNHMEQVHSGEKKNSCSICSESFHTVEELYSHMDSHQQPESCNHSNSPSLVTVGYTSVSSTTPDSNLSVDSSTMVEAAPPIPKSRGRKRAAQQTPDMTGPSSKQAKVTYSCIYCNKQLFSSLAVLQIHLKTMHLDKPEQAHICQYCLEVLPSLYNLNEHLKQVHEAQDPGLIVSAMPAIVYQCNFCSEVVNDLNTLQEHIRCSHGFANPAAKDSNAFFCPHCYMGFLTDSSLEEHIRQVHCDLSGSRFGSPVLGTPKEPVVEVYSCSYCTNSPIFNSVLKLNKHIKENHKNIPLALNYIHNGKKSRALSPLSPVAIEQTSLKMMQAVGGAPARPTGEYICNQCGAKYTSLDSFQTHLKTHLDTVLPKLTCPQCNKEFPNQESLLKHVTIHFMITSTYYICESCDKQFTSVDDLQKHLLDMHTFVFFRCTLCQEVFDSKVSIQLHLAVKHSNEKKVYRCTSCNWDFRNETDLQLHVKHNHLENQGKVHKCIFCGESFGTEVELQCHITTHSKKYNCKFCSKAFHAIILLEKHLREKHCVFETKTPNCGTNGASEQVQKEEVELQTLLTNSQESHNSHDGSEEDVDTSEPMYGCDICGAAYTMETLLQNHQLRDHNIRPGESAIVKKKAELIKGNYKCNVCSRTFFSENGLREHMQTHLGPVKHYMCPICGERFPSLLTLTEHKVTHSKSLDTGNCRICKMPLQSEEEFLEHCQMHPDLRNSLTGFRCVVCMQTVTSTLELKIHGTFHMQKTGNGSAVQTTGRGQHVQKLYKCASCLKEFRSKQDLVKLDINGLPYGLCAGCVNLSKSASPGINVPPGTNRPGLGQNENLSAIEGKGKVGGLKTRCSSCNVKFESESELQNHIQTIHRELVPDSNSTQLKTPQVSPMPRISPSQSDEKKTYQCIKCQMVFYNEWDIQVHVANHMIDEGLNHECKLCSQTFDSPAKLQCHLIEHSFEGMGGTFKCPVCFTVFVQANKLQQHIFSAHGQEDKIYDCTQCPQKFFFQTELQNHTMTQHSS

SEQ ID NO: 70690 - protein, 1311 aa, Homo sapiens
ISRAQKAQTRRLNDPNCKLEDKTEDGEALDCKKRPEDGEELEDEAVHSCDSCLQVFESLSDITEHKINQCQLTDGVDVEDDPTCSWPASSPSSKDQTSPSHGEGCDFGEEEGGPGLPYPCQFCDKSFSRLSYLKHHEQSHSDKLPFKCTYCSRLFKHKRSRDRHIKLHTGDKKYHCSECDAAFSRSDHLKIHLKTHTSNKPYKCAICRRGFLSSSSLHGHMQVHERNKDGSQSGSRMEDWKMKDTQKCSQCEEGFDFPEDLQKHIAECHPECSPNEDRAALQCVYCHELFVEETSLMNHMEQVHSGEKKNSCSICSESFHTVEELYSHMDSHQQPESCNHSNSPSLVTVGYTSVSSTTPDSNLSVDSSTMVEAAPPIPKSRGRKRAAQQTPDMTGPSSKQAKVTYSCIYCNKQLFSSLAVLQIHLKTMHLDKPEQAHICQYCLEVLPSLYNLNEHLKQVHEAQDPGLIVSAMPAIVYQCNFCSEVVNDLNTLQEHIRCSHGFANPAAKDSNAFFCPHCYMGFLTDSSLEEHIRQVHCDLSGSRFGSPVLGTPKEPVVEVYSCSYCTNSPIFNSVLKLNKHIKENHKNIPLALNYIHNGKKSRALSPLSPVAIEQTSLKMMQAVGGAPARPTGEYICNQCGAKYTSLDSFQTHLKTHLDTVLPKLTCPQCNKEFPNQESLLKHVTIHFMITSTYYICESCDKQFTSVDDLQKHLLDMHTFVFFRCTLCQEVFDSKVSIQLHLAVKHSNEKKVYRCTSCNWDFRNETDLQLHVKHNHLENQGKVHKCIFCGESFGTEVELQCHITTHSKKYNCKFCSKAFHAIILLEKHLREKHCVFETKTPNCGTNGASEQVQKEEVELQTLLTNSQESHNSHDGSEEDVDTSEPMYGCDICGAAYTMETLLQNHQLRDHNIRPGESAIVKKKAELIKGNYKCNVCSRTFFSENGLREHMQTHLGPVKHYMCPICGERFPSLLTLTEHKVTHSKSLDTGNCRICKMPLQSEEEFLEHCQMHPDLRNSLTGFRCVVCMQTVTSTLELKIHGTFHMQKTGNGSAVQTTGRGQHVQKLYKCASCLKEFRSKQDLVKLDINGLPYGLCAGCVNLSKSASPGINVPPGTNRPGLGQNENLSAIEGKGKVGGLKTRCSSCNVKFESESELQNHIQTIHRELVPDSNSTQLKTPQVSPMPRISPSQSDEKKTYQCIKCQMVFYNEWDIQVHVANHMIDEGLNHECKLCSQTFDSPAKLQCHLIEHSFEGMGGTFKCPVCFTVFVQANKLQQHIFSAHGQEDKIYDCTQCPQKFFFQTELQVHTATPRQS

SEQ ID NO: 70691 - protein, 1345 aa, Homo sapiens
FLSDYVQSESLRVRGPLWSHPDGFGGLASIFHYYVDYRSDSAVQDLADPNCKLEDKTEDGEALDCKKRPEDGEELEDEAVHSCDSCLQVFESLSDITEHKINQCQLTDGVDVEDDPTCSWPASSPSSKDQTSPSHGEGCDFGEEEGGPGLPYPCQFCDKSFSRLSYLKHHEQSHSDKLPFKCTYCSRLFKHKRSRDRHIKLHTGDKKYHCSECDAAFSRSDHLKIHLKTHTSNKPYKCAICRRGFLSSSSLHGHMQVHERNKDGSQSGSRMEDWKMKDTQKCSQCEEGFDFPEDLQKHIAECHPECSPNEDRAALQCVYCHELFVEETSLMNHMEQVHSGEKKNSCSICSESFHTVEELYSHMDSHQQPESCNHSNSPSLVTVGYTSVSSTTPDSNLSVDSSTMVEAAPPIPKSRGRKRAAQQTPDMTGPSSKQAKVTYSCIYCNKQLFSSLAVLQIHLKTMHLDKPEQAHICQYCLEVLPSLYNLNEHLKQVHEAQDPGLIVSAMPAIVYQCNFCSEVVNDLNTLQEHIRCSHGFANPAAKDSNAFFCPHCYMGFLTDSSLEEHIRQVHCDLSGSRFGSPVLGTPKEPVVEVYSCSYCTNSPIFNSVLKLNKHIKENHKNIPLALNYIHNGKKSRALSPLSPVAIEQTSLKMMQAVGGAPARPTGEYICNQCGAKYTSLDSFQTHLKTHLDTVLPKLTCPQCNKEFPNQESLLKHVTIHFMITSTYYICESCDKQFTSVDDLQKHLLDMHTFVFFRCTLCQEVFDSKVSIQLHLAVKHSNEKKVYRCTSCNWDFRNETDLQLHVKHNHLENQGKVHKCIFCGESFGTEVELQCHITTHSKKYNCKFCSKAFHAIILLEKHLREKHCVFETKTPNCGTNGASEQVQKEEVELQTLLTNSQESHNSHDGSEEDVDTSEPMYGCDICGAAYTMETLLQNHQLRDHNIRPGESAIVKKKAELIKGNYKCNVCSRTFFSENGLREHMQTHLGPVKHYMCPICGERFPSLLTLTEHKVTHSKSLDTGNCRICKMPLQSEEEFLEHCQMHPDLRNSLTGFRCVVCMQTVTSTLELKIHGTFHMQKTGNGSAVQTTGRGQHVQKLYKCASCLKEFRSKQDLVKLDINGLPYGLCAGCVNLSKSASPGINVPPGTNRPGLGQNENLSAIEGKGKVGGLKTRCSSCNVKFESESELQNHIQTIHRELVPDSNSTQLKTPQVSPMPRISPSQSDEKKTYQCIKCQMVFYNEWDIQVHVANHMIDEGLNHECKLCSQTFDSPAKLQCHLIEHSFEGMGGTFKCPVCFTVFVQANKLQQHIFSAHGQEDKIYDCTQCPQKFFFQTELQVHTATPRQS

SEQ ID NO: 70692 - protein, 670 aa, Homo sapiens
MAEVVAEVAEMPTQMSPGAVEMSTPMSAEMMEMSTEVTEMTPGEALASSLFFQHHQFMCSECGSLYNTLEEVLSHQEQHMLAVSEEEALTTQNVGLEPELVPGAEGPFQCGECSQLILSPGELLAHQDAHLRESANQIQYQCWDCQELFPSPELWVAHRKAQHLSATVAEPPVPPPLPPPTPLPPPSPPSEVKMEPYECPECSTLCATPEEFLEHQGTHFDSLEKEERNGLEEEEEDDEEDEEDDEEMEDEEAMAEVGDDAVGGDESTAGWAQGCGDCPQHQPSAGARRQHRRTAHSPASATHPFHCSQCQRSFSSANRLQAHGRAHVGGTHECTTCSKVFKKAASLEQHLRLHRGEARYLCVDCGRGFGTELTLVAHRRAHTANPLHRCRCGKTFSNMTKFLYHRRTHAGKSGAPPTGATAPPAPAEPTPPPPPPAPPAQLPCPQCSKSFASASRLSRHRRAVHGPPERRHRCGVCGKGFKKLIHVRNHLRTHTGERPFQCHSCGKTFASLANLSRHQLTHTGARPYQCLDCGKRFTQSSNLQQHRRLHLRPVAFARAPRLPITGLYNKSPYYCGTCGRWFRAMAGLRLHQRVHARARTLTLQPPRSPSPAPPPPPEPQQTIMCTELGETIAIIETSQPLALEDTLQLCQAALGASEAGGLLQLDTAFV

SEQ ID NO: 70693 - protein, 526 aa, Homo sapiens
MAEVVAEVAEMPTQMSPGAVEMSTPMSAEMMEMSTEVTEMTPSPPSEVKMEPYECPECSTLCATPEEFLEHQGTHFDSLEKEERNGLEEEEEDDEEDEEDDEEMEDEEAMAEVGDDAVGGDESTAGWAQGCGDCPQHQPSAGARRQHRRTAHSPASATHPFHCSQCQRSFSSANRLQAHGRAHVGGTHECTTCSKVFKKAASLEQHLRLHRGEARYLCVDCGRGFGTELTLVAHRRAHTANPLHRCRCGKTFSNMTKFLYHRRTHAGKSGAPPTGATAPPAPAEPTPPPPPPAPPAQLPCPQCSKSFASASRLSRHRRAVHGPPERRHRCGVCGKGFKKLIHVRNHLRTHTGERPFQCHSCGKTFASLANLSRHQLTHTGARPYQCLDCGKRFTQSSNLQQHRRLHLRPVAFARAPRLPITGLYNKSPYYCGTCGRWFRAMAGLRLHQRVHARARTLTLQPPRSPSPAPPPPPEPQQTIMCTELGETIAIIETSQPLALEDTLQLCQAALGASEAGGLLQLDTAFV

SEQ ID NO: 70694 - protein, 660 aa, Homo sapiens
MAHALVTFRDVAIDFSQKEWECLDTTQRKLYRDVMLENYNNLVSLGYSGSKPDVITLLEQGKEPCVVARDVTGRQCPGLLSRHKTKKLSSEKDIHEISLSKESIIEKSKTLRLKGSIFRNEWQNKSEFEGQQGLKERSISQKKIVSKKMSTDRKRPSFTLNQRIHNSEKSCDSHLVQHGKIDSDVKHDCKECGSTFNNVYQLTLHQKIHTGEKSCKCEKCGKVFSHSYQLTLHQRFHTGEKPYECQECGKTFTLYPQLNRHQKIHTGKKPYMCKKCDKGFFSRLELTQHKRIHTGKKSYECKECGKVFQLIFYFKEHERIHTGKKPYECKECGKAFSVCGQLTRHQKIHTGVKPYECKECGKTFRLSFYLTEHRRTHAGKKPYECKECGKSFNVRGQLNRHKTIHTGIKPFACKVCEKAFSYSGDLRVHSRIHTGEKPYECKECGKAFMLRSVLTEHQRLHTGVKPYECKECGKTFRVRSQISLHKKIHTDVKPYKCVRCGKTFRFGFYLTEHQRIHTGEKPYKCKECGKAFIRRGNLKEHLKIHSGLKPYDCKECGKSFSRRGQFTEHQKIHTGVKPYKCKECGKAFSRSVDLRIHQRIHTGEKPYECKQCGKAFRLNSHLTEHQRIHTGEKPYECKVCRKAFRQYSHLYQHQKTHNVI

SEQ ID NO: 70695 - protein, 628 aa, Homo sapiens
MAHALVTFRDVAIDFSQKEWECLDTTQRKLYRDVMLENYNNLVSLGLLSRHKTKKLSSEKDIHEISLSKESIIEKSKTLRLKGSIFRNEWQNKSEFEGQQGLKERSISQKKIVSKKMSTDRKRPSFTLNQRIHNSEKSCDSHLVQHGKIDSDVKHDCKECGSTFNNVYQLTLHQKIHTGEKSCKCEKCGKVFSHSYQLTLHQRFHTGEKPYECQECGKTFTLYPQLNRHQKIHTGKKPYMCKKCDKGFFSRLELTQHKRIHTGKKSYECKECGKVFQLIFYFKEHERIHTGKKPYECKECGKAFSVCGQLTRHQKIHTGVKPYECKECGKTFRLSFYLTEHRRTHAGKKPYECKECGKSFNVRGQLNRHKTIHTGIKPFACKVCEKAFSYSGDLRVHSRIHTGEKPYECKECGKAFMLRSVLTEHQRLHTGVKPYECKECGKTFRVRSQISLHKKIHTDVKPYKCVRCGKTFRFGFYLTEHQRIHTGEKPYKCKECGKAFIRRGNLKEHLKIHSGLKPYDCKECGKSFSRRGQFTEHQKIHTGVKPYKCKECGKAFSRSVDLRIHQRIHTGEKPYECKQCGKAFRLNSHLTEHQRIHTGEKPYECKVCRKAFRQYSHLYQHQKTHNVI

SEQ ID NO: 70696 - protein, 628 aa, Homo sapiens; identical to SEQ ID NO: 70695

SEQ ID NO: 70697 - protein, 660 aa, Homo sapiens; identical to SEQ ID NO: 70694

SEQ ID NO: 70698 - protein, 499 aa, Homo sapiens
MAQGLVTFRDVAIEFSLEEWKCLEPAQRDLYREVTLENFGHLASLGLSISKPDVVSLLEQGKEPWMIANDVTGPWCPDLESRCEKFLQKDIFEIGAFNWEIMESLKCSDLEGSDFRADWECEGQFERQVNEECYFKQVNVTYGHMPVFQHHTSHTVRQSRETGEKLMECHECGKAFSRGSHLIQHQKIHTGEKPFGCKECGKAFSRASHLVQHQRIHTGEKPYDCKDCGKAFGRTSELILHQRLHTGVKPYECKECGKTFRQHSQLILHQRTHTGEKPYVCKDCGKAFIRGSQLTVHRRIHTGARPYECKECGKAFRQHSQLTVHQRIHTGEKPYECKECGKGFIHSSEVTRHQRIHSGEKPYECKECGKAFRQHAQLTRHQRVHTGDRPYECKDCGKAFSRSSYLIQHQRIHTGDKPYECKECGKAFIRVSQLTHHQRIHTCEKPYECRECGMAFIRSSQLTEHQRIHPGIKPYECRECGQAFILGSQLIEHYRIHTG

SEQ ID NO: 70699 - protein, 539 aa, Homo sapiens
MRRGPWERWSLASHRLDAGLCTCPREESREIRAGQIVLKAMAQGLVTFRDVAIEFSLEEWKCLEPAQRDLYREVTLENFGHLASLGLSISKPDVVSLLEQGKEPWMIANDVTGPWCPDLESRCEKFLQKDIFEIGAFNWEIMESLKCSDLEGSDFRADWECEGQFERQVNEECYFKQVNVTYGHMPVFQHHTSHTVRQSRETGEKLMECHECGKAFSRGSHLIQHQKIHTGEKPFGCKECGKAFSRASHLVQHQRIHTGEKPYDCKDCGKAFGRTSELILHQRLHTGVKPYECKECGKTFRQHSQLILHQRTHTGEKPYVCKDCGKAFIRGSQLTVHRRIHTGARPYECKECGKAFRQHSQLTVHQRIHTGEKPYECKECGKGFIHSSEVTRHQRIHSGEKPYECKECGKAFRQHAQLTRHQRVHTGDRPYECKDCGKAFSRSSYLIQHQRIHTGDKPYECKECGKAFIRVSQLTHHQRIHTCEKPYECRECGMAFIRSSQLTEHQRIHPGIKPYECRECGQAFILGSQLIEHYRIHTG

SEQ ID NO: 70700 - protein, 499 aa, Homo sapiens; identical to SEQ ID NO: 70698

SEQ ID NO: 70701 - protein, 686 aa, Homo sapiens
MTESQGTVTFKDVAIDFTQEEWKRLDPAQRKLYRNVMLENYNNLITVGYPFTKPDVIFKLEQEEEPWVMEEEVLRRHWQGEIWGVDEHQKNQDRLLRQVEVKFQKTLTEEKGNECQKKFANVFPLNSDFFPSRHNLYEYDLFGKCLEHNFDCHNNVKCLMRKEHCEYNEPVKSYGNSSSHFVITPFKCNHCGKGFNQTLDLIRHLRIHTGEKPYECSNCRKAFSHKEKLIKHYKIHSREQSYKCNECGKAFIKMSNLIRHQRIHTGEKPYACKECEKSFSQKSNLIDHEKIHTGEKPYECNECGKAFSQKQSLIAHQKVHTGEKPYACNECGKAFPRIASLALHMRSHTGEKPYKCDKCGKAFSQFSMLIIHVRIHTGEKPYECNECGKAFSQSSALTVHMRSHTGEKPYECKECRKAFSHKKNFITHQKIHTREKPYECNECGKAFIQMSNLVRHQRIHTGEKPYICKECGKAFSQKSNLIAHEKIHSGEKPYECNECGKAFSQKQNFITHQKVHTGEKPYDCNECGKAFSQIASLTLHLRSHTGEKPYECDKCGKAFSQCSLLNLHMRSHTGEKPYVCNECGKAFSQRTSLIVHMRGHTGEKPYECNKCGKAFSQSSSLTIHIRGHTGEKPFDCSKCGKAFSQISSLTLHMRKHTGEKPYHCIECGKAFSQKSHLVRHQRIHTH

SEQ ID NO: 70702 - protein, 342 aa, Homo sapiens
MRSHTGEKPYKCDKCGKAFSQFSMLIIHVRIHTGEKPYECNECGKAFSQSSALTVHMRSHTGEKPYECKECRKAFSHKKNFITHQKIHTREKPYECNECGKAFIQMSNLVRHQRIHTGEKPYICKECGKAFSQKSNLIAHEKIHSGEKPYECNECGKAFSQKQNFITHQKVHTGEKPYDCNECGKAFSQIASLTLHLRSHTGEKPYECDKCGKAFSQCSLLNLHMRSHTGEKPYVCNECGKAFSQRTSLIVHMRGHTGEKPYECNKCGKAFSQSSSLTIHIRGHTGEKPFDCSKCGKAFSQISSLTLHMRKHTGEKPYHCIECGKAFSQKSHLVRHQRIHTH

SEQ ID NO: 70703 - protein, 527 aa, Homo sapiens
MRKEHCEYNEPVKSYGNSSSHFVITPFKCNHCGKGFNQTLDLIRHLRIHTGEKPYECSNCRKAFSHKEKLIKHYKIHSREQSYKCNECGKAFIKMSNLIRHQRIHTGEKPYACKECEKSFSQKSNLIDHEKIHTGEKPYECNECGKAFSQKQSLIAHQKVHTGEKPYACNECGKAFPRIASLALHMRSHTGEKPYKCDKCGKAFSQFSMLIIHVRIHTGEKPYECNECGKAFSQSSALTVHMRSHTGEKPYECKECRKAFSHKKNFITHQKIHTREKPYECNECGKAFIQMSNLVRHQRIHTGEKPYICKECGKAFSQKSNLIAHEKIHSGEKPYECNECGKAFSQKQNFITHQKVHTGEKPYDCNECGKAFSQIASLTLHLRSHTGEKPYECDKCGKAFSQCSLLNLHMRSHTGEKPYVCNECGKAFSQRTSLIVHMRGHTGEKPYECNKCGKAFSQSSSLTIHIRGHTGEKPFDCSKCGKAFSQISSLTLHMRKHTGEKPYHCIECGKAFSQKSHLVRHQRIHTH

SEQ ID NO: 70704 - protein, 516 aa, Homo sapiens
MFEQLKPIEPRDCWREARVKKKPVTFEDVAVNFTQEEWDCLDASQRVLYQDVMSETFKNLTSVARIFLHKPELITKLEQEEEQWREFVHLPNTEGLSEGKKKELREQHPSLRDEGTSDDKVFLACRGAGQCPLSAPAGTMDRTRVLQASQAGPPFFCYTCGKCFSRRSYLYSHQFVHNPKLTNSCSQCGKLFRSPKSLSYHRRMHLGERPFCCTLCDKTYCDASGLSRHRRVHLGYRPHSCSVCGKSFRDQSELKRHQKIHQNQEPVDGNQECTLRIPGTQAEFQTPIARSQRSIQGLLDVNHAPVARSQEPIFRTEGPMAQNQASVLKNQAPVTRTQAPITGTLCQDARSNSHPVKPSRLNVFCCPHCSLTFSKKSYLSRHQKAHLTEPPNYCFHCSKSFSSFSRLVRHQQTHWKQKSYLCPICDLSFGEKEGLMDHWRGYKGKDLCQSSHHKCRVILGQWLGFSHDVPTMAGEEWKHGGDQSPPRIHTPRRRGLREKACKGDKTKEAVSILKHK

SEQ ID NO: 70705 - protein, 516 aa, Homo sapiens; identical to SEQ ID NO: 70704

SEQ ID NO: 70706 - protein, 516 aa, Homo sapiens; identical to SEQ ID NO: 70704

SEQ ID NO: 70707 - protein, 516 aa, Homo sapiens; identical to SEQ ID NO: 70704

SEQ ID NO: 70708 - protein, 211 aa, Homo sapiens
  VARIANT 1: note = MOD_RES - Any amino acid
XARSQEPIFRTEGPMAQNQASVLKNQAPVTRTQAPITGTLCQDARSNSHPVKPSRLNVFCCPHCSLTFSKKSYLSRHQKAHLTEPPNYCFHCSKSFSSFSRLVRHQQTHWKQKSYLCPICDLSFGEKEGLMDHWRGYKGKDLCQSSHHKCRVILGQWLGFSHDVPTMAGEEWKHGGDQSPPRIHTPRRRGLREKACKGDKTKEAVSILKHK

SEQ ID NO: 70709 - protein, 516 aa, Homo sapiens; identical to SEQ ID NO: 70704

SEQ ID NO: 70710 - protein, 516 aa, Homo sapiens; identical to SEQ ID NO: 70704

SEQ ID NO: 70711 - protein, 516 aa, Homo sapiens; identical to SEQ ID NO: 70704

SEQ ID NO: 70712 - protein, 516 aa, Homo sapiens; identical to SEQ ID NO: 70704

SEQ ID NO: 70713 - protein, 536 aa, Homo sapiens
MFEQLKPIEPVQKTLPWVGEVAATLQEAMKRDCWREARVKKKPVTFEDVAVNFTQEEWDCLDASQRVLYQDVMSETFKNLTSVARIFLHKPELITKLEQEEEQWREFVHLPNTEGLSEGKKKELREQHPSLRDEGTSDDKVFLACRGAGQCPLSAPAGTMDRTRVLQASQAGPPFFCYTCGKCFSRRSYLYSHQFVHNPKLTNSCSQCGKLFRSPKSLSYHRRMHLGERPFCCTLCDKTYCDASGLSRHRRVHLGYRPHSCSVCGKSFRDQSELKRHQKIHQNQEPVDGNQECTLRIPGTQAEFQTPIARSQRSIQGLLDVNHAPVARSQEPIFRTEGPMAQNQASVLKNQAPVTRTQAPITGTLCQDARSNSHPVKPSRLNVFCCPHCSLTFSKKSYLSRHQKAHLTEPPNYCFHCSKSFSSFSRLVRHQQTHWKQKSYLCPICDLSFGEKEGLMDHWRGYKGKDLCQSSHHKCRVILGQWLGFSHDVPTMAGEEWKHGGDQSPPRIHTPRRRGLREKACKGDKTKEAVSILKHK

SEQ ID NO: 70714 - protein, 516 aa, Homo sapiens; identical to SEQ ID NO: 70704

SEQ ID NO: 70715 - protein, 451 aa, Homo sapiens
AGGSPESLLFFQKPVTFEDVAVNFTQEEWDCLDASQRVLYQDVMSETFKNLTSVARIFLHKPELITKLEQEEEQWRETRVLQASQAGPPFFCYTCGKCFSRRSYLYSHQFVHNPKLTNSCSQCGKLFRSPKSLSYHRRMHLGERPFCCTLCDKTYCDASGLSRHRRVHLGYRPHSCSVCGKSFRDQSELKRHQKIHQNQEPVDGNQECTLRIPGTQAEFQTPIARSQRSIQGLLDVNHAPVARSQEPIFRTEGPMAQNQASVLKNQAPVTRTQAPITGTLCQDARSNSHPVKPSRLNVFCCPHCSLTFSKKSYLSRHQKAHLTEPPNYCFHCSKSFSSFSRLVRHQQTHWKQKSYLCPICDLSFGEKEGLMDHWRGYKGKDLCQSSHHKCRVILGQWLGFSHDVPTMAGEEWKHGGDQSPPRIHTPRRRGLREKACKGDKTKEAVSILKHK

SEQ ID NO: 70716 - protein, 516 aa, Homo sapiens; identical to SEQ ID NO: 70704

SEQ ID NO: 70717 - protein, 536 aa, Homo sapiens; identical to SEQ ID NO: 70713

SEQ ID NO: 70718 - protein, 536 aa, Homo sapiens; identical to SEQ ID NO: 70713

SEQ ID NO: 70719 - protein, 536 aa, Homo sapiens; identical to SEQ ID NO: 70713

SEQ ID NO: 70720 - protein, 536 aa, Homo sapiens; identical to SEQ ID NO: 70713

SEQ ID NO: 70721 - protein, 516 aa, Homo sapiens; identical to SEQ ID NO: 70704

SEQ ID NO: 70722 - protein, 516 aa, Homo sapiens; identical to SEQ ID NO: 70704

SEQ ID NO: 70723 - protein, 536 aa, Homo sapiens; identical to SEQ ID NO: 70713

SEQ ID NO: 70724 - protein, 516 aa, Homo sapiens; identical to SEQ ID NO: 70704

SEQ ID NO: 70725 - protein, 516 aa, Homo sapiens; identical to SEQ ID NO: 70704

SEQ ID NO: 70726 - protein, 536 aa, Homo sapiens; identical to SEQ ID NO: 70713

SEQ ID NO: 70727 - protein, 574 aa, Homo sapiens
MAAAVPRRPTQGTVTFEDVAVNFSQEEWCLLSEAQRCLYRDVMLENLALISSLGCWCGSKDEEAPCKQRISVQRESQSRTPRAGVSPKKAHPCEMCGLILEDVFHFADHQETHHKQKLNRSGACGKNLDDTAYLHQHQKQHIGEKFYRKSVREASFVKKRKLRVSQEPFVFREFGKDVLPSSGLCQEEAAVEKTDSETMHGPPFQEGKTNYSCGKRTKAFSTKHSVIPHQKLFTRDGCYVCSDCGKSFSRYVSFSNHQRDHTAKGPYDCGECGKSYSRKSSLIQHQRVHTGQTAYPCEECGKSFSQKGSLISHQLVHTGEGPYECRECGKSFGQKGNLIQHQQGHTGERAYHCGECGKSFRQKFCFINHQRVHTGERPYKCGECGKSFGQKGNLVHHQRGHTGERPYECKECGKSFRYRSHLTEHQRLHTGERPYNCRECGKLFNRKYHLLVHERVHTGERPYACEVCGKLFGNKHSVTIHQRIHTGERPYECSECGKSFLSSSALHVHKRVHSGQKPYKCSECGKSFSECSSLIKHRRIHTGERPYECTKCGKTFQRSSTLLHHQSSHRRKAL

SEQ ID NO: 70728 - protein, 1267 aa, Homo sapiens
MGDMKTPDFDDLLAAFDIPDPTSLDAKEAIQTPSEENESPLKPPGICMDESVSLSHSGSAPDVPAVSVIVKNTSRQESFEAEKDHITPSLLHNGFRGSDLPPDPHNCGKFDSTFMNGDSARSFPGKLEPPKSEPLPTFNQFSPISSPEPEDPIKDNGFGIKPKHSDSYFPPPLGCGAVGGPVLEALAKFPVPELHMFDHFCKKEPKPEPLPLGSQQEHEQSGQNTVEPHKDPDATRFFGEALEFNSHPSNSIGESKGLARELGTCSSVPPRQRLKPAHSKLSSCVAALVALQAKRVASVTKEDQPGHTKDLSGPTKESSKGSPKMPKSPKSPRSPLEATRKSIKPSDSPRSICSDSSSKGSPSVAASSPPAIPKVRIKTIKTSSGEIKRTVTRILPDPDDPSKSPVGSPLGSAIAEAPSEMPGDEVPVEEHFPEAGTNSGSPQGARKGDESMTKASDSSSPSCSSGPRVPKGAAPGSQTGKKQQSTALQASTLAPANLLPKAVHLANLNLVPHSVAASVTAKSSVQRRSQPQLTQMSVPLVHQVKKAAPLIVEVFNKVLHSSNPVPLYAPNLSPPADSRIHVPASGYCCLECGDAFALEKSLSQHYGRRSVHIEVLCTLCSKTLLFFNKCSLLRHARDHKSKGLVMQCSQLLVKPISADQMFVSAPVNSTAPAAPAPSSSPKHGLTSGSASPPPPALPLYPDPVRLIRYSIKCLECHKQMRDYMVLAAHFQRTTEETEGLTCQVCQMLLPNQCSFCAHQRIHAHKSPYCCPECGVLCRSAYFQTHVKENCLHYARKVGYRCIHCGVVHLTLALLKSHIQERHCQVFHKCAFCPMAFKTASSTADHSATQHPTQPHRPSQLIYKCSCEMVFNKKRHIQQHFYQNVSKTQVGVFKCPECPLLFVQKPELMQHVKSTHGVPRNVDELSSLQSSADTSSSRPGSRVPTEPPATSVAARSSSLPSGRWGRPEAHRRVEARPRLRNTGWTCQECQEWVPDRESYVSHMKKSHGRTLKRYPCRQCEQSFHTPNSLRKHIRNNHDTVKKFYTCGYCTEDSPSFPRPSLLESHISLMHGIRNPDLSQTSKVKPPGGHSPQVNHLKRPVSGVGDAPGTSNGATVSSTKRHKSLFQCAKCSFATDSGLEFQSHIPQHQVDSSTAQCLLCGLCYTSASSLSRHLFIVHKVRDQEEEEEEEAAAAEMAVEVAEPEEGSGEEVPMETRENGLEECAGEPLSADPEARRLLGPAPEDDGGHNDHSQPQASQDQDSHTLSPQV

SEQ ID NO: 70729 - protein, 1267 aa, Homo sapiens; identical to SEQ ID NO: 70728

SEQ ID NO: 70730 - protein, 792 aa, Homo sapiens
MAAINPWASWGALTDQSWGMTAVDPWASWALCPQYPAWHVEGSLEEGRRATGLPAAQVQEPVTFKDVAVDFTQEEWGQLDLVQRTLYRDVMLETYGHLLSVGNQIAKPEVISLLEQGEEPWSVEQACPQRTCPEWVRNLESKALIPAQSIFEEEQSHGMKLERYIWDDPWFSRLEVLGCKDQLEMYHMNQSTAMRQMVFMQKQVLSQRSSEFCGLGAEFSQNLNFVPSQRVSQIEHFYKPDTHAQSWRCDSAIMYADKVTCENNDYDKTVYQSIQPIYPARIQTGDNLFKCTDAVKSFNHIIHFGDHKGIHTGEKLYEYKECHQIFNQSPSFNEHPRLHVGENQYNYKEYENIFYFSSFMEHQKIGTVEKAYKYNEWEKVFGYDSFLTQHTSTYTAEKPYDYNECGTSFIWSSYLIQHKKTHTGEKPYECDKCGKVFRNRSALTKHERTHTGIKPYECNKCGKAFSWNSHLIVHKRIHTGEKPYVCNECGKSFNWNSHLIGHQRTHTGEKPFECTECGKSFSWSSHLIAHMRMHTGEKPFKCDECEKAFRDYSALSKHERTHSGAKPYKCTECGKSFSWSSHLIAHQRTHTGEKPYNCQECGKAFRERSALTKHEIIHSGIKPYECNKCGKSCSQMAHLVRHQRTHTGEKPYECNKCGKSFSQSCHLVAHRRIHTGEKPYKCNQCERSFNCSSHLIAHRRTHTGEKPYRCNECGKAFNESSSLIVHLRNHTGEKPYKCNHCEKAFCKNSSLIIHQRMHSGEKRFICSECGKAFSGHSALLQHQRNHSEEKLN

SEQ ID NO: 70731 - protein, 702 aa, Homo sapiens
MLETYGHLLSVGNQIAKPEVISLLEQGEEPWSVEQACPQRTCPEWVRNLESKALIPAQSIFEEEQSHGMKLERYIWDDPWFSRLEVLGCKDQLEMYHMNQSTAMRQMVFMQKQVLSQRSSEFCGLGAEFSQNLNFVPSQRVSQIEHFYKPDTHAQSWRCDSAIMYADKVTCENNDYDKTVYQSIQPIYPARIQTGDNLFKCTDAVKSFNHIIHFGDHKGIHTGEKLYEYKECHQIFNQSPSFNEHPRLHVGENQYNYKEYENIFYFSSFMEHQKIGTVEKAYKYNEWEKVFGYDSFLTQHTSTYTAEKPYDYNECGTSFIWSSYLIQHKKTHTGEKPYECDKCGKVFRNRSALTKHERTHTGIKPYECNKCGKAFSWNSHLIVHKRIHTGEKPYVCNECGKSFNWNSHLIGHQRTHTGEKPFECTECGKSFSWSSHLIAHMRMHTGEKPFKCDECEKAFRDYSALSKHERTHSGAKPYKCTECGKSFSWSSHLIAHQRTHTGEKPYNCQECGKAFRERSALTKHEIIHSGIKPYECNKCGKSCSQMAHLVRHQRTHTGEKPYECNKCGKSFSQSCHLVAHRRIHTGEKPYKCNQCERSFNCSSHLIAHRRTHTGEKPYRCNECGKAFNESSSLIVHLRNHTGEKPYKCNHCEKAFCKNSSLIIHQRMHSGEKRFICSECGKAFSGHSALLQHQRNHSEEKLN

SEQ ID NO: 70732 - protein, 508 aa, Homo sapiens
MAAINPWASWGALTDQSWGMTAVDPWASWALCPQYPAWHVEGSLEEGRRATGLPAAQVQEPVTFKDVAVDFTQEEWGQLDLVQRTLYRDVMLETYGHLLSVGNQIAKPEVISLLEQGEEPWSVEQACPQRTCPEWVRNLESKALIPAQSIFEEEQSHGMKLERYIWDDPWFSRLEVLGCKDQLEMYHMNQSTAMRQMVFMQKQVLSQRSSEFCGLGAEFSQNLNFVPSQRVSQIEHFYKPDTHAQSWRCDSAIMYADKVTCENNDYDKTVYQSIQPIYPARIQTGDNLFKCTDAVKSFNHIIHFGDHKGIHTGEKLYEYKECHQIFNQSPSFNEHPRLHVGENQYNYKEYENIFYFSSFMEHQKIGTVEKAYKYNEWEKVFGYDSFLTQHTSTYTAEKPYDYNECGTSFIWSSYLIQHKKTHTGEKPYECDKCGKVFRNRSALTKHERTHTGIKPYECNKCGKAFSWNSHLIVHKRIHTGEKPYVCNECGKSFNWNSHLIGHQRTHTG

SEQ ID NO: 70733 - protein, 840 aa, Homo sapiens
MKEDKSSIREAISKAKSTANIKTEQEGEASEKSLHLSPQHITHQTMPIGQRGSEQGKRVENINGTSYPSLQQKTNAVKKLHKCDECGKSFKYNSRLVQHKIMHTGEKRYECDDCGGTFRSSSSLRVHKRIHTGEKPYKCEECGKAYMSYSSLINHKSTHSGEKNCKCDECGKSFNYSSVLDQHKRIHTGEKPYECGECGKAFRNSSGLRVHKRIHTGEKPYECDICGKTFSNSSGLRVHKRIHTGEKPYECDECGKAFITCRTLLNHKSIHFGDKPYKCDECEKSFNYSSLLIQHKVIHTGEKPYECDECGKAFRNSSGLIVHKRIHTGEKPYKCDVCGKAFSYSSGLAVHKSIHPGKKAHECKECGKSFSYNSLLLQHRTIHTGERPYVCDVCGKTFRNNAGLKVHRRLHTGEKPYKCDVCGKAYISRSSLKNHKGIHLGEKPYKCSYCEKSFNYSSALEQHKRIHTREKPFGCDECGKAFRNNSGLKVHKRIHTGERPYKCEECGKAYISLSSLINHKSVHPGEKPFKCDECEKAFITYRTLTNHKKVHLGEKPYKCDVCEKSFNYTSLLSQHRRVHTREKPYECDRCEKVFRNNSSLKVHKRIHTGERPYECDVCGKAYISHSSLINHKSTHPGRTPHTCDECGKAFFSSRTLISHKRVHLGEKPFKCVECGKSFSYSSLLSQHKRIHTGEKPYVCDRCGKAFRNSSGLTVHKRIHTGEKPYECDECGKAYISHSSLINHKSVHQGKQPYNCECGKSFNYRSVLDQHKRIHTGKKPYRCNECGKAFNIRSNLTKHKRTHTGEESLNVIYVGSYSGTSQKRTYEGGNALDGGRMRMPL

SEQ ID NO: 70734 - protein, 498 aa, Homo sapiens
MSYSSLINHKSTHSGEKNCKCDECGKSFNYSSVLDQHKRIHTGEKPYECGECGKAFRNSSGLRVHKRIHTGEKPYECDICGKTFSNSSGLRVHKRIHTGEKPYECDECGKAFITCRTLLNHKSIHFGDKPYKCDECGKAFRNNSGLKVHKRIHTGERPYKCEECGKAYISLSSLINHKSVHPGEKPFKCDECEKAFITYRTLTNHKKVHLGEKPYKCDVCEKSFNYTSLLSQHRRVHTREKPYECDRCEKVFRNNSSLKVHKRIHTGERPYECDVCGKAYISHSSLINHKSTHPGRTPHTCDECGKAFFSSRTLISHKRVHLGEKPFKCVECGKSFSYSSLLSQHKRIHTGEKPYVCDRCGKAFRNSSGLTVHKRIHTGEKPYECDECGKAYISHSSLINHKSVHQGKQPYNCECGKSFNYRSVLDQHKRIHTGKKPYRCNECGKAFNIRSNLTKHKRTHTGEESLNVIYVGSYSGTSQKRTYEGGNALDGGRMRMPL

SEQ ID NO: 70735 - protein, 900 aa, Homo sapiens
MSHLKTSTEDEEPTEEYENVGNAASKWPKVEDPMPESKVGDTCVWDSKVENQQKKPVENRMKEDKSSIREAISKAKSTANIKTEQEGEASEKSLHLSPQHITHQTMPIGQRGSEQGKRVENINGTSYPSLQQKTNAVKKLHKCDECGKSFKYNSRLVQHKIMHTGEKRYECDDCGGTFRSSSSLRVHKRIHTGEKPYKCEECGKAYMSYSSLINHKSTHSGEKNCKCDECGKSFNYSSVLDQHKRIHTGEKPYECGECGKAFRNSSGLRVHKRIHTGEKPYECDICGKTFSNSSGLRVHKRIHTGEKPYECDECGKAFITCRTLLNHKSIHFGDKPYKCDECEKSFNYSSLLIQHKVIHTGEKPYECDECGKAFRNSSGLIVHKRIHTGEKPYKCDVCGKAFSYSSGLAVHKSIHPGKKAHECKECGKSFSYNSLLLQHRTIHTGERPYVCDVCGKTFRNNAGLKVHRRLHTGEKPYKCDVCGKAYISRSSLKNHKGIHLGEKPYKCSYCEKSFNYSSALEQHKRIHTREKPFGCDECGKAFRNNSGLKVHKRIHTGERPYKCEECGKAYISLSSLINHKSVHPGEKPFKCDECEKAFITYRTLTNHKKVHLGEKPYKCDVCEKSFNYTSLLSQHRRVHTREKPYECDRCEKVFRNNSSLKVHKRIHTGERPYECDVCGKAYISHSSLINHKSTHPGRTPHTCDECGKAFFSSRTLISHKRVHLGEKPFKCVECGKSFSYSSLLSQHKRIHTGEKPYVCDRCGKAFRNSSGLTVHKRIHTGEKPYECDECGKAYISHSSLINHKSVHQGKQPYNCECGKSFNYRSVLDQHKRIHTGKKPYRCNECGKAFNIRSNLTKHKRTHTGEESLNVIYVGSYSGTSQKRTYEGGNALDGGRMRMPL

SEQ ID NO: 70736 - protein, 160 aa, Homo sapiens
MPESKVGDTCVWDSKVENQQKKPVENRMKEDKSSIREAISKAKSTANIKTEQEGEASEKSLHLSPQHITHQTMPIGQRGSEQGKRVENINGTSYPSLQQKTNAVKKLHKCDECGKSFKYNSRLVQHKIMHTGEKRYECDDCGGTFRSSSSLRVHKRIHTG

SEQ ID NO: 70737 - protein, 104 aa, Homo sapiens
MPESKVGDTCVWDSKVENQQKKPVENRMKEDKSSIREAISKAKSTANIKTEQEGEASEKSLHLSPQHITHQTMPIGQRGSEQGKRVENINGTSYPSLQQKTNAV

SEQ ID NO: 70738 - protein, 78 aa, Homo sapiens
MPESKVGDTCVWDSKVENQQKKPVENRMKEDKSSIREAISKAKSTANIKTEQEGEASEKSLHLSPQHITHQTMPIGQR

SEQ ID NO: 70739 - protein, 867 aa, Homo sapiens
MPESKVGDTCVWDSKVENQQKKPVENRMKEDKSSIREAISKAKSTANIKTEQEGEASEKSLHLSPQHITHQTMPIGQRGSEQGKRVENINGTSYPSLQQKTNAVKKLHKCDECGKSFKYNSRLVQHKIMHTGEKRYECDDCGGTFRSSSSLRVHKRIHTGEKPYKCEECGKAYMSYSSLINHKSTHSGEKNCKCDECGKSFNYSSVLDQHKRIHTGEKPYECGECGKAFRNSSGLRVHKRIHTGEKPYECDICGKTFSNSSGLRVHKRIHTGEKPYECDECGKAFITCRTLLNHKSIHFGDKPYKCDECEKSFNYSSLLIQHKVIHTGEKPYECDECGKAFRNSSGLIVHKRIHTGEKPYKCDVCGKAFSYSSGLAVHKSIHPGKKAHECKECGKSFSYNSLLLQHRTIHTGERPYVCDVCGKTFRNNAGLKVHRRLHTGEKPYKCDVCGKAYISRSSLKNHKGIHLGEKPYKCSYCEKSFNYSSALEQHKRIHTREKPFGCDECGKAFRNNSGLKVHKRIHTGERPYKCEECGKAYISLSSLINHKSVHPGEKPFKCDECEKAFITYRTLTNHKKVHLGEKPYKCDVCEKSFNYTSLLSQHRRVHTREKPYECDRCEKVFRNNSSLKVHKRIHTGERPYECDVCGKAYISHSSLINHKSTHPGRTPHTCDECGKAFFSSRTLISHKRVHLGEKPFKCVECGKSFSYSSLLSQHKRIHTGEKPYVCDRCGKAFRNSSGLTVHKRIHTGEKPYECDECGKAYISHSSLINHKSVHQGKQPYNCECGKSFNYRSVLDQHKRIHTGKKPYRCNECGKAFNIRSNLTKHKRTHTGEESLNVIYVGSYSGTSQKRTYEGGNALDGGRMRMPL

SEQ ID NO: 70740 - protein, 461 aa, Homo sapiens
MDSVAFEDVAVNFTLEEWALLDPSQKNLYRDVMRETFRNLASVGKQWEDQNIEDPFKIPRRNISHIPERLCESKEGGQGEETFSQIPDGILNKKTPGVKPCESSVCGEVGMGPSSLNRHIRDHTGREPNEYQEYGKKSYTRNQCGRALSYHRSFPVRERTHPGGKPYDCKECGETFISLVSIRRHMLTHRGGVPYKCKVCGKAFDYPSLFRIHERSHTGEKPYECKQCGKAFSCSSYIRIHERTHTGDKPYECKQCGKAFSCSKYIRIHERTHTGEKPYECKQCGKAFRCASSVRSHERTHTGEKLFECKECGKALTCLASVRRHMIKHTGNGPYKCKVCGKAFDFPSSFRIHERTHTGEKPYDCKQCGKAFSCSSSFRKHERIHTGEKPYKCTKCGKAFSRSSYFRIHERTHTGEKPYECKQCGKAFSRSTYFRVHEKIHTGEKPYENPNPNASVVPVLS

SEQ ID NO: 70741 - protein, 1055 aa, Homo sapiens
MVGSHADMAPASTAEGAGEKPGPAAPAPAAQYECGECGKSFRWSSRLLHHQRTHTGERPYKCPDCPKAFKGSSALLYHQRGHTGERPYQCPDCPKAFKRSSLLQIHRSVHTGLRAFICGQCGLAFKWSSHYQYHLRQHTGERPYPCPDCPKAFKNSSSLRRHRHVHTGERPYTCGVCGKSFTQSTNLRQHQRVHTGERPFRCPLCPKTFTHSSNLLLHQRTHGAAPAPGTASAAPPPQSREPGKVFVCDAYLQRHLQPHSPPAPPAPPPPPPPVVPELFLAAAETTVELVYRCDGCEQGFSSEELLLEHQPCPGPDAAPQPQEAPAEAPKADQPPSPLPQPPPPAAAPAPGFACLPCGKSFRTVAGLSRHQHSHGAAGGQAFRCGSCDGSFPQLASLLAHQQCHVEEAAAGRPPPQAEAAEVTCPQEPLAPAAPVPPPPPSAPASAERPYKCAECGKSFKGSSGLRYHLRDHTGERPYQCGECGKAFKRSSLLAIHQRVHTGLRAFTCGQCGLTFKWSSHYQYHLRLHSGERPYACGECGKAFRNTSCLRRHRHVHTGERPHACGVCGKSFAQTSNLRQHQRVHTGERPFRCPLCPKTFTHSSNLLLHQRTHSAERPFTCPICGRGFVMAAYLQRHLRTHAPANTPPSTTAPAAGPQPPAPLAAARAPPATQDVHVLPHLQATLSLEVAGGTAQAPSLGPAAPNSQTFLLVQTAQGLQLIPSSVQPPTPPPPPAPPKLILLPSSSAGAGGGRARQGPRAVGKAGQGAGVVWLPGPGGLGVQGAASAGASGTGQSLIVLQNVGGGEAGPQEMSGVQLQPLRPAPEVTTVQLQPAQEVTTVQLQPAQEVTTVQLQPAQEVTTVQLQPVAGQLSNSSGGAVATEAPNLLVVQSGAAEELLTGPGPGEAGDGEASTGVVQDVLFETLQTDEGLQSVLVLSGADGEQTRLCVQEVETLPPGLTEPPATGPPGQKLLIIRSAPATELLDSSNTGGGTATLQLLAPPPSGPASGPAGLPGAPASQMVQVVPAGAGPGVMTPQGLPSIQIVQTLPAVQLVHTF

SEQ ID NO: 70742 - protein, 533 aa, Homo sapiens
MDRYQGNQDRVLRQVTVISRETLTDEMGSKYSAFGKMFNRCTDLAPLSQKFHKFDSCENSLKSNSDLLNYNRSYARKNPTKRFRCGRPPKYNASCSVPEKEGFIHTGMEPYGDSQCEKVLSHKQAHVQYKKFQAREKPNVCSMCGKAFIKKSQLIIHQRIHTGEKPYVCGDCRKAFSEKSHLIVHQRIHTGEKPYECTKYGRAFSRKSPFTVHQRVHTGEKPYECFECPKAFSQKSHLIIHQRVHTREKPFECSECRKAFCEMSHLFIHQITHTGKKPYECTECGKTFPRKTQLIIHQRTHTGEKPYKCGECGKTFCQQSHLIGHQRIHTGEKPYVCTDCGKAFSQKSHLTGHQRLHTGEKPYMCTECGKSFSQKSPLIIHQRIHTGEKPYQCGECGKTFSQKSLLIIHLRVHTGEKPYECTECGRAFSLKSHLILHQRGHTGEKPYECSECGKAFCGKSPLIIHQKTHPREKTPECAESGMTFFWKSQMITYQRRHTGEKPSRCSDCGKAFCQHVYFTGHQNPYRKDTLYIC

SEQ ID NO: 70743 - protein, 657 aa, Homo sapiens
MIESQEPVTFEDVAVDFTQEEWQQLNPAQKTLHRDVMLETYNHLVSVGCSGIKPDVIFKLEHGKDPWIIESELSRWIYPDRVKGLESSQQIISGELLFQREILERAPKDNSLYSVLKIWHIDNQMDRYQGNQDRVLRQVTVISRETLTDEMGSKYSAFGKMFNRCTDLAPLSQKFHKFDSCENSLKSNSDLLNYNRSYARKNPTKRFRCGRPPKYNASCSVPEKEGFIHTGMEPYGDSQCEKVLSHKQAHVQYKKFQAREKPNVCSMCGKAFIKKSQLIIHQRIHTGEKPYVCGDCRKAFSEKSHLIVHQRIHTGEKPYECTKYGRAFSRKSPFTVHQRVHTGEKPYECFECPKAFSQKSHLIIHQRVHTREKPFECSECRKAFCEMSHLFIHQITHTGKKPYECTECGKTFPRKTQLIIHQRTHTGEKPYKCGECGKTFCQQSHLIGHQRIHTGEKPYVCTDCGKAFSQKSHLTGHQRLHTGEKPYMCTECGKSFSQKSPLIIHQRIHTGEKPYQCGECGKTFSQKSLLIIHLRVHTGEKPYECTECGRAFSLKSHLILHQRGHTGEKPYECSECGKAFCGKSPLIIHQKTHPREKTPECAESGMTFFWKSQMITYQRRHTGEKPSRCSDCGKAFCQHVYFTGHQNPYRKDTLYIC

SEQ ID NO: 70744 - protein, 214 aa, Homo sapiens
MIESQEPVTFEDVAVDFTQEEWQQLNPAQKTLHRDVMLETYNHLVSVGCSGIKPDVIFKLEHGKDPWIIESELSRWIYPDRVKGLESSQQIISGELLFQREILERAPKDNSLYSVLKIWHIDNQMDRYQGNQDRVLRQVTVISRETLTDEMGSKYSAFGKMFNRCTDLAPLSQKFHKFDSCENSLKSNSDLLNYNRSYARKNPTKRFRCGRPPK

SEQ ID NO: 70745 - protein, 643 aa, Homo sapiens
MIESQEEWQQLNPAQKTLHRDVMLETYNHLVSVGCSGIKPDVIFKLEHGKDPWIIESELSRWIYPDRVKGLESSQQIISGELLFQREILERAPKDNSLYSVLKIWHIDNQMDRYQGNQDRVLRQVTVISRETLTDEMGSKYSAFGKMFNRCTDLAPLSQKFHKFDSCENSLKSNSDLLNYNRSYARKNPTKRFRCGRPPKYNASCSVPEKEGFIHTGMEPYGDSQCEKVLSHKQAHVQYKKFQAREKPNVCSMCGKAFIKKSQLIIHQRIHTGEKPYVCGDCRKAFSEKSHLIVHQRIHTGEKPYECTKYGRAFSRKSPFTVHQRVHTGEKPYECFECPKAFSQKSHLIIHQRVHTREKPFECSECRKAFCEMSHLFIHQITHTGKKPYECTECGKTFPRKTQLIIHQRTHTGEKPYKCGECGKTFCQQSHLIGHQRIHTGEKPYVCTDCGKAFSQKSHLTGHQRLHTGEKPYMCTECGKSFSQKSPLIIHQRIHTGEKPYQCGECGKTFSQKSLLIIHLRVHTGEKPYECTECGRAFSLKSHLILHQRGHTGEKPYECSECGKAFCGKSPLIIHQKTHPREKTPECAESGMTFFWKSQMITYQRRHTGEKPSRCSDCGKAFCQHVYFTGHQNPYRKDTLYIC

SEQ ID NO: 70746 - protein, 1978 aa, Homo sapiens
MSRPRFNPRGDFPLQRPRAPNPSGMRPPGPFMRPGSMGLPRFYPAGRARGIPHRFAGHESYQNMGPQRMNVQVTQHRTDPRLTKEKLDFHEAQQKKGKPHGSRWDDEPHISASVAVKQSSVTQVTEQSPKVQSRYTKESASSILASFGLSNEDLEELSRYPDEQLTPENMPLILRDIRMRKMGRRLPNLPSQSRNKETLGSEAVSSNVIDYGHASKYGYTEDPLEVRIYDPEIPTDEVENEFQSQQNISASVPNPNVICNSMFPVEDVFRQMDFPGESSNNRSFFSVESGTKMSGLHISGGQSVLEPIKSVNQSINQTVSQTMSQSLIPPSMNQQPFSSELISSVSQQERIPHEPVINSSNVHVGSRGSKKNYQSQADIPIRSPFGIVKASWLPKFSHADAQKMKRLPTPSMMNDYYAASPRIFPHLCSLCNVECSHLKDWIQHQNTSTHIESCRQLRQQYPDWNPEILPSRRNEGNRKENETPRRRSHSPSPRRSRRSSSSHRFRRSRSPMHYMYRPRSRSPRICHRFISRYRSRSRSRSPYRIRNPFRGSPKCFRSVSPERMSRRSVRSSDRKKALEDVVQRSGHGTEFNKQKHLEAADKGHSPAQKPKTSSGTKPSVKPTSATKSDSNLGGHSIRCKSKNLEDDTLSECKQVSDKAVSLQRKLRKEQSLHYGSVLLITELPEDGCTEEDVRKLFQPFGKVNDVLIVPYRKEAYLEMEFKEAITAIMKYIETTPLTIKGKSVKICVPGKKKAQNKEVKKKTLESKKVSASTLKRDADASKAVEIVTSTSAAKTGQAKASVAKVNKSTGKSASSVKSVVTVAVKGNKASIKTAKSGGKKSLEAKKTGNVKNKDSNKPVTIPENSEIKTSIEVKATENCAKEAISDAALEATENEPLNKETEEMCVMLVSNLPNKGYSVEEVYDLAKPFGGLKDILILSSHKKAYIEINRKAAESMVKFYTCFPVLMDGNQLSISMAPENMNIKDEEAIFITLVKENDPEANIDTIYDRFVHLDNLPEDGLQCVLCVGLQFGKVDHHVFISNRNKAILQLDSPESAQSMYSFLKQNPQNIGDHMLTCSLSPKIDLPEVQIEHDPELEKESPGLKNSPIDESEVQTATDSPSVKPNELEEESTPSIQTETLVQQEEPCEEEAEKATCDSDFAVETLELETQGEEVKEEIPLVASASVSIEQFTENAEECALNQQMFNSDLEKKGAEIINPKTALLPSDSVFAEERNLKGILEESPSEAEDFISGITQTMVEAVAEVEKNETVSEILPSTCIVTLVPGIPTGDEKTVDKKNISEKKGNMDEKEEKEFNTKETRMDLQIGTEKAEKNEGRMDAEKVEKMAAMKEKPAENTLFKAYPNKGVGQANKPDETSKTSILAVSDVSSSKPSIKAVIVSSPKAKATVSKTENQKSFPKSVPRDQINAEKKLSAKEFGLLKPTSARSGLAESSSKFKPTQSSLTRGGSGRISALQGKLSKLDYRDITKQSQETEARPSIMKRDDSNNKTLAEQNTKNPKSTTGRSSKSKEEPLFPFNLDEFVTVDEVIEEVNPSQAKQNPLKGKRKETLKNVPFSELNLKKKKGKTSTPRGVEGELSFVTLDEIGEEEDAAAHLAQALVTVDEVIDEEELNMEEMVKNSNSLFTLDELIDQDDCISHSEPKDVTVLSVAEEQDLLKQERLVTVDEIGEVEELPLNESADITFATLNTKGNEGDTVRDSIGFISSQVPEDPSTLVTVDEIQDDSSDLHLVTLDEVTEEDEDSLADFNNLKEELNFVTVDEVGEEEDGDNDLKVELAQSKNDHPTDKKGNRKKRAVDTKKTKLESLSQVGPVNENVMEEDLKTMIERHLTAKTPTKRVRIGKTLPSEKAVVTEPAKGEEAFQMSEVDEESGLKDSEPERKRKKTEDSSSGKSVASDVPEELDFLVPKAGFFCPICSLFYSGEKAMTNHCKSTRHKQNTEKFMAKQRKEKEQNEAEERSSR

SEQ ID NO: 70747 - protein, 1139 aa, Homo sapiens
MSRPRFNPRGDFPLQRPRAPNPSGMRPPGPFMRPGSMGLPRFYPAGRARGIPHRFAGHESYQNMGPQRMNVQVTQHRTDPRLTKEKLDFHEAQQKKGKPHGSRWDDEPHISASVAVKQSSVTQVTEQSPKVQSRYTKESASSILASFGLSNEDLEELSRYPDEQLTPENMPLILRDIRMRKMGRRLPNLPSQSRNKETLGSEAVSSNVIDYGHASKYGYTEDPLEVRIYDPEIPTDEVENEFQSQQNISASVPNPNVICNSMFPVEDVFRQMDFPGESSNNRSFFSVESGTKMSGLHISGGQSVLEPIKSVNQSINQTVSQTMSQSLIPPSMNQQPFSSELISSVSQQERIPHEPVINSSNVHVGSRGSKKNYQSQADIPIRSPFGIVKASWLPKFSHADAQKMKRLPTPSMMNDYYAASPRIFPHLCSLCNVECSHLKDWIQHQNTSTHIESCRQLRQQYPDWNPEILPSRRNEGNRKENETPRRRSHSPSPRRSRRSSSSHRFRRSRSPMHYMYRPRSRSPRICHRFISRYRSRSRSRSPYRIRNPFRGSPKCFRSVSPERMSRRSVRSSDRKKALEDVVQRSGHGTEFNKQKHLEAADKGHSPAQKPKTSSGTKPSVKPTSATKSDSNLGGHSIRCKSKNLEDDTLSECKQVSDKAVSLQRKLRKEQSLHYGSVLLITELPEDGCTEEDVRKLFQPFGKVNDVLIVPYRKEAYLEMEFKEAITAIMKYIETTPLTIKGKSVKICVPGKKKAQNKEVKKKTLESKKVSASTLKRDADASKAVEIVTSTSAAKTGQAKASVAKVNKSTGKSASSVKSVVTVAVKGNKASIKTAKSGGKKSLEAKKTGNVKNKDSNKPVTIPENSEIKTSIEVKATENCAKEAISDAALEATENEPLNKETEEMCVMLVSNLPNKGYSVEEVYDLAKPFGGLKDILILSSHKKAYIEINRKAAESMVKFYTCFPVLMDGNQLSISMAPENMNIKDEEAIFITLVKENDPEANIDTIYDRFVHLDNLPEDGLQCVLCVGLQFGKVDHHVFISNRNKAILQLDSPESAQSMYSFLKQNPQNIGDHMLTCSLSPKIDLPEVQIEHDPELEKERLWLSKTLRILKALLVEVPNLKRSHYFHLIWMNLLLWMRL

SEQ ID NO: 70748 - protein, 814 aa, Homo sapiens
MSRPRFNPRGDFPLQRPRAPNPSGMRPPGPFMRPGSMGLPRFYPAGRARGIPHRFAGHESYQNMGPQRMNVQVTQHRTDPRLTKEKLDFHEAQQKKGKPHGSRWDDEPHISASVAVKQSSVTQVTEQSPKVQSRYTKESASSILASFGLSNEDLEELSRYPDEQLTPENMPLILRDIRMRKMGRRLPNLPSQSRNKETLGSEAVSSNVIDYGHASKYGYTEDPLEVRIYDPEIPTDEVENEFQSQQNISASVPNPNVICNSMFPVEDVFRQMDFPGESSNNRSFFSVESGTKMSGLHISGGQSVLEPIKSVNQSINQTVSQTMSQSLIPPSMNQQPFSSELISSVSQQERIPHEPVINSSNVHVGSRGSKKNYQSQADIPIRSPFGIVKASWLPKFSHADAQKMKRLPTPSMMNDYYAASPRIFPHLCSLCNVECSHLKDWIQHQNTSTHIESCRQLRQQYPDWNPEILPSRRNEGNRKENETPRRRSHSPSPRRSRRSSSSHRFRRSRSPMHYMYRPRSRSPRICHRFISRYRSRSRSRSPYRIRNPFRGSPKCFRSVSPERMSRRSVRSSDRKKALEDVVQRSGHGTEFNKQKHLEAADKGHSPAQKPKTSSGTKPSVKPTSATKSDSNLGGHSIRCKSKNLEDDTLSECKQVSDKAVSLQRKLRKEQSLHYGSVLLITELPEDGCTEEDVRKLFQPFGKVNDVLIVPYRKEAYLEMEFKEAITAIMKYIETTPLTIKGKSVKICVPGKKKAQNKEVKKKTLESKKVSASTLKRDADASKAVEIVTSTSAGLLPTGGGNNYPQIVLAPGLCH

SEQ ID NO: 70749 - protein, 880 aa, Homo sapiens
MPRDGVPAGNTTPAAAQAAAQSPDSATAGAPQVLDSLKRYPDWNPEILPSRRNEGNRKENETPRRRSHSPSPRRSRRSSSSHRFRRSRSPMHYMYRPRSRSPRICHRFISRYRSRSRSRSPYRIRNPFRGSPKCFRSVSPERMSRRSVRSSDRKKALEDVVQRSGHGTEFNKQKHLEAADKGHSPAQKPKTSSGTKPSVKPTSATKSDSNLGGHSIRCKSKNLEDDTLSECKQVSDKAVSLQRKLRKEQSLHYGSVLLITELPEDGCTEEDVRKLFQPFGKVNDVLIVPYRKEAYLEMEFKEAITAIMKYIETTPLTIKGKSVKICVPGKKKAQNKEVKKKTLESKKVSASTLKRDADASKAVEIVTSTSAAKTGQAKASVAKVNKSTGKSASSVKSVVTVAVKGNKASIKTAKSGGKKSLEAKKTGNVKNKDSNKPVTIPENSEIKTSIEVKATENCAKEAISDAALEATENEPLNKETEEMCVMLVSNLPNKGYSVEEVYDLAKPFGGLKDILILSSHKKAYIEINRKAAESMVKFYTCFPVLMDGNQLSISMAPENMNIKDEEAIFITLVKENDPEANIDTIYDRFVHLDNLPEDGLQCVLCVGLQFGKVDHHVFISNRNKAILQLDSPESAQSMYSFLKQNPQNIGDHMLTCSLSPKIDLPEVQIEHDPELEKESPGLKNSPIDESEVQTATDSPSVKPNELEEESTPSIQTETLVQQEEPCEEEAEKATCDSDFAVETLELETQGEEVKEEIPLVASASVSIEQFTENAEECALNQQMFNSDLEKKGAEIINPKTALLPSDSVFAEERNLKGILEESPSEAEDFISGITQTMVEAVAEVEKNETVSEILPSTCIVTLVPGIPTGDEKTVDKKNIS

SEQ ID NO: 70750 - protein, 918 aa, Homo sapiens
MDSPPLKALNSNSIYFLLLFHCMLISEVQIEHDPELEKESPGLKNSPIDESEVQTATDSPSVKPNELEEESTPSIQTETLVQQEEPCEEEAEKATCDSDFAVETLELETQGEEVKEEIPLVASASVSIEQFTENAEECALNQQMFNSDLEKKGAEIINPKTALLPSDSVFAEERNLKGILEESPSEAEDFISGITQTMVEAVAEVEKNETVSEILPSTCIVTLVPGIPTGDEKTVDKKNISEKKGNMDEKEEKEFNTKETRMDLQIGTEKAEKNEGRMDAEKVEKMAAMKEKPAENTLFKAYPNKGVGQANKPDETSKTSILAVSDVSSSKPSIKAVIVSSPKAKATVSKTENQKSFPKSVPRDQINAEKKLSAKEFGLLKPTSARSGLAESSSKFKPTQSSLTRGGSGRISALQGKLSKLDYRDITKQSQETEARPSIMKRDDSNNKTLAEQNTKNPKSTTGRSSKSKEEPLFPFNLDEFVTVDEVIEEVNPSQAKQNPLKGKRKETLKNVPFSELNLKKKKGKTSTPRGVEGELSFVTLDEIGEEEDAAAHLAQALVTVDEVIDEEELNMEEMVKNSNSLFTLDELIDQDDCISHSEPKDVTVLSVAEEQDLLKQERLVTVDEIGEVEELPLNESADITFATLNTKGNEGDTVRDSIGFISSQVPEDPSTLVTVDEIQDDSSDLHLVTLDEVTEEDEDSLADFNNLKEELNFVTVDEVGEEEDGDNDLKVELAQSKNDHPTDKKGNRKKRAVDTKKTKLESLSQVGPVNENVMEEDLKTMIERHLTAKTPTKRVRIGKTLPSEKAVVTEPAKGEEAFQMSEVDEESGLKDSEPERKRKKTEDSSSGKSVASDVPEELDFLVPKAGFFCPICSLFYSGEKAMTNHCKSTRHKQNTEKFMAKQRKEKEQNEAEERSSR

SEQ ID NO: 70751 - protein, 1978 aa, Homo sapiens; identical to SEQ ID NO: 70746

SEQ ID NO: 70752 - protein, 29 aa, Homo sapiens
MSRPRFNPRGDFPLQRPRAPNPSGMRPPG

SEQ ID NO: 70753 - protein, 197 aa, Homo sapiens
MSRPRFNPRGDFPLQRPRAPNPSGMRPPGPFMRPGSMGLPRFYPAGRARGIPHRFAGHESYQNMGPQRMNVQVTQHRTDPRLTKEKLDFHEAQQKKGKPHGSRWDDEPHISASVAVKQSSVTQVTEQSPKVQSRYTKESASSILASFGLSNEDLEELSRYPDEQLTPENMPLILRDIRMRKMGRRLPNLPSQSRNKE

SEQ ID NO: 70754 - protein, 36 aa, Homo sapiens
MSRPRFNPRGDFPLQRPRAPNPSGMRPPGPFMRPGS

SEQ ID NO: 70755 - protein, 62 aa, Homo sapiens
MSRPRFNPRGDFPLQRPRAPNPSGMRPPGPFMRPGSMGLPRFYPAGRARGIPHRFAGHESYQ

SEQ ID NO: 70756 - protein, 62 aa, Homo sapiens; identical to SEQ ID NO: 70755

SEQ ID NO: 70757 - protein, 585 aa, Homo sapiens
MDSPPLKALNSNSIYFLLLFHCMLISEVQIEHDPELEKESPGLKNSPIDESEVQTATDSPSVKPNELEEESTPSIQTETLVQQEEPCEEEAEKATCDSDFAVETLELETQGEEVKEEIPLVASASVSIEQFTENAEECALNQQMFNSDLEKKGAEIINPKTALLPSDSVFAEERNLKGILEESPSEAEDFISGITQTMVEAVAEVEKNETVSEILPSTCIVTLVPGIPTGDEKTVDKKNISEKKGNMDEKEEKEFNTKETRMDLQIGTEKAEKNEGRMDAEKVEKMAAMKEKPAENTLFKAYPNKGVGQANKPDETSKTSILAVSDVSSSKPSIKAVIVSSPKAKATVSKTENQKSFPKSVPRDQINAEKKLSAKEFGLLKPTSARSGLAESSSKFKPTQSSLTRGGSGRISALQGKLSKLDYRDITKQSQETEARPSIMKRDDSNNKTLAEQNTKNPKSTTGRSSKSKEEPLFPFNLDEFVTVDEVIEEVNPSQAKQNPLKGKRKETLKNVPFSELNLKKKKGKTSTPRGVEGELSFVTLDEIGEEEDAAAHLAQALVTVDEVIDEEELNMEEMVKFKFTFYIR

SEQ ID NO: 70758 - protein, 1024 aa, Homo sapiens
MPRDGVPAGNTTPAAAQAAAQSPDSATAGAPQVLDSLKRFVLFLENFAPLVNSLNLGIANPLLLGPSPLHFAQIKTQLALQQLNAVASHGSTPPYTLLNQAFLKIAMSRPRFNPRGDFPLQRPRAPNPSGMRPPGPFMRPGSMGLPRFYPAGRARGIPHRFAGHESYQNMGPQRMNVQVTQHRTDPRLTKEKLDFHEAQQKKGKPHGSRWDDEPHISASVAVKQSSVTQVTEQSPKVQSRYTKESASSILASFGLSNEDLEELSRYPDEQLTPENMPLILRDIRMRKMGRRLPNLPSQSRNKETLGSEAVSSNVIDYGHASKYGYTEDPLEVRIYDPEIPTDEVENEFQSQQNISASVPNPNVICNSMFPVEDVFRQMDFPGESSNNRSFFSVESGTKMSGLHISGGQSVLEPIKSVNQSINQTVSQTMSQSLIPPSMNQQPFSSELISSVSQQERIPHEPVINSSNVHVGSRGSKKNYQSQADIPIRSPFGIVKASWLPKFSHADAQKMKRLPTPSMMNDYYAASPRIFPHLCSLCNVECSHLKDWIQHQNTSTHIESCRQLRQQYPDWNPEILPSRRNEGNRKENETPRRRSHSPSPRRSRRSSSSHRFRRSRSPMHYMYRPRSRSPRICHRFISRYRSRSRSRSPYRIRNPFRGSPKCFRSVSPERMSRRSVRSSDRKKALEDVVQRSGHGTEFNKQKHLEAADKGHSPAQKPKTSSGTKPSVKPTSATKSDSNLGGHSIRCKSKNLEDDTLSECKQVSDKAVSLQRKLRKEQSLHYGSVLLITELPEDGCTEEDVRKLFQPFGKVNDVLIVPYRKEAYLEMEFKEAITAIMKYIETTPLTIKGKSVKICVPGKKKAQNKEVKKKTLESKKVSASTLKRDADASKAVEIVTSTSAESVDQTQQLVPLVRNTARDHDGTPENEGEETVQSALFGFQYDASDHTMAWLGPNTVPEVKEMILQDPQLQTTQLPQTTQAPDITWGMLKKTTYKAEQILLQTQKPFTPDNLFLALLSGDAKPEYEQ

SEQ ID NO: 70759 - protein, 438 aa, Homo sapiens
MQAEDRSQFGSAAEMLSEQTAALGTGWESMNVQLDGAEPQVERGSQEERPWRTVPGPLEHLCCDLEEEPQSLQEKAQSAPWVPAIPQEGNTGDWEMAAALLAAGSQGLVTIKDVSLCFSQEEWRSLDPSQTDFYGEYVMQENCGIVVSLRFPIPKLDMLSQLEGGEEQWVPDPQDLEERDILRVTYTGDGSEHEGDTPELEAEPPRMLSSVSEDTVLWNPEHDESWDSMPSSSRGMLLGPPFLQEDSFSNLLCSTEMDSLLRPHTCPQCGKQFVWGSHLARHQQTHTGERPYSCLKCEKTFGRRHHLIRHQKTHLHDKTSRCSECGKNFRCNSHLASHQRVHAEGKSCKGQEVGESPGTRKRQRAPPVPKCHVCTECGKSFGRRHHLVRHWLTHTGEKPFQCPRCEKSFGRKHHLDRHLLTHQGQSPRNSWDRGTSVF

SEQ ID NO: 70760 - protein, 415 aa, Homo sapiens
MLSEQTAALGTGWESMNVQLDGAEPQVERGSQEERPWRTVPGPLEHLCCDLEEEPQSLQEKAQSAPWVPAIPQEGNTGDWEMAAALLAAGSQVSSASLGVSCGPITAAFVLLSHQPIDELAHMIINGFPIPKLDMLSQLEGGEEQWVPDPQDLEERDILRVTYTGDGSEHEGDTPELEAEPPRMLSSVSEDTVLWNPEHDESWDSMPSSSRGMLLGPPFLQEDSFSNLLCSTEMDSLLRPHTCPQCGKQFVWGSHLARHQQTHTGERPYSCLKCEKTFGRRHHLIRHQKTHLHDKTSRCSECGKNFRCNSHLASHQRVHAEGKSCKGQEVGESPGTRKRQRAPPVPKCHVCTECGKSFGRRHHLVRHWLTHTGEKPFQCPRCEKSFGRKHHLDRHLLTHQGQSPRNSWDRGTSVF

SEQ ID NO: 70761 - protein, 438 aa, Homo sapiens; identical to SEQ ID NO: 70759

SEQ ID NO: 70762 - protein, 424 aa, Homo sapiens
MLSEQTAALGTGWESMNVQLDGAEPQVERGSQEERPWRTVPGPLEHLCCDLEEEPQSLQEKAQSAPWVPAIPQEGNTGDWEMAAALLAAGSQGLVTIKDVSLCFSQEEWRSLDPSQTDFYGEYVMQENCGIVVSLRFPIPKLDMLSQLEGGEEQWVPDPQDLEERDILRVTYTGDGSEHEGDTPELEAEPPRMLSSVSEDTVLWNPEHDESWDSMPSSSRGMLLGPPFLQEDSFSNLLCSTEMDSLLRPHTCPQCGKQFVWGSHLARHQQTHTGERPYSCLKCEKTFGRRHHLIRHQKTHLHDKTSRCSECGKNFRCNSHLASHQRVHAEGKSCKGQEVGESPGTRKRQRAPPVPKCHVCTECGKSFGRRHHLVRHWLTHTGEKPFQCPRCEKSFGRKHHLDRHLLTHQGQSPRNSWDRGTSVF

SEQ ID NO: 70763 - protein, 136 aa, Homo sapiens
MQAEDRSQFGSAAEMLSEQTAALGTGWESMNVQLDGAEPQVERGSQEERPWRTVPGPLEHLCCDLEEEPQSLQEKAQSAPWVPAIPQEGNTGDWEMAAALLAAGSQGLVTIKDVSLCFSQEEWRSLDPSQTDFYGE

SEQ ID NO: 70764 - protein, 107 aa, Homo sapiens
MLSEQTAALGTGWESMNVQLDGAEPQVERGSQEERPWRTVPGPLEHLCCDLEEEPQSLQEKAQSAPWVPAIPQEGNTGDWEMAAALLAAGSQGLVTIKDVSLCFSQE

SEQ ID NO: 70765 - protein, 77 aa, Homo sapiens
MLSEQTAALGTGWESMNVQLDGAEPQVERGSQEERPWRTVPGPLEHLCCDLEEEPQSLQEKAQSAPWVPAIPQEGNT

SEQ ID NO: 70766 - protein, 1327 aa, Homo sapiens
MRSFLQQDVNKTKSRLNVLNGLANNMDDLKINTDITGAKEELLDDNNFISDKESGVHKPKDCQTSFQKNNTLTLPEELSKDKSENALSGGQSSLFIHAGAPTVSSENFILPKGAAVNGPVSHSSLTKTSNMNKGSVSLTTGQPVDQPTTESCSTLKVAADLQLSTPQKASQHQVLFLLSDVAHAKNPTHSNKKLPTSASVGCDIQNSVGSNIKSDGTLINQVEVGEDGEDLLVKDDCVNTVTGISSGTDGFRSENDTNWDPQKEFIQFLMTNEETVDKAPPHSKIGLEKKRKRKMDVSKITRYTEDCFSDSNCVPNKSKMQEVDFLEQNEELQAVDSQKYALSKVKPESTDEDLESVDAFQHLIYNPDKCGEESSPVHTSTFLSNTLKKKCEESDSESPATFSTEEPSFYPCTKCNVNFREKKHLHRHMMYHLDGNSHFRHLNVPRPYACRECGRTFRDRNSLLKHMIIHQERRQKLMEEIRELKELQDEGRSARLQCPQCVFGTNCPKTFVQHAKTHEKDKRYYCCEECNFMAVTENELECHRGIAHGAVVKCPMVTSDIAQRKTQKKTFMKDSVVGSSKKSATYICKMCPFTTSAKSVLKKHTEYLHSSSCVDSFGSPLGLDKRKNDILEEPVDSDSTKTLTKQQSTTFPKNSALKQDVKRTFGSTSQSSSFSKIHKRPHRIQKARKSIAQSGVNMCNQNSSPHKNVTIKSSVDQKPKYFHQAAKEKSNAKANSHYLYRHKYENYRMIKKSGESYPVHFKKEEASSLNSLHLFSSSSNSHNNFISDPHKPDAKRPESFKDHRRVAVKRVIKESKKESSVGGEDLDSYPDFLHKMTVVVLQKLNSAEKKDSYETEDESSWDNVELGDYTTQAIEDETYSDINQEHVNLFPLFKSKVEGQEPGENATLSYDQNDGFYFEYYEDTGSNNFLHEIHDPQHLETADASLSKHSSVFHWTDLSLEKKSCPYCPATFETGVGLSNHVRGHLHRAGLSYEARHVVSPEQIATSDKMQHFKRTGTGTPVKRVRKAIEKSETTSEHTCQLCGGWFDTKIGLSNHVRGHLKRLGKTKWDAHKSPICVLNEMMQNEEKYEKILKALNSRRIIPRPFVAQKLASSDDFISQNVIPLEAYRNGLKTEALSVSASEEEGLNFLNEYDETKPELPSGKKNQSLTLIELLKNKRMGEERNSAISPQKIHNQTARKRFVQKCVLPLNEDSPLMYQPQKMDLTMHSALDCKQKKSRSRSGSKKKMLTLPHGADEVYILRCRFCGLVFRGPLSVQEDWIKHLQRHIVNANLPRTGAGMVEVTSLLKKPASITETSFSLLMAEAAS

SEQ ID NO: 70767 - protein, 105 aa, Homo sapiens
MLIRQNLALDCKQKKSRSRSGSKKKMLTLPHGADEVYILRCRFCGLVFRGPLSVQEDWIKHLQRHIVNANLPRTGAGMVEVTSLLKKPASITETSFSLLMAEAAS

SEQ ID NO: 70768 - protein, 105 aa, Homo sapiens; identical to SEQ ID NO: 70767

SEQ ID NO: 70769 - protein, 1327 aa, Homo sapiens; identical to SEQ ID NO: 70766

SEQ ID NO: 70770 - protein, 650 aa, Homo sapiens
MMYHLDGNSHFRHLNVPRPYACRECGRTFRDRNSLLKHMIIHQERRQKLMEEIRELKELQDEGRSARLQCPQCVFGTNCPKTFVQHAKTHEKDKRYYCCEECNFMAVTENELECHRGIAHGAVVKCPMVTSDIAQRKTQKKTFMKDSVVGSSKKSATYICKMCPFTTSAKSVLKKHTEYLHSSSCVDSFGSPLGLDKRKNDILEEPVDSDSTKTLTKQQSTTFPKNSALKQDVKRTFGSTSQSSSFSKIHKRPHRIQKARKSIAQSGVNMCNQNSSPHKNVTIKSSVDQKPKYFHQAAKEKSNAKANSHYLYRHKYENYRMIKKSGESYPVHFKKEEASSLNSLHLFSSSSNSHNNFISDPHKPDAKRPESFKDHRRVAVKRVIKESKKESSVGGEDLDSYPDFLHKMTVVVLQKLNSAEKKDSYETEDESSWDNVELGDYTTQAIEDETYSDINQEHVNLFPLFKSKVEGQEPGENATLSYDQNDGFYFEYYEDTGSNNFLHEIHDPQHLETADASLSKHSSVFHWTDLSLEKKSCPYCPATFETGVGLSNHVRGHLHRAGLSYEARHVVSPEQIATSDKMQHFKRTGTGTPVKRVRKAIEKSETTSEHTCQLCGGWFDTKIGLSNHVRGHLKRLGKTKWDAHKSPICV

SEQ ID NO: 70771 - protein, 307 aa, Homo sapiens
MRSFLQQDVNKTKSRLNVLNGLANNMDDLKINTDITGAKEELLDDNNFISDKESGVHKPKDCQTSFQKNNTLTLPEELSKDKSENALSGGQSSLFIHAGAPTVSSENFILPKGAAVNGPVSHSSLTKTSNMNKGSVSLTTGQPVDQPTTESCSTLKVAADLQLSTPQKASQHQVLFLLSDVAHAKNPTHSNKKLPTSASVGCDIQNSVGSNIKSDGTLINQVEVGEDGEDLLVKDDCVNTVTGISSGTDGFRSENDTNWDPQKEFIQFLMTNEETVDKAPPHSKIGLEKKKAKNGCKQDNSLYRGLL

SEQ ID NO: 70772 - protein, 505 aa, Homo sapiens
MTKAQESLTLEDVAVDFTWEEWQFLSPAQKDLYRDVMLENYSNLVSVGYQAGKPDALTKLEQGEPLWTLEDEIHSPAHPEIEKADDHLQQPLQNQKILKRTGQRYEHGRTLKSYLGLTNQSRRYNRKEPAEFNGDGAFLHDNHEQMPTEIEFPESRKPISTKSQFLKHQQTHNIEKAHECTDCGKAFLKKSQLTEHKRIHTGKKPHVCSLCGKAFYKKYRLTEHERAHRGEKPHGCSLCGKAFYKRYRLTEHERAHKGEKPYGCSECGKAFPRKSELTEHQRIHTGIKPHQCSECGRAFSRKSLLVVHQRTHTGEKPHTCSECGKGFIQKGNLNIHQRTHTGEKPYGCIDCGKAFSQKSCLVAHQRYHTGKTPFVCPECGQPCSQKSGLIRHQKIHSGEKPYKCSDCGKAFLTKTMLIVHHRTHTGERPYGCDECEKAYFYMSCLVKHKRIHSREKRGDSVKVENPSTASHSLSPSEHVQGKSPVNMVTVAMVAGQCEFAHILHS

SEQ ID NO: 70773 - protein, 610 aa, Homo sapiens
MPSARGKSKSKAPITFGDLAIYFSQEEWEWLSPIQKDLYEDVMLENYRNLVSLGLSFRRPNVITLLEKGKAPWMVEPVRRRRAPDSGSKCETKKLPPNQCNKSGQSICQKLVSAQQKAPTRKSGCNKNSVLVKPKKGHSGKKPLKCNDCGKTFSRSFSLKLHQNIHTGEKPFECSNCRKAFRQISSILLHQRIHSGKKSHECNKCGESFNQRTTLILHMRIHDGKEILDCGKALSQCQSFNIHQKIHVVGNVCQCRKCGKAFNQMSSLLLHKKIHNGKKTHKYNKCGRGFKKKSVFVVHKRIHAGEKIPENAKALSQSLQQRSHHLENPFKCRKCGKLFNRISPLMLHQRIHTSEKPYKCDKCDKFFRRLSTLILHLRIHNGEKLYRCNKCEKVCNRHSSLIQHQKVHTKKKKLFECKECGKMFSGTANLKIHQNIHSEEKPFKCNKCSKVFGRQSFLIEHQRIHTGEKPYQCEECGKAFSHRISLTRHKRIHTEDRPYECDQCGKAFSQSAHLAQHERIHTGEKPYTCKTCGKAFSQRTSLILHERSHTGEKPYECNECGKAFSSGSDLIRHQRSHSSEKPYECSKCGKAYSRSSSLIRHQNTHSEEKA

SEQ ID NO: 70774 - protein, 738 aa, Homo sapiens
MRTLVNALSGGGQEIKPEGKCAHNGMCFRCEEVAPDTCEAYPYPGLVVSVAGKEGPNPDHKRGFLDLAQEGIQALPYQLSAHLSVWTLKGEERMPSARGKSKSKAPITFGDLAIYFSQEEWEWLSPIQKDLYEDVMLENYRNLVSLGLSFRRPNVITLLEKGKAPWMVEPVRRRRAPELVTVALFSSFGEVMFSRMVLMLMDVCQYLVIDELDSGSKCETKKLPPNQCNKSGQSICQKLVSAQQKAPTRKSGCNKNSVLVKPKKGHSGKKPLKCNDCGKTFSRSFSLKLHQNIHTGEKPFECSNCRKAFRQISSILLHQRIHSGKKSHECNKCGESFNQRTTLILHMRIHDGKEILDCGKALSQCQSFNIHQKIHVVGNVCQCRKCGKAFNQMSSLLLHKKIHNGKKTHKYNKCGRGFKKKSVFVVHKRIHAGEKIPENAKALSQSLQQRSHHLENPFKCRKCGKLFNRISPLMLHQRIHTSEKPYKCDKCDKFFRRLSTLILHLRIHNGEKLYRCNKCEKVCNRHSSLIQHQKVHTKKKKLFECKECGKMFSGTANLKIHQNIHSEEKPFKCNKCSKVFGRQSFLIEHQRIHTGEKPYQCEECGKAFSHRISLTRHKRIHTEDRPYECDQCGKAFSQSAHLAQHERIHTGEKPYTCKTCGKAFSQRTSLILHERSHTGEKPYECNECGKAFSSGSDLIRHQRSHSSEKPYECSKCGKAYSRSSSLIRHQNTHSEEKA

SEQ ID NO: 70775 - protein, 324 aa, Homo sapiens
KNSVLVKPKKGHSGKKPLKCNDCGKTFSRSFSLKLHQNIHTGEKPFECSNCRKAFRQISSILLHQRIHSGKKSHECNKCGESFNQRTTLILHMRIHDGKNPFKCRKCGKLFNRISPLMLHQRIHTSEKPYKCEECGKMFSGTANLKIHQNIHSEEKPFKCNKCSKVFGRQSFLIEHQRIHTGEKPYQCEECGKAFSHRISLTRHKRIHTEDRPYECDQCGKAFSQSAHLAQHERIHTGEKPYTCKTCGKAFSQRTSLILHERSHTGEKPYECNECGKAFSSGSDLIRHQRSHSSEKPYECSKCGKAYSRSSSLIRHQNTHSEEK

SEQ ID NO: 70776 - protein, 392 aa, Homo sapiens [sequence omitted]

SEQ ID NO: 70777 - protein, 610 aa, Homo sapiens; identical to SEQ ID NO: 70773

SEQ ID NO: 70778 - protein, 575 aa, Homo sapiens
MAMSQESLTFKDVFVDFTLEEWQQLDSAQKNLYRDVMLENYSHLVSVGHLVGKPDVIFRLGPGDESWMADGGTPVRTCAVWEVDEQIDHYKESQDKFLWQAAFIGKETLKDESGQECKICRKIIYLNTDFVSVKQRLPKYYSWERCSKHHLNFLGQNRSYVRKKDDGCKAYWKVCLHYNLHKAQPAERFFDPNQRGKALHQKQALRKSQRSQTGEKLYKCTECGKVFIQKANLVVHQRTHTGEKPYECCECAKAFSQKSTLIAHQRTHTGEKPYECSECGKTFIQKSTLIKHQRTHTGEKPFVCDKCPKAFKSSYHLIRHEKTHIRQAFYKGIKCTTSSLIYQRIHTSEKPQCSEHGKASDEKPSPTKHWRTHTKENIYECSKCGKSFRGKSHLSVHQRIHTGEKPYECSICGKTFSGKSHLSVHHRTHTGEKPYECRRCGKAFGEKSTLIVHQRMHTGEKPYKCNECGKAFSEKSPLIKHQRIHTGERPYECTDCKKAFSRKSTLIKHQRIHTGEKPYKCSECGKAFSVKSTLIVHHRTHTGEKPYECRDCGKAFSGKSTLIKHQRSHTGDKNL

SEQ ID NO: 70779 - protein, 581 aa, Homo sapiens
MAMSQESLTFKDVFVDFTLEEWQQLDSAQKNLYRDVMLENYSHLVSVGHLVGKPDVIFRLGPGDESWMADGGTPVRTCAGEDRPEVWEVDEQIDHYKESQDKFLWQAAFIGKETLKDESGQECKICRKIIYLNTDFVSVKQRLPKYYSWERCSKHHLNFLGQNRSYVRKKDDGCKAYWKVCLHYNLHKAQPAERFFDPNQRGKALHQKQALRKSQRSQTGEKLYKCTECGKVFIQKANLVVHQRTHTGEKPYECCECAKAFSQKSTLIAHQRTHTGEKPYECSECGKTFIQKSTLIKHQRTHTGEKPFVCDKCPKAFKSSYHLIRHEKTHIRQAFYKGIKCTTSSLIYQRIHTSEKPQCSEHGKASDEKPSPTKHWRTHTKENIYECSKCGKSFRGKSHLSVHQRIHTGEKPYECSICGKTFSGKSHLSVHHRTHTGEKPYECRRCGKAFGEKSTLIVHQRMHTGEKPYKCNECGKAFSEKSPLIKHQRIHTGERPYECTDCKKAFSRKSTLIKHQRIHTGEKPYKCSECGKAFSVKSTLIVHHRTHTGEKPYECRDCGKAFSGKSTLIKHQRSHTGDKNL

SEQ ID NO: 70780 - protein, 1237 aa, Homo sapiens
MGDMKTPDFDDLLAAFDIPDIDANEAIHSGPEENEGPGGPGKPEPGVGSESEDTAAASAGDGPGVPAQASDHGLPPPDISVVSVIVKNTVCPEQSEALAGGSAGDGAQAAGVTKEGPVGPHRMQNGFGSPEPSLPGTPHSPAPPSGGTWKEKGMEGKTPLDLFAHFGPEPGDHSDPLPPSAPSPTREGALTPPPFPSSFELAQENGPGMQPPVSSPPLGALKQESCSPHHPQVLAQQGSGSSPKATDIPASASPPPVAGVPFFKQSPGHQSPLASPKVPVCQPLKEEDDDEGPVDKSSPGSPQSPSSGAEAADEDSNDSPASSSSRPLKVRIKTIKTSCGNITRTVTQVPSDPDPPAPLAEGAFLAEASLLKLSPATPTSEGPKVVSVQLGDGTRLKGTVLPVATIQNASTAMLMAASVARKAVVLPGGTATSPKMIAKNVLGLVPQALPKADGRAGLGTGGQKVNGASVVMVQPSKTATGPSTGGGTVISRTQSSLVEAFNKILNSKNLLPAYRPNLSPPAEAGLALPPTGYRCLECGDAFSLEKSLARHYDRRSMRIEVTCNHCARRLVFFNKCSLLLHAREHKDKGLVMQCSHLVMRPVALDQMVGQPDITPLLPVAVPPVSGPLALPALGKGEGAITSSAITTVAAEAPVLPLSTEPPAAPATSAYTCFRCLECKEQCRDKAGMAAHFQQLGPPAPGATSNVCPTCPMMLPNRCSFSAHQRMHKNRPPHVCPECGGNFLQANFQTHLREACLHVSRRVGYRCPSCSVVFGGVNSIKSHIQTSHCEVFHKCPICPMAFKSGPSAHAHLYSQHPSFQTQQAKLIYKCAMCDTVFTHKPLLSSHFDQHLLPQRVSVFKCPSCPLLFAQKRTMLEHLKNTHQSGRLEETAGKGAGGALLTPKTEPEELAVSQGGAAPATEESSSSSEEEEVPSSPEPPRPAKRPRRELGSKGLKGGGGGPGGWTCGLCHSWFPERDEYVAHMKKEHGKSVKKFPCRLCERSFCSAPSLRRHVRVNHEGIKRVYPCRYCTEGKRTFSSRLILEKHVQVRHGLQLGAQSPGRGTTLARGSSARAQGPGRKRRQSSDSCSEEPDSTTPPAKSPRGGPGSGGHGPLRYRSSSSTEQSLMMGLRVEDGAQQCLDCGLCFASPGSLSRHRFISHKKRRGVGKASALGLGDGEEEAPPSRSDPDGGDSPLPASGGPLTCKVCGKSCDSPLNLKTHFRTHGMAFIRARQGAVGDN

SEQ ID NO: 70781 - protein, 1237 aa, Homo sapiens; identical to SEQ ID NO: 70780

SEQ ID NO: 70782 - protein, 1103 aa, Homo sapiens
MGDMKTPDFDDLLAAFDIPDIDANEAIHSGPEENEGPGGPGKPEPGVGSESEDTAAASAGDGPGVPAQASDHGLPPPDISVVSVIVKNTVCPEQSEALAGGSAGDGAQAAGVTKEGPVGPHRMQNGFGSPEPSLPGTPHSPAPPSGGTWKEKGMEGKTPLDLFAHFGPEPGDHSDPLPPSAPSPTREGALTPPPFPSSFELAQENGPGMQPPVSSPPLGALKQESCSPHHPQVLAQQGSGSSPKATDIPASASPPPVAGVPFFKQSPGHQSPLASPKVPVCQPLKEEDDDEGPVDKSSPGSPQSPSSGAEAADEDSNDSPASSSSRPLKVRIKTIKTSCGNITRTVTQVPSDPDPPAPLAEGAFLAEASLLKLSPATPTSEGPKVVSVQLGDGTRLKGTVLPVATIQNASTAMLMAASVARKAVVLPGGTATSPKMIAKNVLGLVPQALPKADGRAGLGTGGQKVNGASVVMVQPSKTATGPSTGGGTVISRTQSSLVEAFNKILNSKNLLPAYRPNLSPPAEAGLALPPTGYRCLECGDAFSLEKSLARHYDRRSMRIEVTCNHCARRLVFFNKCSLLLHAREHKDKGLVMQCSHLVMRPVALDQMVGQPDITPLLPVAVPPVSGPLALPALGKGEGAITSSAITTVAAEAPVLPLSTEPPAAPATSAYTCFRCLECKEQCRDKAGMAAHFQQLGPPAPGATSNVCPTCPMMLPNRCSFSAHQRMHKNRPPHVCPECGGNFLQANFQTHLREACLHVSRRVGYRCPSCSVVFGGVNSIKSHIQTSHCEVFHKCPICPMAFKSGPSAHAHLYSQHPSFQTQQAKLIYKCAMCDTVFTHKPLLSSHFDQHLLPQRVSVFKCPSCPLLFAQKRTMLEHLKNTHQSGRLEETAGKGAGGALLTPKTEPEELAVSQGGAAPATEESSSSSEEEEVPSSPEPPRPAKRPRRELGSKGLKGGGGGPGGWTCGLCHSWFPERDEYVAHMKKEHGKSVKKFPCRLCERSFCSAPSLRRHVRVNHEGIKRVYPCRSKGPGLRAVPLLPSCPLPFQVLHRGKTHLQQPPDPRETCPGPARLAAWGPVPWPGDHLGSGFQCQSPGARSETPPVF

SEQ ID NO: 70783 - protein, 706 aa, Homo sapiens
  VARIANT 1: note = MOD_RES - Any amino acid
XTVLPVATIQNASTAMLMAASVARKAVVLPGGTATSPKMIAKNVLGLVPQALPKADGRAGLGTGGQKVNGASVVMVQPSKTATGPSTGGGTVISRTQSSLVEAFNKILNSKNLLPAYRPNLSPPAEAGLALPPTGYRCLECGDAFSLEKSLARHYDRRSMRIEVTCNHCARRLVFFNKCSLLLHAREHKDKGLVMQCSHLVMRPVALDQMVGQPDITPLLPVAVPPVSGPLALPALGKGEGAITSSAITTVAAEAPVLPLSTEPPAAPATSAYTCFRCLECKEQCRDKAGMAAHFQQLGPPAPGATSNVCPTCPMMLPNRCSFSAHQRMHKNRPPHVCPECGGNFLQANFQTHLREACLHVSRRVGYRCPSCSVVFGGVNSIKSHIQTSHCEVFHKCPICPMAFKSGPSAHAHLYSQHPSFQTQQAKLIYKCAMCDTVFTHKPLLSSHFDQHLLPQRVSVFKCPSCPLLFAQKRTMLEHLKNTHQSGRLEETAGKGAGGALLTPKTEPEELAVSQGGAAPATEESSSSSEEEEVPSSPEPPRPAKRPRRELGSKGLKGGGGGPGGWTCGLCHSWFPERDEYVAHMKKEHGKSVKKFPCRLCERSFCSAPSLRRHVRVNHEGIKRVYPCRSKGPGLRAVPLLPSCPLPFQVLHRGKTHLQQPPDPRETCPGPARLAAWGPVPWPGDHLGSGFQCQSPGARSETPPVF

SEQ ID NO: 70784 - protein, 149 aa, Homo sapiens
MPCCSHRRCREDPGTSESQEMEEWALLDISQRKLYKEVMLETFRNLTSVGKSWKDQNIEYEYQNPRRNFRSLIEKKVNEIKDDSHCGETFTQVPDDRLNFQEKKASPEIKSCDSFVCGEVGLGNSSFNMNIRGDIGHKAYEYQEYGPKP

SEQ ID NO: 70785 - protein, 566 aa, Homo sapiens
MPCCSHRRCREDPGTSESQEMDPVAFDDVAVNFTQEEWALLDISQRKLYKEVMLETFRNLTSVGKSWKDQNIEYEYQNPRRNFRSLIEKKVNEIKDDSHCGETFTQVPDDRLNFQEKKASPEIKSCDSFVCGEVGLGNSSFNMNIRGDIGHKAYEYQEYGPKPCKCQQPKKAFRYHPSFRTPQRDHTGEKPYACKECGKTFISHSSIQRHVVMHSGDGPYKCKFCGKAFHCLSLYLIHERIHTGEKPYECKQCGKSFSYSATLRIHERTHTGEKPYECQQCGKAFHSPRCYRRHERIHTGEKAYQCKECGKAFTCPQYVRIHERTHSRKKPYECTQCGKALSSLTSFQTHIRMHSGERPYECKICGKGFCSANSFQRHEKTHSGEKPYKCKQCGKAFIHSSSLRYHERIHTGEKPYECKQCGKAFRSSSHLQLHGRTHTGEKPYECQECGKAFRSMKNLQSHERTQTHVRIHSGERPYKCKLCGKGFYCPKSLQRHEKTHTGEKLYECKQCGEAFSSSSSFRYHERTHTGEKPYKCKQCGKAFRAASVLRMHGRTHPEDKPYECKQ

SEQ ID NO: 70786 - protein, 686 aa, Homo sapiens
MEVVTFGDVAVHFSREEWQCLDPGQRALYREVMLENHSSVAGLAGFLVFKPELISRLEQGEEPWVLDLQGAEGTEAPRTSKTDSTIRTENEQACEDMDILKSESYGTVVRISPQDFPQNPGFGDVSDSEVWLDSHLGSPGLKVTGFTFQNNCLNEETVVPKTFTKDAPQGCKELGSSGLDCQPLESQGESAEGMSQRCEECGKGIRATSDIALHWEINTQKISRCQECQKKLSDCLQGKHTNNCHGEKPYECAECGKVFRLCSQLNQHQRIHTGEKPFKCTECGKAFRLSSKLIQHQRIHTGEKPYRCEECGKAFGQSSSLIHHQRIHTGERPYGCRECGKAFSQQSQLVRHQRTHTGERPYPCKECGKAFSQSSTLAQHQRMHTGEKAQILKASDSPSLVAHQRIHAVEKPFKCDECGKAFRWISRLSQHQLIHTGEKPYKCNKCTKAFGCSSRLIRHQRTHTGEKPFKCDECGKGFVQGSHLIQHQRIHTGEKPYVCNDCGKAFSQSSSLIYHQRIHKGEKPYECLQCGKAFSMSTQLTIHQRVHTGERPYKCNECGKAFSQNSTLFQHQIIHAGVKPYECSECGKAFSRSSYLIEHQRIHTRAQWFYEYGNALEGSTFVSRKKVNTIKKLHQCEDCEKIFRWRSHLIIHQRIHTGEKPYKCNDCGKAFNRSSRLTQHQKIHMG

SEQ ID NO: 70787 - protein, 697 aa, Homo sapiens
MGFLGCWCVSFQEVVTFGDVAVHFSREEWQCLDPGQRALYREVMLENHSSVAGLAGFLVFKPELISRLEQGEEPWVLDLQGAEGTEAPRTSKTDSTIRTENEQACEDMDILKSESYGTVVRISPQDFPQNPGFGDVSDSEVWLDSHLGSPGLKVTGFTFQNNCLNEETVVPKTFTKDAPQGCKELGSSGLDCQPLESQGESAEGMSQRCEECGKGIRATSDIALHWEINTQKISRCQECQKKLSDCLQGKHTNNCHGEKPYECAECGKVFRLCSQLNQHQRIHTGEKPFKCTECGKAFRLSSKLIQHQRIHTGEKPYRCEECGKAFGQSSSLIHHQRIHTGERPYGCRECGKAFSQQSQLVRHQRTHTGERPYPCKECGKAFSQSSTLAQHQRMHTGEKAQILKASDSPSLVAHQRIHAVEKPFKCDECGKAFRWISRLSQHQLIHTGEKPYKCNKCTKAFGCSSRLIRHQRTHTGEKPFKCDECGKGFVQGSHLIQHQRIHTGEKPYVCNDCGKAFSQSSSLIYHQRIHKGEKPYECLQCGKAFSMSTQLTIHQRVHTGERPYKCNECGKAFSQNSTLFQHQIIHAGVKPYECSECGKAFSRSSYLIEHQRIHTRAQWFYEYGNALEGSTFVSRKKVNTIKKLHQCEDCEKIFRWRSHLIIHQRIHTGEKPYKCNDCGKAFNRSSRLTQHQKIHMG

SEQ ID NO: 70788 - protein, 148 aa, Homo sapiens
MEVVTFGDVAVHFSREEWQCLDPGQRALYREVMLENHSSVAGLAGFLVFKPELISRLEQGEEPWVLDLQGAEGTEAPRTSKTGFLGRPTMGQEPRHPHAPPATPVPGLPKHCSQRLTLPPPGLSSSPLGHFLVHDQDRRRGTSAIWMV

SEQ ID NO: 70789 - protein, 686 aa, Homo sapiens; identical to SEQ ID NO: 70786

SEQ ID NO: 70790 - protein, 590 aa, Homo sapiens
MDILKSESYGTVVRISPQDFPQNPGFGDVSDSEVWLDSHLGSPGLKVTGFTFQNNCLNEETVVPKTFTKDAPQGCKELGSSGLDCQPLESQGESAEGMSQRCEECGKGIRATSDIALHWEINTQKISRCQECQKKLSDCLQGKHTNNCHGEKPYECAECGKVFRLCSQLNQHQRIHTGEKPFKCTECGKAFRLSSKLIQHQRIHTGEKPYRCEECGKAFGQSSSLIHHQRIHTGERPYGCRECGKAFSQQSQLVRHQRTHTGERPYPCKECGKAFSQSSTLAQHQRMHTGEKAQILKASDSPSLVAHQRIHAVEKPFKCDECGKAFRWISRLSQHQLIHTGEKPYKCNKCTKAFGCSSRLIRHQRTHTGEKPFKCDECGKGFVQGSHLIQHQRIHTGEKPYVCNDCGKAFSQSSSLIYHQRIHKGEKPYECLQCGKAFSMSTQLTIHQRVHTGERPYKCNECGKAFSQNSTLFQHQIIHAGVKPYECSECGKAFSRSSYLIEHQRIHTRAQWFYEYGNALEGSTFVSRKKVNTIKKLHQCEDCEKIFRWRSHLIIHQRIHTGEKPYKCNDCGKAFNRSSRLTQHQKIHMG

SEQ ID NO: 70791 - protein, 489 aa, Homo sapiens
MKELDPKNDISEDKLSVVGEATGGPTRNGARGPGSEGVWEPGSWPERPRGDAGAEWEPLGIPQGNKLLGGSVPACHELKAFANQGCVLVPPRLDDPTEKGACPPVRRGKNFSSTSDLSKPPMPCEEKKTYDCSECGKAFSRSSSLIKHQRIHTGEKPFECDTCGKHFIERSSLTIHQRVHTGEKPYACGDCGKAFSQRMNLTVHQRTHTGEKPYVCDVCGKAFRKTSSLTQHERIHTGEKPYACGDCGKAFSQNMHLIVHQRTHTGEKPYVCPECGRAFSQNMHLTEHQRTHTGEKPYACKECGKAFNKSSSLTLHQRNHTGEKPYVCGECGKAFSQSSYLIQHQRFHIGVKPFECSECGKAFSKNSSLTQHQRIHTGEKPYECYICKKHFTGRSSLIVHQIVHTGEKPYVCGECGKAFSQSAYLIEHQRIHTGEKPYRCGQCGKSFIKNSSLTVHQRIHTGEKPYRCGECGKTFSRNTNLTRHLRIHT

SEQ ID NO: 70792 - protein, 761 aa, Homo sapiens
MDSGGGSLGLHTPDSRMAHTMIMQDFVAGMAGTAHIDGDHIVVSVPEAVLVSDVVTDDGITLDHGLAAEVVHGPDIITETDVVTEGVIVPEAVLEADVAIEEDLEEDDGDHILTSELITETVRVPEQVFVADLVTGPNGHLEHVVQDCVSGVDSPTMVSEEVLVTNSDTETVIQAAGGVPGSTVTIKTEDDDDDDVKSTSEDYLMISLDDVGEKLEHMGNTPLKIGSDGSQEDAKEDGFGSEVIKVYIFKAEAEDDVEIGGTEIVTESEYTSGHSVAGVLDQSRMQREKMVYMAVKDSSQEEDDIRDERRVSRRYEDCQASGNTLDSALESRSSTAAQYLQICDGINTNKVLKQKAKKRRRGETRQWQTAVIIGPDGQPLTVYPCHICTKKFKSRGFLKRHMKNHPDHLMRKKYQCTDCDFTTNKKVSFHNHLESHKLINKVDKTHEFTEYTRRYREASPLSSNKLILRDKEPKMHKCKYCDYETAEQGLLNRHLLAVHSKNFPHVCVECGKGFRHPSELKKHMRTHTGEKPYQCQYCIFRCADQSNLKTHIKSKHGNNLPYKCEHCPQAFGDERELQRHLDLFQGHKTHQCPHCDHKSTNSSDLKRHIISVHTKDFPHKCEVCDKGFHRPSELKKHSDIHKGRKIHQCRHCDFKTSDPFILSGHILSVHTKDQPLKCKRCKRGFRQQNELKKHMKTHTGRKIYQCEYCEYSTTDASGFKRHVISIHTKDYPHRCEFCKKGFRRPSEKNQHIMRHHKEALM

SEQ ID NO: 70793 - protein, 761 aa, Homo sapiens; identical to SEQ ID NO: 70792

SEQ ID NO: 70794 - protein, 769 aa, Homo sapiens
MQDFVAGMAGTAHIDGDHIVVSVPEAVLVSDVVTDDGITLDHGLAAEVVHGPDIITETDVVTEGVIVPEAVLEADVAIEEDLEEDDGDHILTSELITETVRVPEQVFVADLVTGPNGHLEHVVQDCVSGVDSPTMVSEEVLVTNSDTETVIQAAGGVPGSTVTIKTEDDDDDDVKSTSEDYLMISLDDVGEKLEHMGNTPLKIGSDGSQEDAKEDGFGSEVIKVYIFKAEAEDDVEIGGTEIVTESEYTSGHSVAGVLDQSRMQREKMVYMAVKDSSQEEDDISCAEIADEVYMEVIVGEEEGTSLPEIQLEDSDVNKTVVPVVWAAAYGNTLDSALESRSSTAAQYLQICDGINTNKVLKQKAKKRRRGETRQWQTAVIIGPDGQPLTVYPCHICTKKFKSRGFLKRHMKNHPDHLMRKKYQCTDCDFTTNKKVSFHNHLESHKLINKVDKTHEFTEYTRRYREASPLSSNKLILRDKEPKMHKCKYCDYETAEQGLLNRHLLAVHSKNFPHVCVECGKGFRHPSELKKHMRTHTGEKPYQCQYCIFRCADQSNLKTHIKSKHGNNLPYKCEHCPQAFGDERELQRHLDLFQGHKTHQCPHCDHKSTNSSDLKRHIISVHTKDFPHKCEVCDKGFHRPSELKKHSDIHKGRKIHQCRHCDFKTSDPFILSGHILSVHTKDQPLKCKRCKRGFRQQNELKKHMKTHTGRKIYQCEYCEYSTTDASGFKRHVISIHTKDYPHRCEFCKKGFRRPSEKNQHIMRHHKEALM

SEQ ID NO: 70795 - protein, 603 aa, Homo sapiens
MISLDDVGEKLEHMGNTPLKIGSDGSQEDAKEDGFGSEVIKVYIFKAEAEDDVEIGGTEIVTESEYTSGHSVAGVLDQSRMQREKMVYMAVKDSSQEEDDISCAEIADEVYMEVIVGEEEGTSLPEIQLEDSDVNKTVVPVVWAAAYGDERRVSRRYEDCQASGNTLDSALESRSSTAAQYLQICDGINTNKVLKQKAKKRRRGETRQWQTAVIIGPDGQPLTVYPCHICTKKFKSRGFLKRHMKNHPDHLMRKKYQCTDCDFTTNKKVSFHNHLESHKLINKVDKTHEFTEYTRRYREASPLSSNKLILRDKEPKMHKCKYCDYETAEQGLLNRHLLAVHSKNFPHVCVECGKGFRHPSELKKHMRTHTGEKPYQCQYCIFRCADQSNLKTHIKSKHGNNLPYKCEHCPQAFGDERELQRHLDLFQGHKTHQCPHCDHKSTNSSDLKRHIISVHTKDFPHKCEVCDKGFHRPSELKKHSDIHKGRKIHQCRHCDFKTSDPFILSGHILSVHTKDQPLKCKRCKRGFRQQNELKKHMKTHTGRKIYQCEYCEYSTTDASGFKRHVISIHTKDYPHRCEFCKKGFRRPSEKNQHIMRHHKEALM

SEQ ID NO: 70796 - protein, 536 aa, Homo sapiens
MGPLQFRDVAIEFSLEEWHCLDTAQRNLYRNVMLENYRNLVFLGIVVSKPDLITCLEQGKKPLTMKKHEMVANPSVTCSHFARDLWPEQSIKDSFQKVTLRRYENYGHDNLQFKKGCESVDECKVHKRGYNGLNQYLTTTQSKIFQCDKYVKVIHKFSNSNRHKIRHTGKKPFKCIECGKAFNQSSTLTTHKKIHTGEKPFKCEECGKAFNWSSHLTTHKRIHTGEKRYKCEDCGKAFSRFSYLTAHKIIHSGEKPYKCEECGKAFKRSSNLTTHKIIHTGEKPYKCEECGKAFKRSSILTAHKIIHSGEKPYKCEECGKAFKHPSVLTTHKRIHTGEKPYKCEECGRAFKYFSSLTTHKIIHSGEKPYKCEECGKAFNWSSHLTTHKRIHTGEKPYKCEECGEAFKYSSSLTTHKIIHTGQQPFKCEECGKAFKCFSILTTHKRIHTGEKPYKCEECGKAFNSSSHLTAHKRIHTGEKPYKCERCGKAFKRSFILTRHKRIHTGEKPYKCEECGKGFKCPSTLTTHKVIHTGEKL

SEQ ID NO: 70797 - protein, 644 aa, Homo sapiens
MEIPAPEPEKTALSSQDPALSLKENLEDISGWGLPEARSKESVSFKDVAVDFTQEEWGQLDSPQRALYRDVMLENYQNLLALGPPLHKPDVISHLERGEEPWSMQREVPRGPCPEWELKAVPSQQQGICKEEPAQEPIMERPLGGAQAWGRQAGALQRSQAAPWAPAPAMVWDVPVEEFPLRCPLFAQQRVPEGGPLLDTRKNVQATEGRTKAPARLCAGENASTPSEPEKFPQVRRQRGAGAGEGEFVCGECGKAFRQSSSLTLHRRWHSREKAYKCDECGKAFTWSTNLLEHRRIHTGEKPFFCGECGKAFSCHSSLNVHQRIHTGERPYKCSACEKAFSCSSLLSMHLRVHTGEKPYRCGECGKAFNQRTHLTRHHRIHTGEKPYQCGSCGKAFTCHSSLTVHEKIHSGDKPFKCSDCEKAFNSRSRLTLHQRTHTGEKPFKCADCGKGFSCHAYLLVHRRIHSGEKPFKCNECGKAFSSHAYLIVHRRIHTGEKPFDCSQCWKAFSCHSSLIVHQRIHTGEKPYKCSECGRAFSQNHCLIKHQKIHSGEKSFKCEKCGEMFNWSSHLTEHQRLHSEGKPLAIQFNKHLLSTYYVPGSLLGAGDAGLRDVDPIDALDVAKLLCVVPPRAGRNFSLGSKPRN

SEQ ID NO: 70798 - protein, 644 aa, Homo sapiens; identical to SEQ ID NO: 70797

SEQ ID NO: 70799 - protein, 612 aa, Homo sapiens
MEIPAPEPEKTALSSQDPALSLKENLEDISGWGLPEARSKESVSFKDVAVDFTQEEWGQLDSPQRALYRDVMLENYQNLLALEWELKAVPSQQQGICKEEPAQEPIMERPLGGAQAWGRQAGALQRSQAAPWAPAPAMVWDVPVEEFPLRCPLFAQQRVPEGGPLLDTRKNVQATEGRTKAPARLCAGENASTPSEPEKFPQVRRQRGAGAGEGEFVCGECGKAFRQSSSLTLHRRWHSREKAYKCDECGKAFTWSTNLLEHRRIHTGEKPFFCGECGKAFSCHSSLNVHQRIHTGERPYKCSACEKAFSCSSLLSMHLRVHTGEKPYRCGECGKAFNQRTHLTRHHRIHTGEKPYQCGSCGKAFTCHSSLTVHEKIHSGDKPFKCSDCEKAFNSRSRLTLHQRTHTGEKPFKCADCGKGFSCHAYLLVHRRIHSGEKPFKCNECGKAFSSHAYLIVHRRIHTGEKPFDCSQCWKAFSCHSSLIVHQRIHTGEKPYKCSECGRAFSQNHCLIKHQKIHSGEKSFKCEKCGEMFNWSSHLTEHQRLHSEGKPLAIQFNKHLLSTYYVPGSLLGAGDAGLRDVDPIDALDVAKLLCVVPPRAGRNFSLGSKPRN

SEQ ID NO: 70800 - protein, 69 aa, Homo sapiens
MEIPAPEPEKTALSSQDPALSLKENLEDISGWGLPEARSKSLALVTQAGVQWRNLGSLQPPPLGFKQFS

SEQ ID NO: 70801 - protein, 644 aa, Homo sapiens
MAEAVAAPISPWTMAATIQAMERKIESQAARLLSLEGRTGMAEKKLADCEKTAVEFGNQLEGKWAVLGTLLQEYGLLQRRLENVENLLRNRNFWILRLPPGSKGESPKEWGKLEDWQKELYKHVMRGNYETLVSLDYAISKPEVLSQIEQGKEPCNWRRPGPKIPDVPVDPSPGSGPPVPAPDLLMQIKQEGELQLQEQQALGVEAWAAGQPDIGEEPWGLSQLDSGAGDISTDATSGVHSNFSTTIPPTSWQTDLPPHHPSSACSDGTLKLNTAASTEDVKIVIKTEVQEEEVVATPVHPTDLEAHGTLFGPGQATRFFPSPAQEGAWESQGSSFPSQDPVLGLREPARPERDMGELSPAVAQEETPPGDWLFGGVRWGWNFRCKPPVGLNPRTGPEGLPYSSPDNGEAILDPSQAPRPFNEPCKYPGRTKGFGHKPGLKKHPAAPPGGRPFTCATCGKSFQLQVSLSAHQRSCGAPDGSGPGTGGGGSGSGGGGGGSGGGSARDGSALRCGECGRCFTRPAHLIRHRMLHTGERPFPCTECEKRFTERSKLIDHYRTHTGVRPFTCTVCGKSFIRKDHLRKHQRNHAAGAKTPARGQPLPTPPAPPDPFKSPASKGPLASTDLVTDWTCGLSVLGPTDGGDM

SEQ ID NO: 70802 - protein, 645 aa, Homo sapiens
MAEAVAAPISPWTMAATIQAMERKIESQAARLLSLEGRTGMAEKKLADCEKTAVEFGNQLEGKWAVLGTLLQEYGLLQRRLENVENLLRNRNFWILRLPPGSKGESPKEWGKLEDWQKELYKHVMRGNYETLVSLDYAISKPEVLSQIEQGKEPCNWRRPGPKIPDVPVDPSPGSGPPVPAPDLLMQIKQEGELQLQEQQALGVEAWAAGQPDIGEEPWGLSQLDSGAGDISTDATSGVHSNFSTTIPPTSWQTDLPPHHPSSACSDGTLKLNTAASTEADVKIVIKTEVQEEEVVATPVHPTDLEAHGTLFGPGQATRFFPSPAQEGAWESQGSSFPSQDPVLGLREPARPERDMGELSPAVAQEETPPGDWLFGGVRWGWNFRCKPPVGLNPRTGPEGLPYSSPDNGEAILDPSQAPRPFNEPCKYPGRTKGFGHKPGLKKHPAAPPGGRPFTCATCGKSFQLQVSLSAHQRSCGAPDGSGPGTGGGGSGSGGGGGGSGGGSARDGSALRCGECGRCFTRPAHLIRHRMLHTGERPFPCTECEKRFTERSKLIDHYRTHTGVRPFTCTVCGKSFIRKDHLRKHQRNHAAGAKTPARGQPLPTPPAPPDPFKSPASKGPLASTDLVTDWTCGLSVLGPTDGGDM

SEQ ID NO: 70803 - protein, 723 aa, Homo sapiens
MSLLKERKPKKPHYIPRPPGKPFKYKCFQCPFTCNEKSHLFNHMKYGLCKNSITLVSEQDRVPKCPKSNSLDPKQTNQPDATAKPASSKSVANGLSAFDSKLQHSSAREDIKENLELQARGTHRCLGQKPALHRASPCKSPAPEAALGAQPALEGAARPSAFVPVGEHRLKGPDNAEAPETLALHNPTAKAVSFHTKSAFHTPGYPWKAGSPFLPPEFPHKISSTKGLGAISPYMHPTIPEYPPHFYTEHGLATIYSPYLLAGSSPECDAPLLSVYGTQDPRHFLPHPGPIPKHLAPSPATYDHYRFFQQYPSNLPIPYGFYRPESAFSSYGLRLPPVTGLTRDQSSHLLEEATLVYPASSPSRLNPSDPNRKHVEFESPIPEAKDSSKAGQRDTEGSKMSPRAGSAATGSPGRPSPTDFMQTSQTCEGLYDLSNKAASSALGRLYPPEQSLTAFRPVKKSTECLPAQAAETTAESPVSLNVVNGDPPAPTGSASLVSEAAPSSPDDSSGMGPLNLSKKSEINLAATHEPTYQGSPQAETASFSELQDLPLNLSVKDPCNTQAPRPAFPGRPRAAEPAAAVPQKTGTEGSEDGPSHPETKPGSLDGDGAPPTGPGEEAPDACAVDSSEEQKQTAAVALCQLAAYSPRNIRVGDGDAAAPEPACRQDTPTLSSMESQEAQCDLRPKGQKRTSLRDAGKSQQGAKKAKLQDTARVFTLRRRARVS

SEQ ID NO: 70804 - protein, 316 aa, Homo sapiens
MSPRAGSAATGSPGRPSPTDFMQTSQTCEGLYDLSNKAASSALGRLYPPEQSLTAFRPVKKSTECLPAQAAETTAESPVSLNVVNGDPPAPTGSASLVSEAAPSSPDDSSGKSEINLAATHEPTYQGSPQAETASFSELQDLPLNLSVKDPCNTQAPRPAFPGRPRAAEPAAAVPQKTGTEGSEDGPSHPETKPGSLDGDGAPPTGPGEEAPDACAVDSSEEQKQTAAVALCQLAAYSPRNIRVGDGDAAAPEPACRQDTPTLSSMESQEAQCDLRPKGQKRTSLRDAGKSQQGAKKAKLQDTARVFTLRRRARVS

SEQ ID NO: 70805 - protein, 296 aa, Homo sapiens
MYFSQEEWELLDPTQKALYNDVMQENYETVISLALFVLPKPKVISCLEQGEEPWVQVSPEFKDSAGKSPTGLKLKNDTENHQPVSLSDLEIQASAGVISKKAKVKVPQKTAGKENHFDMHRVGKWHQDFPVKKRKKLSTWKQELLKLMDRHKKDCAREKPFKCQECGKTFRVSSDLIKHQRIHTEEKPYKCQQCDKRFRWSSDLNKHLTTHQGIKPYKCSWCGKSFSQNTNLHTHQRTHTGEKPFTCHECGKKFSQNSHLIKHRRTHTGEQPYTCSICRRNFSRRSSLLRHQKLHL

SEQ ID NO: 70806 - protein, 296 aa, Homo sapiens; identical to SEQ ID NO: 70805

SEQ ID NO: 70807 - protein, 415 aa, Homo sapiens
MAMRELNADSCSSPQMGAMWETSGSVKENSSQSKKYSTKIENLGPESACRHFWSFRYHEATGPLETISQLQKLCHQWLRPEIHSKEQILEMLVLEQFLSILPKETQNWVQKHHPQNVKQALVLVEFLQREPDGTKNESLLTFEDVAVYFSEEEWQLLNPLEKTLYNDVMQDIYETVISLGLKLKNDTGNDHPISVSTSEIQTSGCEVSKKTRMKIAQKTMGRENPGDTHSVQKWHRAFPRKKRKKPATCKQELPKLMDLHGKGPTGEKPFKCQECGKSFRVSSDLIKHHRIHTGEKPYKCQQCDRRFRWSSDLNKHFMTHQGIKPYRCSWCGKSFSHNTNLHTHQRIHTGEKPFKCDECGKRFIQNSHLIKHQRTHTGEQPYTCSLCKRNFSRRSSLLRHQKLHRRREACLVSPN

SEQ ID NO: 70808 - protein, 510 aa, Homo sapiens
MAMRELNADSCSSPQMGAMWETSGSVKENSSQSKKYSTKIENLGPESACRHFWSFRYHEATGPLETISQLQKLCHQWLRPEIHSKEQILEMLVLEQFLSILPKETQNWVQKHHPQNVKQALVLVEFLQREPDGTKNEVTAHELGKEAVLLGGTAVAPGFKWKPAEPQPMGVFQKEYWNTYRVLQEQLGWNTHKETQPVYERAVHDQQMLALSEQKRIKHWKMASKLILPESLSLLTFEDVAVYFSEEEWQLLNPLEKTLYNDVMQDIYETVISLGLKLKNDTGNDHPISVSTSEIQTSGCEVSKKTRMKIAQKTMGRENPGDTHSVQKWHRAFPRKKRKKPATCKQELPKLMDLHGKGPTGEKPFKCQECGKSFRVSSDLIKHHRIHTGEKPYKCQQCDRRFRWSSDLNKHFMTHQGIKPYRCSWCGKSFSHNTNLHTHQRIHTGEKPFKCDECGKRFIQNSHLIKHQRTHTGEQPYTCSLCKRNFSRRSSLLRHQKLHRRREACLVSPN

SEQ ID NO: 70809 - protein, 515 aa, Homo sapiens
MESLGLHTVTLSDGTTAYVQQAVKGEKLLEGQVIQLEDGTTAYIHQVTVQKEALSFEDGQPVQLEDGSMAYIHRTPREGYDPSTLEAVQLEDGSTAYIHHPVAVPSESTILAVQTEVGLEDLAAEDDEGFSADAVVALEQYASKVLHDSQIPRNGKGQQVGDRAFRCGYKGCGRLYTTAHHLKVHERAHTGDRPYRCDFPSCGKAFATGYGLKSHVRTHTGEKPYKCPEELCSKAFKTSGDLQKHVRTHTGERPFQCPFEGCGRSFTTSNIRKVHVRTHTGERPYTCPEPHCGRGFTSATNYKNHVRIHTGEKPYVCTVPGCGKRFTEYSSLYKHHVVHTHCKPYTCSTCGKTYRQTSTLAMHKRSAHGELEATEESEQALYEQQQLEAASAAEESPPPKRPRIAYLSEVKEERDDIPAQVAMVTEEDGAPQVALITQDGAQQVTIITSGAVVAEDSSVASLRHQQVALLATANGTHIAVQLEEQQTLEEAINVATAAMQQGAVTLETTVSESGC

SEQ ID NO: 70810 - protein, 570 aa, Homo sapiens
MESLGLHTVTLSDGTTAYVQQAVKGEKLLEGQVIQLEDGTTAYIHQVTVQKEALSFEDGQPVQLEDGSMAYIHRTPREGYDPSTLEAVQLEDGSTAYIHHPVAVPSESTILAVQTEVGLEDLAAEDDEGFSADAVVALEQYASKVLHDSQIPRNGKGQQVGDRAFRCGYKGCGRLYTTAHHLKVHERAHTGDRPYRCDFPSCGKAFATGYGLKSHVRTHTGEKPYKCPEELCSKAFKTSGDLQKHVRTHTGERPFQCPFEGCGRSFTTSNIRKVHVRTHTGERPYTCPEPHCGRGFTSATNYKNHVRIHTGEKPYVCTVPGCGKRFTEYSSLYKHHVVHTHCKPYTCSTCGKTYRQTSTLAMHKRSAHGELEATEESEQALYEQQQLEAASAAEESPPPKRPRIAYLSEVKEERDDIPAQVAMVTEEDGAPQVALITQDGAQQVSLSPEDLQALGSAISMVTQHGSTTLTIPSPDADLATSGTHTVTMVSADGTQTQPVTIITSGAVVAEDSSVASLRHQQVALLATANGTHIAVQLEEQQTLEEAINVATAAMQQGAVTLETTVSESGC

SEQ ID NO: 70811 - protein, 428 aa, Homo sapiens
MESLGLHTVTLSDGTTAYVQQAVKGEKLLEGQVIQLEDGTTAYIHQVTVQKEALSFEDGQPVQLEDGSMAYIHRTPREGYDPSTLEAVQLEDGSTAYIHHPVAVPSESTILAVQTEVGLEDLAAEDDEGFSADAVVALEQYASKVLHDSQIPRNGKGQQVGDRAFRCGYKGCGRLYTTAHHLKVHERAHTGDRPYRCDFPSCGKAFATGYGLKSHVRTHTGEKPYKCPEELCSKAFKTSGDLQKHVRTHTGERPFQCPFEGCGRSFTTSNIRKVHVRTHTGERPYTCPEPHCGRGFTSATNYKNHVRIHTGEKPYVCTVPGCGKRFTEYSSLYKHHVVHTHCKPYTCSTCGKTYRQTSTLAMHKRSGHCGHAARGCDPGDNSVGEWLLSPRGLGPTPCWRKCHLHGHSCPQGPRLWLTHRRWPHRSLG

SEQ ID NO: 70812 - protein, 544 aa, Homo sapiens
MESLGLHTVTLSDGTTAYVQQAVKGEKLLEGQVIQLEDGTTAYIHQVTVQKEGYDPSTLEAVQLEDGSTAYIHHPVAVPSESTILAVQTEVGLEDLAAEDDEGFSADAVVALEQYASKVLHDSQIPRNGKGQQVGDRAFRCGYKGCGRLYTTAHHLKVHERAHTGDRPYRCDFPSCGKAFATGYGLKSHVRTHTGEKPYKCPEELCSKAFKTSGDLQKHVRTHTGERPFQCPFEGCGRSFTTSNIRKVHVRTHTGERPYTCPEPHCGRGFTSATNYKNHVRIHTGEKPYVCTVPGCGKRFTEYSSLYKHHVVHTHCKPYTCSTCGKTYRQTSTLAMHKRSAHGELEATEESEQALYEQQQLEAASAAEESPPPKRPRIAYLSEVKEERDDIPAQVAMVTEEDGAPQVALITQDGAQQVSLSPEDLQALGSAISMVTQHGSTTLTIPSPDADLATSGTHTVTMVSADGTQTQPVTIITSGAVVAEDSSVASLRHQQVALLATANGTHIAVQLEEQQTLEEAINVATAAMQQGAVTLETTVSESGC

SEQ ID NO: 70813 - protein, 402 aa, Homo sapiens
MESLGLHTVTLSDGTTAYVQQAVKGEKLLEGQVIQLEDGTTAYIHQVTVQKEALSFEDGQPVQLEDGSMAYIHRTPREGYDPSTLEAVQLEDGSTAYIHHPVAVPSESTILAVQTEVGLEDLAAEDDEGFSADAVVALEQYASKVLHDSQIPRNGKGQQVGDRAFRCGYKGCGRLYTTAHHLKVHERAHTGDRPYRCDFPSCGKAFATGYGLKSHVRTHTGEKPYKCPEELCSKAFKTSGDLQKHVRTHTGERPFQCPFEGCGRSFTTSNIRKVHVRTHTGERPYTCPEPHCGRGFTSATNYKNHVRIHTGEKPYVCTVPGCGKRFTEYSSLYKHHVVHTHHCGHAARGCDPGDNSVGEWLLSPRGLGPTPCWRKCHLHGHSCPQGPRLWLTHRRWPHRSLG

SEQ ID NO: 70814 - protein, 340 aa, Homo sapiens
MESLGLHTVTLSDGTTAYVQQAVKGEKLLEGQVIQLEDGTTAYIHQVTVQKEALSFEDGQPVQLEDGSMAYIHRTPREGYDPSTLEAVQLEDGSTAYIHHPVAVPSESTILAVQTEVGLEDLAAEDDEGFSADAVVALEQYASKVLHDSQIPRNGKGQQVGDRAFRCGYKGCGRLYTTAHHLKVHERAHTGDRPYRCDFPSCGKAFATGYGLKSHVRTHTGEKPYKCPEELCSKAFKTSGDLQKHVRTHTGERPFQCPFEGCGRSFTTSNIRKVHVRTHTGERPYTCPEPHCGRGFTSATNYKNHVRIHTGEKPYVCTVPGCGKRFTEYSSLYKHHVVHT

SEQ ID NO: 70815 - protein, 545 aa, Homo sapiens
MDCVIFEEVAVNFTPEEWALLDHAQRSLYRDVMLETCRNLASLDCYIYVRTSGSSSQRDVFGNGISNDEEIVKFTGSDSWSIFGENWRFDNTGDQHQIPQRHLRSQLGRLCESNEGHQCGETLSQTANLLVHKSYPTEAKPSECTKCGKAFENRQRSHTGQRPCKECGQACSCLSCQSPPMKTQTVEKPCNCQDSRTASVTYVKSLSSKKSYECQKCGKAFICPSSFRGHVNSHHGQKTHACKVCGKTFMYYSYLTRHVRTHTGEKPYECKECGKAFSCPSYFREHVRTHTGEKPYECKHCGKSFSCYSSFRDHVRTHTGEKPCQCKHCGKAFTCYSSLREHGRTHSGEKPYECKECGKAFRYPSSLRAHMRMHTGEKPYVCKQCGKAFGCPTYFRRHVKTHSGVKPYQCKECGKAYSFSSSLRIHVRTHTGEKPFECKHCGKAFSCHSSLREHVRTHSGEKPYECNQCGKAFSHAQYFQKHVRSHSGVKPYECTECGKAYSCSSSLRVHVRTHTGERPYECKQCGKTFRYLASLQAHVRTHAGA

SEQ ID NO: 70816 - protein, 435 aa, Homo sapiens
RLCESNEGHQCGETLSQTANLLVHKSYPTEAKPSECTKCGKTFMYYSYLTRHVRTHTGEKPYECKECGKAFSCPSYFREHVRTHTGEKPYECKHCGKSFSCYSSFRDHVRTHTGEKPCQCKHCGKAFTCYSSLREHGRTHSGEKPYECKECGKAFRYPSSLRAHMRMHTGEKPYVCKQCGKAFGCPTYFRRHVKTHSGVKPYQCKECGKAYSFSSSLRIHVRTHTGEKPFECKHCGKAFSCHSSLREHVRTHSGEKPYECNQCGKAFSHAQYFQKHVRSHSGVKPYECTECGKAYSCSSSLRVHVRTHTGERPYECKQCGKTFSWPSDLRVHMRTHSGEKRCGCKQCGKSFSSPSSFKGHIRTHTGEKLYTCRECGKVFSSPSYFRTQVRIHIGEKPYVCEQRGKVFSWSSSFRGHLRTHSREKPYECKECTKAF

SEQ ID NO: 70817 - protein, 498 aa, Homo sapiens
MLEEGVLPSPGPALPQEENTGEEGMAAGLLTAGPRGSTFFSSVTVAFAQERWRCLVSTPRDRFKEGIPGKSRSLVLLGLPVSQPGMNSQLEQREGAWMLEGEDLRSPSPGWKIISGSPPEQALSEASFQDPCVEMPPGDSDHGTSDLEKSFNLRPVLSPQQRVPVEARPRKCETHTESFKNSEILKPHRAKPYACNECGKAFSYCSSLSQHQKSHTGEKPYECSECGKAFSQSSSLIQHQRIHTGEKPYKCSECGRAFSQNANLTKHQRTHTGEKPYRCSECEKAFSDCSALVQHQRIHTGEKPYECSDCGKAFRHSANLTNHQRTHTGEKPYKCSECGKAFSYCAAFIQHQRIHTGEKPYRCAACGKAFSQSANLTNHQRTHTGEKPYKCSECGKAFSQSTNLIIHQKTHTGEKPYKCNECGKFFSESSALIRHHIIHTGEKPYECNECGKAFNQSSSLSQHQRIHTGVKPYECSECGKAFRCSSAFVRHQRLHAGE

SEQ ID NO: 70818 - protein, 474 aa, Homo sapiens
MAAGLLTAGPRGSTFFSSVTVAFAQERWRCLVSTPRDRFKEGIPGKSRSLVLLGLPVSQPGMNSQLEQREGAWMLEGEDLRSPSPGWKIISGSPPEQALSEASFQDPCVEMPPGDSDHGTSDLEKSFNLRPVLSPQQRVPVEARPRKCETHTESFKNSEILKPHRAKPYACNECGKAFSYCSSLSQHQKSHTGEKPYECSECGKAFSQSSSLIQHQRIHTGEKPYKCSECGRAFSQNANLTKHQRTHTGEKPYRCSECEKAFSDCSALVQHQRIHTGEKPYECSDCGKAFRHSANLTNHQRTHTGEKPYKCSECGKAFSYCAAFIQHQRIHTGEKPYRCAACGKAFSQSANLTNHQRTHTGEKPYKCSECGKAFSQSTNLIIHQKTHTGEKPYKCNECGKFFSESSALIRHHIIHTGEKPYECNECGKAFNQSSSLSQHQRIHTGVKPYECSECGKAFRCSSAFVRHQRLHAGE

SEQ ID NO: 70819 - protein, 575 aa, Homo sapiens
MDPEDEGVAGVMSVGPPAARLQEPVTFRDVAVDFTQEEWGQLDPTQRILYRDVMLETFGHLLSIGPELPKPEVISQLEQGTELWVAERGTTQGCHPAWEPRSESQASRKEEGLPEEEPSHVTGREGFPTDAPYPTTLGKDRECQSQSLALKEQNNLKQLEFGLKEAPVQDQGYKTLRLRENCVLSSSPNPFPEISRGEYLYTYDSQITDSEHNSSLVSQQTGSPGKQPGENSDCHRDSSQAIPITELTKSQVQDKPYKCTDCGKSFNHNAHLTVHKRIHTGERPYMCKECGKAFSQNSSLVQHERIHTGDKPYKCAECGKSFCHSTHLTVHRRIHTGEKPYECQDCGRAFNQNSSLGRHKRTHTGEKPYTCSVCGKSFSRTTCLFLHLRTHTEERPYECNHCGKGFRHSSSLAQHQRKHAGEKPFECRQRLIFEQTPALTKHEWTEALGCDPPLSQDERTHRSDRPFKCNQCGKCFIQSSHLIRHQITHTREEQPHGRSRRREQSSSRNSHLVQHQHPNSRKSSAGGAKAGQPESRALALFDIQKIMQEKNPVHVIGVEEPSVGASMLFDIREST

SEQ ID NO: 70820 - protein, 172 aa, Homo sapiens
MDPEDEGVAGVMSVGPPAARLQVTITTITTAAGSGQASPAQTDPFTSRRDESGTAVNALDTWGNSDAGRGVVTVLAGQRGGRDSNQAPGPRMRMLHAALSSPAPRSPCPGAWAQPLGGNDGSPRTECDESDHQGRPLRDCGRTAVQGGQCLQGHLAIRAPLSRQSGCGLCSP

SEQ ID NO: 70821 - protein, 290 aa, Homo sapiens
MCKECGKAFSQNSSLVQHERIHTGDKPYKCAECGKSFCHSTHLTVHRRIHTGEKPYECQDCGRAFNQNSSLGRHKRTHTGEKPYTCSVCGKSFSRTTCLFLHLRTHTEERPYECNHCGKGFRHSSSLAQHQRKHAGEKPFECRQRLIFEQTPALTKHEWTEALGCDPPLSQDERTHRSDRPFKCNQCGKCFIQSSHLIRHQITHTREEQPHGRSRRREQSSSRNSHLVQHQHPNSRKSSAGGAKAGQPESRALALFDIQKIMQEKNPVHVIGVEEPSVGASMLFDIREST

SEQ ID NO: 70822 - protein, 273 aa, Homo sapiens
MSPKRDGLGTGDGLHSQVLQEQVSTGDNLHECDSQGPSKDTLVREGKTYKCKECGSVFNKNSLLVRHQQIHTGVKPYECQECGKAFPEKVDFVRPMRIHTGEKPCKCVECGKVFNRRSHLLCYRQIHTGEKPYECSECGKTFSYHSVFIQHRVTHTGEKLFGCKECGKTFYYNSSLTRHMKIHTGEKPCKCSECGKTFTYRSVFFRHSMTHTAGKPYECKECGKGFYYSYSLTRHTRSHTGEKPYECLEHRKDFGYHSAFAQQSKIHSGGKNL

SEQ ID NO: 70823 - protein, 273 aa, Homo sapiens; identical to SEQ ID NO: 70822

SEQ ID NO: 70824 - protein, 1209 aa, Homo sapiens
MECYYIVISSTHLSNGHFRNIKGVFRGPLSKNGNKTLDYAEKENTIAKALEDLKANFYCELCDKQYYKHQEFDNHINSYDHAHKQRLKELKQREFARNVASKSRKDERKQEKALQRLHKLAELRKETVCAPGSGPMFKSTTVTVRENCNEISQRVVVDSVNNQQDFKYTLIHSEENTKDATTVAEDPESANNYTAKNNQVGDQAQGIHRHKIGFSFAFPKKASVKLESSAAAFSEYSDDASVGKGFSRKSRFVPSACHLQQSSPTDVLLSSEEKTNSFHPPEAMCRDKETVQTQEIKEVSSEKDALLLPSFCKFQLQLSSDADNCQNSVPLADQIPLESVVINEDIPVSGNSFELLGNKSTVLDMSNDCISVQATTEENVKHNEASTTEVENKNGPETLAPSNTEEVNITIHKKTNFCKRQCEPFVPVLNKHRSTVLQWPSEMLVYTTTKPSISYSCNPLCFDFKSTKVNNNLDKNKPDLKDLCSQQKQEDICMGPLSDYKDVSTEGLTDYEIGSSKNKCSQVTPLLADDILSSSCDSGKNENTGQRYKNISCKIRETEKYNFTKSQIKQDTLDEKYNKIRLKETHEYWFHKSRRKKKRKKLCQHHHMEKTKESETRCKMEAENSYTENAGKYLLEPISEKQYLAAEQLLDSHQLLDKRPKSESISLSDNEEMCKTWNTEYNTYDTISSKNHCKKNTILLNGQSNATMIHSGKHNLTYSRTYCCWKTKMSSCSQDHRSLVLQNDMKHMSQNQAVKRGYNSVMNESERFYRKRRQHSHSYSSDESLNRQNHLPEEFLRPPSTSVAPCKPKKKRRRKRGRFHPGFETLELKENTDYPVKDNSSLNPLDRLISEDKKEKMKPQEVAKIERNSEQTNQLRNKLSFHPNNLLPSETNGETEHLEMETTSGELSDVSNDPTTSVCVASAPTKEAIDNTLLEHKERSENINLNEKQIPFQVPNIERNFRQSQPKSYLCHYELAEALPQGKMNETPTEWLRYNSGILNTQPPLPFKEAHVSGHTFVTAEQILAPLALPEQALLIPLENHDKFKNVPCEVYQHILQPNMLANKVKFTFPPAALPPPSTPLQPLPLQQSLCSTSVTTIHHTVLQQHAAAAAAAAAAAAAGTFKVLQPHQQFLSQIPALTRTSLPQLSVGPVGPRLCPGNQPTFVAPPQMPIIPASVLHPSHLAFPSLPHALFPSLLSPHPTVIPLQPLF

SEQ ID NO: 70825 - protein, 69 aa, Homo sapiens
MPANEDAPQPGEHGSACEVSVSFEDVTVDFSREEWQQLDSTQRRLYQDVMLENYSHLLSVGKDNHPVKL

SEQ ID NO: 70826 - protein, 661 aa, Homo sapiens
MPANEDAPQPGEHGSACEVSVSFEDVTVDFSREEWQQLDSTQRRLYQDVMLENYSHLLSVGFEVPKPEVIFKLEQGEGPWTLEGEAPHQSCSDGKFGIKPSQRRISGKSTFHSEMEGEDTRDDSLYSILEELWQDAEQIKRCQEKHNKLLSRTTFLNKKILNTEWDYEYKDFGKFVHPSPNLILSQKRPHKRDSFGKSFKHNLDLHIHNKSNAAKNLDKTIGHGQVFTQNSSYSHHENTHTGVKFCERNQCGKVLSLKHSLSQNVKFPIGEKANTCTEFGKIFTQRSHFFAPQKIHTVEKPHELSKCVNVFTQKPLLSIYLRVHRDEKLYICTKCGKAFIQNSELIMHEKTHTREKPYKCNECGKSFFQVSSLLRHQTTHTGEKLFECSECGKGFSLNSALNIHQKIHTGERHHKCSECGKAFTQKSTLRMHQRIHTGERSYICTQCGQAFIQKAHLIAHQRIHTGEKPYECSDCGKSFPSKSQLQMHKRIHTGEKPYICTECGKAFTNRSNLNTHQKSHTGEKSYICAECGKAFTDRSNFNKHQTIHTGEKPYVCADCGRAFIQKSELITHQRIHTTEKPYKCPDCEKSFSKKPHLKVHQRIHTGEKPYICAECGKAFTDRSNFNKHQTIHTGDKPYKCSDCGKGFTQKSVLSMHRNIHT

SEQ ID NO: 70827 - protein, 103 aa, Homo sapiens
MPANEDAPQPGEHGSACEVSVSFEDVTVDFSREEWQQLDSTQRRLYQDVMLENYSHLLSVGFEVPKPEVIFKLEQGEGPWTLEGEAPHQSCSGISTYFVTSTV

SEQ ID NO: 70828 - protein, 661 aa, Homo sapiens; identical to SEQ ID NO: 70826

SEQ ID NO: 70829 - protein, 122 aa, Homo sapiens
MPANEDAPQPGEHGSACEVSVSFEDVTVDFSREEWQQLDSTQRRLYQDVMLENYSHLLSVGFEVPKPEVIFKLEQGEGPWTLEGEAPHQSCSDGKFGIKPSQRRISGKSTFHSEMEGEDTLC

SEQ ID NO: 70830 - protein, 516 aa, Homo sapiens
MHGRKDDAQKQPVKNQLGLNPQSHLPELQLFQAEGKIYKYDHMEKSVNSSSLVSPPQRISSTVKTHISHTYECNFVDSLFTQKEKANIGTEHYKCSERGKAFHQGLHFTIHQIIHTKETQFKCDICGKIFNKKSNLASHQRIHTGEKPYKCNECGKVFHNMSHLAQHRRIHTGEKPYKCNECGKVFNQISHLAQHQRIHTGEKPYKCNECGKVFHQISHLAQHRTIHTGEKPYECNKCGKVFSRNSYLVQHLIIHTGEKPYRCNVCGKVFHHISHLAQHQRIHTGEKPYKCNECGKVFSHKSSLVNHWRIHTGEKPYKCNECGKVFSHKSSLVNHWRIHTGEKPYKCNECGKVFSRNSYLAQHLIIHAGEKPYKCDECDKAFSQNSHLVQHHRIHTGEKPYKCDECGKVFSQNSYLAYHWRIHTGEKAYKCNECGKVFGLNSSLAHHRKIHTGEKPFKCNECGKAFSMRSSLTNHHAIHTGEKHFKCNECGKLFRDNSYLVRHQRFHAGKKSNTCN

SEQ ID NO: 70831 - protein, 488 aa, Homo sapiens
MHGRKDDAQKQPVKNQLGLNPQSHLPELQLFQAEGKIYKYDHMEKSVNSSSLVSPPQRISSTVKTHISHTYECNFVDSLFTQKEKANIGTEHYKCSERGKAFHQGLHFTIHQIIHTKETQFKCDICGKIFNKKSNLASHQRIHTGEKPYKCNECGKVFHNMSHLAQHRRIHTGEKPYKCNECGKVFNQISHLAQHQRIHTGEKPYKCNECGKVFHQISHLAQHRTIHTGEKPYECNKCGKVFSRNSYLVQHLIIHTGEKPYRCNVCGKVFSHKSSLVNHWRIHTGEKPYKCNECGKVFSHKSSLVNHWRIHTGEKPYKCNECGKVFSRNSYLAQHLIIHAGEKPYKCDECDKAFSQNSHLVQHHRIHTGEKPYKCDECGKVFSQNSYLAYHWRIHTGEKAYKCNECGKVFGLNSSLAHHRKIHTGEKPFKCNECGKAFSMRSSLTNHHAIHTGEKHFKCNECGKLFRDNSYLVRHQRFHAGKKSNTCN

SEQ ID NO: 70832 - protein, 488 aa, Homo sapiens; identical to SEQ ID NO: 70831

SEQ ID NO: 70833 - protein, 516 aa, Homo sapiens; identical to SEQ ID NO: 70830

SEQ ID NO: 70834 - protein, 516 aa, Homo sapiens; identical to SEQ ID NO: 70830

SEQ ID NO: 70835 - protein, 516 aa, Homo sapiens; identical to SEQ ID NO: 70830

SEQ ID NO: 70836 - protein, 516 aa, Homo sapiens; identical to SEQ ID NO: 70830

SEQ ID NO: 70837 - protein, 1677 aa, Homo sapiens
MEVPEPTCPAPPARDQPAPTPGPPGAPGGQASPHLTLGPVLLPPEQGLAPPTVFLKALPIPLYHTVPPGGLQPRAPLVTGSLDGGNVPFILSPVLQPEGPGPTQVGKPAAPTLTVNIVGTLPVLSPGLGPTLGSPGKVRNAGKYLCPHCGRDCLKPSVLEKHIRSHTGERPFPCATCGIAFKTQSNLYKHRRTQTHLNNSRLSSESEGAGGGLLEEGDKAGEPPRPEGRGESRCQGMHEGASERPLSPGAHVPLLAKNLDVRTEAAPCPGSAFADREAPWDSAPMASPGLPAASTQPWRKLPEQKSPTAGKPCALQRQQATAAEKPWDAKAPEGRLRKCESTDSGYLSRSDSAEQPHAPCSPLHSLSEHSAESEGEGGPGPGPGVAGAEPGAREAGLELEKKRLEERIAQLISHNQAVVDDAQLDNVRPRKTGLSKQGSIDLPTPYTYKDSFHFDIRALEPGRRRAPGPVRSTWTPPDKSRPLFFHSVPTQLSTTVECVPVTRSNSLPFVEGSRTWLEPREPRDPWSRTQKPLSPRPGPARLGCRSGLSSTDVPSGHPRALVRQAAVEDLPGTPIGDALVPAEDTDAKRTAAREAMAGKGRAGGRKCGQRRLKMFSQEKWQVYGDETFKRIYQKMKASPHGGKKAREVGMGSGAELGFPLQKEAAGSSGTVPTQDRRTPVHEDISAGATPEPWGNPPALEASLVTEPTKHGETVARRGDSDRPRVEEAVSSPALGGRDSPCSGSRSPLVSPNGRLELGWQMPPAPGPLKGGDVEAPRPVWPDPKLEGGARGVGDVQETCLWAQTVLRWPSRGSGEDKLPSERKKLKVEDLHSWKQPEPVSAETPGGPTQPASLSSQKQDADPGEVPGGSKESARQVGEPLESSGASLAAASVALKRVGPRDKATPLHPAAPAPAEHPSLATPPQAPRVLSALADNAFSPKYLLRLPQAETPLPLPIPWGPRHSQDSLCSSGWPEERASFVGSGLGTPLSPSPASGPSPGEADSILEDPSCSRPQDGRKGAQLGGDKGDRMATSRPAARELPISAPGAPREATSSPPTPTCEAHLVQDMEGDSHRIHRLCMGSTLARARLSGDVLNPWVPNWELGEPPGNAPEDPSSGPLVGPDPCSPLQPGSFLTALTRPQGVPPGWPELALSSHSGTSRSHSTRSPHSTQNPFPSLKAEPRLTWCCLSRSVPLPAEQKAKAASVYLAVHFPGSSLRDEGPNGPPGSNGGWTWTSPGEGGPAQMSKFSYPTVPGVMPQHQVSEPEWKKGLPWRAKMSRGNSKQRKLKINPKRYKGNFLQSCVQLRASRLRTPTWVRRRSRHPPALEGLKPCRTPGQTSSEIAGLNLQEEPSCATSESPPCCGKEEKKEGDCRQTLGTLSLGTSSRIVREMDKRTVKDISPSAGEHGDCTTHSTAATSGLSLQSDTCLAVVNDVPLPPGKGLDLGLLETQLLASQDSVSTDPKPYIFSDAQRPSSFGSKGTFPHHDIATSVAAVCISLPVRTDHIAQEIHSAESRDHSQTAGRTLTSSSPDSKVTEEGRAQTLLPGRPSSGQRISDSVPLESTEKTHLEIPASGPSSASSHHKEGRHKTFFPSRGQYGCGEMTVPCPSLGSDGRKRQVSGLITRKDSVVPSKPEQPIEIPEAPSKSLKKRSLEGMRKQTRVEFSDTSSDDEDRLVIEI

SEQ ID NO: 70838 - protein, 87 aa, Homo sapiens
MGPLTFRDVAIEFSLKEWQCLDTAQRNLYRNVMLENYRNLVFLGITVSKPDLITCLEQGKEAWSMKRHEIMVAKPTESYSVTQSGMQ

SEQ ID NO: 70839 - protein, 595 aa, Homo sapiens
MGPLTFRDVAIEFSLKEWQCLDTAQRNLYRNVMLENYRNLVFLGITVSKPDLITCLEQGKEAWSMKRHEIMVAKPTVMCSHFAQDLWPEQNIKDSFQKVTLKRYGKCRHENLPLRKGCESMDECKMHKGGCNGLNQCLTATQSKIFQCDKYVKVAHKFSNSNRHEIRHTKKKPFKCTKCGKSFGMISCLTEHSRIHTRVNFYKCEECGKAFNWSSTLTKHKRIHTGEKPYKCEECGKAFNQSSNLIKHKKIHTGEKPYKCEECGKTFNRFSTLTTHKIIHTGEKPYKCKECGKAFNRSSTLTTHRKIHTGEKPYKCEECGKAFKQSSNLTTHKIIHTGEKPYKCKKCGKAFNQSAHLTTHEVIHTGEKPYKCEKCGKAFNHFSHLTTHKIIHTGEKPYKCKECGKAFKHSSTLTKHKIIHTGEKPYKCKECEKAFNQSSKLTEHKKIHTGEKPYECEKCGKAFNQSSNLTRHKKSHTEEKPYKCEECGKGFKWPSTLTIHKIIHTGEKPYKCEECGKAFNQSSKLTKHKKIHTGEKPYTCEECGKAFNQSSNLTKHKRIHTGEKPYKCEECDKAFKWSSVLTKHKIIHTGEKLQI

SEQ ID NO: 70840 - protein, 562 aa, Homo sapiens
MGPLTFRDVAIEFSLKEWQCLDTAQRNLYRNVMLENYRNLVFLVMCSHFAQDLWPEQNIKDSFQKVTLKRYGKCRHENLPLRKGCESMDECKMHKGGCNGLNQCLTATQSKIFQCDKYVKVAHKFSNSNRHEIRHTKKKPFKCTKCGKSFGMISCLTEHSRIHTRVNFYKCEECGKAFNWSSTLTKHKRIHTGEKPYKCEECGKAFNQSSNLIKHKKIHTGEKPYKCEECGKTFNRFSTLTTHKIIHTGEKPYKCKECGKAFNRSSTLTTHRKIHTGEKPYKCEECGKAFKQSSNLTTHKIIHTGEKPYKCKKCGKAFNQSAHLTTHEVIHTGEKPYKCEKCGKAFNHFSHLTTHKIIHTGEKPYKCKECGKAFKHSSTLTKHKIIHTGEKPYKCKECEKAFNQSSKLTEHKKIHTGEKPYECEKCGKAFNQSSNLTRHKKSHTEEKPYKCEECGKGFKWPSTLTIHKIIHTGEKPYKCEECGKAFNQSSKLTKHKKIHTGEKPYTCEECGKAFNQSSNLTKHKRIHTGEKPYKCEECDKAFKWSSVLTKHKIIHTGEKLQI

SEQ ID NO: 70841 - protein, 470 aa, Homo sapiens
MHKGGCNGLNQCLTATQSKIFQCDKYVKVAHKFSNSNRHEIRHTKKKPFKCTKCGKSFGMISCLTEHSRIHTRVNFYKCEECGKAFNWSSTLTKHKRIHTGEKPYKCEECGKAFNQSSNLIKHKKIHTGEKPYKCEECGKTFNRFSTLTTHKIIHTGEKPYKCKECGKAFNRSSTLTTHRKIHTGEKPYKCEECGKAFKQSSNLTTHKIIHTGEKPYKCKKCGKAFNQSAHLTTHEVIHTGEKPYKCEKCGKAFNHFSHLTTHKIIHTGEKPYKCKECGKAFKHSSTLTKHKIIHTGEKPYKCKECEKAFNQSSKLTEHKKIHTGEKPYECEKCGKAFNQSSNLTRHKKSHTEEKPYKCEECGKGFKWPSTLTIHKIIHTGEKPYKCEECGKAFNQSSKLTKHKKIHTGEKPYTCEECGKAFNQSSNLTKHKRIHTGEKPYKCEECDKAFKWSSVLTKHKIIHTGEKLQI

SEQ ID NO: 70842 - protein, 601 aa, Homo sapiens
MGPLEFRDVAIEFSLEEWHCLDTAQQNLYRDVMLENYRHLVFLGIVVTKPDLITCLEQGKKPFTVKRHEMIAKSPVMCFHFAQDLCPEQSLKDSFQKVIVTRYEKREYGNLELKKGCESVDEGKVHKRGYNGLNQCLTATQSKVFQCDTYVKVSHIFSNSNRHKIRDTGKKPFKCIECGKAFNQSSTLATHKKIHTGEITCKCEECGKAFNRSSHLTSHKRIHTGEKRYKCEDCGKELKYSSTLTAHKRIHTGEKRYKCEDCGKELKYSSTLTAHKRIHTGEKPYKCDKCGRAFISSSILYVHKISHTEEKPYKCEECGKAFKLSSILSTHKRIHTGEKPYKCEECGKAFRRSLVLRTHKRIHTGEKPYKCDKCGKAFISSSLLYKHKISHSEKKPYKCEECGKAFKRSSTLTIHKISHTEEKPYKCQECDKVFKRSSALSTHKIIHSGEKPYKCEECGKAFKRSSNLTTHKISHTEEKLYKCQECDKAFKYSSALSTHKIIHSGENPYKCEECGKAFKRSSVLSKHKIIHTGAKPYKCEECGKAFKRSSQLTSHKISHTGEKPYKCEECGKAFNLSSDLNTHKRIHIGQKAYIVKNMANL

SEQ ID NO: 70843 - protein, 122 aa, Homo sapiens
MRKHIKERELSLMEQIKEFILERNTMNVPTVGKPFSGRHSLLSIREFTLGRSPMNVMNVGEPSEKKPTCMIIREFILEKNPILVRNVGKTSAEVQLLLNTREFILEINSRNREIKEFAECFS

SEQ ID NO: 70844 - protein, 636 aa, Homo sapiens
MAPRPPTAAPQESVTFKDVSVDFTQEEWYHVDPAQRSLYRDVMLENYSHLVSLGYQVSKPEVIFKLEQGEEPWISEGEIQRPFYPDWKTRPEVKSSHLQQDVSEVSHCTHDLLHATLEDSWDVSSQLDRQQENWKRHLGSEASTQKKIITPQENFEQNKFGENSRLNTNLVTQLNIPARIRPSECETLGSNLGHNADLLNENNILAKKKPYKCDKCRKAFIHRSSLTKHEKTHKGEGAFPNGTDQGIYPGKKHHECTDCGKTFLWKTQLTEHQRIHTGEKPFECNVCGKAFRHSSSLGQHENAHTGEKPYQCSLCGKAFQRSSSLVQHQRIHTGEKPYRCNLCGRSFRHGTSLTQHEVTHSGEKPFQCKECGKAFSRCSSLVQHERTHTGEKPFECSICGRAFGQSPSLYKHMRIHKRGKPYQSSNYSIDFKHSTSLTQDESTLTEVKSYHCNDCGEDFSHITDFTDHQRIHTAENPYDCEQAFSQQAISHPGEKPYQCNVCGKAFKRSTSFIEHHRIHTGEKPYECNECGEAFSRRSSLTQHERTHTGEKPYECIDCGKAFSQSSSLIQHERTHTGEKPYECNECGRAFRKKTNLHDHQRIHTGEKPYSCKECGKNFSRSSALTKHQRIHTRNKL

SEQ ID NO: 70845 - protein, 1191 aa, Homo sapiens
MPGTPGSLEMGLLTFRDVAIEFSPEEWQCLDTAQQNLYRNVMLENYRNLAFLGIALSKPDLITYLEQGKEPWNMKQHEMVDEPTGICPHFPQDFWPEQSMEDSFQKVLLRKYEKCGHENLQLRKGCKSVDECKVHKEGYNKLNQCLTTAQSKVFQCGKYLKVFYKFLNSNRHTIRHTGKKCFKCKKCVKSFCIRLHKTQHKCVYITEKSCKCKECEKTFHWSSTLTNHKEIHTEDKPYKCEECGKAFKQLSTLTTHKIICAKEKIYKCEECGKAFLWSSTLTRHKRIHTGEKPYKCEECGKAFSHSSTLAKHKRIHTGEKPYKCEECGKAFSRSSTLAKHKRIHTGEKPYKCKECGKAFSNSSTLANHKITHTEEKPYKCKECDKAFKRLSTLTKHKIIHAGEKLYKCEECGKAFNRSSNLTIHKFIHTGEKPYKCEECGKAFNWSSSLTKHKRFHTREKPFKCKECGKAFIWSSTLTRHKRIHTGEKPYKCEECGKAFRQSSTLTKHKIIHTGEKPYKFEECGKAFRQSLTLNKHKIIHSREKPYKCKECGKAFKQFSTLTTHKIIHAGKKLYKCEECGKAFNHSSSLSTHKIIHTGEKSYKCEECGKAFLWSSTLRRHKRIHTGEKPYKCEECGKAFSHSSALAKHKRIHTGEKPYKCKECGKAFSNSSTLANHKITHTEEKPYKCKECDKTFKRLSTLTKHKIIHAGEKLYKCEECGKAFNRSSNLTIHKFIHTGEKPYKCEECGKAFNWSSSLTKHKRIHTREKPFKCKECGKAFIWSSTLTRHKRIHTGEKPYKCEECGKAFSRSSTLTKHKTIHTGEKPYKCKECGKAFKHSSALAKHKIIHAGEKLYKCEECGKAFNQSSNLTTHKIIHTKEKPSKSEECDKAFIWSSTLTEHKRIHTREKTYKCEECGKAFSQPSHLTTHKRMHTGEKPYKCEECGKAFSQSSTLTTHKIIHTGEKPYKCEECGKAFRKSSTLTEHKIIHTGEKPYKCEECGKAFSQSSTLTRHTRMHTGEKPYKCEECGKAFNRSSKLTTHKIIHTGEKPYKCEECGKAFISSSTLNGHKRIHTREKPYKCEECGKAFSQSSTLTRHKRLHTGEKPYKCGECGKAFKESSALTKHKIIHTGEKPYKCEKCGKAFNQSSILTNHKKIHTITPVIPLLWEAEAGGSRGQEMETILANTVKPLLY

SEQ ID NO: 70846 - protein, 1159 aa, Homo sapiens
MPGTPGSLEMGLLTFRDVAIEFSPEEWQCLDTAQQNLYRNVMLENYRNLAFLGICPHFPQDFWPEQSMEDSFQKVLLRKYEKCGHENLQLRKGCKSVDECKVHKEGYNKLNQCLTTAQSKVFQCGKYLKVFYKFLNSNRHTIRHTGKKCFKCKKCVKSFCIRLHKTQHKCVYITEKSCKCKECEKTFHWSSTLTNHKEIHTEDKPYKCEECGKAFKQLSTLTTHKIICAKEKIYKCEECGKAFLWSSTLTRHKRIHTGEKPYKCEECGKAFSHSSTLAKHKRIHTGEKPYKCEECGKAFSRSSTLAKHKRIHTGEKPYKCKECGKAFSNSSTLANHKITHTEEKPYKCKECDKAFKRLSTLTKHKIIHAGEKLYKCEECGKAFNRSSNLTIHKFIHTGEKPYKCEECGKAFNWSSSLTKHKRFHTREKPFKCKECGKAFIWSSTLTRHKRIHTGEKPYKCEECGKAFRQSSTLTKHKIIHTGEKPYKFEECGKAFRQSLTLNKHKIIHSREKPYKCKECGKAFKQFSTLTTHKIIHAGKKLYKCEECGKAFNHSSSLSTHKIIHTGEKSYKCEECGKAFLWSSTLRRHKRIHTGEKPYKCEECGKAFSHSSALAKHKRIHTGEKPYKCKECGKAFSNSSTLANHKITHTEEKPYKCKECDKTFKRLSTLTKHKIIHAGEKLYKCEECGKAFNRSSNLTIHKFIHTGEKPYKCEECGKAFNWSSSLTKHKRIHTREKPFKCKECGKAFIWSSTLTRHKRIHTGEKPYKCEECGKAFSRSSTLTKHKTIHTGEKPYKCKECGKAFKHSSALAKHKIIHAGEKLYKCEECGKAFNQSSNLTTHKIIHTKEKPSKSEECDKAFIWSSTLTEHKRIHTREKTYKCEECGKAFSQPSHLTTHKRMHTGEKPYKCEECGKAFSQSSTLTTHKIIHTGEKPYKCEECGKAFRKSSTLTEHKIIHTGEKPYKCEECGKAFSQSSTLTRHTRMHTGEKPYKCEECGKAFNRSSKLTTHKIIHTGEKPYKCEECGKAFISSSTLNGHKRIHTREKPYKCEECGKAFSQSSTLTRHKRLHTGEKPYKCGECGKAFKESSALTKHKIIHTGEKPYKCEKCGKAFNQSSILTNHKKIHTITPVIPLLWEAEAGGSRGQEMETILANTVKPLLY

SEQ ID NO: 70847 - protein, 586 aa, Homo sapiens
MGPLTFRDVKIEFSLEEWQCLDTAQRNLYRDVMLENYRNLVFLGIAVSKPDLITWLEQGKEPWNLKRHEMVDKTPVMCSHFAQDVWPEHSIKDSFQKVILRTYGKYGHENLQLRKDHKSVDACKVYKGGYNGLNQCLTTTDSKIFQCDKYVKVFHKFPNVNRNKIRHTGKKPFKCKNRGKSFCMLSQLTQHKKIHTREYSYKCEECGKAFNWSSTLTKHKIIHTGEKPYKCEECGKAFNRSSNLTKHKIIHTGEKPYKCEECGKAFNRSSTLTKHKRIHTEEKPYKCEECGKAFNQFSILNKHKRIHMEDKPYKCEECGKAFRVFSILKKHKIIHTGEKPYKCEECGKAFNQFSNLTKHKIIHTGEKPYKCDECGKAFNQSSTLTKHKRIHTGEKPYKCEECGKAFKQSSTLTEHKIIHTGEKPYKCEKCGKAFSWSSAFTKHKRNHMEDKPYKCEECGKAFSVFSTLTKHKIIHTREKPYKCEECGKAFNQSSIFTKHKIIHTEGKSYKCEKCGNAFNQSSNLTARKIIYTGEKPYKYEECDKAFNKFSTLITHQIIYTGEKPCKHECGRAFNKSSNYTKEKLQT

SEQ ID NO: 70848 - protein, 554 aa, Homo sapiens
MGPLTFRDVKIEFSLEEWQCLDTAQRNLYRDVMLENYRNLVFLVMCSHFAQDVWPEHSIKDSFQKVILRTYGKYGHENLQLRKDHKSVDACKVYKGGYNGLNQCLTTTDSKIFQCDKYVKVFHKFPNVNRNKIRHTGKKPFKCKNRGKSFCMLSQLTQHKKIHTREYSYKCEECGKAFNWSSTLTKHKIIHTGEKPYKCEECGKAFNRSSNLTKHKIIHTGEKPYKCEECGKAFNRSSTLTKHKRIHTEEKPYKCEECGKAFNQFSILNKHKRIHMEDKPYKCEECGKAFRVFSILKKHKIIHTGEKPYKCEECGKAFNQFSNLTKHKIIHTGEKPYKCDECGKAFNQSSTLTKHKRIHTGEKPYKCEECGKAFKQSSTLTEHKIIHTGEKPYKCEKCGKAFSWSSAFTKHKRNHMEDKPYKCEECGKAFSVFSTLTKHKIIHTREKPYKCEECGKAFNQSSIFTKHKIIHTEGKSYKCEKCGNAFNQSSNLTARKIIYTGEKPYKYEECDKAFNKFSTLITHQIIYTGEKPCKHECGRAFNKSSNYTKEKLQT

SEQ ID NO: 70849 - protein, 517 aa, Homo sapiens
MVDKTPVMCSHFAQDVWPEHSIKDSFQKVILRTYGKYGHENLQLRKDHKSVDACKVYKGGYNGLNQCLTTTDSKIFQCDKYVKVFHKFPNVNRNKIRHTGKKPFKCKNRGKSFCMLSQLTQHKKIHTREYSYKCEECGKAFNWSSTLTKHKIIHTGEKPYKCEECGKAFNRSSNLTKHKIIHTGEKPYKCEECGKAFNRSSTLTKHKRIHTEEKPYKCEECGKAFNQFSILNKHKRIHMEDKPYKCEECGKAFRVFSILKKHKIIHTGEKPYKCEECGKAFNQFSNLTKHKIIHTGEKPYKCDECGKAFNQSSTLTKHKRIHTGEKPYKCEECGKAFKQSSTLTEHKIIHTGEKPYKCEKCGKAFSWSSAFTKHKRNHMEDKPYKCEECGKAFSVFSTLTKHKIIHTREKPYKCEECGKAFNQSSIFTKHKIIHTEGKSYKCEKCGNAFNQSSNLTARKIIYTGEKPYKYEECDKAFNKFSTLITHQIIYTGEKPCKHECGRAFNKSSNYTKEKLQT

SEQ ID NO: 70850 - protein, 620 aa, Homo sapiens
MGPLQFRDVAIEFSLEEWHCLDTAQRNLYRNVMLENYSNLVFLGIVVSKPDLIAHLEQGKKPLTMKRHEMVANPSVICSHFAQDLWPEQNIKDSFQKVILRRYEKRGHGNLQLIKRCESVDECKVHTGGYNGLNQCSTTTQSKVFQCDKYGKVFHKFSNSNRHNIRHTEKKPFKCIECGKAFNQFSTLITHKKIHTGEKPYICEECGKAFKYSSALNTHKRIHTGEKPYKCDKCDKAFIASSTLSKHEIIHTGKKPYKCEECGKAFNQSSTLTKHKKIHTGEKPYKCEECGKAFNQSSTLTKHKKIHTGEKPYVCEECGKAFKYSRILTTHKRIHTGEKPYKCNKCGKAFIASSTLSRHEFIHMGKKHYKCEECGKAFIWSSVLTRHKRVHTGEKPYKCEECGKAFKYSSTLSSHKRSHTGEKPYKCEECGKAFVASSTLSKHEIIHTGKKPYKCEECGKAFNQSSSLTKHKKIHTGEKPYKCEECGKAFNQSSSLTKHKKIHTGEKPYKCEECGKAFNQSSTLIKHKKIHTREKPYKCEECGKAFHLSTHLTTHKILHTGEKPYRCRECGKAFNHSATLSSHKKIHSGEKPYECDKCGKAFISPSSLSRHEIIHTGEKP

SEQ ID NO: 70851 - protein, 592 aa, Homo sapiens
MGPLQFRDVAIEFSLEEWHCLDTAQRNLYRNVMLENYSNLVFLGIVVSKPDLIAHLEQGKKPLTMKRHEMVANPSVICSHFAQDLWPEQNIKDSFQKVILRRYEKRGHGNLQLIKRCESVDECKVHTGGYNGLNQCSTTTQSKVFQCDKYGKVFHKFSNSNRHNIRHTEKKPFKCIECGKAFNQFSTLITHKKIHTGEKPYICEECGKAFKYSSALNTHKRIHTGEKPYKCDKCDKAFIASSTLSKHEIIHTGKKPYKCEECGKAFNQSSTLTKHKKIHTGEKPYKCEECGKAFNQSSTLTKHKKIHTGEKPYVCEECGKAFKYSRILTTHKRIHTGEKPYKCNKCGKAFIASSTLSRHEFIHMGKKHYKCEECGKAFIWSSVLTRHKRVHTGEKPYKCEECGKAFVASSTLSKHEIIHTGKKPYKCEECGKAFNQSSSLTKHKKIHTGEKPYKCEECGKAFNQSSSLTKHKKIHTGEKPYKCEECGKAFNQSSTLIKHKKIHTREKPYKCEECGKAFHLSTHLTTHKILHTGEKPYRCRECGKAFNHSATLSSHKKIHSGEKPYECDKCGKAFISPSSLSRHEIIHTGEKP

SEQ ID NO: 70852 - protein, 60 aa, Homo sapiens
MVANPSVICSHFAQDLWPEQNIKDSFQKVILRRYEKRGHGNLQLIKRCESTPSEKEKKKK

SEQ ID NO: 70853 - protein, 572 aa, Homo sapiens
MPGPLGSLEMGVLTFRDVALEFSLEEWQCLDTAQQNLYRNVMLENYRNLVFVGIAASKPDLITCLEQGKEPWNVKRHEMVTEPPVVYSYFAQDLWPKQGKKNYFQKVILRTYKKCGRENLQLRKYCKSMDECKVHKECYNGLNQCLTTTQNKIFQYDKYVKVFHKFSNSNRHKIGHTGKKSFKCKECEKSFCMLSHLAQHKRIHSGEKPYKCKECGKAYNEASNLSTHKRIHTGKKPYKCEECGKAFNRLSHLTTHKIIHTGKKPYKCEECGKAFNQSANLTTHKRIHTGEKPYKCEECGRAFSQSSTLTAHKIIHAGEKPYKCEECGKAFSQSSTLTTHKIIHTGEKFYKCEECGKAFSRLSHLTTHKRIHSGEKPYKCEECGKAFKQSSTLTTHKRIHAGEKFYKCEVCSKAFSRFSHLTTHKRIHTGEKPYKCEECGKAFNLSSQLTTHKIIHTGEKPYKCEECGKAFNQSSTLSKHKVIHTGEKPYKCEECGKAFNQSSHLTTHKMIHTGEKPYKCEECGKAFNNSSILNRHKMIHTGEKLYKPESCNNACDNIAKISKYKRNCAGEK

SEQ ID NO: 70854 - protein, 1037 aa, Homo sapiens [sequence omitted]

SEQ ID NO: 70855 - protein, 1006 aa, Homo sapiens
MSRRKQSNPRQIKRSLGDMEAREEVQLVGASHMEQKATAPEAPSPPSADVNSPPPLPPPTSPGGPKELEGQEPEPRPTEEEPGSPWSGPDELEPVVQDGQRRIRARLSLATGLSWGPFHGSVQTRASSPRQAEPSPALTLLLVDEACWLRTLPQALTEAEANTEIHRKDDALWCRVTKPVPAGGLLSVLLTAEPHSTPGHPVKKEPAEPTCPAPAHDLQLLPQQAGMASILATAVINKDVFPCKDCGIWYRSERNLQAHLLYYCASRQGTGSPAAAATDEKPKETYPNERVCPFPQCRKSCPSASSLEIHMRSHSGERPFVCLICLSAFTTKANCERHLKVHTDTLSGVCHSCGFISTTRDILYSHLVTNHMVCQPGSKGEIYSPGAGHPATKLPPDSLGSFQQQHTALQGPLASADLGLAPTPSPGLDRKALAEATNGEARAEPLAQNGGSSEPPAAPRSIKVEAVEEPEAAPILGPGEPGPQAPSRTPSPRSPAPARVKAELSSPTPGSSPVPGELGLAGALFLPQYVFGPDAAPPASEILAKMSELVHSRLQQGAGAGAGGAQTGLFPGAPKGATCFECEITFSNVNNYYVHKRLYCSGRRAPEDAPAARRPKAPPGPARAPPGQPAEPDAPRSSPGPGAREEGAGGAATPEDGAGGRGSEGSQSPGSSVDDAEDDPSRTLCEACNIRFSRHETYTVHKRYYCASRHDPPPRRPAAPPGPPGPAAPPAPSPAAPVRTRRRRKLYELHAAGAPPPPPPGHAPAPESPRPGSGSGSGPGLAPARSPGPAADGPIDLSKKPRRPLPGAPAPALADYHECTACRVSFHSLEAYLAHKKYSCPAAPPPGALGLPAAACPYCPPNGPVRGDLLEHFRLAHGLLLGAPLAGPGVEARTPADRGPSPAPAPAASPQPGSRGPRDGLGPEPQEPPPGPPPSPAAAPEAVPPPPAPPSYSDKGVQTPSKGTPAPLPNGNHRYCRLCNIKFSSLSTFIAHKKYYCSSHAAEHVK

SEQ ID NO: 70856 - protein, 882 aa, Homo sapiens [sequence omitted]

SEQ ID NO: 70857 - protein, 1151 aa, Homo sapiens
MSRRKQSKPRQIKRPLEDAIEDEEEECPSEETDIISKGDFPLEESFSTEFGPENLSCEEVEYFCNKGDDEGIQETAESDGDTQSEKPGQPGVETDDWDGPGELEVFQKDGERKIQSRQQLPVGTTWGPFPGKMDLNNNSLKTKAQVPMVLTAGPKWLLDVTWQGVEDNKNNCIVYSKGGQLWCTTTKAISEGEELIAFVVDFDSRLQAASQMTLTEGMYPARLLDSIQLLPQQAAMASILPTAIVNKDIFPCKSCGIWYRSERNLQAHLMYYCSGRQREAAPVSEENEDSAHQISSLCPFPQCTKSFSNARALEMHLNSHSGVKMEEFLPPGASLKCTVCSYTADSVINFHQHLFSHLTQAAFRCNHCHFGFQTQRELLQHQELHVPSGKLPRESDMEHSPSATEDSLQPATDLLTRSELPQSQKAMQTKDASSDTELDKCEKKTQLFLTNQRPEIQPTTNKQSFSYTKIKSEPSSPRLASSPVQPNIGPSFPVGPFLSQFSFPQDITMVPQASEILAKMSELVHRRLRHGSSSYPPVIYSPLMPKGATCFECNITFNNLDNYLVHKKHYCSSRWQQMAKSPEFPSVSEKMPEALSPNTGQTSINLLNPAAHSADPENPLLQTSCINSSTVLDLIGPNGKGHDKDFSTQTKKLSTSSNNDDKINGKPVDVKNPSVPLVDGESDPNKTTCEACNITFSRHETYMVHKQYYCATRHDPPLKRSASNKVPAMQRTMRTRKRRKMYEMCLPEQEQRPPLVQQRFLDVANLNNPCTSTQEPTEGLGECYHPRCDIFPGIVSKHLETSLTINKCVPVSKCDTTHSSVSCLEMDVPIDLSKKCLSQSERTTTSPKRLLDYHECTVCKISFNKVENYLAHKQNFCPVTAHQRNDLGQLDGKVFPNPESERNSPDVSYERSIIKCEKNGNLKQPSPNGNLFSSHLATLQGLKVFSEAAQLIATKEENRHLFLPQCLYPGAIKKAKGADQLSPYYGIKPSDYISGSLVIHNTDIEQSRNAENESPKGQASSNGCAALKKDSLPLLPKNRGMVIVNGGLKQDERPAANPQQENISQNPQHEDDHKSPSWISENPLAANENVSPGIPSAEEQLSSIAKGVNGSSQAPTSGKYCRLCDIQFNNLSNFITHKKFYCSSHAAEHVK

SEQ ID NO: 70858 - protein, 1019 aa, Homo sapiens
MDLNNNSLKTKAQVPMVLTAGPKWLLDVTWQGVEDNKNNCIVYSKGGQLWCTTTKAISEGEELIAFVVDFDSRLQAASQMTLTEGMYPARLLDSIQLLPQQAAMASILPTAIVNKDIFPCKSCGIWYRSERNLQAHLMYYCSGRQREAAPVSEENEDSAHQISSLCPFPQCTKSFSNARALEMHLNSHSGVKMEEFLPPGASLKCTVCSYTADSVINFHQHLFSHLTQAAFRCNHCHFGFQTQRELLQHQELHVPSGKLPRESDMEHSPSATEDSLQPATDLLTRSELPQSQKAMQTKDASSDTELDKCEKKTQLFLTNQRPEIQPTTNKQSFSYTKIKSEPSSPRLASSPVQPNIGPSFPVGPFLSQFSFPQDITMVPQASEILAKMSELVHRRLRHGSSSYPPVIYSPLMPKGATCFECNITFNNLDNYLVHKKHYCSSRWQQMAKSPEFPSVSEKMPEALSPNTGQTSINLLNPAAHSADPENPLLQTSCINSSTVLDLIGPNGKGHDKDFSTQTKKLSTSSNNDDKINGKPVDVKNPSVPLVDGESDPNKTTCEACNITFSRHETYMVHKQYYCATRHDPPLKRSASNKVPAMQRTMRTRKRRKMYEMCLPEQEQRPPLVQQRFLDVANLNNPCTSTQEPTEGLGECYHPRCDIFPGIVSKHLETSLTINKCVPVSKCDTTHSSVSCLEMDVPIDLSKKCLSQSERTTTSPKRLLDYHECTVCKISFNKVENYLAHKQNFCPVTAHQRNDLGQLDGKVFPNPESERNSPDVSYERSIIKCEKNGNLKQPSPNGNLFSSHLATLQGLKVFSEAAQLIATKEENRHLFLPQCLYPGAIKKAKGADQLSPYYGIKPSDYISGSLVIHNTDIEQSRNAENESPKGQASSNGCAALKKDSLPLLPKNRGMVIVNGGLKQDERPAANPQQENISQNPQHEDDHKSPSWISENPLAANENVSPGIPSAEEQLSSIAKGVNGSSQAPTSGKYCRLCDIQFNNLSNFITHKKFYCSSHAAEHVK

SEQ ID NO: 70859 - protein, 1019 aa, Homo sapiens; identical to SEQ ID NO: 70858

SEQ ID NO: 70860 - protein, 805 aa, Homo sapiens
MDEDGLELQQEPNSFFDATGADGTHMDGDQIVVEVQETVFVSDVVDSDITVHNFVPDDPDSVVIQDVIEDVVIEDVQCPDIMEEADVSETVIIPEQVLDSDVTEEVSLAHCTVPDDVLASDITSASMSMPEHVLTGDSIHVSDVGHVGHVGHVEHVVHDSVVEAEIVTDPLTTDVVSEEVLVADCASEAVIDANGIPVDQQDDDKGNCEDYLMISLDDAGKIEHDGSSGMTMDTESEIDPCKVDGTCPEVIKVYIFKADPGEDDLGGTVDIVESEPENDHGVELLDQNSSIRVPREKMVYMTVNDSQPEDEDLNVAEIADEVYMEVIVGEEDAAAAAAAAAVHEQQMDDNEIKTFMPIAWAAAYGNNSDGIENRNGTASALLHIDESAGLGRLAKQKPKKRRRPDSRQYQTAIIIGPDGHPLTVYPCMICGKKFKSRGFLKRHMKNHPEHLAKKKYRCTDCDYTTNKKISLHNHLESHKLTSKAEKAIECDECGKHFSHAGALFTHKMVHKEKGANKMHKCKFCEYETAEQGLLNRHLLAVHSKNFPHICVECGKGFRHPSELKKHMRIHTGEKPYQCQYCEYRSADSSNLKTHVKTKHSKEMPFKCDICLLTFSDTKEVQQHALIHQESKTHQCLHCDHKSSNSSDLKRHIISVHTKDYPHKCDMCDKGFHRPSELKKHVAAHKGKKMHQCRHCDFKIADPFVLSRHILSVHTKDLPFRCKRCRKGFRQQSELKKHMKTHSGRKVYQCEYCEYSTTDASGFKRHVISIHTKDYPHRCEYCKKGFRRPSEKNQHIMRHHKEVGLP

SEQ ID NO: 70861 - protein, 755 aa, Homo sapiens
MDEDGLELQQEPNSFFDATGADGTHMDGDQIVVEVQETVFVSDVVDSDITVHNFVPDDPDSVVIQDVIEDVVIEDVQCPDIMEEADVSETVIIPEQVLDSDVTEEVSLAHCTVPDDVLASDITSASMSMPEHVLTGDSIHVSDVGHVGHVGHVEHVVHDSVVEAEIVTDPLTTDVVSEEVLVADCASEAVIDANGIPVDQQDDDKGNCEDYLMISCGTVDIVESEPENDHGVELLDQNSSIRVPREKMVYMTVNDSQPEDEDLNVAEIADEVYMEVIVGEEDAAAAAAAAAVHEQQMDDNEIKTFMPIAWAAAYGNNSDGIENRNGTASALLHIDESAGLGRLAKQKPKKRRRPDSRQYQTAIIIGPDGHPLTVYPCMICGKKFKSRGFLKRHMKNHPEHLAKKKYRCTDCDYTTNKKISLHNHLESHKLTSKAEKAIECDECGKHFSHAGALFTHKMVHKEKGANKMHKCKFCEYETAEQGLLNRHLLAVHSKNFPHICVECGKGFRHPSELKKHMRIHTGEKPYQCQYCEYRSADSSNLKTHVKTKHSKEMPFKCDICLLTFSDTKEVQQHALIHQESKTHQCLHCDHKSSNSSDLKRHIISVHTKDYPHKCDMCDKGFHRPSELKKHVAAHKGKKMHQCRHCDFKIADPFVLSRHILSVHTKDLPFRCKRCRKGFRQQSELKKHMKTHSGRKVYQCEYCEYSTTDASGFKRHVISIHTKDYPHRCEYCKKGFRRPSEKNQHIMRHHKEVGLP

SEQ ID NO: 70862 - protein, 805 aa, Homo sapiens; identical to SEQ ID NO: 70860

SEQ ID NO: 70863 - protein, 805 aa, Homo sapiens; identical to SEQ ID NO: 70860

SEQ ID NO: 70864 - protein, 32 aa, Homo sapiens
MDEDGLELQQEPNSFFDATGADGTHMDGDQIV

SEQ ID NO: 70865 - protein, 135 aa, Homo sapiens
MDEDGLELQQEPNSFFDATGADGTHMDGDQIVVEVQETVFVSDVVDSDITVHNFVPDDPDSVVIQDVIEDVVIEDVQCPDIMEEADVSETVIIPEQVLDSDVTEEVSLAHCTVPDDVLASDITSASMSMPEHVLT

SEQ ID NO: 70866 - protein, 527 aa, Homo sapiens
MDTESEIDPCKVDGTCPEVIKVYIFKADPGEDDLGGTVDIVESEPENDHGVELLDQNSSIRVPREKMVYMTVNDSQPEDEDLNVAEIADEVYMEVIVGEEDAAAAAAAAAVHEQQMDDNEIKTFMPIAWAAAYAIIIGPDGHPLTVYPCMICGKKFKSRGFLKRHMKNHPEHLAKKKYRCTDCDYTTNKKISLHNHLESHKLTSKAEKAIECDECGKHFSHAGALFTHKMVHKEKGANKMHKCKFCEYETAEQGLLNRHLLAVHSKNFPHICVECGKGFRHPSELKKHMRIHTGEKPYQCQYCEYRSADSSNLKTHVKTKHSKEMPFKCDICLLTFSDTKEVQQHALIHQESKTHQCLHCDHKSSNSSDLKRHIISVHTKDYPHKCDMCDKGFHRPSELKKHVAAHKGKKMHQCRHCDFKIADPFVLSRHILSVHTKDLPFRCKRCRKGFRQQSELKKHMKTHSGRKVYQCEYCEYSTTDASGFKRHVISIHTKDYPHRCEYCKKGFRRPSEKNQHIMRHHKEVGLP

SEQ ID NO: 70867 - protein, 262 aa, Homo sapiens
MDEDGLELQQEPNSFFDATGADGTHMDGDQIVVEVQETVFVSDVVDSDITVHNFVPDDPDSVVIQDVIEDVVIEDVQCPDIMEEADVSETVIIPEQVLDSDVTEEVSLAHCTVPDDVLASDITSASMSMPEHVLTGDSIHVSDVGHVGHVGHVEHVVHDSVVEAEIVTDPLTTDVVSEEVLVADCASEAVIDANGIPVDQQDDDKGNCEDYLMISCNNSDGIENRNGTASALLHIDESAGLGRLAKQKPKKRRRPDSRQYQT

SEQ ID NO: 70868 - protein, 576 aa, Homo sapiens
MTMDTESEIDPCKVDGTCPEVIKVYIFKADPGEDDLGGTVDIVESEPENDHGVELLDQNSSIRVPREKMVYMTVNDSQPEDEDLNVAEIADEVYMEVIVGEEDAAAAAAAAAVHEQQMDDNEIKTFMPIAWAAAYGNNSDGIENRNGTASALLHIDESAGLGRLAKQKPKKRRRPDSRQYQTAIIIGPDGHPLTVYPCMICGKKFKSRGFLKRHMKNHPEHLAKKKYRCTDCDYTTNKKISLHNHLESHKLTSKAEKAIECDECGKHFSHAGALFTHKMVHKEKGANKMHKCKFCEYETAEQGLLNRHLLAVHSKNFPHICVECGKGFRHPSELKKHMRIHTGEKPYQCQYCEYRSADSSNLKTHVKTKHSKEMPFKCDICLLTFSDTKEVQQHALIHQESKTHQCLHCDHKSSNSSDLKRHIISVHTKDYPHKCDMCDKGFHRPSELKKHVAAHKGKKMHQCRHCDFKIADPFVLSRHILSVHTKDLPFRCKRCRKGFRQQSELKKHMKTHSGRKVYQCEYCEYSTTDASGFKRHVISIHTKDYPHRCEYCKKGFRRPSEKNQHIMRHHKEVGLP

SEQ ID NO: 70869 - protein, 844 aa, Homo sapiens
MDEDGLELQQEPNSFFDATDRVSFCHPGWSTVAPSGSTATSASQAQVICSASRVTGATGADGTHMDGDQIVVEVQETVFVSDVVDSDITVHNFVPDDPDSVVIQDVIEDVVIEDVQCPDIMEEADVSETVIIPEQVLDSDVTEEVSLAHCTVPDDVLASDITSASMSMPEHVLTGDSIHVSDVGHVGHVGHVEHVVHDSVVEAEIVTDPLTTDVVSEEVLVADCASEAVIDANGIPVDQQDDDKGNCEDYLMISLDDAGKIEHDGSSGMTMDTESEIDPCKVDGTCPEVIKVYIFKADPGEDDLGGTVDIVESEPENDHGVELLDQNSSIRVPREKMVYMTVNDSQPEDEDLNVAEIADEVYMEVIVGEEDAAAAAAAAAVHEQQMDDNEIKTFMPIAWAAAYGNNSDGIENRNGTASALLHIDESAGLGRLAKQKPKKRRRPDSRQYQTAIIIGPDGHPLTVYPCMICGKKFKSRGFLKRHMKNHPEHLAKKKYRCTDCDYTTNKKISLHNHLESHKLTSKAEKAIECDECGKHFSHAGALFTHKMVHKEKGANKMHKCKFCEYETAEQGLLNRHLLAVHSKNFPHICVECGKGFRHPSELKKHMRIHTGEKPYQCQYCEYRSADSSNLKTHVKTKHSKEMPFKCDICLLTFSDTKEVQQHALIHQESKTHQCLHCDHKSSNSSDLKRHIISVHTKDYPHKCDMCDKGFHRPSELKKHVAAHKGKKMHQCRHCDFKIADPFVLSRHILSVHTKDLPFRCKRCRKGFRQQSELKKHMKTHSGRKVYQCEYCEYSTTDASGFKRHVISIHTKDYPHRCEYCKKGFRRPSEKNQHIMRHHKEVGLP

SEQ ID NO: 70870 - protein, 173 aa, Homo sapiens
GGCSQYLLLFVDDAGKIEHDGSSGMTMDTESEIDPCKVDGTCPEVIKVYIFKADPGEDDLGGTVDIVESEPENDHGVELLDQNSSIRVPREKMVYMTVNDSQPEDEDLNVAEIADEVYMEVIVGEEDAAAAAAAAAVHEQQMDDNEIKTFMPIAWAAAYGNNSDGIENRNGTA

SEQ ID NO: 70871 - protein, 801 aa, Homo sapiens
MDEDEFELQPQEPNSFFDGIGADATHMDGDQIVVEIQEAVFVSNIVDSDITVHNFVPDDPDSVVIQDVVEDVVIEEDVQCSDILEEADVSENVIIPEQVLDSDVTEEVSLPHCTVPDDVLASDITSTSMSMPEHVLTSESMHVCDIGHVEHMVHDSVVEAEIITDPLTSDIVSEEVLVADCAPEAVIDASGISVDQQDNDKASCEDYLMISLDDAGKIEHDGSTGVTIDAESEMDPCKVDSTCPEVIKVYIFKADPGEDDLGGTVDIVESEPENDHGVELLDQNSSIRVPREKMVYMTVNDSQQEDEDLNVAEIADEVYMEVIVGEEDAAVAAAAAAVHEQQIDEDEMKTFVPIAWAAAYGNNSDGIENRNGTASALLHIDESAGLGRLAKQKPKKKRRPDSRQYQTAIIIGPDGHPLTVYPCMICGKKFKSRGFLKRHMKNHPEHLAKKKYHCTDCDYTTNKKISLHNHLESHKLTSKAEKAIECDECGKHFSHAGALFTHKMVHKEKGANKMHKCKFCEYETAEQGLLNRHLLAVHSKNFPHICVECGKGFRHPSELRKHMRIHTGEKPYQCQYCEYRSADSSNLKTHIKTKHSKEMPFKCDICLLTFSDTKEVQQHTLVHQESKTHQCLHCDHKSSNSSDLKRHVISVHTKDYPHKCEMCEKGFHRPSELKKHVAVHKGKKMHQCRHCDFKIADPFVLSRHILSVHTKDLPFRCKRCRKGFRQQNELKKHMKTHSGRKVYQCEYCEYSTTDASGFKRHVISIHTKDYPHRCEYCKKGFRRPSEKNQHIMRHHKEVGLP

SEQ ID NO: 70872 - protein, 801 aa, Homo sapiens; identical to SEQ ID NO: 70871

SEQ ID NO: 70873 - protein, 610 aa, Homo sapiens
MDEDEFELQPQEPNSFFDGIVDDAGKIEHDGSTGVTIDAESEMDPCKVDSTCPEVIKVYIFKADPGEDDLGGTVDIVESEPENDHGVELLDQNSSIRVPREKMVYMTVNDSQQEDEDLNVAEIADEVYMEVIVGEEDAAVAAAAAAVHEQQIDEDEMKTFVPIAWAAAYGNNSDGIENRNGTASALLHIDESAGLGRLAKQKPKKKRRPDSRQYQTAIIIGPDGHPLTVYPCMICGKKFKSRGFLKRHMKNHPEHLAKKKYHCTDCDYTTNKKISLHNHLESHKLTSKAEKAIECDECGKHFSHAGALFTHKMVHKEKGANKMHKCKFCEYETAEQGLLNRHLLAVHSKNFPHICVECGKGFRHPSELRKHMRIHTGEKPYQCQYCEYRSADSSNLKTHIKTKHSKEMPFKCDICLLTFSDTKEVQQHTLVHQESKTHQCLHCDHKSSNSSDLKRHVISVHTKDYPHKCEMCEKGFHRPSELKKHVAVHKGKKMHQCRHCDFKIADPFVLSRHILSVHTKDLPFRCKRCRKGFRQQNELKKHMKTHSGRKVYQCEYCEYSTTDASGFKRHVISIHTKDYPHRCEYCKKGFRRPSEKNQHIMRHHKEVGLP

SEQ ID NO: 70874 - protein, 91 aa, Homo sapiens
MDEDEFELQPQEPNSFFDGIGADATHMDGDQIVVEIQEAVFVSNIVDSDITVHNFVPDDPDSVVIQDVVEDVVIEEDVQCSDILEEADVSE

SEQ ID NO: 70875 - protein, 724 aa, Homo sapiens
MDGDQIVVEIQEAVFVSNIVDSDITVHNFVPDDPDSVVIQDVVEDVVIEEDVQCSDILEEADVSENVIIPEQVLDSDVTEEVSLPHCTVPDDVLASDITSTSMSMPEHVLTSESMHVCDIGHVEHMVHDSVVEAEIITDPLTSDIVSEEVLVADCAPEAVIDASGISVDQQDNDKASCEDYLMISLDDAGKIEHDGSTGVTIDAESEMDPCKVDSTCPEVIKVYIFKADPGEDDLGGTVDIVESEPENDHGVELLDQNSSIRVPREKMVYMTVNDSQQEDEDLSNNSDGIENRNGTASALLHIDESAGLGRLAKQKPKKKRRPDSRQYQTAIIIGPDGHPLTVYPCMICGKKFKSRGFLKRHMKNHPEHLAKKKYHCTDCDYTTNKKISLHNHLESHKLTSKAEKAIECDECGKHFSHAGALFTHKMVHKEKGANKMHKCKFCEYETAEQGLLNRHLLAVHSKNFPHICVECGKGFRHPSELRKHMRIHTGEKPYQCQYCEYRSADSSNLKTHIKTKHSKEMPFKCDICLLTFSDTKEVQQHTLVHQESKTHQCLHCDHKSSNSSDLKRHVISVHTKDYPHKCEMCEKGFHRPSELKKHVAVHKGKKMHQCRHCDFKIADPFVLSRHILSVHTKDLPFRCKRCRKGFRQQNELKKHMKTHSGRKVYQCEYCEYSTTDASGFKRHVISIHTKDYPHRCEYCKKGFRRPSEKNQHIMRHHKEVGLP

SEQ ID NO: 70876 - protein, 538 aa, Homo sapiens
MARELSESTALDAQSTEDQMELLVIKVEEEEAGFPSSPDLGSEGSRERFRGFRYPEAAGPREALSRLRELCRQWLQPEMHSKEQILELLVLEQFLTILPGNLQSWVREQHPESGEEVVVLLEYLERQLDEPAPQVSGVDQGQELLCCKMALLTPAPGSQSSQFQLMKALLKHESVGSQPLQDRVLQVPVLAHGGCCREDKVVASRLTPESQGLLKVEDVALTLTPEWTQQDSSQGNLCRDEKQENHGSLVSLGDEKQTKSRDLPPAEELPEKEHGKISCHLREDIAQIPTCAEAGEQEGRLQRKQKNATGGRRHICHECGKSFAQSSGLSKHRRIHTGEKPYECEECGKAFIGSSALVIHQRVHTGEKPYECEECGKAFSHSSDLIKHQRTHTGEKPYECDDCGKTFSQSCSLLEHHRIHTGEKPYQCSMCGKAFRRSSHLLRHQRIHTGDKNVQEPEQGEAWKSRMESQLENVETPMSYKCNECERSFTQNTGLIEHQKIHTGEKPYQCNACGKGFTRISYLVQHQRSHVGKNILSQ

SEQ ID NO: 70877 - protein, 390 aa, Homo sapiens
MALLTPAPGSQSSQFQLMKALLKHESVGSQPLQDRVLQVPVLAHGGCCREDKVVASRLTPESQGLLKVEDVALTLTPEWTQQDSSQGNLCRDEKQENHGSLVSLGDEKQTKSRDLPPAEELPEKEHGKISCHLREDIAQIPTCAEAGEQEGRLQRKQKNATGGRRHICHECGKSFAQSSGLSKHRRIHTGEKPYECEECGKAFIGSSALVIHQRVHTGEKPYECEECGKAFSHSSDLIKHQRTHTGEKPYECDDCGKTFSQSCSLLEHHRIHTGEKPYQCSMCGKAFRRSSHLLRHQRIHTGDKNVQEPEQGEAWKSRMESQLENVETPMSYKCNECERSFTQNTGLIEHQKIHTGEKPYQCNACGKGFTRISYLVQHQRSHVGKNILSQ

SEQ ID NO: 70878 - protein, 538 aa, Homo sapiens; identical to SEQ ID NO: 70876

SEQ ID NO: 70879 - protein, 178 aa, Homo sapiens
MARELSESTALDAQSTEDQMELLVIKVEEEEAGFPSSPDLGSEGSRERFRGFRYPEAAGPREALSRLRELCRQWLQPEMHSKEQILELLVLEQFLTILPGNLQSWVREQHPESGEEVVVLLEYLERQLDEPAPQVERTGLVSERCGLFPPEIPDQSEGHSFNIQEFFISFLYREPPWQ

SEQ ID NO: 70880 - protein, 330 aa, Homo sapiens
RQRFRGFRYPEAAGPREALSRLRELCGQWLQPEMHSKEQILELLVLEQFLTILPGNLQSWVREQHPESGEEVVVLLEYLERQLDEPAPQVERTGLVSERCARGIPLRSRSSSSLFVLAFLPWQGITHSCRPFVVSGGEIQTKSRDLPPVKKLPEKEHGKICHLREDIAQIPTHAEAGEQEGRLQRKQKNAIGSRRHYCHECGKSFAQSSGLTKHRRIHTGEKPYECEDCGKTFIGSSALVIHQRVHTGEKPYECEECGKVFSHSSNLIKHQRTHTGEKPYECDDCGKTFSQSCSLLEHHKIHTGEKPYQCNMCGKAFRRNSHLLRHQRIH

SEQ ID NO: 70881 - protein, 545 aa, Homo sapiens
MAREPRKNAALDAQSAEDQTGLLTVKVEKEEASALTAEVRAPCSPARGPERSRQRFRGFRYPEAAGPREALSRLRELCGQWLQPEMHSKEQILELLVLEQFLTILPGNLQSWVREQHPESGEEVVVLLEYLERQLDEPAPQVPVGDQGQELLCCKMALLTQTQGSQSSQCQPMKALFKHESLGSQPLHDRVLQVPGLAQGGCCREDAMVASRLTPGSQGLLKMEDVALTLTPGWTQLDSSQVNLYRDEKQENHSSLVSLGGEIQTKSRDLPPVKKLPEKEHGKICHLREDIAQIPTHAEAGEQEGRLQRKQKNAIGSRRHYCHECGKSFAQSSGLTKHRRIHTGEKPYECEDCGKTFIGSSALVIHQRVHTGEKPYECEECGKVFSHSSNLIKHQRTHTGEKPYECDDCGKTFSQSCSLLEHHKIHTGEKPYQCNMCGKAFRRNSHLLRHQRIHGDKNVQNPEHGESWESQGRTESQWENTEAPVSYKCNECERSFTRNRSLIEHQKIHTGEKPYQCDTCGKGFTRTSYLVQHQRSHVGKKTLSQ

SEQ ID NO: 70882 - protein, 390 aa, Homo sapiens
MALLTQTQGSQSSQCQPMKALFKHESLGSQPLHDRVLQVPGLAQGGCCREDAMVASRLTPGSQGLLKMEDVALTLTPGWTQLDSSQVNLYRDEKQENHSSLVSLGGEIQTKSRDLPPVKKLPEKEHGKICHLREDIAQIPTHAEAGEQEGRLQRKQKNAIGSRRHYCHECGKSFAQSSGLTKHRRIHTGEKPYECEDCGKTFIGSSALVIHQRVHTGEKPYECEECGKVFSHSSNLIKHQRTHTGEKPYECDDCGKTFSQSCSLLEHHKIHTGEKPYQCNMCGKAFRRNSHLLRHQRIHGDKNVQNPEHGESWESQGRTESQWENTEAPVSYKCNECERSFTRNRSLIEHQKIHTGEKPYQCDTCGKGFTRTSYLVQHQRSHVGKKTLSQ

SEQ ID NO: 70883 - protein, 166 aa, Homo sapiens
PTHAEAGEQEGRLQRKQKNAIGSRRHYCHECGKSFAQSSGLTKHRRIHTGEKPYECEDCGKTFIGSSALVIHQRVHTGEKPYECEECGKVFSHSSNLIKHQRTHTGEKPYECDDCGKTFSQSCSLLEHHKIHTGEKPYQCNMCGKAFRRNSHLLRHQRIHVVTEIV

SEQ ID NO: 70884 - protein, 145 aa, Homo sapiens
MEFPDLGKHCSEKTCKQLDFLPVKCDACKQDFCKDHFPYAAHKCPFAFQKDVHVPVCPLCNTPIPVKKGQIPDVVVGDHIDRDCDSHPGKKKEKIFTYRCSKEGCKKKEMLQMVCAQCHGNFCIQHRHPLDHSCRHGSRPTIKAG

SEQ ID NO: 70885 - protein, 180 aa, Homo sapiens
MEFPDLGKHCSEKTCKQLDFLPVKCDACKQDFCKDHFPYAAHKCPFAFQKDVHVPVCPLCNTPIPVKKGQIPDVVVGDHIDRDCDSHPGKKKEKIFTYRCSKEGCKKKEMLQMVCAQCHGNFCIQHRHPLDHSCRHGSRPTIKAGCSPMTVSESRPLGDFLTLAPGGLAQRLGYWFTRLM

SEQ ID NO: 70886 - protein, 257 aa, Homo sapiens
MEFPDLGAHCSEPSCQRLDFLPLKCDACSGIFCADHVAYAQHHCGSAYQKDIQVPVCPLCNVPVPVARGEPPDRAVGEHIDRDCRSDPAQQKRKIFTNKCERAGCRQREMMKLTCERCSRNFCIKHRHPLDHDCSGEGHPTSRAGLAAISRAQAVASTSTVPSPSQTMPSCTSPSRATTRSPSWTAPPVIALQNGLSEDEALQRALEMSLAETKPQVPSCQEEEDLALAQALSASEAEYQRQQAQSRSSKPSNCSLC

SEQ ID NO: 70887 - protein, 176 aa, Homo sapiens
MEFPDLGAHCSEPSCQRLDFLPLKCDACSGIFCADHVAYAQHHCGSAYQKDIQVPVCPLCNVPVPVARGEPPDRAVGEHIDRDCRSDPAQQKRKIFTNKCERAGCRQREMMKLTCERCSRNFCIKHRHPLDHDCSGEGHPTSRAGLAAISRAQAVASTSTVPSPSQTMPSCTSPSR

SEQ ID NO: 70888 - protein, 257 aa, Homo sapiens; identical to SEQ ID NO: 70886

SEQ ID NO: 70889 - protein, 176 aa, Homo sapiens; identical to SEQ ID NO: 70887

SEQ ID NO: 70890 - protein, 50 aa, Homo sapiens
MEFPDLGAHCSEPSCQRLDFLPLKCDACSGIFCADHVAYAQHHCGSAYQK

SEQ ID NO: 70891 - protein, 225 aa, Homo sapiens
MEFPDLGAHCSEPSCQRLDFLPLKCDACSGIFCADHVAYAQHHCGSAYQKDIQVPVCPLCNVPVPVARGEPPDRAVGEHIDRDCRSDPAQQKRKIFTNKCERAGCRQREMMKLTCERCSRNFCIKHRHPLDHDCSGEGHPTSRAGLAAISRAQAVASTSTVPSPSQTMPSCTSPSRATTRSPSWTAPPVIALQNGLVSWAEVGWTETNTQRVKSKDAGLLSPFVE

SEQ ID NO: 70892 - protein, 227 aa, Homo sapiens
MGDAGSERSKAPSLPPRCPCGFWGSSKTMNLCSKCFADFQKKQPDDDSAPSTSNSQSDLFSEETTSDNNNTSITTPTLSPSQQPLPTELNVTSPSKEECGPCTDTAHVSLITPTKRSCGTDSQSENEASPVKRPRLLENTERSEETSRSKQKSRRRCFQCQTKLELVQQELGSCRCGYVFCMLHRLPEQHDCTFDHMGRGREEAIMKMVKLDRKVGRSCQRIGEGCS

SEQ ID NO: 70893 - protein, 213 aa, Homo sapiens
MAQETNQTPGPMLCSTGCGFYGNPRTNGMCSVCYKEHLQRQQNSGRMSPMGTASGSNSPTSDSASVQRADTSLNNCEGAAGSTSEKSRNVPVAALPVTQQMTEMSISREDKITTPKTEVSEPVVTQPSPSVSQPSTSQSEEKAPELPKPKKNRCFMCRKKVGLTGFDCRCGNLFCGLHRYSDKHNCPYDYKAEAAAKIRKENPVVVAEKIQRI

SEQ ID NO: 70894 - protein, 213 aa, Homo sapiens; identical to SEQ ID NO: 70893

SEQ ID NO: 70895 - protein, 211 aa, Homo sapiens
MAKPEQAADGGVRGRGARPPAQEAQRRRRHPVVVARDLAPGVPGSLHSTQKNMAQETNQTPGPMLCSTGCGFYGNPRTNGMCSVCYKEHLQRQQNSGRMSPMGTASGSNSPTSDSASVQRADTSLNNCEGAAGSTSEKSRNVPVAALPVTQQMTEMSISREDKITTPKTEVSEPVVTQPSPSVSQPSTSQSEEKAPELPKPKKNRCFMCRK

SEQ ID NO: 70896 - protein, 213 aa, Homo sapiens; identical to SEQ ID NO: 70893

SEQ ID NO: 70897 - protein, 213 aa, Homo sapiens; identical to SEQ ID NO: 70893

SEQ ID NO: 70898 - protein, 208 aa, Homo sapiens
MAQETNHSQVPMLCSTGCGFYGNPRTNGMCSVCYKEHLQRQNSSNGRISPPATSVSSLSESLPVQCTDGSVPEAQSALDSTSSSMQPSPVSNQSLLSESVASSQLDSTSVDKAVPETEDVQASVSDTAQQPSEEQSKSLEKPKQKKNRCFMCRKKVGLTGFECRCGNVYCGVHRYSDVHNCSYNYKADAAEKIRKENPVVVGEKIQKI

SEQ ID NO: 70899 - protein, 208 aa, Homo sapiens; identical to SEQ ID NO: 70898

SEQ ID NO: 70900 - protein, 196 aa, Homo sapiens
MAQETNHSQVPMLCSTGCGFYGNPRTNGMCSVCYKEHLQRQNSSNGRISPPVQCTDGSVPEAQSALDSTSSSMQPSPVSNQSLLSESVASSQLDSTSVDKAVPETEDVQASVSDTAQQPSEEQSKSLEKPKQKKNRCFMCRKKVGLTGFECRCGNVYCGVHRYSDVHNCSYNYKADAAEKIRKENPVVVGEKIQKI

SEQ ID NO: 70901 - protein, 208 aa, Homo sapiens; identical to SEQ ID NO: 70898

SEQ ID NO: 70902 - protein, 208 aa, Homo sapiens; identical to SEQ ID NO: 70898

SEQ ID NO: 70903 - protein, 208 aa, Homo sapiens; identical to SEQ ID NO: 70898

SEQ ID NO: 70904 - protein, 694 aa, Homo sapiens
MENKSLESSQTDLKLVAHPRAKSKVWKYFGFDTNAEGCILQWKKIYCRICMAQIAYSGNTSNLSYHLEKNHPEEFCEFVKSNTEQMREAFATAFSKLKPESSQQPGQDALAVKAGHGYDSKKQQELTAAVLGLICEGLYPASIVDEPTFKVLLKTADPRYELPSRKYISTKAIPEKYGAVREVILKELAEATWCGISTDMWRSENQNRAYVTLAAHFLGLGAPNCLSMGSRCLKTFEVPEENTAETITRVLYEVFIEWGISAKVFGATTNYGKDIVKACSLLDVAVHMPCLGHTFNAGIQQAFQLPKLGALLSRCRKLVEYFQQSAVAMYMLYEKQKQQNVAHCMLVSNRVSWWGSTLAMLQRLKEQQFVIAGVLVEDSNNHHLMLEASEWATIEGLVELLQPFKQVAEMLSASRYPTISMVKPLLHMLLNTTLNIKETDSKELSMAKEVIAKELSKTYQETPEIDMFLNVATFLDPRYKRLPFLSAFERQQVENRVVEEAKGLLDKVKDGGYRPAEDKIFPVPEEPPVKKLMRTSTPPPASVINNMLAEIFCQTGGVEDQEEWHAQVVEELSNFKSQKVLGLNEDPLKWWSDRLALFPLLPKVLQKYWCVTATRVAPERLFGSAANVVSAKRNRLAPAHVDEQVFLYENARSGAEAEPEDQDEGEWGLDQEQVFSLGDGVSGGFFGIRDSSFL

SEQ ID NO: 70905 - protein, 694 aa, Homo sapiens; identical to SEQ ID NO: 70904

SEQ ID NO: 70906 - protein, 694 aa, Homo sapiens; identical to SEQ ID NO: 70904

SEQ ID NO: 70907 - protein, 272 aa, Homo sapiens
MENKSLESSQTDLKLVAHPRAKSKVWKYFGFDTNAEGCILQWKKIYCRICMAQIAYSGNTSNLSYHLEKNHPEEFCEFVKSNTEQMREAFATAFSKLKPESSQQPGQDALAVKAGHGYDSKKQQELTAAVLGLICEGLYPASIVDEPTFKVLLKTADPRYELPSRKYISTKAIPEKYGAVREVILKELAEATWCGISTDMWRSENQNRAYVTLAAHFLGLGAPNCLSMGSRCLKTFEVPEENTAETITRVLYEVFIEWGISAKVFGATTNYG

SEQ ID NO: 70908 - protein, 1171 aa, Homo sapiens
MENNLKTCPKEDGDFVSDKIKFKIEEEDDDGIPPDSLERMDFKSEQEDMKQTDSGGERAGLGGTGCSCKPPGKYLSAESEDDYGALFSQYSSTLYDVAMEAVTQSLLSSRNMSSRKKSPAWKHFFISPRDSTKAICMYCVKEFSRGKNEKDLSTSCLMRHVRRAHPTVLIQENGSVSAVSSFPSPSLLLPPQPADAGDLSTILSPIKLVQKVASKIPSPDRITEESVSVVSSEEISSDMSVSEKCGREEALVGSSPHLPALHYDEPAENLAEKSLPLPKSTSGSRRRSAVWKHFYLSPLDNSKAVCIHCMNEFSRGKNGKDLGTSCLIRHMWRAHRAIVLQENGGTGIPPLYSTPPTLLPSLLPPEGELSSVSSSPVKPVRESPSASSSPDRLTEDLQSHLNPGDGLMEDVAAFSSSDDIGEASASSPEKQQADGLSPRLFESGAIFQQNKKVMKRLKSEVWHHFSLAPMDSLKAECRYCGCAISRGKKGDVGTSCLMRHLYRRHPEVVGSQKGFLGASLANSPYATLASAESSSSKLTDLPTVVTKNNQVMFPVNSKKTSKLWNHFSICSADSTKVVCLHCGRTISRGKKPTNLGTSCLLRHLQRFHSNVLKTEVSETARPSSPDTRVPRGTELSGASSFDDTNEKFYDSHPVAKKITSLIAEMIALDLQPYSFVDNVGFNRLLEYLKPQYSLPAPSYFSRTAIPGMYDNVKQIIMSHLKEAESGVIHFTSGIWMSNQTREYLTLTAHWVSFESPARPRCDDHHCSALLDVSQVDCDYSGNSIQKQLECWWEAWVTSTGLQVGITVTDNASIGKTLNEGEHSSVQCFSHTVNLIVSEAIKSQRMVQNLLSLARKICERVHRSPKAKEKLAELQREYALPQHHLIQDVPSKWSTSFHMLERLIEQKRAINEMSVECNFRELISCDQWEVMQSVCRALKPFEAASREMSTQMSTLSQVIPMVHILNRKVEMLFEETMGIDTMLRSLKEAMVSRLSATLHDPRYVFATLLDPRYKASLFTEEEAEQYKQDLIRELELMNSTSEDVAASHRCDAGSPSKDSAAEENLWSLVAKVKKKDPREKLPEAMVLAYLEEEVLEHSCDPLTYWNLKKASWPGLSALAVRFLGCPPSIVPSEKLFNTPTENGSLGQSRLMMEHFEKLIFLKVNLPLIYFQY

SEQ ID NO: 70909 - protein, 979 aa, Homo sapiens
MSVCTLSVPVSSLSPGRRCNTFSDSGILGCVPINSNTDEEDVVEEKMVAEGVNKEAKQPAKKKRKKGLRIKGKRRRKKLILAKKFSKDLGSGRPVADAPALLASNDPEQDEESLFESNIEKQIYLPSTRAKTSIVWHFFHVDPQYTWRAICNLCEKSVSRGKPGSHLGTSTLQRHLQARHSPHWTRANKFGVASGEEDFTLDVSLSPSSGSNGSFEYIPTDPLDDNRMGKKHDKSASDALRAERGRFLIKSNIVKHALIPGTRAKTSAVWNFFYTDPQHISRAVCNICKRSVSRGRPGSHLGTSTLQRHLQATHPIHWAVANKDSGAVANGLDEAETERSDLLSDTLHGEKSTGSQDLTAEDLSDSDSDEPMLEVENRSESPIPVAEQGTLMRAQERETTCCGNPVSSHISQAIIQMIVEDMHPYNYFSTPAFQRFMQIVAPDYRLPSETYFFTKAVPQLYDCVREKIFLTLENVQSQKIHLTVDIWTHDPSTDYFIVTVHWVSLETASFLNNGRIPDFRKWAVLCVTGLAKDCLITNILQELNDQIGLWLSPNFLIPSFIVSDNSSNVVHAIKDGGFTHVPCFLHCLNMVIQDFFCEHKSIENMLVAARKTCHHFSHSVKARQILQEFQNDHQLPWKNLKQDETGHWISTFYMLKWLLEHCYSVHHSLGRASGVVLTSLQWTLMTYVCDILKPFEEATQKVSVKTAGLNQVLPLIHHLLLSLQKLREDFQVRGITQALNLVDSLSLKLETDTLLSAMLKSKPCILATLLDPCFKNSLEDFFPQGADLETYKQFLAEEVCNYMESSPEICQIPTSEASCPSVTVGADSFTSSLKEGTSSSGSVDSSAVDNVALGSKSFMFPSAVAVVDEYFKEKYSEFSGGDDPLIYWQRKISIWPALTQVAIQYLSCPMCSWQSECIFTKNSHFHPKQIMSLDFDNIEQLMFLKMNLKNVNYDYSTLVLSWDPEQNEVVQSSEKEILP

SEQ ID NO: 70910 - protein, 1645 aa, Homo sapiens
MEESKTLKSENHEPKKNVICEESKAVQVIGNQTLKARNDKSVKEIENSSPNRNSSKKNKQNDICIEKTEVKSCKVNAANLPGPKDLGLVLRDQSHCKAKKFPNSPVKAEKATISQAKSEKATSLQAKAEKSPKSPNSVKAEKASSYQMKSEKVPSSPAEAEKGPSLLLKDMRQKTELQQIGKKIPSSFTSVDKVNIEAVGGEKCALQNSPRSQKQQTCTDNTGDSDDSASGIEDVSDDLSKMKNDESNKENSSEMDYLENATVIDESALTPEQRLGLKQAEERLERDHIFRLEKRSPEYTNCRYLCKLCLIHIENIQGAHKHIKEKRHKKNILEKQEESELRSLPPPSPAHLAALSVAVIELAKEHGITDDDLRVRQEIVEEMSKVITTFLPECSLRLYGSSLTRFALKSSDVNIDIKFPPKMNHPDLLIKVLGILKKNVLYVDVESDFHAKVPVVVCRDRKSGLLCRVSAGNDMACLTTDLLTALGKIEPVFIPLVLAFRYWAKLCYIDSQTDGGIPSYCFALMVMFFLQQRKPPLLPCLLGSWIEGFDPKRMDDFQLKGIVEEKFVKWECNSSSATEKNSIAEENKAKADQPKDDTKKTETDNQSNAMKEKHGKSPLALETPNRVSLGQLWLELLKFYTLDFALEEYVICVRIQDILTRENKNWPKRRIAIEDPFSVKRNVARSLNSQLVYEYVVERFRAAYRYFACPQTKGGNKSTVDFKKREKGKISNKKPVKSNNMATNGCILLGETTEKINAEREQPVQCDEMDCTSQRCIIDNNNLLVNELDFADHGQDSSSLSTSKSSEIEPKLDKKQDDLAPSETCLKKELSQCNCIDLSKSPDPDKSTGTDCRSNLETESSHQSVCTDTSATSCNCKATEDASDLNDDDNLPTQELYYVFDKFILTSGKPPTIVCSICKKDGHSKNDCPEDFRKIDLKPLPPMTNRFREILDLVCKRCFDELSPPCSEQHNREQILIGLEKFIQKEYDEKARLCLFGSSKNGFGFRDSDLDICMTLEGHENAEKLNCKEIIENLAKILKRHPGLRNILPITTAKVPIVKFEHRRSGLEGDISLYNTLAQHNTRMLATYAAIDPRVQYLGYTMKVFAKRCDIGDASRGSLSSYAYILMVLYFLQQRKPPVIPVLQEIFDGKQIPQRMVDGWNAFFFDKTEELKKRLPSLGKNTESLGELWLGLLRFYTEEFDFKEYVISIRQKKLLTTFEKQWTSKCIAIEDPFDLNHNLGAGVSRKMTNFIMKAFINGRKLFGTPFYPLIGREAEYFFDSRVLTDGELAPNDRCCRVCGKIGHYMKDCPKRKSSLLFRLKKKDSEEEKEGNEEEKDSRDVLDPRDLHDTRDFRDPRDLRCFICGDAGHVRRECPEVKLARQRNSSVAAAQLVRNLVNAQQVAGSAQQQGDQSIRTRQSSECSESPSYSPQPQPFPQNSSQSAAITQPSSQPGSQPKLGPPQQGAQPPHQVQMPLYNFPQSPPAQYSPMHNMGLLPMHPLQIPAPSWPIHGPVIHSAPGSAPSNIGLNDPSIIFAQPAARPVAIPNTSHDGHWPRTVAPNSLVNSGAVGNSEPGFRGLTPPIPWEHAPRPHFPLVPASWPYGLHQNFMHQGNARFQPNKPFYTQDRCATRRCRERCPHPPRGNVSE

SEQ ID NO: 70911 - protein, 1644 aa, Homo sapiens
MEESKTLKSENHEPKKNVICEESKAVQVIGNQTLKARNDKSVKEIENSSPNRNSSKKNKQNDICIEKTEVKSCKVNAANLPGPKDLGLVLRDQSHCKAKKFPNSPVKAEKATISQAKSEKATSLQAKAEKSPKSPNSVKAEKASSYQMKSEKVPSSPAEAEKGPSLLLKDMRQKTELQQIGKKIPSSFTSVDKVNIEAVGGEKCALQNSPRSQKQQTCTDNTGDSDDSASGIEDVSDDLSKMKNDESNKENSSEMDYLENATVIDESALTPEQRLGLKQAEERLERDHIFRLEKRSPEYTNCRYLCKLCLIHIENIQGAHKHIKEKRHKKNILEKQEESELRSLPPPSPAHLAALSVAVIELAKEHGITDDDLRVRQEIVEEMSKVITTFLPECSLRLYGSSLTRFALKSSDVNIDIKFPPKMNHPDLLIKVLGILKKNVLYVDVESDFHAKVPVVVCRDRKSGLLCRVSAGNDMACLTTDLLTALGKIEPVFIPLVLAFRYWAKLCYIDSQTDGGIPSYCFALMVMFFLQQRKPPLLPCLLGSWIEGFDPKRMDDFQLKGIVEEKFVKWECNSSSATEKNSIAEENKAKADQPKDDTKKTETDNQSNAMKEKHGKSPLALETPNRVSLGQLWLELLKFYTLDFALEEYVICVRIQDILTRENKNWPKRRIAIEDPFSVKRNVARSLNSQLVYEYVVERFRAAYRYFACPQTKGGNKSTVDFKKREKGKISNKKPVKSNNMATNGCILLGETTEKINAEREQPVQCDEMDCTSQRCIIDNNNLLVNELDFADHGQDSSSLSTSKSSEIEPKLDKKQDDLAPSETCLKKELSQCNCIDLSKSPDPDKSTGTDCRSNLETESSHQSVCTDTSATSCNCKATEDASDLNDDDNLPTQELYYVFDKFILTSGKPPTIVCSICKKDGHSKNDCPEDFRKIDLKPLPPMTNRFREILDLVCKRCFDELSPPCSEQHNREQILIGLEKFIQKEYDEKARLCLFGSSKNGFGFRDSDLDICMTLEGHENAEKLNCKEIIENLAKILKRHPGLRNILPITTAKVPIVKFEHRRSGLEGDISLYNTLAQHNTRMLATYAAIDPRVQYLGYTMKVFAKRCDIGDASRGSLSSYAYILMVLYFLQQRKPPVIPVLQEIFDGKQIPQRMVDGWNAFFFDKTEELKKRLPSLGKNTESLGELWLGLLRFYTEEFDFKEYVISIRQKKLLTTFEKQWTSKCIAIEDPFDLNHNLGAGVSRKMTNFIMKAFINGRKLFGTPFYPLIGREAEYFFDSRVLTDGELAPNDRCCRVCGKIGHYMKDCPKRKSLLFRLKKKDSEEEKEGNEEEKDSRDVLDPRDLHDTRDFRDPRDLRCFICGDAGHVRRECPEVKLARQRNSSVAAAQLVRNLVNAQQVAGSAQQQGDQSIRTRQSSECSESPSYSPQPQPFPQNSSQSAAITQPSSQPGSQPKLGPPQQGAQPPHQVQMPLYNFPQSPPAQYSPMHNMGLLPMHPLQIPAPSWPIHGPVIHSAPGSAPSNIGLNDPSIIFAQPAARPVAIPNTSHDGHWPRTVAPNSLVNSGAVGNSEPGFRGLTPPIPWEHAPRPHFPLVPASWPYGLHQNFMHQGNARFQPNKPFYTQDRCATRRCRERCPHPPRGNVSE

SEQ ID NO: 70912 - protein, 87 aa, Homo sapiens
MEESKTLKSENHEPKKNVICEESKAVQVIGNQTLKARNDKSVKEIENSSPNRNSSKKNKQNDICIEKTEVKSCKVNAANLPGPKDLG

SEQ ID NO: 70913 - protein, 77 aa, Homo sapiens
MEESKTLKSENHEPKKNVICEESKAVQVIGNQTLKARNDKSVKEIENSSPNRNSSKKNKQNDICIEKTEVKSCKVNA

SEQ ID NO: 70914 - protein, 402 aa, Homo sapiens
MASIIARVGNSRRLNAPLPPWAHSMLRSLGRSLGPIMASMADRNMKLFSGRVVPAQGEETFENWLTQVNGVLPDWNMSEEEKLKRLMKTLRGPAREVMRVLQATNPNLSVADFLRAMKLVFGESESSVTAHGKFFNTLQAQGEKASLYVIRLEVQLQNAIQAGIIAEKDANRTRLQQLLLGGELSRDLRLRLKDFLRMYANEQERLPNFLELIRMVREEEDWDDAFIKRKRPKRSESMVERAVSPVAFQGSPPIVIGSADCNVIEIDDTLDDSDEDVILVESQDPPLPSWGAPPLRDRARPQDEVLVIDSPHNSRAQFPSTSGGSGYKNNGPGEMRRARKRKHTIRCSYCGEEGHSKETCDNESDKAQVFENLIITLQELTHTEMERSRVAPGEYNDFSEPL

SEQ ID NO: 70915 - protein, 513 aa, Homo sapiens
MAASRNGFEAVEAEGSAGCRGSSGMEVVLPLDPAVPAPLCPHGPTLLFVKVTQGKEETRRFYACSACRDRKDCNFFQWEDEKLSGARLAAREAHNRRCQPPLSRTQCVERYLKFIELPLTQRKFCQTCQQLLLPDDWGQHSEHQVLGNVSITQLRRPSQLLYPLENKKTNAQYLFADRSCQFLVDLLSALGFRRVLCVGTPRLHELIKLTASGDKKSNIKSLLLDIDFRYSQFYMEDSFCHYNMFNHHFFDGKTALEVCRAFLQEDKGEGIIMVTDPPFGGLVEPLAITFKKLIAMWKEGQSQDDSHKELPIFWIFPYFFESRICQFFPSFQMLDYQVDYDNHALYKHGKTGRKQSPVRIFTNIPPNKIILPTEEGYRFCSPCQRYVSLENQHCELCNSCTSKDGRKWNHCFLCKKCVKPSWIHCSICNHCAVPDHSCEGPKHGCFICGELDHKRSTCPNIATSKRANKAVRKQKQRKSNKMKMETTKGQSMNHTSATRRKKRRERAHQYLGS

SEQ ID NO: 70916 - protein, 127 aa, Homo sapiens [sequence omitted]

SEQ ID NO: 70917 - protein, 492 aa, Homo sapiens
MVILLLQHGADPTLIDGEGFSSIHLAVLFQHMPIIAYLISKGQSVNMTDVNGQTPLMLSAHKVIGPEPTGFLLKFNPSLNVVDKIHQNTPLHWAVAAGNVNAVDKLLEAGSSLDIQNVKGETPLDMALQNKNQLIIHMLKTEAKMRANQKFRLWRWLQKCELFLLLMLSVITMWAIGYILDFNSDSWLLKGCLLVTLFFLTSLFPRFLVGYKNLVYLPTAFLLSSVFWIFMTWFILFFPDLAGAPFYFSFIFSIVAFLYFFYKTWATDPGFTKASEEEKKVNIITLAETGSLDFRTFCTSCLIRKPLRSLHCHVCNCCVARYDQHCLWTGRCIGFGNHHYYIFFLFFLSMVCGWIIYGSFIYLSSHCATTFKEDGLWTYLNQIVACSPWVLYILMLATFHFSWSTFLLLNQLFQIAFLGLTSHERISLQKQSKHMKQTLSLRKTPYNLGFMQNLADFFQCGCFGLVKPCVVDWTSQYTMVFHPAREKVLRSV

SEQ ID NO: 70918 - protein, 622 aa, Homo sapiens
MEGPGLGSQCRNHSHGPHPPGFGRYGICAHENKELANAREALPLIEDSSNCDIVKATQYGIFERCKELVEAGYDVRQPDKENVSLLHWAAINNRLDLVKFYISKGAVVDQLGGDLNSTPLHWAIRQGHLPMVILLLQHGADPTLIDGEGFSSIHLAVLFQHMPIIAYLISKGQSVNMTDVNGQTPLMLSAHKVIGPEPTGFLLKFNPSLNVVDKIHQNTPLHWAVAAGNVNAVDKLLEAGSSLDIQNVKGETPLDMALQNKNQLIIHMLKTEAKMRANQKFRLWRWLQKCELFLLLMLSVITMWAIGYILDFNSDSWLLKGCLLVTLFFLTSLFPRFLVGYKNLVYLPTAFLLSSVFWIFMTWFILFFPDLAGAPFYFSFIFSIVAFLYFFYKTWATDPGFTKASEEEKKVNIITLAETGSLDFRTFCTSCLIRKPLRSLHCHVCNCCVARYDQHCLWTGRCIGFGNHHYYIFFLFFLSMVCGWIIYGSFIYLSSHCATTFKEDGLWTYLNQIVACSPWVLYILMLATFHFSWSTFLLLNQLFQIAFLGLTSHERISLQKQSKHMKQTLSLRKTPYNLGFMQNLADFFQCGCFGLVKPCVVDWTSQYTMVFHPAREKVLRSV

SEQ ID NO: 70919 - protein, 187 aa, Homo sapiens
MRRGWKMALSGGLRCCRRVLSWVPVLVIVLVVLWSYYAYVFELCLVTVLSPAEKVIYLILYHAIFVFFTWTYWKSIFTLPQQPNQKFHLSYTDKERYENEERPEVQKQMLVDMAKKLPVYTRTGSGAVRFCDRCHLIKPDRCHHCSVCAMCVLKMDHHCPWGNYPVFALSSMSFFFSLWPACFLSAL

SEQ ID NO: 70920 - protein, 337 aa, Homo sapiens
MRRGWKMALSGGLRCCRRVLSWVPVLVIVLVVLWSYYAYVFELCLVTVLSPAEKVIYLILYHAIFVFFTWTYWKSIFTLPQQPNQKFHLSYTDKERYENEERPEVQKQMLVDMAKKLPVYTRTGSGAVRFCDRCHLIKPDRCHHCSVCAMCVLKMDHHCPWVNNCIGFSNYKFFLQFLAYSVLYCLYIATTVFSYFIKYWRGELPSVRSKFHVLFLLFVACMFFVSLVILFGYHCWLVSRNKTTLEAFCTPVFTSGPEKNGFNLGFIKNIQQVFGDKKKFWLIPIGSSPGDGHSFPMRSMNESQNPLLANEETWEDNEDDNQDYPEGSSSLAVETET

SEQ ID NO: 70921 - protein, 328 aa, Homo sapiens
MRRGWKMALSGGLRCCRRVLSWVPVLVIVLVVLWSYYAYVFELCLVIYLILYHAIFVFFTWTYWKSIFTLPQQPNQKFHLSYTDKERYENEERPEVQKQMLVDMAKKLPVYTRTGSGAVRFCDRCHLIKPDRCHHCSVCAMCVLKMDHHCPWVNNCIGFSNYKFFLQFLAYSVLYCLYIATTVFSYFIKYWRGELPSVRSKFHVLFLLFVACMFFVSLVILFGYHCWLVSRNKTTLEAFCTPVFTSGPEKNGFNLGFIKNIQQVFGDKKKFWLIPIGSSPGDGHSFPMRSMNESQNPLLANEETWEDNEDDNQDYPEGSSSLAVETET

SEQ ID NO: 70922 - protein, 673 aa, Homo sapiens
MPRSPGTRLKPAKYIPVATAAALLVGSSTLFFVFTCPWLTRAVSPAVPVYNGIIFLFVLANFSMATFMDPGVFPRADEDEDKEDDFRAPLYKNVDVRGIQVRMKWCATCHFYRPPRCSHCSVCDNCVEVTGKFRGGVNPFTRGCCGNVEHVLCSPLAPRYVVEPPRLPLAVSLKPPFLRPELLDRAAPLKVKLSDNGLKAGLGRSKSKGSLDRLDEKPLDLGPPLPPKIEAGTFSSDLQTPRPGSAESALSVQRTSPPTPAMYKFRPAFPTGPKVPFCGPGEQVPGPDSLTLGDDSIRSLDFVSEPSLDLPDYGPGGLHAAYPPSPPLSASDAFSGALRSLSLKASSRRGGDHVALQPLRSEGGPPTPHRSIFAPHALPNRNGSLSYDSLLNPGSPGGHACPAHPAVGVAGYHSPYLHPGATGDPPRPLPRSFSPVLGPRPREPSPVRYDNLSRTIMASIQERKDREERERLLRSQADSLFGDSGVYDAPSSYSLQQASVLSEGPRGPALRYGSRDDLVAGPGFGGARNPALQTSLSSLSSSVSRAPRTSSSSLQADQASSNAPGPRPSSGSHRSPARQGLPSPPGTPHSPSYAGPKAVAFIHTDLPEPPPSLTVQRDHPQLKTPPSKLNGQSPGLARLGPATGPPGPSASPTRHTLVKKVSGVGGTTYEISV

SEQ ID NO: 70923 - protein, 765 aa, Homo sapiens
MPRSPGTRLKPAKYIPVATAAALLVGSSTLFFVFTCPWLTRAVSPAVPVYNGIIFLFVLANFSMATFMDPGVFPRADEDEDKEDDFRAPLYKNVDVRGIQVRMKWCATCHFYRPPRCSHCSVCDNCVEDFDHHCPWVNNCIGRRNYRYFFLFLLSLSAHMVGVVAFGLVYVLNHAEGLGAAHTTITMAVMCVAGLFFIPVIGLTGFHVVLVTRGRTTNEQVTGKFRGGVNPFTRGCCGNVEHVLCSPLAPRYVVEPPRLPLAVSLKPPFLRPELLDRAAPLKVKLSDNGLKAGLGRSKSKGSLDRLDEKPLDLGPPLPPKIEAGTFSSDLQTPRPGSAESALSVQRTSPPTPAMYKFRPAFPTGPKVPFCGPGEQVPGPDSLTLGDDSIRSLDFVSEPSLDLPDYGPGGLHAAYPPSPPLSASDAFSGALRSLSLKASSRRGGDHVALQPLRSEGGPPTPHRSIFAPHALPNRNGSLSYDSLLNPGSPGGHACPAHPAVGVAGYHSPYLHPGATGDPPRPLPRSFSPVLGPRPREPSPVRYDNLSRTIMASIQERKDREERERLLRSQADSLFGDSGVYDAPSSYSLQQASVLSEGPRGPALRYGSRDDLVAGPGFGGARNPALQTSLSSLSSSVSRAPRTSSSSLQADQASSNAPGPRPSSGSHRSPARQGLPSPPGTPHSPSYAGPKAVAFIHTDLPEPPPSLTVQRDHPQLKTPPSKLNGQSPGLARLGPATGPPGPSASPTRHTLVKKVSGVGGTTYEISV

SEQ ID NO: 70924 - protein, 778 aa, Homo sapiens
MPRSPGTRLKPAKYIPVATAAALLVGSSTLFFVFTCPWLTRAVSPAVPVYNGIIFLFVLANFSMATFMDPGVFPRADEDEDKEDDFRAPLYKNVDVRGIQVRMKWCATCHFYRPPRCSHCSVCDNCVEDFDHHCPWVNNCIGRRNYRYFFLFLLSLSAHMVGVVAFGLVYVLNHAEGLGAAHTTITMAVMCVAGLFFIPVIGLTGFHVVLVTRGRTTNEQVTGKFRGGVNPFTRGCCGNVEHVLCSPLAPRYVVEPPRLPLAVSLKPPFLRPELLDRAAPLKVKLSDNGLKAGLGRSKSKGSLDRLDEKPLDLGPPLPPKIEAGTFSSDLQTPRPGSAESALSVQRTSPPTPAMYKFRPAFPTGPKVPFCGPGEQVPGPDSLTLGDDSIRSLDFVSEPSLDLPDYGPGGLHAAYPPSPPLSASDAFSGALRSLSLKASSRRGGDHVALQPLRSEGGPPTPHRSIFAPHALPNRNGSLSYDSLLNPGSPGGHACPAHPAVGVAGYHSPYLHPGATGDPPRPLPRSFSPVLGPRPREPSPVRYDNLSRTIMASIQERKDREERERLLRSQADSLFGDSGVYDAPSSYSLQQASVLSEGPRGPALRYGSRDDLVAGPGFGGARNPALQTSLSSLSSSVSRAPRTSSSSLQADQASSNAPGPRPSSGSHRSPARQGLPSPPGTPHSPSYAGPKAVAFIHTDLPEPPPSLTVQRGRIGTCTRGWGRRGQPWVPPGLHLCHLGRPEDRPPLRAPWSQAAGAPPRGAMCRLHLAASSLFPSLSGP

SEQ ID NO: 70925 - protein, 364 aa, Homo sapiens
MSVMVVRKKVTRKWEKLPGRNTFCCDGRVMMARQKGIFYLTLFLILGTCTLFFAFECRYLAVQLSPAIPVFAAMLFLFSMATLLRTSFSDPGVIPRALPDEAAFIEMEIEATNGAVPQGQRPPPRIKNFQINNQIVKLKYCYTCKIFRPPRASHCSICDNCVERFDHHCPWVGNCVGKRNYRYFYLFILSLSLLTIYVFAFNIVYVALKSLKIGFLETLKETPGTVLEVLICFFTLWSVVGLTGFHTFLVALNQTTNEDIKGSWTGKNRVQNPYSHGNIVKNCCEVLCGPLPPSVLDRRGILPLEESGSRPPSTQETSSSLLPQSPAPTEHLNSNEMPEDSSTPEEMPPPEPPEPPQEAAEAEK

SEQ ID NO: 70926 - protein, 364 aa, Homo sapiens; identical to SEQ ID NO: 70925

SEQ ID NO: 70927 - protein, 170 aa, Homo sapiens
MSVMVVRKKVTRKWEKLPGRNTFCCDGRVMMARQKGIFYLTLFLILGTCTLFFAFECRYLAVQLSPAIPVFAAMLFLFSMATLLRTSFSDPGVIPRALPDEAAFIEMEIEATNGAVPQGQRPPPRIKNFQINNQIVKLKYCYTCKIFRPPRASHCSICDNCVERFDHHCP

SEQ ID NO: 70928 - protein, 194 aa, Homo sapiens
  VARIANT 1: note = MOD_RES - Any amino acid
XLFLILGTCTLFFAFECRYLAVQLSPAIPVFAAMLFLFSMATLLRTSFSDPGVIPRALPDEAAFIEMEIEATNGAVPQGQRPPPRIKNFQINNQIVKLKYCYTCKIFRPPRASHCSICDNCVESLKIGFLETLKETPGTVLEVLICFFTLWSVVGLTGFHTFLVALNQTTNEDIKGSWTGKNRVQNPYSHGNIV

SEQ ID NO: 70929 - protein, 252 aa, Homo sapiens
MSSEVSARRDAKKLVRSPSGLRMVPEHRAFGSPFGLEEPQWVPDKECRRCMQCDAKFDFLTRKHHCRRCGKCFCDRCCSQKVPLRRMCFVDPVRQCAECALVSLKEAEFYDKQLKVLLSGATFLVTFGNSEKPETMTCRLSNNQRYLFLDGDSHYEIEIVHISTVQILTEGFPPGEKDIHAYTSLRGSQPASEGGNARATGMFLQYTVPGTEGVTQLKLTVVEDVTVGRRQAVAWLVAMHKAAKLLYESRDQ

SEQ ID NO: 70930 - protein, 234 aa, Homo sapiens
MSSEVSARRDAKKLVRSPSGLRMVPEHRAFGSPFGLEEPQWVPDKECRRCMQCDAKFDFLTRKHHCRRCGKCFCDRCCSQKVPLRRMCFVDPVRQCAECALVSLKEAEFYDKQLKVLLSGATFLVTFGNSEKPETMTCRLSNNQRYLFLDGDSHYEIEIVHISTVQILTEGFPPGGGNARATGMFLQYTVPGTEGVTQLKLTVVEDVTVGRRQAVAWLVAMHKAAKLLYESRDQ

SEQ ID NO: 70931 - protein, 2539 aa, Homo sapiens
MNHPFGKEEAASQKQLFGFFCECLRRGEWELAQACVPQLQEGQGDIPKRVEDILQALVVCPNLLRCGQDINPQRVAWVWLLVLEKWLAREKKLLPVVFRRKLEFLLLSEDLQGDIPENILEELYETLTQGAVGHVPDGNPRRESWTPRLSSEAVSVLWDLLRQSPQPAQALLELLLEEDDGTGLCHWPLQNALVDLIRKALRALQGPDSVPPGVVDAIYGALRTLRCPAEPLGVELHLLCEELLEACRTEGSPLREERLLSCLLHKASRGLLSLYGHTYAEKVTEKPPRATASGKVSPDHLDPERAMLALFSNPNPAEAWKVAYFYCLSNNKHFLEQILVTALTLLKEEDFPNLGCLLDREFRPLSCLLVLLGWTHCQSLESAKRLLQTLHRTQGPGCDELLRDACDGLWAHLEVLEWCIQQSSNPIPKRDLLYHLHGGDSHSVLYTLHHLTNLPALREEDVLKLLQKVPAKDPQQEPDAVDAPVPEHLSQCQNLTLYQGFCAMKYAIYALCVNSHQHSQCQDCKDSLSEDLASATEPANDSLSSPGAANLFSTYLARCQQYLCSIPDSLCLELLENIFSLLLITSADLHPEPHLPEDYAEDDDIEGKSPSGLRSPSESPQHIAHPERKSERGSLGVPKTLAYTMPSHVKAEPKDSYPGPHRHSFLDLKHFTSGISGFLADEFAIGAFLRLLQEQLDEISSRSPPEKPKQESQSCSGSRDGLQSRLHRLSKVVSEAQWRHKVVTSNHRSEEQPSRRYQPATRHPSLRRGRRTRRSQADGRDRGSNPSLESTSSELSTSTSEGSLSAMSGRNELHSRLHPHPQSSLIPMMFSPPESLLASCILRGNFAEAHQVLFTFNLKSSPSSGELMFMERYQEVIQELAQVEHKIENQNSDAGSSTIRRTGSGRSTLQAIGSAAAAGMVFYSISDVTDKLLNTSGDPIPMLQEDFWISTALVEPTAPLREVLEDLSPPAMAAFDLACSQCQLWKTCKQLLETAERRLNSSLERRGRRIDHVLLNADGIRGFPVVLQQISKSLNYLLMSASQTKSESVEEKGGGPPRCSITELLQMCWPSLSEDCVASHTTLSQQLDQVLQSLREALELPEPRTPPLSSLVEQAAQKAPEAEAHPVQIQTQLLQKNLGKQTPSGSRQMDYLGTFFSYCSTLAAVLLQSLSSEPDHVEVKVGNPFVLLQQSSSQLVSHLLFERQVPPERLAALLAQENLSLSVPQVIVSCCCEPLALCSSRQSQQTSSLLTRLGTLAQLHASHCLDDLPLSTPSSPRTTENPTLERKPYSSPRDSSLPALTSSALAFLKSRSKLLATVACLGASPRLKVSKPSLSWKELRGRREVPLAAEQVARECERLLEQFPLFEAFLLAAWEPLRGSLQQGQSLAVNLCGWASLSTVLLGLHSPIALDVLSEAFEESLVARDWSRALQLTEVYGRDVDDLSSIKDAVLSCAVACDKEGWQYLFPVKDASLRSRLALQFVDRWPLESCLEILAYCISDTAVQEGLKCELQRKLAELQVYQKILGLQSPPVWCDWQTLRSCCVEDPSTVMNMILEAQEYELCEEWGCLYPIPREHLISLHQKHLLHLLERRDHDKALQLLRRIPDPTMCLEVTEQSLDQHTSLATSHFLANYLTTHFYGQLTAVRHREIQALYVGSKILLTLPEQHRASYSHLSSNPLFMLEQLLMNMKVDWATVAVQTLQQLLVGQEIGFTMDEVDSLLSRYAEKALDFPYPQREKRSDSVIHLQEIVHQAADPETLPRSPSAEFSPAAPPGISSIHSPSLRERSFPPTQPSQEFVPPATPPARHQWVPDETESICMVCCREHFTMFNRRHHCRRCGRLVCSSCSTKKMVVEGCRENPARVCDQCYSYCNKDVPEEPSEKPEALDSSKNESPPYSFVVRVPKADEVEWILDLKEEENELVRSEFYYEQAPSASLCIAILNLHRDSIACGHQLIEHCCRLSKGLTNPEVDAGLLTDIMKQLLFSAKMMFVKAGQSQDLALCDSYISKVDVLNILVAAAYRHVPSLDQILQPAAVTRLRNQLLEAEYYQLGVEVSTKTGLDTTGAWHAWGMACLKAGNLTAAREKFSRCLKPPFDLNQLNHGSRLVQDVVEYLESTVRPFVSLQDDDYFATLRELEATLRTQSLSLAVIPEGKIMNNTYYQECLFYLHNYSTNLAIISFYVRHSCLREALLHLLNKESPPEVFIEGIFQPSYKSGKLHTLENLLESIDPTLESWGKYLIAACQHLQKKNYYHILYELQQFMKDQVRAAMTCIRFFSHKAKSYTELGEKLSWLLKAKDHLKIYLQETSRSSGRKKTTFFRKKMTAADVSRHMNTLQLQMEVTRFLHRCESAGTSQITTLPLPTLFGNNHMKMDVACKVMLGGKNVEDGFGIAFRVLQDFQLDAAMTYCRAARQLVEKEKYSEIQQLLKCVSESGMAAKSDGDTILLNCLEAFKRIPPQELEGLIQAIHNDDNKVRAYLICCKLRSAYLIAVKQEHSRATALVQQVQQAAKSSGDAVVQDICAQWLLTSHPRGAHGPGSRK

SEQ ID NO: 70932 - protein, 2518 aa, Homo sapiens
MNHPFGKEEAASQKQLFGFFCECLRRGEWELAQACVPQLQEGQGDIPKRVEDILQALVVCPNLLRCGQDINPQRVAWVWLLVLEKWLAREKKLLPVVFRRKLEFLLLSEDLQGDIPENILEELYETLTQGAVGHVPDGNPRRESWTPRLSSEAVSVLWDLLRQSPQPAQALLELLLEEDDGTGLCHWPLQNALVDLIRKALRTLRCPAEPLGVELHLLCEELLEACRTEGSPLREERLLSCLLHKASRGLLSLYGHTYAEKVTEKPPRATASGKVSPDHLDPERAMLALFSNPNPAEAWKVAYFYCLSNNKHFLEQILVTALTLLKEEDFPNLGCLLDREFRPLSCLLVLLGWTHCQSLESAKRLLQTLHRTQGPGCDELLRDACDGLWAHLEVLEWCIQQSSNPIPKRDLLYHLHGGDSHSVLYTLHHLTNLPALREEDVLKLLQKVPAKDPQQEPDAVDAPVPEHLSQCQNLTLYQGFCAMKYAIYALCVNSHQHSQCQDCKDSLSEDLASATEPANDSLSSPGAANLFSTYLARCQQYLCSIPDSLCLELLENIFSLLLITSADLHPEPHLPEDYAEDDDIEGKSPSGLRSPSESPQHIAHPERKSERGSLGVPKTLAYTMPSHVKAEPKDSYPGPHRHSFLDLKHFTSGISGFLADEFAIGAFLRLLQEQLDEISSRSPPEKPKQESQSCSGSRDGLQSRLHRLSKVVSEAQWRHKVVTSNHRSEEQPSRRYQPATRHPSLRRGRRTRRSQADGRDRGSNPSLESTSSELSTSTSEGSLSAMSGRNELHSRLHPHPQSSLIPMMFSPPESLLASCILRGNFAEAHQVLFTFNLKSSPSSGELMFMERYQEVIQELAQVEHKIENQNSDAGSSTIRRTGSGRSTLQAIGSAAAAGMVFYSISDVTDKLLNTSGDPIPMLQEDFWISTALVEPTAPLREVLEDLSPPAMAAFDLACSQCQLWKTCKQLLETAERRLNSSLERRGRRIDHVLLNADGIRGFPVVLQQISKSLNYLLMSASQTKSESVEEKGGGPPRCSITELLQMCWPSLSEDCVASHTTLSQQLDQVLQSLREALELPEPRTPPLSSLVEQAAQKAPEAEAHPVQIQTQLLQKNLGKQTPSGSRQMDYLGTFFSYCSTLAAVLLQSLSSEPDHVEVKVGNPFVLLQQSSSQLVSHLLFERQVPPERLAALLAQENLSLSVPQVIVSCCCEPLALCSSRQSQQTSSLLTRLGTLAQLHASHCLDDLPLSTPSSPRTTENPTLERKPYSSPRDSSLPALTSSALAFLKSRSKLLATVACLGASPRLKVSKPSLSWKELRGRREVPLAAEQVARECERLLEQFPLFEAFLLAAWEPLRGSLQQGQSLAVNLCGWASLSTVLLGLHSPIALDVLSEAFEESLVARDWSRALQLTEVYGRDVDDLSSIKDAVLSCAVACDKEGWQYLFPVKDASLRSRLALQFVDRWPLESCLEILAYCISDTAVQEGLKCELQRKLAELQVYQKILGLQSPPVWCDWQTLRSCCVEDPSTVMNMILEAQEYELCEEWGCLYPIPREHLISLHQKHLLHLLERRDHDKALQLLRRIPDPTMCLEVTEQSLDQHTSLATSHFLANYLTTHFYGQLTAVRHREIQALYVGSKILLTLPEQHRASYSHLSSNPLFMLEQLLMNMKVDWATVAVQTLQQLLVGQEIGFTMDEVDSLLSRYAEKALDFPYPQREKRSDSVIHLQEIVHQAADPETLPRSPSAEFSPAAPPGISSIHSPSLRERSFPPTQPSQEFVPPATPPARHQWVPDETESICMVCCREHFTMFNRRHHCRRCGRLVCSSCSTKKMVVEGCRENPARVCDQCYSYCNKDVPEEPSEKPEALDSSKNESPPYSFVVRVPKADEVEWILDLKEEENELVRSEFYYEQAPSASLCIAILNLHRDSIACGHQLIEHCCRLSKGLTNPEVDAGLLTDIMKQLLFSAKMMFVKAGQSQDLALCDSYISKVDVLNILVAAAYRHVPSLDQILQPAAVTRLRNQLLEAEYYQLGVEVSTKTGLDTTGAWHAWGMACLKAGNLTAAREKFSRCLKPPFDLNQLNHGSRLVQDVVEYLESTVRPFVSLQDDDYFATLRELEATLRTQSLSLAVIPEGKIMNNTYYQECLFYLHNYSTNLAIISFYVRHSCLREALLHLLNKESPPEVFIEGIFQPSYKSGKLHTLENLLESIDPTLESWGKYLIAACQHLQKKNYYHILYELQQFMKDQVRAAMTCIRFFSHKAKSYTELGEKLSWLLKAKDHLKIYLQETSRSSGRKKTTFFRKKMTAADVSRHMNTLQLQMEVTRFLHRCESAGTSQITTLPLPTLFGNNHMKMDVACKVMLGGKNVEDGFGIAFRVLQDFQLDAAMTYCRAARQLVEKEKYSEIQQLLKCVSESGMAAKSDGDTILLNCLEAFKRIPPQELEGLIQAIHNDDNKVRAYLICCKLRSAYLIAVKQEHSRATALVQQVQQAAKSSGDAVVQDICAQWLLTSHPRGAHGPGSRK

SEQ ID NO: 70933 - protein, 372 aa, Homo sapiens
MQTSEREGSGPELSPSVMPEAPLESPPFPTKSPAFDLFNLVLSYKRLEIYLEPLKDAGAWYSVGALMISVPALLGYLQEVCRARLPDSELMRRKYHSVRQEDLQRGRLSRPEAVAEVKSFLIQLEAFLSRLCCTCEAAYRVLHWENPVVSSQFYGALLGTVCMLYLLPLCWVLTLLNSTLFLGNVEFFRVVSEYRASLQQRMNPKQEEHAFESPPPPDVGGKDGLMDSTPALTPTEDLTPGSVEEAEEAEPDEEFKDAIEEDDEGAPCPAEDELALQDNGFLSKNEVLRSKVSRLTERLRKRYPTNNFGNCTGCSATFSVLKKRRSCSNCGNSFCSRCCSFKVPKSSMGATAPEAQRETVFVCASCNQTLSK

SEQ ID NO: 70934 - protein, 416 aa, Homo sapiens
MQTSEREGSGPELSPSVMPEAPLESPPFPTKSPAFDLFNLVLSYKRLEIYLEPLKDAGDGVRYLLRWQMPLCSLLTCLGLNVLFLTLNEGAWYSVGALMISVPALLGYLQEVCRARLPDSELMRRKYHSVRQEDLQRGRLSRPEAVAEVKSFLIQLEAFLSRLCCTCEAAYRVLHWENPVVSSQFYGALLGTVCMLYLLPLCWVLTLLNSTLFLGNVEFFRVVSEYRASLQQRMNPKQEEHAFESPPPPDVGGKDGLMDSTPALTPTESLSSQDLTPGSVEEAEEAEPDEEFKDAIEETHLVVLEDDEGAPCPAEDELALQDNGFLSKNEVLRSKVSRLTERLRKRYPTNNFGNCTGCSATFSVLKKRRSCSNCGNSFCSRCCSFKVPKSSMGATAPEAQRETVFVCASCNQTLSK

SEQ ID NO: 70935 - protein, 318 aa, Homo sapiens
MQTSEREGSGPELSPSVMPEAPLESPPFPTKSPAFDLFNLVLSYKRLEIYLEPLKDAGDGVRYLLSLIQLEAFLSRLCCTCEAAYRVLHWENPVVSSQFYGALLGTVCMLYLLPLCWVLTLLNSTLFLGNVEFFRVVSEYRASLQQRMNPKQEEHAFESPPPPDVGGKDGLMDSTPALTPTEDLTPGSVEEAEEAEPDEEFKDAIEEDDEGAPCPAEDELALQDNGFLSKNEVLRSKVSRLTERLRKRYPTNNFGNCTGCSATFSVLKKRRSCSNCGNSFCSRCCSFKVPKSSMGATAPEAQRETVFVCASCNQTLSK

SEQ ID NO: 70936 - protein, 404 aa, Homo sapiens
MQTSEREGSGPELSPSVMPEAPLESPPFPTKSPAFDLFNLVLSYKRLEIYLEPLKDAGDGVRYLLRWQMPLCSLLTCLGLNVLFLTLNEGAWYSVGALMISVPALLGYLQEVCRARLPDSELMRRKYHSVRQEDLQRGRLSRPEAVAEVKSFLIQLEAFLSRLCCTCEAAYRVLHWENPVVSSQFYGALLGTVCMLYLLPLCWVLTLLNSTLFLGNVEFFRVVSEYRASLQQRMNPKQEEHAFESPPPPDVGGKDGLMDSTPALTPTEDLTPGSVEEAEEAEPDEEFKDAIEEDDEGAPCPAEDELALQDNGFLSKNEVLRSKVSRLTERLRKRYPTNNFGNCTGCSATFSVLKKRRSCSNCGNSFCSRCCSFKVPKSSMGATAPEAQRETVFVCASCNQTLSK

SEQ ID NO: 70937 - protein, 311 aa, Homo sapiens
MISVPALLGYLQEVCRARLPDSELMRRKYHSVRQEDLQRGRLSRPEAVAEVKSFLIQLEAFLSRLCCTCEAAYRVLHWENPVVSSQFYGALLGTVCMLYLLPLCWVLTLLNSTLFLGNVEFFRVVSEYRASLQQRMNPKQEEHAFESPPPPDVGGKDGLMDSTPALTPTESLSSQDLTPGSVEEAEEAEPDEEFKDAIEEDDEGAPCPAEDELALQDNGFLSKNEVLRSKVSRLTERLRKRYPTNNFGNCTGCSATFSVLKKRRSCSNCGNSFCSRCCSFKVPKSSMGATAPEAQRETVFVCASCNQTLSK

SEQ ID NO: 70938 - protein, 286 aa, Homo sapiens
MQTSEREGSGPELSPSVMPEAPLESPPFPTKSPAFDLFNLVLSYKRLEIYLEPLKDAGDGVRYLLRFYGALLGTVCMLYLLPLCWVLTLLNSTLFLGNVEFFRVVSEYRASLQQRMNPKQEEHAFESPPPPDVGGKDGLMDSTPALTPTEDLTPGSVEEAEEAEPDEEFKDAIEEDDEGAPCPAEDELALQDNGFLSKNEVLRSKVSRLTERLRKRYPTNNFGNCTGCSATFSVLKKRRSCSNCGNSFCSRCCSFKVPKSSMGATAPEAQRETVFVCASCNQTLSK

SEQ ID NO: 70939 - protein, 411 aa, Homo sapiens
MQTSEREGSGPELSPSVMPEAPLESPPFPTKSPAFDLFNLVLSYKRLEIYLEPLKDAGDGVRYLLRWQMPLCSLLTCLGLNVLFLTLNEGAWYSVGALMISVPALLGYLQEVCRARLPDSELMRRKYHSVRQEDLQRGRLSRPEAVAEVKSFLIQLEAFLSRLCCTCEAAYRVLHWENPVVSSQFYGALLGTVCMLYLLPLCWVLTLLNSTLFLGNVEFFRVVSEYRASLQQRMNPKQEEHAFESPPPPDVGGKDGLMDSTPALTPTEDLTPGSVEEAEEAEPDEEFKDAIEETHLVVLEDDEGAPCPAEDELALQDNGFLSKNEVLRSKVSRLTERLRKRYPTNNFGNCTGCSATFSVLKKRRSCSNCGNSFCSRCCSFKVPKSSMGATAPEAQRETVFVCASCNQTLSK

SEQ ID NO: 70940 - protein, 394 aa, Homo sapiens
LESPPFPTKSPAFDLFNLVLSYKRLEIYLEPLKDAGDGVRYLLRWQMPLCSLLTCLGLNVLFLTLNEGAWYSVGALMISVPALLGYLQEVCRARLPDSELMRRKYHSVRQEDLQRGRLSRPEAVAEVKSFLIQLEAFLSRLCCTCEAAYRVLHWENPVVSSQFYGALLGTVCMLYLLPLCWVLTLLNSTLFLGNVEFFRVVSEYRASLQQRMNPKQEEHAFESPPPPDVGGKDGLMDSTPALTPTESLSSQDLTPGSVEEAEEAEPDEEFKDAIEETHLVVLEDDEGAPCPAEDELALQDNGFLSKNEVLRSKVSRLTERLRKRYPTNNFGNCTGCSATFSVLKKRRSCSNCGNSFCSRCCSFKVPKSSMGATAPEAQRETVFVCASCNQTLSK

SEQ ID NO: 70941 - protein, 348 aa, Homo sapiens
MQTSEREGSGPELSPSVMPEAPLESPPFPTKSPAFDLFNLVLSYKRLEIYLEPLKDAGDGVRYLLRWQMPLCSLLTCLGLNVLFLTLNEGAWYSVGALMISVPALLGYLQEVCRARLPDSELMRRKYHSVRQEDLQRGRLSRPEAVAEVKSFLIQLEAFLSRLCCTCEAAYRVLHWENPVVSSQFYGALLGTVCMLYLLPLCWVLTLLNSTLFLGNVEFFRVVSEYRASLQQRMNPKQEEHAFESPPPPDVGGKDGLMDSTPALTPTEDLTPGSVEEAEEAEPDEEFKDAIEEDDEGAPCPAEDELALQDNGFLSKNEVLRSKVSRLTERLRKRYPTNNFGVTGAGSS

SEQ ID NO: 70942 - protein, 887 aa, Homo sapiens
MMNRFRKWLYKPKRSDPQLLARFYYADEELNQVAAELDSLDGRKDPQRCTLLVSQFRSCQDNVLNIINQIMDECIPQDRAPRDFCVKFPEEIRHDNLAGQLWFGAECLAAGSIIMNRELESMAMRPLAKELTRSLEDVRGALRDQALRDLNTYTEKMREALRHFDVLFAEFELSYVSAMVPVKSPREYYVQQEVIVLFCETVERALDFGYLTQDMIDDYEPALMFSIPRLAIVCGLVVYADGPLNLDRKVEDMSELFRPFHTLLRKIRDLLQTLTEEELHTLERNLCISQDVEFPIRADVQGPAALAPALSAPLPPEGPLSAKAKDPDAELACSMQYDDQELEQLSRMVHRAGDEMSSLLSPPIACQSPAHRPGAEGSPGGEASPGRPRLRSGSDEEERVFFMDDVEGTAEALARPESPAGPFGWAGSTWADPQEKGQGGPGGAAGISLPASEKEEDLSNNNLEAEGTDGASLAGTSSCSCLDSRLHLDGWEVGADDAETAEMIAHRTGGMKLSATVIFNPKSPTSLDSAVATQEAASEPVAEGMDGGPHKLSTGATNCLLHSCVCCGSCGDSREDVVERLREKCSPGGVIGASYAAGLAKASDRAPERQEEAPPPSEDASNGREPKAPTSDKCLPHTSGSQVDTASGLQGEAGVAGQQEPEARELHAGSPSAHEAPQALSGSSSSTAGSCSSDKMGPEAAPAATHAAPQATREKIRSRFHGSHDLIHRLFVCISGVADQLQTNYASDLRSILKTLFEVMATKPETDDKEKLRKVTQTLRSAALEDCALCQETLSSSELAAKTRDGDFEDPPEWVPDEACGFCTACKAPFTVIRRKHHCRSCGKIFCSRCSSHSAPLPRYGQVKPVRVCTHCYMFHVTPFYSDKAGL

SEQ ID NO: 70943 - protein, 857 aa, Homo sapiens
MMNRFRKWLYKPKRSDPQLLARFYYADEELNQVAAELDSLDGRKDPQRCTLLVSQFRSCQDNVLNIINQIMDECIPQDRAPRDFCVKFPEEIRHDNLAGQLWFGAECLAAGSIIMNRELESMAMRPLAKELTRSLEDVRGALRDQALRDLNTYTEKMREALRHFDVLFAEFELSYVSAMVPVKSPREYYVQQEVIVLFCETVESGLVVYADGPLNLDRKVEDMSELFRPFHTLLRKIRDLLQTLTEEELHTLERNLCISQDVEFPIRADVQGPAALAPALSAPLPPEGPLSAKAKDPDAELACSMQYDDQELEQLSRMVHRAGDEMSSLLSPPIACQSPAHRPGAEGSPGGEASPGRPRLRSGSDEEERVFFMDDVEGTAEALARPESPAGPFGWAGSTWADPQEKGQGGPGGAAGISLPASEKEEDLSNNNLEAEGTDGASLAGTSSCSCLDSRLHLDGWEVGADDAETAEMIAHRTGGMKLSATVIFNPKSPTSLDSAVATQEAASEPVAEGMDGGPHKLSTGATNCLLHSCVCCGSCGDSREDVVERLREKCSPGGVIGASYAAGLAKASDRAPERQEEAPPPSEDASNGREPKAPTSDKCLPHTSGSQVDTASGLQGEAGVAGQQEPEARELHAGSPSAHEAPQALSGSSSSTAGSCSSDKMGPEAAPAATHAAPQATREKIRSRFHGSHDLIHRLFVCISGVADQLQTNYASDLRSILKTLFEVMATKPETDDKEKLRKVTQTLRSAALEDCALCQETLSSSELAAKTRDGDFEDPPEWVPDEACGFCTACKAPFTVIRRKHHCRSCGKIFCSRCSSHSAPLPRYGQVKPVRVCTHCYMFHVTPFYSDKAGL

SEQ ID NO: 70944 - protein, 817 aa, Homo sapiens
MDECIPQDRAPRDFCVKFPEEIRHDNLAGQLWFGAECLAAGSIIMNRELESMAMRPLAKELTRSLEDVRGALRDQALRDLNTYTEKMREALRHFDVLFAEFELSYVSAMVPVKSPREYYVQQEVIVLFCETVERALDFGYLTQDMIDDYEPALMFSIPRLAIVCGLVVYADGPLNLDRKVEDMSELFRPFHTLLRKIRDLLQTLTEEELHTLERNLCISQDVEFPIRADVQGPAALAPALSAPLPPEGPLSAKAKDPDAELACSMQYDDQELEQLSRMVHRAGDEMSSLLSPPIACQSPAHRPGAEGSPGGEASPGRPRLRSGSDEEERVFFMDDVEGTAEALARPESPAGPFGWAGSTWADPQEKGQGGPGGAAGISLPASEKEEDLSNNNLEAEGTDGASLAGTSSCSCLDSRLHLDGWEVGADDAETAEMIAHRTGGMKLSATVIFNPKSPTSLDSAVATQEAASEPVAEGMDGGPHKLSTGATNCLLHSCVCCGSCGDSREDVVERLREKCSPGGVIGASYAAGLAKASDRAPERQEEAPPPSEDASNGREPKAPTSDKCLPHTSGSQVDTASGLQGEAGVAGQQEPEARELHAGSPSAHEAPQALSGSSSSTAGSCSSDKMGPEAAPAATHAAPQATREKIRSRFHGSHDLIHRLFVCISGVADQLQTNYASDLRSILKTLFEVMATKPETDDKEKLRKVTQTLRSAALEDCALCQETLSSSELAAKTRDGDFEDPPEWVPDEACGFCTACKAPFTVIRRKHHCRSCGKIFCSRCSSHSAPLPRYGQVKPVRVCTHCYMFHVTPFYSDKAGL

SEQ ID NO: 70945 - protein, 403 aa, Homo sapiens
MEPAGPCGFCPAGEVQPARYTCPRCNAPYCSLRCYRTHGTCAENFYRDQVLGELRGCSAPPSRLASALRRLRQQRETEDEPGEAGLSSGPAPGGLSGLWERLAPGEKAAFERLLSRGEAGRLLPPWRPWWWNRGAGPQLLEELDNAPGSDAAELELAPARTPPDSVKDASAAEPAAAERVLGDVPGACTPVVPTRIPAIVSLSRGPVSPLVRFQLPNVLFAYAHTLALYHGGDDALLSDFCATLLGVSGALGAQQVFASAEEALQAAAHVLEAGEHPPGPLGTRGAMHEVARILLGEGPTNQKGYTLAALGDLAQTLGRARKQAVAREERDHLYRARKKCQFLLAWTNENEAALTPLALDCARAHQAHAVVAEEVAALTGELERLWGGPVPPAPRTLIEELPS

SEQ ID NO: 70946 - protein, 155 aa, Homo sapiens
MASLKCSTVVCVICLEKPKYRCPACRVPYCSVVCFRKHKEQCNPETRPVEKKIRSALPTKTVKPVENKDDDDSIADFLNSDEEEDRVSLQNLKNLGESATLRSLLLNPHLRQLMVNLDQGEDKAKLMRAYMQEPLFVEFADCCLGIVEPSQNEES

SEQ ID NO: 70947 - protein, 1377 aa, Homo sapiens
MDTSSVGGLELTDQTPVLLGSTAMATSLTNVGNSFSGPANPLVSRSNKFQNSSVEDDDDVVFIEPVQPPPPSVPVVADQRTITFTSSKNEELQGNDSKITPSSKELASQKGSVSETIVIDDEEDMETNQGQEKNSSNFIERRPPETKNRTNDVDFSTSSFSRSKVNAGMGNSGITTEPDSEIQIANVTTLETGVSSVNDGQLENTDGRDMNLMITHVTSLQNTNLGDVSNGLQSSNFGVNIQTYTPSLTSQTKTGVGPFNPGRMNVAGDVFQNGESATHHNPDSWISQSASFPRNQKQPGVDSLSPVASLPKQIFQPSVQQQPTKPVKVTCANCKKPLQKGQTAYQRKGSAHLFCSTTCLSSFSHKPAPKKLCVMCKKDITTMKGTIVAQVDSSESFQEFCSTSCLSLYEDKQNPTKGALNKSRCTICGKLTEIRHEVSFKNMTHKLCSDHCFNRYRMANGLIMNCCEQCGEYLPSKGAGNNVLVIDGQQKRFCCQSCVSEYKQVGSHPSFLKEVRDHMQDSFLMQPEKYGKLTTCTGCRTQCRFFDMTQCIGPNGYMEPYCSTACMNSHKTKYAKSQSLGIICHFCKRNSLPQYQATMPDGKLYNFCNSSCVAKFQALSMQSSPNGQFVAPSDIQLKCNYCKNSFCSKPEILEWENKVHQFCSKTCSDDYKKLHCIVTYCEYCQEEKTLHETVNFSGVKRPFCSEGCKLLYKQDFARRLGLRCVTCNYCSQLCKKGATKELDGVVRDFCSEDCCKKFQDWYYKAARCDCCKSQGTLKERVQWRGEMKHFCDQHCLLRFYCQQNEPNMTTQKGPENLHYDQGCQTSRTKMTGSAPPPSPTPNKEMKNKAVLCKPLTMTKATYCKPHMQTKSCQTDDTWRTEYVPVPIPVPVYIPVPMHMYSQNIPVPTTVPVPVPVPVFLPAPLDSSEKIPAAIEELKSKVSSDALDTELLTMTDMMSEDEGKTETTNINSVIIETDIIGSDLLKNSDPETQSSMPDVPYEPDLDIEIDFPRAAEELDMENEFLLPPVFGEEYEEQPRPRSKKKGAKRKAVSGYQSHDDSSDNSECSFPFKYTYGVNAWKHWVKTRQLDEDLLVLDELKSSKSVKLKEDLLSHTTAELNYGLAHFVNEIRRPNGENYAPDSIYYLCLGIQEYLCGSNRKDNIFIDPGYQTFEQELNKILRSWQPSILPDGSIFSRVEEDYLWRIKQLGSHSPVALLNTLFYFNTKYFGLKTVEQHLRLSFGTVFRHWKKNPLTMENKACLRYQVSSLCGTDNEDKITTGKRKHEDDEPVFEQIENTANPSRCPVKMFECYLSKSPQNLNQRMDVFYLQPECSSSTDSPVWYTSTSLDRNTLENMLVRVLLVKDIYDKDNYELDEDTD

SEQ ID NO: 70948 - protein, 1375 aa, Homo sapiens
MDTSSVGGLELTDQTPVLLGSTAMATSLTNVGNSFSGPANPLVSRSNKFQNSSVEDDDDVVFIEPVQPPPPSVPVVADQRTITFTSSKNEELQGNDSKITPSSKELASQKGSVSETIVIDDEEDMETNQGQEKNSSNFIERRPPETKNRTNDVDFSTSSFSRSKVNAGMGNSGITTEPDSEIQIANVTTLETGVSSVNDGQLENTDGRDMNLMITHVTSLQNTNLGDVSNGLQSSNFGVNIQTYTPSLTSQTKTGVGPFNPGRMNVAGDVFQNGESATHHNPDSWISQSASFPRNQKQPGVDSLSPVASLPKQIFQPSVQQQPTKPVKVTCANCKKPLQKGQTAYQRKGSAHLFCSTTCLSSFSHKPAPKKLCVMCKKDITTMKGTIVAQVDSSESFQEFCSTSCLSLYEDKQNPTKGALNKSRCTICGKLTEIRHEVSFKNMTHKLCSDHCFNRYRMANGLIMNCCEQCGEYLPSKGAGNNVLVIDGQQKRFCCQSCVSEYKQVGSHPSFLKEVRDHMQDSFLMQPEKYGKLTTCTGCRTQCRFFDMTQCIGPNGYMEPYCSTACMNSHKTKYAKSQSLGIICHFCKRNSLPQYQATMPDGKLYNFCNSSCVAKFQALSMQSSPNGQFVAPSDIQLKCNYCKNSFCSKPEILEWEASLHQFCSKTCSDDYKKLHCIVTYCEYCQEEKTLHETVNFSGVKRPFCSEGCKLLYKQDFARRLGLRCVTCNYCSQLCKKGATKELDGVVRDFCSEDCCKKFQDWYYKACDCCKSQGTLKERVQWRGEMKHFCDQHCLLRFYCQQNEPNMTTQKGPENLHYDQGCQTSRTKMTGSAPPPSPTPNKEMKNKAVLCKPLTMTKATYCKPHMQTKSCQTDDTWRTEYVPVPIPVPVYIPVPMHMYSQNIPVPTTVPVPVPVPVFLPAPLDSSEKIPAAIEELKSKVSSDALDTELLTMTDMMSEDEGKTETTNINSVIIETDIIGSDLLKNSDPETQSSMPDVPYEPDLDIEIDFPRAAEELDMENEFLLPPVFGEEYEEQPRPRSKKKGAKRKAVSGYQSHDDSSDNSECSFPFKYTYGVNAWKHWVKTRQLDEDLLVLDELKSSKSVKLKEDLLSHTTAELNYGLAHFVNEIRRPNGENYAPDSIYYLCLGIQEYLCGSNRKDNIFIDPGYQTFEQELNKILRSWQPSILPDGSIFSRVEEDYLWRIKQLGSHSPVALLNTLFYFNTKYFGLKTVEQHLRLSFGTVFRHWKKNPLTMENKACLRYQVSSLCGTDNEDKITTGKRKHEDDEPVFEQIENTANPSRCPVKMFECYLSKSPQNLNQRMDVFYLQPECSSSTDSPVWYTSTSLDRNTLENMLVRVLLVKDIYDKDNYELDEDTD

SEQ ID NO: 70949 - protein, 1375 aa, Homo sapiens; identical to SEQ ID NO: 70948

SEQ ID NO: 70950 - protein, 377 aa, Homo sapiens
MQDSFLMQPEKYGKLTTCTGCRTQCRFFDMTQCIGPNGYMEPYCSTACMNSHKTKYAKSQSLGIICHFCKRNSLPQYQATMPDGKLYNFCNSSCVAKFQALSMQSSPNGQFVAPSDIQLKCNYCKNSFCSKPEILEWENKVHQFCSKTCSDDYKKLHCIVTYCEYCQEEKTLHETVNFSGVKRPFCSEGCKLLYKQDFARRLGLRCVTCNYCSQLCKKGATKELDGVVRDFCSEDCCKKFQDWYYKAARCDCCKSQGTLKERVQWRGEMKHFCDQHCLLRFYCQQNEPNMTTQKGPENLHYDQGCQTSRTKMTGSAPPPSPTPNKEMKNKAVLCKPLTMTKATYCKPHMQTKSCQTDITWRIQHLILNHYDQSLIKA

SEQ ID NO: 70951 - protein, 1377 aa, Homo sapiens; identical to SEQ ID NO: 70947

SEQ ID NO: 70952 - protein, 1370 aa, Homo sapiens
MDPSDFPSPFDPLTLPEKPLAGDLPVDMEFGEDLLESQTAPTRGWAPPGPSPSSGALDLLDTPAGLEKDPGVLDGATELLGLGGLLYKAPSPPEVDHGPEGTLAWDAGDQTLEPGPGGQTPEVVPPDPGAGANSCSPEGLLEPLAPDSPITLQSPHIEEEETTSIATARRGSPGQEEELPQGQPQSPNAPPSPSVGETLGDGINSSQTKPGGSSPPAHPSLPGDGLTAKASEKPPERKRSERVRRAEPPKPEVVDSTESIPVSDEDSDAMVDDPNDEDFVPFRPRRSPRMSLRSSVSQRAGRSAVGTKMTCAHCRTPLQKGQTAYQRKGLPQLFCSSSCLTTFSKKPSGKKTCTFCKKEIWNTKDSVVAQTGSGGSFHEFCTSVCLSLYEAQQQRPIPQSGDPADATRCSICQKTGEVLHEVSNGSVVHRLCSDSCFSKFRANKGLKTNCCDQCGAYIYTKTGSPGPELLFHEGQQKRFCNTTCLGAYKKKNTRVYPCVWCKTLCKNFEMLSHVDRNGKTSLFCSLCCTTSYKVKQAGLTGPPRPCSFCRRSLSDPCYYNKVDRTVYQFCSPSCWTKFQRTSPEGGIHLSCHYCHSLFSGKPEVLDWQDQVFQFCCRDCCEDFKRLRGVVSQCEHCRQEKLLHEKLRFSGVEKSFCSEGCVLLYKQDFTKKLGLCCITCTYCSQTCQRGVTEQLDGSTWDFCSEDCKSKYLLWYCKAARCHACKRQGKLLETIHWRGQIRHFCNQQCLLRFYSQQNQPNLDTQSGPESLLNSQSPESKPQTPSQTKVENSNTVRTPEENGNLGKIPVKTRSAPTAPTPPPPPPPATPRKNKAAMCKPLMQNRGVSCKVEMKSKGSQTEEWKPQVIVLPIPVPIFVPVPMHLYCQKVPVPFSMPIPVPVPMFLPTTLESTDKIVETIEELKVKIPSNPLEADILAMAEMIAEAEELDKASSDLCDLVSNQSAEGLLEDCDLFGPARDDVLAMAVKMANVLDEPGQDLEADFPKNPLDINPSVDFLFDCGLVGPEDVSTEQDLPRTMRKGQKRLVLSESCSRDSMSSQPSCTGLNYSYGVNAWKCWVQSKYANGETSKGDELRFGPKPMRIKEDILACSAAELNYGLAQFVREITRPNGERYEPDSIYYLCLGIQQYLLENNRMVNIFTDLYYLTFVQELNKSLSTWQPTLLPNNTVFSRVEEEHLWECKQLGVYSPFVLLNTLMFFNTKFFGLQTAEEHMQLSFTNVVRQSRKCTTPRGTTKVVSIRYYAPVRQRKGRDTGPGKRKREDEAPILEQRENRMNPLRCPVKFYEFYLSKCPESLRTRNDVFYLQPERSCIAESPLWYSVIPMDRSMLESMLNRILAVREIYEELGRPGEEDLD

SEQ ID NO: 70953 - protein, 1370 aa, Homo sapiens; identical to SEQ ID NO: 70952

SEQ ID NO: 70954 - protein, 349 aa, Homo sapiens
MDPSDFPSPFDPLTLPEKPLAGDLPVDMEFGEDLLESQTAPTRGWAPPGPSPSSGALDLLDTPAGLEKDPGVLDGATELLGLGGLLYKAPSPPEVDHGPEGTLAWDAGDQTLEPGPGGQTPEVVPPDPGAGANSCSPEGLLEPLAPDSPITLQSPHIEEEETTSIATARRGSPGQEEELPQGQPQSPNAPPSPSVGETLGDGINSSQTKPGGSSPPAHPSLPGDGLTAKASEKPPERVQKRSERVRRAEPPKPEVVDSTESRRSGTPRTRLWRRLVLEAPSMSSAHPSVSPCMRPSSSARSPSLGIPPTLLAAAYARRLERSCTRSAMAAWYTGSAAILASPNSGPTRD

SEQ ID NO: 70955 - protein, 495 aa, Homo sapiens
MDPSDFPSPFDPLTLPEKPLAGDLPVDMEFGEDLLESQTAPTRGWAPPGPSPSSGALDLLDTPAGLEKDPGVLDGATELLGLGGLLYKAPSPPEVDHGPEGTLAWDAGDQTLEPGPGGQTPEVVPPDPGAGANSCSPEGLLEPLAPDSPITLQSPHIEEEETTSIATARRGSPGQEEELPQGQPQSPNAPPSPSVGETLGDGINSSQTKPGGSSPPAHPSLPGDGLTAKASEKPPERKRSERVRRAEPPKPEVVDSTESIPVSDEDSDAMVDDPNDEDFVPFRPRRSPRMSLRSSVSQRAGRSAVGTKMTCAHCRTPLQKGQTAYQRKGLPQLFCSSSCLTTFSKKPSGKKTCTFCKKEIWNTKDSVVAQTGSGGSFHEFCTSVCLSLYEAQQQRPIPQSGDPADATRCSICQKTGEVLHEVSNGSVVHRLCSDSCFSKFRANKGLKTNCCDQCGAYIYTKTGSPGPELLFHEGQQKRFCNTTCLGAYKKVGPRE

SEQ ID NO: 70956 - protein, 497 aa, Homo sapiens
MDPSDFPSPFDPLTLPEKPLAGDLPVDMEFGEDLLESQTAPTRGWAPPGPSPSSGALDLLDTPAGLEKDPGVLDGATELLGLGGLLYKAPSPPEVDHGPEGTLAWDAGDQTLEPGPGGQTPEVVPPDPGAGANSCSPEGLLEPLAPDSPITLQSPHIEEEETTSIATARRGSPGQEEELPQGQPQSPNAPPSPSVGETLGDGINSSQTKPGGSSPPAHPSLPGDGLTAKASEKPPERVQKRSERVRRAEPPKPEVVDSTESIPVSDEDSDAMVDDPNDEDFVPFRPRRSPRMSLRSSVSQRAGRSAVGTKMTCAHCRTPLQKGQTAYQRKGLPQLFCSSSCLTTFSKKPSGKKTCTFCKKEIWNTKDSVVAQTGSGGSFHEFCTSVCLSLYEAQQQRPIPQSGDPADATRCSICQKTGEVLHEVSNGSVVHRLCSDSCFSKFRANKGLKTNCCDQCGAYIYTKTGSPGPELLFHEGQQKRFCNTTCLGAYKKVGPRE

SEQ ID NO: 70957 - protein, 1280 aa, Homo sapiens
MDPSDFPSPFDPLTLPEKPLAGDLPVDMEFGEDLLESQTAPTRGWAPPGPSPSSGALDLLDTPAGLEKDPGVLDGATELLGLGGLLYKAPSPPEVDHGPEGTLAWDAGDQTLEPGPGGQTPEVVPPDPGAGANSCSPEGLLEPLAPDSPITLQSPHIEEEETTSIATARRGSPGQEEELPQGQPQSPNAPPSPSVGETLGDGINSSQTKPGGSSPPAHPSLPGDGLTAKASEKPPERVQKRSERVRRAEPPKPEVVDSTESIPVSDEDSDAMVDDPNDEDFVPFRPRRSPRMSLRSSVSQRAGRSAVGTKMTCAHCRTPLQKGQTAYQRKGLPQLFCSSSCLTTFSKKPSGKKTCTFCKKEIWNTKDSVVAQTGSGGSFHEFCTSVCLSLYEAQQQRPIPQSGDPADATRCSICQKTGEVLHEVSNGSVVHRLCSDSCFSKFRANKGLKTNCCDQCGAYIYTKTGSPGPELLFHEGQQKRFCNTTCLGAYKKKNTRVYPCVWCKTLCKNFEMLSHVDRNGKTSLFCSLCCTTSYKVKQAGLTGPPRPCSFCRRSLSDPCYYNKVDRTVYQFCSPSCWTKFQRTSPEGGIHLSCHYCHSLFSGKPEVLDWQDQVFQFCCRDCCEDFKRLRGVVSQCEHCRQEKLLHEKLRFSGVEKSFCSEGCVLLYKQDFTKKLGLCCITCTYCSQTCQRGVTEQLDGSTWDFCSEDCKSKYLLWYCKAARCHACKRQGKLLETIHWRGQIRHFCNQQCLLRFYSQQNQPNLDTQSGPESLLNSQSPESKPQTPSQTKVENSNTVRTPEENGNLGKIPVKTRSAPTAPTPPPPPPPATPRKNKAAMCKPLMQNRGVSCKVEMKSKGSQTEEWKPQVIVLPIPVPIFVPVPMHLYCQKVPVPFSMPIPVPVPMFLPTTLESTDKIVETIEELKVKIPSNPLEADILAMAEMIAEAEELDKASSDLCDLVSNQSAEGLLEDCDLFGPARDDVLAMAVKMANVLDEPGQDLEADFPKNPLDINPSVDFLFDCGLVGPEDVSTEQDLPRTMRKGQKRLVLSESCSRDSMSSQPSCTGLNYSYGVNAWKCWVQSKYANGETSKAKPMRIKEDILACSAAELNYGLAQFVREITRPNGERYEPDSIYYLCLGIQQYLLENNRMVNIFTDLYYLTFVQELNKSLSTWQPTLLPNNTGPGKRKREDEAPILEQRENRMNPLRCPVKFYEFYLSKCPESLRTRNDVFYLQPERSCIAESPLWYSVIPMDRSMLESMLNRILAVREIYEELGRPGEEDLD

SEQ ID NO: 70958 - protein, 1372 aa, Homo sapiens
MDPSDFPSPFDPLTLPEKPLAGDLPVDMEFGEDLLESQTAPTRGWAPPGPSPSSGALDLLDTPAGLEKDPGVLDGATELLGLGGLLYKAPSPPEVDHGPEGTLAWDAGDQTLEPGPGGQTPEVVPPDPGAGANSCSPEGLLEPLAPDSPITLQSPHIEEEETTSIATARRGSPGQEEELPQGQPQSPNAPPSPSVGETLGDGINSSQTKPGGSSPPAHPSLPGDGLTAKASEKPPERVQKRSERVRRAEPPKPEVVDSTESIPVSDEDSDAMVDDPNDEDFVPFRPRRSPRMSLRSSVSQRAGRSAVGTKMTCAHCRTPLQKGQTAYQRKGLPQLFCSSSCLTTFSKKPSGKKTCTFCKKEIWNTKDSVVAQTGSGGSFHEFCTSVCLSLYEAQQQRPIPQSGDPADATRCSICQKTGEVLHEVSNGSVVHRLCSDSCFSKFRANKGLKTNCCDQCGAYIYTKTGSPGPELLFHEGQQKRFCNTTCLGAYKKKNTRVYPCVWCKTLCKNFEMLSHVDRNGKTSLFCSLCCTTSYKVKQAGLTGPPRPCSFCRRSLSDPCYYNKVDRTVYQFCSPSCWTKFQRTSPEGGIHLSCHYCHSLFSGKPEVLDWQDQVFQFCCRDCCEDFKRLRGVVSQCEHCRQEKLLHEKLRFSGVEKSFCSEGCVLLYKQDFTKKLGLCCITCTYCSQTCQRGVTEQLDGSTWDFCSEDCKSKYLLWYCKAARCHACKRQGKLLETIHWRGQIRHFCNQQCLLRFYSQQNQPNLDTQSGPESLLNSQSPESKPQTPSQTKVENSNTVRTPEENGNLGKIPVKTRSAPTAPTPPPPPPPATPRKNKAAMCKPLMQNRGVSCKVEMKSKGSQTEEWKPQVIVLPIPVPIFVPVPMHLYCQKVPVPFSMPIPVPVPMFLPTTLESTDKIVETIEELKVKIPSNPLEADILAMAEMIAEAEELDKASSDLCDLVSNQSAEGLLEDCDLFGPARDDVLAMAVKMANVLDEPGQDLEADFPKNPLDINPSVDFLFDCGLVGPEDVSTEQDLPRTMRKGQKRLVLSESCSRDSMSSQPSCTGLNYSYGVNAWKCWVQSKYANGETSKGDELRFGPKPMRIKEDILACSAAELNYGLAQFVREITRPNGERYEPDSIYYLCLGIQQYLLENNRMVNIFTDLYYLTFVQELNKSLSTWQPTLLPNNTVFSRVEEEHLWECKQLGVYSPFVLLNTLMFFNTKFFGLQTAEEHMQLSFTNVVRQSRKCTTPRGTTKVVSIRYYAPVRQRKGRDTGPGKRKREDEAPILEQRENRMNPLRCPVKFYEFYLSKCPESLRTRNDVFYLQPERSCIAESPLWYSVIPMDRSMLESMLNRILAVREIYEELGRPGEEDLD

SEQ ID NO: 70959 - protein, 1358 aa, Homo sapiens
MDPSDFPSPFDPLTLPEKPLAGDLPVDMEFGEDLLESQTAPTRGWAPPGPSPSSGALDLLDTPAGLEKDPGVLDGATELLGLGGLLYKAPSPPEVDHGPEGTLAWDAGDQTLEPGPGGQTPEVVPPDPGAGANSCSPEGLLEPLAPDSPITLQSPHIEEEETTSIATARRGSPGQEEELPQGQPQSPNAPPSPSVGETLGDGINSSQTKPGGSSPPAHPSLPGDGLTAKASEKPPERKRSERVRRAEPPKPEVVDSTESIPVSDEDSDAMVDDPNDEDFVPFRPRRSPRMSLRSSVSQRAGRSAVGTKMTCAHCRTPLQKGQTAYQRKGLPQLFCSSSCLTTFSKKPSGKKTCTFCKKEIWNTKDSVVAQTGSGGSFHEFCTSVCLSLYEAQQQRPIPQSGDPADATRCSICQKTGEVLHEVSNGSVVHRLCSDSCFSKFRANKGLKTNCCDQCGAYIYTKTGSPGPELLFHEGQQKRFCNTTCLGAYKKKNTRVYPCVWCKTLCKNFEMLSHVDRNGKTSLFCSLCCTTSYKVKQAGLTGPPRPCSFCRRSLSDPCYYNKVDRTVYQFCSPSCWTKFQRTSPEGGIHLSCHYCHSLFSGKPEVLDWQDQVFQFCCRDCCEDFKRLRGVVSQCEHCRQEKLLHEKLRFSGVEKSFCSEGCVLLYKQDFTKKLGLCCITCTYCSQTCQRGVTEQLDGSTWDFCSEDCKSKYLLWYCKAARCHACKRQGKLLETIHWRGQIRHFCNQQCLLRFYSQQNQPNLDTQSGPESLLNSQSPESKPQTPSQTKVENSNTIPVKTRSAPTAPTPPPPPPPATPRKNKAAMCKPLMQNRGVSCKVEMKSKGSQTEEWKPQVIVLPIPVPIFVPVPMHLYCQKVPVPFSMPIPVPVPMFLPTTLESTDKIVETIEELKVKIPSNPLEADILAMAEMIAEAEELDKASSDLCDLVSNQSAEGLLEDCDLFGPARDDVLAMAVKMANVLDEPGQDLEADFPKNPLDINPSVDFLFDCGLVGPEDVSTEQDLPRTMRKGQKRLVLSESCSRDSMSSQPSCTGLNYSYGVNAWKCWVQSKYANGETSKGDELRFGPKPMRIKEDILACSAAELNYGLAQFVREITRPNGERYEPDSIYYLCLGIQQYLLENNRMVNIFTDLYYLTFVQELNKSLSTWQPTLLPNNTVFSRVEEEHLWECKQLGVYSPFVLLNTLMFFNTKFFGLQTAEEHMQLSFTNVVRQSRKCTTPRGTTKVVSIRYYAPVRQRKGRDTGPGKRKREDEAPILEQRENRMNPLRCPVKFYEFYLSKCPESLRTRNDVFYLQPERSCIAESPLWYSVIPMDRSMLESMLNRILAVREIYEELGRPGEEDLD

SEQ ID NO: 70960 - protein, 703 aa, Homo sapiens; identical to SEQ ID NO: 70244

SEQ ID NO: 70961 - protein, 742 aa, Homo sapiens
MEFVSGYRDEFLDFTALLFGWFRKFVAERGAVGTSLEGRCRQLEAQIRRLPQDPALWVLHVLPNHSVGISLGQGAEPGPGPGLGTAWLLGDNPPLHLRDLSPYISFVSLEDGEEGEEEEEEDEEEEKREDGGAGSTEKVEPEEDRELAPTSRESPQETNPPGESEEAAREAGGGKDGCREDRVENETRPQKRKGQRSEAAPLHVSCLLLVTDEHGTILGIDLLVDGAQGTASWGSGTKDLAPWAYALLCHSMACPMGSGDPRKPRQLTVGDARLHRELESLVPRLGVKLAKTPMRTWGPRPGFTFASLRARTCHVCHRHSFEAKLTPCPQCSAVLYCGEACLRADWQRCPDDVSHRFWCPRLAAFMERAGELATLPFTYTAEVTSETFNKEAFLASRGLTRGYWTQLSMLIPGPGFSRHPRGNTPSLSLLRGGDPYQLLQGDGTALMPPVPPHPPRGVFGSWQDYYTWRGLSLDSPIAVLLTYPLTVYYVITHLVPQSFPELNIQNKQSLKIHVVEAGKEFDLVMVFWELLVLLPHVALELQFVGDGLPPESDEQHFTLQRDSLEVSVRPGSGISARPSSGTKEKGGRRDLQIKVSARPYHLFQGPKPDLVIGFNSGFALKDTWLRSLPRLQSLRVPAFFTESSEYSCVMDGQTMAVATGGGTSPPQPNPFRSPFRLRAADNCMSWYCNAFIFHLVYKPAQGSGARPAPGPPPPSPTPSAPPAPTRRRRGEKKPGRGARRRK

SEQ ID NO: 70962 - protein, 227 aa, Homo sapiens
MTDFKLGIVRLGRVAGKTKYTLIDEQDIPLVESYSFEARMEVDADGNGAKIFAYAFDKNRGRGSGRLLHELLWERHRGGVAPGFQVVHLNAVTVDNRLDNLQLVPWGWRPKAEETSSKQREQSLYWLAIQQLPTDPIEEQFPVLNVTRYYNANGDVVEEEENSCTYYECHYPPCTVIEKQLREFNICGRCQVARYCGSQCQQKDWPAHKKHCRERKRPFQHELEPER

SEQ ID NO: 70963 - protein, 708 aa, Homo sapiens
MSERGIKWACEYCTYENWPSAIKCTMCRAQRPSGTIITEDPFKSGSSDVGRDWDPSSTEGGSSPLICPDSSARPRVKSSYSMENANKWSCHMCTYLNWPRAIRCTQCLSQRRTRSPTESPQSSGSGSRPVAFSVDPCEEYNDRNKLNTRTQHWTCSVCTYENWAKAKRCVVCDHPRPNNIEAIELAETEEASSIINEQDRARWRGSCSSGNSQRRSPPATKRDSEVKMDFQRIELAGAVGSKEELEVDFKKLKQIKNRMKKTDWLFLNACVGVVEGDLAAIEAYKSSGGDIARQLTADEVRLLNRPSAFDVGYTLVHLAIRFQRQDMLAILLTEVSQQAAKCIPAMVCPELTEQIRREIAASLHQRKGDFACYFLTDLVTFTLPADIEDLPPTVQEKLFDEVLDRDVQKELEEESPIINWSLELATRLDSRLYALWNRTAGDCLLDSVLQATWGIYDKDSVLRKALHDSLHDCSHWFYTRWKDWESWYSQSFGLHFSLREEQWQEDWAFILSLASQPGASLEQTHIFVLAHILRRPIIVYGVKYYKSFRGETLGYTRFQGVYLPLLWEQSFCWKSPIALGYTRGHFSALVAMENDGYGNRGAGANLNTDDDVTITFLPLVDSERKLLHVHFLSAQELGNEEQQEKLLREWLDCCVTEGGVLVAMQKSSRRRNHPLVTQMVEKWLDRYRQIRPCTSLSDGEEDEDDEDE

SEQ ID NO: 70964 - protein, 799 aa, Homo sapiens
MEIPKLLPARGTLQGGGGGGIPAGGGRVHRGPDSPAGQVPTRRLLLPRGPQDGGPGRRREEASTASRGPGPSLFAPRPHQPSGGGDDFFLVLLDPVGGDVETAGSGQAAGPVLREEAKAGPGLQGDESGANPAGCSAQGPHCLSAVPTPAPISAPGPAAAFAGTVTIHNQDLLLRFENGVLTLATPPPHAWEPGAAPAQQPRCLIAPQAGFPQAAHPGDCPELRSDLLLAEPAEPAPAPAPQEEAEGLAAALGPRGLLGSGPGVVLYLCPEALCGQTFAKKHQLKMHLLTHSSSQGQRPFKCPLGGCGWTFTTSYKLKRHLQSHDKLRPFGCPAEGCGKSFTTVYNLKAHMKGHEQENSFKCEVCEESFPTQAKLGAHQRSHFEPERPYQCAFSGCKKTFITVSALFSHNRAHFREQELFSCSFPGCSKQYDKACRLKIHLRSHTGERPFLCDFDGCGWNFTSMSKLLRHKRKHDDDRRFMCPVEGCGKSFTRAEHLKGHSITHLGTKPFVCPVAGCCARFSARSSLYIHSKKHLQDVDTWKSRCPISSCNKLFTSKHSMKTHMVKRHKVGQDLLAQLEAANSLTPSSELTSQRQNDLSDAEIVSLFSDVPDSTSAALLDTALVNSGILTIDVASVSSTLAGHLPANNNNSVGQAVDPPSLMATSDPPQSLDTSLFFGTAATGFQQSSLNMDEVSSVSVGPLGSLDSLAMKNSSPEPQALTPSSKLTVDTDTLTPSSTLCENSVSELLTPAKAEWSVHPNSDFFGQEGETQFGFPNAAGNHGSQKERNLITVTGSSFLV

SEQ ID NO: 70965 - protein, 803 aa, Homo sapiens
MEIPKLLPARGTLQGGGGGGIPAGGGRVHRGPDSPAGQVPTRRLLLLRGPQDGGPGRRREEASTASRGPGPSLLAPRTDQPSGGGGGGGDDFFLVLLDPVGGDVETAGSGQAAGPVLREEAEEGPGLQGGESGANPAGPTALGPRCLSAVPTPAPISAPGPAAAFAGTVTIHNQDLLLRFENGVLTLATPPPHAWEPGAAPAQQPGCLIAPQAGFPHAAHPGDCPELPPDLLLAEPAEPAPAPAPEEEAEGPAAALGPRGPLGSGPGVVLYLCPEAQCGQTFAKKHQLKVHLLTHSSSQGQRPFKCPLGGCGWTFTTSYKLKRHLQSHDKLRPFGCPAEGCGKSFTTVYNLKAHMKGHEQENSFKCEVCEESFPTQAKLSAHQRSHFEPERPYQCAFSGCKKTFITVSALFSHNRAHFREQELFSCSFPGCSKQYDKACRLKIHLRSHTGERPFLCDFDGCGWNFTSMSKLLRHKRKHDDDRRFMCPVEGCGKSFTRAEHLKGHSITHLGTKPFVCPVAGCCARFSARSSLYIHSKKHLQDVDTWKSRCPISSCNKLFTSKHSMKTHMVKRHKVGQDLLAQLEAANSLTPSSELTSQRQNDLSDAEIVSLFSDVPDSTSAALLDTALVNSGILTIDVASVSSTLAGHLPANNNNSVGQAVDPPSLMATSDPPQSLDTSLFFGTAATGFQQSSLNMDEVSSVSVGPLGSLDSLAMKNSSPEPQALTPSSKLTVDTDALTPSSTLCENSVSELLTPTKAEWNVHPDSDFFGQEGETQFGFPNAAGNHGSQKETDLITVTGSSFLV

SEQ ID NO: 70966 - protein, 873 aa, Homo sapiens
MASRRKSTTPCMVLASEQDPDLELISDLDEGPPVLTPVENTRAESISSDEEVHESVDSDNQQNKKVEGGYECKYCTFQTPDLNMFTFHVDSEHPNVVLNSSYVCVECNFLTKRYDALSEHNLKYHPGEENFKLTMVKRNNQTIFEQTINDLTFDGSFVKEENAEQAESTEVSSSGISISKTPIMKMMKNKVENKRIAVHHNSVEDVPEEKENEIKPDREEIVENPSSSASESNTSTSIVNRIHPSTASTVVTPAAVLPGLAQVITAVSAQQNSNLIPKVLIPVNSIPTYNAALDNNPLLLNTYNKFPYPTMSEITVLSAQAKYTEEQIKIWFSAQRLKHGVSWTPEEVEEARRKQFNGTVHTVPQTITVIPTHISTGSNGLPSILQTCQIVGQPGLVLTQVAGTNTLPVTAPIALTVAGVPSQNNIQKSQVPAAQPTAETKPATAAVPTSQSVKHETALVNPDSFGIRAKKTKEQLAELKVSYLKNQFPHDSEIIRLMKITGLTKGEIKKWFSDTRYNQRNSKSNQCLHLNNDSSTTIIIDSSDETTESPTVGTAQPKQSWNPFPDFTPQKFKEKTAEQLRVLQASFLNSSVLTDEELNRLRAQTKLTRREIDAWFTEKKKSKALKEEKMEIDESNAGSSKEEAGETSPADESGAPKSGSTGKICKKTPEQLHMLKSAFVRTQWPSPEEYDKLAKESGLARTDIVSWFGDTRYAWKNGNLKWYYYYQSANSSSMNGLSSLRKRGRGRPKGRGRGRPRGRPRGSKRINNWDRGPSLIKFKTGTAILKDYYLKHKFLNEQDLDELVNKSHMGYEQVREWFAERQRRSELGIELFEENEEEDEVIDDQEEDEEETDDSDTWEPPRHVKRKLSKSDD

SEQ ID NO: 70967 - protein, 873 aa, Homo sapiens; identical to SEQ ID NO: 70966

SEQ ID NO: 70968 - protein, 873 aa, Homo sapiens; identical to SEQ ID NO: 70966

SEQ ID NO: 70969 - protein, 498 aa, Homo sapiens
MASKRKSTTPCMIPVKTVVLQDASMEAQPAETLPEGPQQDLPPEASAASSEAAQNPSSTDGSTLANGHRSTLDGYLYSCKYCDFRSHDMTQFVGHMNSEHTDFNKDPTFVCSGCSFLAKTPEGLSLHNATCHSGEASFVWNVAKPDNHVVVEQSIPESTSTPDLAGEPSAEGADGQAEIIITKTPIMKIMKGKAEAKKIHTLKENVPSQPVGEALPKLSTGEMEVREGDHSFINGAVPVSQASASSAKNPHAANGPLIGTVPVLPAGIAQFLSLQQQPPVHAQHHVHQPLPTAKALPKVMIPLSSIPTYNAAMDSNSFLKNSFHKFPYPTKAELCYLTVVTKYPEEQLKIWFTAQRLKQGISWSPEEIEDARKKMFNTVIQSVPQPTITVLNTPLVASAGNVQHLIQAALPGHVVGQPEGTGGGLLVTQPLMANGLQATSSPLPLTVTSVPKQPGVAPINTVCSNTTSAVKVVNAAQSLLTACPSITSQAFLDASIYK

SEQ ID NO: 70970 - protein, 96 aa, Homo sapiens
MASKRKSTTPCMIPVKTVVLQDASMEAQPAETLPEGPQQDLPPEASAASSEAAQNPSSTDGSTLANGHRSTLDGYLYSCKYCDFRSHDMTQFVGHM

SEQ ID NO: 70971 - protein, 747 aa, Homo sapiens
MEVREGDHSFINGAVPVSQASASSAKNPHAANGPLIGTVPVLPAGIAQFLSLQQQPPVHAQHHVHQPLPTAKALPKVMIPLSSIPTYNAAMDSNSFLKNSFHKFPYPTKAELCYLTVVTKYPEEQLKIWFTAQRLKQGISWSPEEIEDARKKMFNTVIQSVPQPTITVLNTPLVASAGNVQHLIQAALPGHVVGQPEGTGGGLLVTQPLMANGLQATSSPLPLTVTSVPKQPGVAPINTVCSNTTSAVKVVNAAQSLLTACPSITSQAFLDASIYKNKKSHEQLSALKGSFCRNQFPGQSEVEHLTKVTGLSTREVRKWFSDRRYHCRNLKGSRAMIPGDHSSIIIDSVPEVSFSPSSKVPEVTCIPTTATLATHPSAKRQSWHQTPDFTPTKYKERAPEQLRALESSFAQNPLPLDEELDRLRSETKMTRREIDSWFSERRKKVNAEETKKAEENASQEEEEAAEDEGGEEDLASELRVSGENGSLEMPSSHILAERKVSPIKINLKNLRVTEANGRNEIPGLGACDPEDDESNKLAEQLPGKVSCKKTAQQRHLLRQLFVQTQWPSNQDYDSIMAQTGLPRPEVVRWFGDSRYALKNGQLKWYEDYKRGNFPPGLLVIAPGNRELLQDYYMTHKMLYEEDLQNLCDKTQMSSQQVKQWFAEKMGEETRAVADTGSEDQGPGTGELTAVHKGMGDTYSEVSENSESWEPRVPEASSEPFDTSSPQAGRQLGSWSLSSQPLPSLLTL

SEQ ID NO: 70972 - protein, 956 aa, Homo sapiens
MASKRKSTTPCMIPVKTVVLQDASMEAQPAETLPEGPQQDLPPEASAASSEAAQNPSSTDGSTLANGHRSTLDGYLYSCKYCDFRSHDMTQFVGHMNSEHTDFNKDPTFVCSGCSFLAKTPEGLSLHNATCHSGEASFVWNVAKPDNHVVVEQSIPESTSTPDLAGEPSAEGADGQAEIIITKTPIMKIMKGKAEAKKIHTLKENVPSQPVGEALPKLSTGEMEVREGDHSFINGAVPVSQASASSAKNPHAANGPLIGTVPVLPAGIAQFLSLQQQPPVHAQHHVHQPLPTAKALPKVMIPLSSIPTYNAAMDSNSFLKNSFHKFPYPTKAELCYLTVVTKYPEEQLKIWFTAQRLKQGISWSPEEIEDARKKMFNTVIQSVPQPTITVLNTPLVASAGNVQHLIQAALPGHVVGQPEGTGGGLLVTQPLMANGLQATSSPLPLTVTSVPKQPGVAPINTVCSNTTSAVKVVNAAQSLLTACPSITSQAFLDASIYKNKKSHEQLSALKGSFCRNQFPGQSEVEHLTKVTGLSTREVRKWFSDRRYHCRNLKGSRAMIPGDHSSIIIDSVPEVSFSPSSKVPEVTCIPTTATLATHPSAKRQSWHQTPDFTPTKYKERAPEQLRALESSFAQNPLPLDEELDRLRSETKMTRREIDSWFSERRKKVNAEETKKAEENASQEEEEAAEDEGGEEDLASELRVSGENGSLEMPSSHILAERKVSPIKINLKNLRVTEANGRNEIPGLGACDPEDDESNKLAEQLPGKVSCKKTAQQRHLLRQLFVQTQWPSNQDYDSIMAQTGLPRPEVVRWFGDSRYALKNGQLKWYEDYKRGNFPPGLLVIAPGNRELLQDYYMTHKMLYEEDLQNLCDKTQMSSQQVKQWFAEKMGEETRAVADTGSEDQGPGTGELTAVHKGMGDTYSEVSENSESWEPRVPEASSEPFDTSSPQAGRQLETD

SEQ ID NO: 70973 - protein, 46 aa, Homo sapiens
MASKRKSTTPCMIPVKTVVLQDASMEAQPAETLPEGPQQDLPPEAS

SEQ ID NO: 70974 - protein, 498 aa, Homo sapiens; identical to SEQ ID NO: 70969

SEQ ID NO: 70975 - protein, 48 aa, Homo sapiens
MASKRKSTTPCMIPVKTVVLQDASMEAQPAETLPEGPQQDLPPEASAA

SEQ ID NO: 70976 - protein, 90 aa, Homo sapiens
MASKRKSTTPCMIPVKTVVLQDASMEAQPAETLPEGPQQDLPPEASAASSEAAQNPSSTDGSTLANGHRSTLDGYLYSCKYCDFRSHDMT

SEQ ID NO: 70977 - protein, 118 aa, Homo sapiens
MASKRKSTTPCMIPVKTVVLQDASMEAQPAETLPEGPQQDLPPEASAASSEAAQNPSSTDGSTLANGHRSTLDGYLYSCKYCDFRSHDMTQFVGHMNSEHTDFNKDPTFVCSGCSFLA

SEQ ID NO: 70978 - protein, 956 aa, Homo sapiens; identical to SEQ ID NO: 70972

SEQ ID NO: 70979 - protein, 969 aa, Homo sapiens
MASKRKSTTPCMIPVKTVVLQDASMEAQPAETLPEGPQQDLPPEASAASSEAAQNPSSTDGSTLANGHRSTLDGYLYSCKYCDFRSHDMTQFVGHMNSEHTDFNKDPTFVCSGCSFLAKTPEGLSLHNATCHSGEASFVWNVAKPDNHVVVEQSIPESTSTPDLAGEPSAEGADGQAEIIITKTPIMKIMKGKAEAKKIHTLKENVPSQPVGEALPKLSTGEMEVREGDHSFINGAVPVSQASASSAKNPHAANGPLIGTVPVLPAGIAQFLSLQQQPPVHAQHHVHQPLPTAKALPKVMIPLSSIPTYNAAMDSNSFLKNSFHKFPYPTKAELCYLTVVTKYPEEQLKIWFTAQRLKQGISWSPEEIEDARKKMFNTVIQSVPQPTITVLNTPLVASAGNVQHLIQAALPGHVVGQPEGTGGGLLVTQPLMANGLQATSSPLPLTVTSVPKQPGVAPINTVCSNTTSAVKVVNAAQSLLTACPSITSQAFLDASIYKNKKSHEQLSALKGSFCRNQFPGQSEVEHLTKVTGLSTREVRKWFSDRRYHCRNLKGSRAMIPGDHSSIIIDSVPEVSFSPSSKVPEVTCIPTTATLATHPSAKRQSWHQTPDFTPTKYKERAPEQLRALESSFAQNPLPLDEELDRLRSETKMTRREIDSWFSERRKKVNAEETKKAEENASQEEEEAAEDEGGEEDLASELRVSGENGSLEMPSSHILAERKVSPIKINLKNLRVTEANGRNEIPGLGACDPEDDESNKLAEQLPGKVSCKKTAQQRHLLRQLFVQTQWPSNQDYDSIMAQTGLPRPEVVRWFGDSRYALKNGQLKWYEDYKRGNFPPGLLVIAPGNRELLQDYYMTHKMLYEEDLQNLCDKTQMSSQQKQTEFDLINVKDWPVWETACHVEEPNPTLCCHMPFPCPAAGHLGELPESSQTAQSLPLPSACPPPSKQQARWGSHQFFLPQCRTFPLPSNG

SEQ ID NO: 70980 - protein, 315 aa, Homo sapiens
MASKRKSTTPCMIPVKTVVLQDASMEAQPAETLPEGPQQDLPPEASAASSEAAQNPSSTDGSTLANGHRSTLDGYLYSCKYCDFRSHDMTQFVGHMNSEHTDFNKDPTFVCSGCSFLAKTPEGLSLHNATCHSGEASFVWNVAKPDNHVVVEQSIPESTSTPDLAGEPSAEGADGQAEIIITKTPIMKIMKGKAEAKKIHTLKENVPSQPVGEALPKLSTGEMEKQTEFDLINVKDWPVWETACHVEEPNPTLCCHMPFPCPAAGHLGELPESSQTAQSLPLPSACPPPSKQQARWGSHQFFLPQCRTFPLPSNG

SEQ ID NO: 70981 - protein, 166 aa, Homo sapiens
MASKRKSTTPCMIPVKTVVLQDASMEAQPAETLPEGPQQDLPPEASAASSEAAQNPSSTDGSTLANGHRSTLDGYLYSCKYCDFRSHDMTQFVGHMNSEHTDFNKDPTFVCSGCSFLAKTPEGLSLHNATCHSGEASFVWNVAKPDNHVVVEQSIPESTSTPDLAG

SEQ ID NO: 70982 - protein, 956 aa, Homo sapiens; identical to SEQ ID NO: 70972

SEQ ID NO: 70983 - protein, 956 aa, Homo sapiens; identical to SEQ ID NO: 70972

SEQ ID NO: 70984 - protein, 166 aa, Homo sapiens; identical to SEQ ID NO: 70981

SEQ ID NO: 70985 - protein, 475 aa, Homo sapiens
MGMWASLDALWEMPAEKRIFGAVLLFSWTVYLWETFLAQRQRRIYKTTTHVPPELGQIMDSETFEKSRLYQLDKSTFSFWSGLYSETEGTLILLFGGIPYLWRLSGRFCGYAGFGPEYEITQSLVFLLLATLFSALTGLPWSLYNTFVIEEKHGFNQQTLGFFMKDAIKKFVVTQCILLPVSSLLLYIIKIGGDYFFIYAWLFTLVVSLVLVTIYADYIAPLFDKFTPLPEGKLKEEIEVMAKSIDFPLTKVYVVEGSKRSSHSNAYFYGFFKNKRIVLFDTLLEEYSVLNKDIQEDSGMEPRNEEEGNSEEIKAKVKNKKQGCKNEEVLAVLGHELGHWKLGHTVKNIIISQMNSFLCFFLFAVLIGRKELFAAFGFYDSQPTLIGLLIIFQFIFSPYNEVLSFCLTVLSRRFEFQADAFAKKLGKAKDLYSALIKLNKDNLGFPVSDWLFSMWHYSHPPLLERLQALKTMKQH

SEQ ID NO: 70986 - protein, 338 aa, Homo sapiens
MMRTCVLLSAVLWCLTGVQCPRFTLFNKKGFIYGKTGQPDKIYVELHQNSPVLICMDFKLSKKEIVDPTYLWIGPNEKTLTGNNRINITETGQLMVKDFLEPLSGLYTCTLSYKTVKAETQEEKTVKKRYDFMVFAYREPDYSYQMAVRFTTRSCIGRYNDVFFRVLKKILDSLISDLSCHVIEPSYKCHSVEIPEHGLIHELFIAFQVNPFAPGWKGACNGSVDCEDTTNHNILQARDRIEDFFRSQAYIFYHNFNKTLPAMHFVDHSLQVVRLDSCRPGFGKNERLHSNCASCCVVCSPATFSPDVNVTCQTCVSVLTYGAKSCPQTSNKNQQYED

SEQ ID NO: 70987 - protein, 316 aa, Homo sapiens
MMRTCVLLSAVLWCLTGDKIYVELHQNSPVLICMDFKLSKKEIVDPTYLWIGPNEKTLTGNNRINITETGQLMVKDFLEPLSGLYTCTLSYKTVKAETQEEKTVKKRYDFMVFAYREPDYSYQMAVRFTTRSCIGRYNDVFFRVLKKILDSLISDLSCHVIEPSYKCHSVEIPEHGLIHELFIAFQVNPFAPGWKGACNGSVDCEDTTNHNILQARDRIEDFFRSQAYIFYHNFNKTLPAMHFVDHSLQVVRLDSCRPGFGKNERLHSNCASCCVVCSPATFSPDVNVTCQTCVSVLTYGAKSCPQTSNKNQQYED

SEQ ID NO: 70988 - protein, 638 aa, Homo sapiens
MAGGSATTWGYPVALLLLVATLGLGRWLQPDPGLPGLRHSYDCGIKGMQLLVFPRPGQTLRFKVVDEFGNRFDVNNCSICYHWVTSRPQEPAVFSADYRGCHVLEKDGRFHLRVFMEAVLPNGRVDVAQDATLICPKPDPSRTLDSQLAPPAMFSVSTPQTLSFLPTSGHTSQGSGHAFPSPLDPGHSSVHPTPALPSPGPGPTLATLAQPHWGTLEHWDVNKRDYIGTHLSQEQCQVASGHLPCIVRRTSKEACQQAGCCYDNTREVPCYYGNTATVQCFRDGYFVLVVSQEMALTHRITLANIHLAYAPTSCSPTQHTEAFVVFYFPLTHCGTTMQVAGDQLIYENWLVSGIHIQKGPQGSITRDSTFQLHVRCVFNASDFLPIQASIFPPPSPAPMTQPGPLRLELRIAKDETFSSYYGEDDYPIVRLLREPVHVEVRLLQRTDPNLVLLLHQCWGAPSANPFQQPQWPILSDGCPFKGDSYRTQMVALDGATPFQSHYQRFTVATFALLDSGSQRALRGLVYLFCSTSACHTSGLETCSTACSTGTTRQRRSSGHRNDTARPQDIVSSPGPVGFEDSYGQEPTLGPTDSNGNSSLRPLLWAVLLLPAVALVLGFGVFVGLSQTWAQKLWESNRQ

SEQ ID NO: 70989 - protein, 330 aa, Homo sapiens
MALTHRITLANIHLAYAPTSCSPTQHTEAFVVFYFPLTHCGTTMQVAGDQLIYENWLVSGIHIQKGPQGSITRDSTFQLHVRCVFNASDFLPIQASIFPPPSPAPMTQPGPLRLELRIAKDETFSSYYGEDDYPIVRLLREPVHVEVRLLQRTDPNLVLLLHQCWGAPSANPFQQPQWPILSDGCPFKGDSYRTQMVALDGATPFQSHYQRFTVATFALLDSGSQRALRGLVYLFCSTSACHTSGLETCSTACSTGTTRQRRSSGHRNDTARPQDIVSSPGPVGFEDSYGQEPTLGPTDSNGNSSLRPLLWAVLLLPAVALVLGFGVFVA

SEQ ID NO: 70990 - protein, 745 aa, Homo sapiens
MACRQRGGSWSPSGWFNAGWSTYRSISLFFALVTSGNSIDVSQLVNPAFPGTVTCDEREITVEFPSSPGTKKWHASVVDPLGLDMPNCTYILDPEKLTLRATYDNCTRRVHGGHQMTIRVMNNSAALRHGAVMYQFFCPAMQVEETQGLSASTICQKDFMSFSLPRVFSGLADDSKGTKVQMGWSIEVGDGARAKTLTLPEAMKEGFSLLIDNHRMTFHVPFNATGVTHYVQGNSHLYMVSLKLTFISPGQKVIFSSQAICAPDPVTCNATHMTLTIPEFPGKLKSVSFENQNIDVSQLHDNGIDLEATNGMKLHFSKTLLKTKLSEKCLLHQFYLASLKLTFLLRPETVSMVIYPECLCESPVSIVTGELCTQDGFMDVEVYSYQTQPALDLGTLRVGNSSCQPVFEAQSQGLVRFHIPLNGCGTRYKFEDDKVVYENEIHALWTDFPPSKISRDSEFRMTVKCSYSRNDMLLNINVESLTPPVASVKLGPFTLILQSYPDNSYQQPYGENEYPLVRFLRQPIYMEVRVLNRDDPNIKLVLDDCWATSTMDPDSFPQWNVVVDGCAYDLDNYQTTFHPVGSSVTHPDHYQRFDMKAFAFVSEAHVLSSLVYFHCSALICNRLSPDSPLCSVTCPVSSRHRRATGATEAEKMTVSLPGPILLLSDDSSFRGVGSSDLKASGSSGEKSRSETGEEVGSRGAMDTKGHKTAGDVGSKAVAAVAAFAGVVATLGFIYYLYEKRTVSNH

SEQ ID NO: 70991 - protein, 373 aa, Homo sapiens
MVMVSKDLFGTGKLIRAADLTLGPEACEPLVSMDTEDVVRFEVGLHECGNSMQVTDDALVYSTFLLHDPRPVGNLSIVRTNRAEIPIECRYPRQGNVSSQAILPTWLPFRTTVFSEEKLTFSLRLMEENWNAEKRSPTFHLGDAAHLQAEIHTGSHVPLRLFVDHCVATPTPDQNASPYHTIVDFHGCLVDGLTDASSAFKVPRPGPDTLQFTVDVFHFANDSRNMIYITCHLKVTLAEQDPDELNKACSFSKPSNSWFPVEGSADICQCCNKGDCGTPSHSRRQPHVMSQWSRSASRNRRHVTEEADVTVGPLIFLDRRGDHEVEQWALPSDTSVVLLGVGLAVVVSLTLTAVILVLTRRCRTASHPVSASE

SEQ ID NO: 70992 - protein, 424 aa, Homo sapiens
MELSYRLFICLLLWGSTELCYPQPLWLLQGGASHPETSVQPVLVECQEATLMVMVSKDLFGTGKLIRAADLTLGPEACEPLVSMDTEDVVRFEVGLHECGNSMQVTDDALVYSTFLLHDPRPVGNLSIVRTNRAEIPIECRYPRQGNVSSQAILPTWLPFRTTVFSEEKLTFSLRLMEENWNAEKRSPTFHLGDAAHLQAEIHTGSHVPLRLFVDHCVATPTPDQNASPYHTIVDFHGCLVDGLTDASSAFKVPRPGPDTLQFTVDVFHFANDSRNMIYITCHLKVTLAEQDPDELNKACSFSKPSNSWFPVEGSADICQCCNKGDCGTPSHSRRQPHVMSQWSRSASRNRRHVTEEADVTVGPLIFLDRRGDHEVEQWALPSDTSVVLLGVGLAVVVSLTLTAVILVLTRRCRTASHPVSASE

SEQ ID NO: 70993 - protein, 371 aa, Homo sapiens
MELSYRLFICLLLWGSTELCYPQPLWLLQGGASHPETSVQPVLVECQEATLMVMVSKDLFGTGKLIRAADLTLGPEACEPLVSMDTEDVVRFEVGLHECGNSMQVTDDALVYSTFLLHDPRPVGNLSIVRTNRAEIPIECRYPRQGNVSSQAILPTWLPFRTTVFSEEKLTFSLRLMEENWNAEKRSPTFHLGDAAHLQAEIHTGSHVPLRLFVDHCVATPTPDQNASPYHTIVDFHGCLVDGLTDASSAFKVPRPGPDTLQFTVDVFHFANDSRNMIYITCHLKVTLAEQDPDELNKACSFSKPSNSWFPVEGSADICQCCNKGDCGTPSHSRRQPHVMSQWSRSASRNRRHVTEEADVTVGTDLPGQEG

SEQ ID NO: 70994 - protein, 540 aa, Homo sapiens
MWLLRCVLLCVSLSLAVSGQHKPEAPDYSSVLHCGPWSFQFAVNLNQEATSPPVLIAWDNQGLLHELQNDSDCGTWIRKGPGSSVVLEATYSSCYVTEWDSHYIMPVGVEGAGAAEHKVVTERKLLKCPMDLLARDAPDTDWCDSIPARDRLPCAPSPISRGDCEGLGCCYSSEEVNSCYYGNTVTLHCTREGHFSIAVSRNVTSPPLLLDSVRLALRNDSACNPVMATQAFVLFQFPFTSCGTTRQITGDRAVYENELVATRDVKNGSRGSVTRDSIFRLHVSCSYSVSSNSLPINVQVFTLPPPFPETQPGPLTLELQIAKDKNYGSYYGVGDYPVVKLLRDPIYVEVSILHRTDPYLGLLLQQCWATPSTDPLSQPQWPILVKGCPYIGDNYQTQLIPVQKALDLPFPSHHQRFSIFTFSFVNPTVEKQALRGPVHLHCSVSVCQPAETPSCVVTCPDLSRRRNFDNSSQNTTASVSSKGPMILLQATKDPPEKLRVPVDSKVLWVAGLSGTLILGALLVSYLAVKKQKSCPDQMCQ

SEQ ID NO: 70995 - protein, 779 aa, Homo sapiens
MASFVTEVLAHSGRLEKEDLGTRISRLTRRVEEIKGEVCNMISKKYSEFLPSMQSAQGLITQVDKLSEDIDLLKSRIESEVRRDLHVSTGEFTDLKQQLERDSVVLSLLKQLQEFSTAIEEYNCALTEKKYVTGAQRLEEAQKCLKLLKSRKCFDLKILKSLSMELTIQKQNILYHLGEEWQKLIVWKFPPSKDTSSLESYLQTELHLYTEQSHKEEKTPMPPISSVLLAFSVLGELHSKLKSFGQMLLKYILRPLASCPSLHAVIESQPNIVIIRFESIMTNLEYPSPSEVFTKIRLVLEVLQKQLLDLPLDTDLENEKTSTVPLAEMLGDMIWEDLSECLIKNCLVYSIPTNSSKLQQYEEIIQSTEEFENALKEMRFLKGDTTDLLKYARNINSHFANKKCQDVIVAARNLMTSEIHNTVKIIPDSKINVPELPTPDEDNKLEVQKVSNTQYHEVMNLEPENTLDQHSFSLPTCRISESVKKLMELAYQTLLEATTSSDQCAVQLFYSVRNIFHLFHDVVPTYHKENLQKLPQLAAIHHNNCMYIAHHLLTLGHQFRLRLAPILCDGTATFVDLVPGFRRLGTECFLAQMRAQKGELLERLSSARNFSNMDDEENYSAASKAVRQVLHQLKRLGIVWQDVLPVNIYCKAMGTLLNTAISEVIGKITALEDISTEDGDRLYSLCKTVMDEGPQVFAPLSEESKNKKYQEEVPVYVPKWMPFKELMMMLQASLQEIGDRWADGKGPLAAAFSSSEVKALIRALFQNTERRAAALAKIK

SEQ ID NO: 70996 - protein, 672 aa, Homo sapiens
MASFVTEVLAHSGRLEKEDLGTRISRLTRRVEEIKGEVCNMISKKYSEFLPSMQSAQGLITQVDKLSEDIDLLKSRIESEVRRDLHVSTGEFTDLKQQLERDSVVLSLLKQLQEFSTAIEEYNCALTEKKYVTGAQRLEEAQKCLKLLKSRKCFDLKILKSLSMELTIQKQNILYHLGEEWQKLIVWKFPPSKDTSSLESYLQTELHLYTEQSHKEEKTPMPPISSVLLAFSVLGELHSKLKSFGQMLLKYILRPLASCPSLHAVIESQPNIVIIRFESIMTNLEYPSPSEVFTKIRLVLEVLQKQLLDLPLDTDLENEKTSTVPLAEMLGDMIWEDLSECLIKNCLVYSIPTNSSKLQQYEEIIQSTEEFENALKEMRFLKGDTTDLLKYARNINSHFANKKCQDVIVAARNLMTSEIHNTVKIIPDSKINVPELPTPDEDNKLEVQKVSNTQYHEVMNLEPENTLDQHSFSLPTCRISESVKKLMELAYQTLLEATTSSDQCAVQLFYSVRNIFHLFHDVVPTYHKENLQKLPQLAAIHHNNCMYIAHHLLTLGHQFRLRLAPILCDGTATFVDLVPGFRRLGTECFLAQMRAQKGELLERLSSARNFSNMDDEENYSAASKAVRQVLHQLKRLGIVWQDVLPVNIYCKAMGTLLNTAISEVIGKITALE

SEQ ID NO: 70997 - protein, 591 aa, Homo sapiens
MWERLNCAAEDFYSRLLQKFNEEKKGIRKDPFLYEADVQVQLISKGQPNPLKNILNENDIVFIVEKVPLEKEETSHIEELQSEETAISDFSTGENVGPLALPVGKARQLIGLYTMAHNPNMTHLKINLPVTALPPLWVRCDSSDPEGTCWLGAELITTNNSITGIVLYVVSCKADKNYSVNLENLKNLHKKRHHLSTVTSKGFAQYELFKSSALDDTITASQTAIALDISWSPVDEILQIPPLSSTATLNIKVESGEPRGPLNHLYRELKFLLVLADGLRTGVTEWLEPLEAKSAVELVQEFLNDLNKLDGFGDSTKKDTEVETLKHDTAAVDRSVKRLFKVRSDLDFAEQLWCKMSSSVISYQDLVKCFTLIIQSLQRGDIQPWLHSGSNSLLSKLIHQSYHGTMDTVSLSGTIPVQMLLEIGLDKLKKDYISFFIGQELASLNHLEYFIAPSVDIQEQVYRVQKLHHILEILVSCMPFIKSQHELLFSLTQICIKYYKQNPLDEQHIFQLPVRPTAVKNLYQSEKPQKWRVEIYSGQKKIKTVWQLSDSSPIDHLNFHKPDFSELTLNGSLEERIFFTNMVTCSQVHFK

SEQ ID NO: 70998 - protein, 477 aa, Homo sapiens
MAHNPNMTHLKINLPVTALPPLWVRCDSSDPEGTCWLGAELITTNNSITGIVLYVVSCKADKNYSVNLENLKNLHKKRHHLSTVTSKGFAQYELFKSSALDDTITASQTAIALDISWSPVDEILQIPPLSSTATLNIKVESGEPRGPLNHLYRELKFLLVLADGLRTGVTEWLEPLEAKSAVELVQEFLNDLNKLDGFGDSTKKDTEVETLKHDTAAVDRSVKRLFKVRSDLDFAEQLWCKMSSSVISYQDLVKCFTLIIQSLQRGDIQPWLHSGSNSLLSKLIHQSYHGTMDTVSLSGTIPVQMLLEIGLDKLKKDYISFFIGQELASLNHLEYFIAPSVDIQEQVYRVQKLHHILEILVSCMPFIKSQHELLFSLTQICIKYYKQNPLDEQHIFQLPVRPTAVKNLYQSEKPQKWRVEIYSGQKKIKTVWQLSDSSPIDHLNFHKPDFSELTLNGSLEERIFFTNMVTCSQVHFK

SEQ ID NO: 70999 - protein, 477 aa, Homo sapiens; identical to SEQ ID NO: 70998

SEQ ID NO: 71000 - protein, 424 aa, Homo sapiens
MAALGDEVLDGYVFPACPPCSYRYPYPAATKGKGAAGGSWQQRGRGCLPASSPCSAGAASLSFPGCGRLTAAEYFDSYQRERLMALLAQVGPGLGPRARRAGSCDVAVQVSPRIDAAVQCSLGRRTLQRRARDPESPAGPGAEGTTGGGSFSQQPSRRGLEQGSPQNGAPRPMRFPRTVAVYSPLALRRLTAFLEGPGPAAGEQRSGASDGERGPPPARLQGPEEGEVWTKKAPRRPQSDDDGEAQAAVRASWEQPADGPELPPREAQEGEAAPRSALRSPGQPPSAGRARDGGDGREAAVAGEGPSPRSPELGKERLRFQFLEQKYGYYHCKDCNIRWESAYVWCVQGTNKVYFKQFCRTCQKSYNPYRVEDITCQSCKQTRCSCPVKLRHVDPKRPHRQDLCGRCKGKRLSCDSTFSFKYII

SEQ ID NO: 71001 - protein, 572 aa, Homo sapiens
MAAPRPSPAISVSVSAPAFYAPQKKFGPVVAPKPKVNPFRPGDSEPPPAPGAQRAQMGRVGEIPPPPPEDFPLPPPPLAGDGDDAEGALGGAFPPPPPPIEESFPPAPLEEEIFPSPPPPPEEEGGPEAPIPPPPQPREKVSSIDLEIDSLSSLLDDMTKNDPFKARVSSGYVPPPVATPFSSKSSTKPAAGGTAPLPPWKSPSSSQPLPQVPAPAQSQTQFHVQPQPQPKPQVQLHVQSQTQPVSLANTQPRGPPASSPAPAPKFSPVTPKFTPVASKFSPGAPGGSGSQPNQKLGHPEALSAGTGSPQPPSFTYAQQREKPRVQEKQHPVPPPAQNQNQVRSPGAPGPLTLKEVEELEQLTQQLMQDMEHPQRQNVAVNELCGRCHQPLARAQPAVRALGQLFHIACFTCHQCAQQLQGQQFYSLEGAPYCEGCYTDTLEKCNTCGEPITDRMLRATGKAYHPHCFTCVVCARPLEGTSFIVDQANRPHCVPDYHKQYAPRCSVCSEPIMPEPGRDETVRVVALDKNFHMKCYKCEDCGKPLSIEADDNGCFPLDGHVLCRKCHTARAQT

SEQ ID NO: 71002 - protein, 540 aa, Homo sapiens
AAPRPSPAISVSVSAPAFYAPQKKFGPVVAPKPKVNPFRPGDSEPPPAPGAQRAQMGRVGEIPPPPPEDFPLPPPPLAGDGDDAEGALGGAFPPPPPPIEESFPPAPLEEEIFPSPPPPPEEEGGPEAPIPPPPQVSSGYVPPPVATPFSSKSSTKPAAGGTAPLPPWKSPSSSQPLPQVPAPAQSQTQFHVQPQPQPKPQVQLHVQSQTQPVSLANTQPRGPPASSPAPAPKFSPVTPKFTPVASKFSPGAPGGSGSQPNQKLGHPEALSAGTGSPQPPSFTYAQQREKPRVQEKQHPVPPPAQNQNQVRSPGAPGPLTLKEVEELEQLTQQLMQDMEHPQRQNVAVNELCGRCHQPLARAQPAVRALGQLFHIACFTCHQCAQQLQGQQFYSLEGAPYCEGCYTDTLEKCNTCGEPITDRMLRATGKAYHPHCFTCVVCARPLEGTSFIVDQANRPHCVPDYHKQYAPRCSVCSEPIMPEPGRDETVRVVALDKNFHMKCYKCEDCGKPLSIEADDNGCFPLDGHVLCRKCHTARAQT

SEQ ID NO: 71003 - protein, 415 aa, Homo sapiens
MTKNDPFKARVSSGYVPPPVATPFSSKSSTKPAAGGTAPLPPWKSPSSSQPLPQVPAPAQSQTQFHVQPQPQPKPQVQLHVQSQTQPVSLANTQPRGPPASSPAPAPKFSPVTPKFTPVASKFSPGAPGGSGSQPNQKLGHPEALSAGTGSPQPPSFTYAQQREKPRVQEKQHPVPPPAQNQNQVRSPGAPGPLTLKEVEELEQLTQQLMQDMEHPQRQNVAVNELCGRCHQPLARAQPAVRALGQLFHIACFTCHQCAQQLQGQQFYSLEGAPYCEGCYTDTLEKCNTCGEPITDRMLRATGKAYHPHCFTCVVCARPLEGTSFIVDQANRPHCVPDYHKQYAPRCSVCSEPIMPEPGRDETVRVVALDKNFHMKCYKCEDCGKPLSIEADDNGCFPLDGHVLCRKCHTARAQT

SEQ ID NO: 71004 - protein, 485 aa, Homo sapiens
MGRVGEIPPPPPEDFPLPPPPLAGDGDDAEGALGGAFPPPPPPIEESFPPAPLEEEIFPSPPPPPEEEGGPEAPIPPPPQVSSGYVPPPVATPFSSKSSTKPAAGGTAPLPPWKSPSSSQPLPQVPAPAQSQTQFHVQPQPQPKPQVQLHVQSQTQPVSLANTQPRGPPASSPAPAPKFSPVTPKFTPVASKFSPGAPGGSGSQPNQKLGHPEALSAGTGSPQPPSFTYAQQREKPRVQEKQHPVPPPAQNQNQVRSPGAPGPLTLKEVEELEQLTQQLMQDMEHPQRQNVAVNELCGRCHQPLARAQPAVRALGQLFHIACFTCHQCAQQLQGQQFYSLEGAPYCEGCYTDTLEKCNTCGEPITDRMLRATGKAYHPHCFTCVVCARPLEGTSFIVDQANRPHCVPDYHKQYAPRCSVCSEPIMPEPGRDETVRVVALDKNFHMKCYKCEDCGKPLSIEADDNGCFPLDGHVLCRKCHTARAQT

SEQ ID NO: 71005 - protein, 164 aa, Homo sapiens
MAAPRPSPAISVSVSAPAFYAPQKKFGPVVAPKPKVNPFRPGDSEPPPAPGAQRAQMGRVGEIPPPPPEDFPLPPPPLAGDGDDAEGALGGAFPPPPPPIEESFPPAPLEEEIFPSPPPPPEEEGGPEAPIPPPPQPREKVSSIDLEIDSLSSLLDDMTKNDPF

SEQ ID NO: 71006 - DNA, 852 bp, synthetic construct
  misc_feature 1..852: note = Description of Artificial Sequence: Synthetic coding sequence
  source 1..852: mol_type = other DNA
atggacctgtggcccggcgcctggatgctgctgctgctgctgttcctgctgctgctgttcctgctgcccaccctgtggttctgcagccccagcgccaagtacttcttcaagatggccttctacaacggctggatcctgttcctggccgtgctggccatccccgtgtgcgccgtgagaggcagaaacgtggagaacatgaagatcctgagactgatgctgctgcacatcaagtacctgtacggcatcagagtggaggtgagaggcgcccaccacttcccccccagccagccctacgtggtggtgagcaaccaccagagcagcctggacctgctgggcatgatggaggtgctgcccggcagatgcgtgcccatcgccaagagagagctgctgtgggccggcagcgccggcctggcctgctggctggccggcgtgatcttcatcgacagaaagagaaccggcgacgccatcagcgtgatgagcgaggtggcccagaccctgctgacccaggacgtgagagtgtgggtgttccccgagggcaccagaaaccacaacggcagcatgctgcccttcaagagaggcgccttccacctggccgtgcaggcccaggtgcccatcgtgcccatcgtgatgagcagctaccaggacttctactgcaagaaggagagaagattcaccagcggccagtgccaggtgagagtgctgccccccgtgcccaccgagggcctgacccccgacgacgtgcccgccctggccgacagagtgagacacagcatgctgaccgtgttcagagagatcagcaccgacggcagaggcggcggcgactacctgaagaagcccggcggcggcggctag

SEQ ID NO: 71007 - DNA, 852 bp, synthetic construct; identical to SEQ ID NO: 71006
  misc_feature 1..852: note = Description of Artificial Sequence: Synthetic coding sequence
  source 1..852: mol_type = other DNA

SEQ ID NO: 71008 - DNA, 852 bp, synthetic construct; identical to SEQ ID NO: 71006
  misc_feature 1..852: note = Description of Artificial Sequence: Synthetic coding sequence
  source 1..852: mol_type = other DNA

SEQ ID NO: 71009 - DNA, 852 bp, synthetic construct; identical to SEQ ID NO: 71006
  misc_feature 1..852: note = Description of Artificial Sequence: Synthetic coding sequence
  source 1..852: mol_type = other DNA

SEQ ID NO: 71010 - DNA, 852 bp, synthetic construct; identical to SEQ ID NO: 71006
  misc_feature 1..852: note = Description of Artificial Sequence: Synthetic coding sequence
  source 1..852: mol_type = other DNA

SEQ ID NO: 71011 - DNA, 852 bp, synthetic construct; identical to SEQ ID NO: 71006
  misc_feature 1..852: note = Description of Artificial Sequence: Synthetic coding sequence
  source 1..852: mol_type = other DNA

SEQ ID NO: 71012 - DNA, 852 bp, synthetic construct; identical to SEQ ID NO: 71006
  misc_feature 1..852: note = Description of Artificial Sequence: Synthetic coding sequence
  source 1..852: mol_type = other DNA

SEQ ID NO: 71013 - DNA, 852 bp, synthetic construct; identical to SEQ ID NO: 71006
  misc_feature 1..852: note = Description of Artificial Sequence: Synthetic coding sequence
  source 1..852: mol_type = other DNA

SEQ ID NO: 71014 - DNA, 852 bp, synthetic construct; identical to SEQ ID NO: 71006
  misc_feature 1..852: note = Description of Artificial Sequence: Synthetic coding sequence
  source 1..852: mol_type = other DNA

SEQ ID NO: 71015 - DNA, 852 bp, synthetic construct; identical to SEQ ID NO: 71006
  misc_feature 1..852: note = Description of Artificial Sequence: Synthetic coding sequence
  source 1..852: mol_type = other DNA

SEQ ID NO: 71016 - DNA, 852 bp, synthetic construct; identical to SEQ ID NO: 71006
  misc_feature 1..852: note = Description of Artificial Sequence: Synthetic coding sequence
  source 1..852: mol_type = other DNA

SEQ ID NO: 71017 - DNA, 852 bp, synthetic construct; identical to SEQ ID NO: 71006
  misc_feature 1..852: note = Description of Artificial Sequence: Synthetic coding sequence
  source 1..852: mol_type = other DNA

SEQ ID NO: 71018 - DNA, 516 bp, synthetic construct
  misc_feature 1..516: note = Description of Artificial Sequence: Synthetic coding sequence
  source 1..516: mol_type = other DNA
atgatggaggtgctgcccggcagatgcgtgcccatcgccaagagagagctgctgtgggccggcagcgccggcctggcctgctggctggccggcgtgatcttcatcgacagaaagagaaccggcgacgccatcagcgtgatgagcgaggtggcccagaccctgctgacccaggacgtgagagtgtgggtgttccccgagggcaccagaaaccacaacggcagcatgctgcccttcaagagaggcgccttccacctggccgtgcaggcccaggtgcccatcgtgcccatcgtgatgagcagctaccaggacttctactgcaagaaggagagaagattcaccagcggccagtgccaggtgagagtgctgccccccgtgcccaccgagggcctgacccccgacgacgtgcccgccctggccgacagagtgagacacagcatgctgaccgtgttcagagagatcagcaccgacggcagaggcggcggcgactacctgaagaagcccggcggcggcggctag

SEQ ID NO: 71019 - DNA, 852 bp, synthetic construct; identical to SEQ ID NO: 71006
  misc_feature 1..852: note = Description of Artificial Sequence: Synthetic coding sequence
  source 1..852: mol_type = other DNA

SEQ ID NO: 71020 - DNA, 852 bp, synthetic construct; identical to SEQ ID NO: 71006
  misc_feature 1..852: note = Description of Artificial Sequence: Synthetic coding sequence
  source 1..852: mol_type = other DNA

SEQ ID NO: 71021 - DNA, 852 bp, synthetic construct; identical to SEQ ID NO: 71006
  misc_feature 1..852: note = Description of Artificial Sequence: Synthetic coding sequence
  source 1..852: mol_type = other DNA

SEQ ID NO: 71022 - DNA, 852 bp, synthetic construct; identical to SEQ ID NO: 71006
  misc_feature 1..852: note = Description of Artificial Sequence: Synthetic coding sequence
  source 1..852: mol_type = other DNA

SEQ ID NO: 71023 - DNA, 852 bp, synthetic construct; identical to SEQ ID NO: 71006
  misc_feature 1..852: note = Description of Artificial Sequence: Synthetic coding sequence
  source 1..852: mol_type = other DNA

SEQ ID NO: 71024 - DNA, 852 bp, synthetic construct; identical to SEQ ID NO: 71006
  misc_feature 1..852: note = Description of Artificial Sequence: Synthetic coding sequence
  source 1..852: mol_type = other DNA

SEQ ID NO: 71025 - DNA, 852 bp, synthetic construct; identical to SEQ ID NO: 71006
  misc_feature 1..852: note = Description of Artificial Sequence: Synthetic coding sequence
  source 1..852: mol_type = other DNA

SEQ ID NO: 71026 - DNA, 852 bp, synthetic construct; identical to SEQ ID NO: 71006
  misc_feature 1..852: note = Description of Artificial Sequence: Synthetic coding sequence
  source 1..852: mol_type = other DNA

SEQ ID NO: 71027 - DNA, 852 bp, synthetic construct; identical to SEQ ID NO: 71006
  misc_feature 1..852: note = Description of Artificial Sequence: Synthetic coding sequence
  source 1..852: mol_type = other DNA

SEQ ID NO: 71028 - DNA, 852 bp, synthetic construct; identical to SEQ ID NO: 71006
  misc_feature 1..852: note = Description of Artificial Sequence: Synthetic coding sequence
  source 1..852: mol_type = other DNA

SEQ ID NO: 71029 - DNA, 852 bp, synthetic construct; identical to SEQ ID NO: 71006
  misc_feature 1..852: note = Description of Artificial Sequence: Synthetic coding sequence
  source 1..852: mol_type = other DNA

SEQ ID NO: 71030 - DNA, 852 bp, synthetic construct; identical to SEQ ID NO: 71006
  misc_feature 1..852: note = Description of Artificial Sequence: Synthetic coding sequence
  source 1..852: mol_type = other DNA

SEQ ID NO: 71031 - DNA, 852 bp, synthetic construct; identical to SEQ ID NO: 71006
  misc_feature 1..852: note = Description of Artificial Sequence: Synthetic coding sequence
  source 1..852: mol_type = other DNA

SEQ ID NO: 71032 - DNA, 852 bp, synthetic construct; identical to SEQ ID NO: 71006
  misc_feature 1..852: note = Description of Artificial Sequence: Synthetic coding sequence
  source 1..852: mol_type = other DNA

SEQ ID NO: 71033 - DNA, 852 bp, synthetic construct; identical to SEQ ID NO: 71006
  misc_feature 1..852: note = Description of Artificial Sequence: Synthetic coding sequence
  source 1..852: mol_type = other DNA

SEQ ID NO: 71034 - DNA, 852 bp, synthetic construct; identical to SEQ ID NO: 71006
  misc_feature 1..852: note = Description of Artificial Sequence: Synthetic coding sequence
  source 1..852: mol_type = other DNA

SEQ ID NO: 71035 - DNA, 852 bp, synthetic construct; identical to SEQ ID NO: 71006
  misc_feature 1..852: note = Description of Artificial Sequence: Synthetic coding sequence
  source 1..852: mol_type = other DNA

SEQ ID NO: 71036 - DNA, 852 bp, synthetic construct; identical to SEQ ID NO: 71006
  misc_feature 1..852: note = Description of Artificial Sequence: Synthetic coding sequence
  source 1..852: mol_type = other DNA

SEQ ID NO: 71037 - DNA, 852 bp, synthetic construct; identical to SEQ ID NO: 71006
  misc_feature 1..852: note = Description of Artificial Sequence: Synthetic coding sequence
  source 1..852: mol_type = other DNA

SEQ ID NO: 71038 - DNA, 852 bp, synthetic construct; identical to SEQ ID NO: 71006
  misc_feature 1..852: note = Description of Artificial Sequence: Synthetic coding sequence
  source 1..852: mol_type = other DNA

SEQ ID NO: 71039 - DNA, 852 bp, synthetic construct; identical to SEQ ID NO: 71006
  misc_feature 1..852: note = Description of Artificial Sequence: Synthetic coding sequence
  source 1..852: mol_type = other DNA

SEQ ID NO: 71040 - DNA, 852 bp, synthetic construct; identical to SEQ ID NO: 71006
  misc_feature 1..852: note = Description of Artificial Sequence: Synthetic coding sequence
  source 1..852: mol_type = other DNA

SEQ ID NO: 71041 - DNA, 852 bp, synthetic construct; identical to SEQ ID NO: 71006
  misc_feature 1..852: note = Description of Artificial Sequence: Synthetic coding sequence
  source 1..852: mol_type = other DNA

SEQ ID NO: 71042 - DNA, 852 bp, synthetic construct; identical to SEQ ID NO: 71006
  misc_feature 1..852: note = Description of Artificial Sequence: Synthetic coding sequence
  source 1..852: mol_type = other DNA

SEQ ID NO: 71043 - DNA, 852 bp, synthetic construct; identical to SEQ ID NO: 71006
  misc_feature 1..852: note = Description of Artificial Sequence: Synthetic coding sequence
  source 1..852: mol_type = other DNA

SEQ ID NO: 71044 - DNA, 852 bp, synthetic construct; identical to SEQ ID NO: 71006
  misc_feature 1..852: note = Description of Artificial Sequence: Synthetic coding sequence
  source 1..852: mol_type = other DNA

SEQ ID NO: 71045 - DNA, 852 bp, synthetic construct; identical to SEQ ID NO: 71006
  misc_feature 1..852: note = Description of Artificial Sequence: Synthetic coding sequence
  source 1..852: mol_type = other DNA

SEQ ID NO: 71046 - DNA, 852 bp, synthetic construct; identical to SEQ ID NO: 71006
  misc_feature 1..852: note = Description of Artificial Sequence: Synthetic coding sequence
  source 1..852: mol_type = other DNA

SEQ ID NO: 71047 - DNA, 852 bp, synthetic construct; identical to SEQ ID NO: 71006
  misc_feature 1..852: note = Description of Artificial Sequence: Synthetic coding sequence
  source 1..852: mol_type = other DNA

SEQ ID NO: 71048 - DNA, 852 bp, synthetic construct; identical to SEQ ID NO: 71006
  misc_feature 1..852: note = Description of Artificial Sequence: Synthetic coding sequence
  source 1..852: mol_type = other DNA

SEQ ID NO: 71049 - DNA, 276 bp, synthetic construct
  misc_feature 1..276: note = Description of Artificial Sequence: Synthetic coding sequence
  source 1..276: mol_type = other DNA
cacagcgccagcacccccatcctgacccacagccaccccgcccagggcatgatggaggtgctgcccggcagatgcgtgcccatcgccaagagagagctgctgtgggccggcagcgccggcctggcctgctggctggccggcgtgatcttcatcgacagaaagagaaccggcgacgccatcagcgtgatgagcgaggtggcccagaccctgctgacccaggacgtgagccaccccggcctgctgctgcaggagggcgccagcctgcacctgggctag

SEQ ID NO: 71050 - DNA, 276 bp, synthetic construct; identical to SEQ ID NO: 71049
  misc_feature 1..276: note = Description of Artificial Sequence: Synthetic coding sequence
  source 1..276: mol_type = other DNA

SEQ ID NO: 71051 - DNA, 276 bp, synthetic construct; identical to SEQ ID NO: 71049
  misc_feature 1..276: note = Description of Artificial Sequence: Synthetic coding sequence
  source 1..276: mol_type = other DNA

SEQ ID NO: 71052 - DNA, 516 bp, synthetic construct; identical to SEQ ID NO: 71018
  misc_feature 1..516: note = Description of Artificial Sequence: Synthetic coding sequence
  source 1..516: mol_type = other DNA

SEQ ID NO: 71053 - DNA, 516 bp, synthetic construct; identical to SEQ ID NO: 71018
  misc_feature 1..516: note = Description of Artificial Sequence: Synthetic coding sequence
  source 1..516: mol_type = other DNA

SEQ ID NO: 71054 - DNA, 276 bp, synthetic construct; identical to SEQ ID NO: 71049
  misc_feature 1..276: note = Description of Artificial Sequence: Synthetic coding sequence
  source 1..276: mol_type = other DNA

SEQ ID NO: 71055 - DNA, 276 bp, synthetic construct; identical to SEQ ID NO: 71049
  misc_feature 1..276: note = Description of Artificial Sequence: Synthetic coding sequence
  source 1..276: mol_type = other DNA

SEQ ID NO: 71056 - DNA, 276 bp, synthetic construct; identical to SEQ ID NO: 71049
  misc_feature 1..276: note = Description of Artificial Sequence: Synthetic coding sequence
  source 1..276: mol_type = other DNA

SEQ ID NO: 71057 - DNA, 516 bp, synthetic construct; identical to SEQ ID NO: 71018
  misc_feature 1..516: note = Description of Artificial Sequence: Synthetic coding sequence
  source 1..516: mol_type = other DNA

SEQ ID NO: 71058 - DNA, 516 bp, synthetic construct; identical to SEQ ID NO: 71018
  misc_feature 1..516: note = Description of Artificial Sequence: Synthetic coding sequence
  source 1..516: mol_type = other DNA

SEQ ID NO: 71059 - DNA, 276 bp, synthetic construct; identical to SEQ ID NO: 71049
  misc_feature 1..276: note = Description of Artificial Sequence: Synthetic coding sequence
  source 1..276: mol_type = other DNA

SEQ ID NO: 71060 - DNA, 516 bp, synthetic construct; identical to SEQ ID NO: 71018
  misc_feature 1..516: note = Description of Artificial Sequence: Synthetic coding sequence
  source 1..516: mol_type = other DNA

SEQ ID NO: 71061 - DNA, 516 bp, synthetic construct; identical to SEQ ID NO: 71018
  misc_feature 1..516: note = Description of Artificial Sequence: Synthetic coding sequence
  source 1..516: mol_type = other DNA

SEQ ID NO: 71062 - DNA, 741 bp, synthetic construct
  misc_feature 1..741: note = Description of Artificial Sequence: Synthetic coding sequence
  source 1..741: mol_type = other DNA
atggagctgtggccctgcctggccgccgccctgctgctgctgctgctgctggtgcagctgagcagagccgccgagttctacgccaaggtggccctgtactgcgccctgtgcttcaccgtgagcgccgtggccagcctggtgtgcctgctgagacacggcggcagaaccgtggagaacatgagcatcatcggctggttcgtgagaagcttcaagtacttctacggcctgagattcgaggtgagagaccccagaagactgcaggaggccagaccctgcgtgatcgtgagcaaccaccagagcatcctggacatgatgggcctgatggaggtgctgcccgagagatgcgtgcagatcgccaagagagagctgctgttcctgggccccgtgggcctgatcatgtacctgggcggcgtgttcttcatcaacagacagagaagcagcaccgccatgaccgtgatggccgacctgggcgagagaatggtgagagagaacgtgcccatcgtgcccgtggtgtacagcagcttcagcagcttctacaacaccaagaagaagttcttcaccagcggcaccgtgaccgtgcaggtgctggaggccatccccaccagcggcctgaccgccgccgacgtgcccgccctggtggacacctgccacagagccatgagaaccaccttcctgcacatcagcaagaccccccaggagaacggcgccaccgccggcagcggcgtgcagcccgcccagtag

SEQ ID NO: 71063 - DNA, 837 bp, synthetic construct
  misc_feature 1..837: note = Description of Artificial Sequence: Synthetic coding sequence
  source 1..837: mol_type = other DNA
atggagctgtggccctgcctggccgccgccctgctgctgctgctgctgctggtgcagctgagcagagccgccgagttctacgccaaggtggccctgtactgcgccctgtgcttcaccgtgagcgccgtggccagcctggtgtgcctgctgagacacggcggcagaaccgtggagaacatgagcatcatcggctggttcgtgagaagcttcaagtacttctacggcctgagattcgaggtgagagaccccagaagactgcaggaggccagaccctgcgtgatcgtgagcaaccaccagagcatcctggacatgatgggcctgatggaggtgctgcccgagagatgcgtgcagatcgccaagagagagctgctgttcctgggccccgtgggcctgatcatgtacctgggcggcgtgttcttcatcaacagacagagaagcagcaccgccatgaccgtgatggccgacctgggcgagagaatggtgagagagaacctgaaggtgtggatctaccccgagggcaccagaaacgacaacggcgacctgctgcccttcaagaagggcgccttctacctggccgtgcaggcccaggtgcccatcgtgcccgtggtgtacagcagcttcagcagcttctacaacaccaagaagaagttcttcaccagcggcaccgtgaccgtgcaggtgctggaggccatccccaccagcggcctgaccgccgccgacgtgcccgccctggtggacacctgccacagagccatgagaaccaccttcctgcacatcagcaagaccccccaggagaacggcgccaccgccggcagcggcgtgcagcccgcccagtag

SEQ ID NO: 71064 - DNA, 837 bp, synthetic construct; identical to SEQ ID NO: 71063
  misc_feature 1..837: note = Description of Artificial Sequence: Synthetic coding sequence
  source 1..837: mol_type = other DNA

SEQ ID NO: 71065 - DNA, 1371 bp, synthetic construct
  misc_feature 1..1371: note = Description of Artificial Sequence: Synthetic coding sequence
  source 1..1371: mol_type = other DNA
atgttcctgctgctgcccttcgacagcctgatcgtgaacctgctgggcatcagcctgaccgtgctgttcaccctgctgctggtgttcatcatcgtgcccgccatcttcggcgtgagcttcggcatcagaaagctgtacatgaagagcctgctgaagatcttcgcctgggccaccctgagaatggagagaggcgccaaggagaagaaccaccagctgtacaagccctacaccaacggcatcatcgccaaggaccccaccagcctggaggaggagatcaaggagatcagaagaagcggcagcagcaaggccctggacaacacccccgagttcgagctgagcgacatcttctacttctgcagaaagggcatggagaccatcatggacgacgaggtgaccaagagattcagcgccgaggagctggagagctggaacctgctgagcagaaccaactacaacttccagtacatcagcctgagactgaccgtgctgtggggcctgggcgtgctgatcagatactgcttcctgctgcccctgagaatcgccctggccttcaccggcatcagcctgctggtggtgggcaccaccgtggtgggctacctgcccaacggcagattcaaggagttcatgagcaagcacgtgcacctgatgtgctacagaatctgcgtgagagccctgaccgccatcatcacctaccacgacagagagaacagacccagaaacggcggcatctgcgtggccaaccacaccagccccatcgacgtgatcatcctggccagcgacggctactacgccatggtgggccaggtgcacggcggcctgatgggcgtgatccagagagccatggtgaaggcctgcccccacgtgtggttcgagagaagcgaggtgaaggacagacacctggtggccaagagactgaccgagcacgtgcaggacaagagcaagctgcccatcctgatcttccccgagggcacctgcatcaacaacaccagcgtgatgatgttcaagaagggcagcttcgagatcggcgccaccgtgtaccccgtggccatcaagtacgacccccagttcggcgacgccttctggaacagcagcaagtacggcatggtgacctacctgctgagaatgatgaccagctgggccatcgtgtgcagcgtgtggtacctgccccccatgaccagagaggccgacgaggacgccgtgcagttcgccaacagagtgaagagcgccatcgccagacagggcggcctggtggacctgctgtgggacggcggcctgaagagagagaaggtgaaggacaccttcaaggaggagcagcagaagctgtacagcaagatgatcgtgggcaaccacaaggacagaagcagaagctag

SEQ ID NO: 71066 - DNA, 1305 bp, synthetic construct
  misc_feature 1..1305: note = Description of Artificial Sequence: Synthetic coding sequence
  source 1..1305: mol_type = other DNA
atggagggcgccgagctggccggcaagatcctgagcacctggctgaccctggtgctgggcttcatcctgctgcccagcgtgttcggcgtgagcctgggcatcagcgagatctacatgaagatcctggtgaagaccctggagtgggccaccatcagaatcgagaagggcacccccaaggagagcatcctgaagaacagcgccagcgtgggcatcatccagagagacgagagccccatggagaagggcctgagcggcctgagaggcagagacttcgagctgagcgacgtgttctacttcagcaagaagggcctggaggccatcgtggaggacgaggtgacccagagattcagcagcgaggagctggtgagctggaacctgctgaccagaaccaacgtgaacttccagtacatcagcctgagactgaccatggtgtgggtgctgggcgtgatcgtgagatactgcgtgctgctgcccctgagagtgaccctggccttcatcggcatcagcctgctggtgatcggcaccaccctggtgggccagctgcccgacagcagcctgaagaactggctgagcgagctggtgcacctgacctgctgcagaatctgcgtgagagccctgagcggcaccatccactaccacaacaagcagtacagaccccagaagggcggcatctgcgtggccaaccacaccagccccatcgacgtgctgatcctgaccaccgacggctgctacgccatggtgggccaggtgcacggcggcctgatgggcatcatccagagagccatggtgaaggcctgcccccacgtgtggttcgagagaagcgagatgaaggacagacacctggtgaccaagagactgaaggagcacatcgccgacaagaagaagctgcccatcctgatcttccccgagggcacctgcatcaacaacaccagcgtgatgatgttcaagaagggcagcttcgagatcggcggcaccatccaccccgtggccatcaagtacaacccccagttcggcgacgccttctggaacagcagcaagtacaacatggtgagctacctgctgagaatgatgaccagctgggccatcgtgtgcgacgtgtggtacatgccccccatgaccagagaggagggcgaggacgccgtgcagttcgccaacagagtgaagagcgccatcgccatccagggcggcctgaccgagctgccctgggacggcggcctgaagagagccaaggtgaaggacatcttcaaggaggagcagcagaagaactacagcaagatgatcgtgggcaacggcagcctgagctag

SEQ ID NO: 71067 - DNA, 1305 bp, synthetic construct; identical to SEQ ID NO: 71066
  misc_feature 1..1305: note = Description of Artificial Sequence: Synthetic coding sequence
  source 1..1305: mol_type = other DNA

SEQ ID NO: 71068 - DNA, 1506 bp, synthetic construct
  misc_feature 1..1506: note = Description of Artificial Sequence: Synthetic coding sequence
  source 1..1506: mol_type = other DNA
atgttcaccctgccccagaaggacttcagagcccccaccacctgcctgggccccacctgcatgcaggacctgggcagcagccacggcgaggacctggagggcgagtgcagcagaaagctggaccagaagctgcccgagctgagaggcgtgggcgaccccgccatgatcagcagcgacaccagctacctgagcagcagaggcagaatgatcaagtggttctgggacagcgccgaggagggctacagaacctaccacatggacgagtacgacgaggacaagaaccccagcggcatcatcaacctgggcaccagcgagaacaagctgtgcttcgacctgctgagctggagactgagccagagagacatgcagagagtggagcccagcctgctgcagtacgccgactggagaggccacctgttcctgagagaggaggtggccaagttcctgagcttctactgcaagagccccgtgcccctgagacccgagaacgtggtggtgctgaacggcggcgccagcctgttcagcgccctggccaccgtgctgtgcgaggccggcgaggccttcctgatccccaccccctactacggcgccatcacccagcacgtgtgcctgtacggcaacatcagactggcctacgtgtacctggacagcgaggtgaccggcctggacaccagacccttccagctgaccgtggagaagctggagatggccctgagagaggcccacagcgagggcgtgaaggtgaagggcctgatcctgatcagcccccagaaccccctgggcgacgtgtacagccccgaggagctgcaggagtacctggtgttcgccaagagacacagactgcacgtgatcgtggacgaggtgtacatgctgagcgtgttcgagaagagcgtgggctacagaagcgtgctgagcctggagagactgcccgacccccagagaacccacgtgatgtgggccaccagcaaggacttcggcatgagcggcctgagattcggcaccctgtacaccgagaaccaggacgtggccaccgccgtggccagcctgtgcagataccacggcctgagcggcctggtgcagtaccagatggcccagctgctgagagacagagactggatcaaccaggtgtacctgcccgagaaccacgccagactgaaggccgcccacacctacgtgagcgaggagctgagagccctgggcatccccttcctgagcagaggcgccggcttcttcatctgggtggacctgagaaagtacctgcccaagggcaccttcgaggaggagatgctgctgtggagaagattcctggacaacaaggtgctgctgagcttcggcaaggccttcgagtgcaaggagcccggctggttcagattcgtgttcagcgaccaggtgcacagactgtgcctgggcatgcagagagtgcagcaggtgctggccggcaagagccaggtggccgaggaccccagacccagccagagccaggagcccagcgaccagagaagatag

SEQ ID NO: 71069 - DNA, 477 bp, synthetic construct
  misc_feature 1..477: note = Description of Artificial Sequence: Synthetic coding sequence
  source 1..477: mol_type = other DNA
atgttcaccctgccccagaaggacttcagagcccccaccacctgcctgggccccacctgcatgcaggacctgggcagcagccacggcgaggacctggagggcgagtgcagcagaaagctggaccagaagctgcccgagctgagaggcgtgggcgaccccgccatgatcagcagcgacaccagctacctgagcagcagaggcagaatgatcaagtggttctgggacagcgccgaggagggctacagaacctaccacatggacgagtacgacgaggacaagaaccccagcggcatcatcaacctgggcaccagcgagaacaagctgtgcttcgacctgctgagctggagaccccccggcggcagcggccaggtgcccgtgttcctgctgcaggagcccagcaccccccagaccagagagtgcggctgccccgagtggtggtgcctggccctgctgtgcagcggccacggcgccgtgtag

SEQ ID NO: 71070 - DNA, 420 bp, synthetic construct
  misc_feature 1..420: note = Description of Artificial Sequence: Synthetic coding sequence
  source 1..420: mol_type = other DNA
atgttcaccctgccccagaaggacttcagagcccccaccacctgcctgggccccacctgcatgcaggacctgggcagcagccacggcgaggacctggagggcgagtgcagcagaaagctggaccagaagctgcccgagctgagaggcgtgggcgaccccgccatgatcagcagcgacaccagctacctgagcagcagaggcagaatgatcaagtggttctgggacagcgccgaggagggctacagaacctaccacatggacgagtacgacgaggacaagaaccccagcggcatcatcaacctgggcaccagcgagaacaagctgtgcttcgacctgctgagctggagactgagccagagagacatgcagagagtggagcccagcctgctgcagtacgccgactggagaggccacctgtag

SEQ ID NO: 71071 - DNA, 234 bp, synthetic construct
  misc_feature 1..234: note = Description of Artificial Sequence: Synthetic coding sequence
  source 1..234: mol_type = other DNA
atgttcaccctgccccagaaggacttcagagcccccaccacctgcctgggccccacctgcatgcaggacctgggcagcagccacggcgaggacctggagggcgagtgcagcagaaagctggaccagaagctgcccgagctgagaggcgtgggcgaccccgccatgatcagcagcgacaccagctacctgagcagcagaggcagaatgatcaagtggttctgggacagcgcctag

SEQ ID NO: 71072 - DNA, 780 bp, synthetic construct
  misc_feature 1..780: note = Description of Artificial Sequence: Synthetic coding sequence
  source 1..780: mol_type = other DNA
atgagcaagtacaagctgatcatgctgagacacggcgagggcgcctggaacaaggagaacagattctgcagctgggtggaccagaagctgaacagcgagggcatggaggaggccagaaactgcggcaagcagctgaaggccctgaacttcgagttcgacctggtgttcaccagcgtgctgaacagaagcatccacaccgcctggctgatcctggaggagctgggccaggagtgggtgcccgtggagagcagctggagactgaacgagagacactacggcgccctgatcggcctgaacagagagcagatggccctgaaccacggcgaggagcaggtgagactgtggagaagaagctacaacgtgacccccccccccatcgaggagagccacccctactaccaggagatctacaacgacagaagatacaaggtgtgcgacgtgcccctggaccagctgcccagaagcgagagcctgaaggacgtgctggagagactgctgccctactggaacgagagaatcgcccccgaggtgctgagaggcaagaccatcctgatcagcgcccacggcaacagcagcagagccctgctgaagcacctggagggcatcagcgacgaggacatcatcaacatcaccctgcccaccggcgtgcccatcctgctggagctggacgagaacctgagagccgtgggcccccaccagttcctgggcgaccaggaggccatccaggccgccatcaagaaggtggaggaccagggcaaggtgaagcaggccaagaagtag

SEQ ID NO: 71073 - DNA, 780 bp, synthetic construct; identical to SEQ ID NO: 71072
  misc_feature 1..780: note = Description of Artificial Sequence: Synthetic coding sequence
  source 1..780: mol_type = other DNA

SEQ ID NO: 71074 - DNA, 780 bp, synthetic construct; identical to SEQ ID NO: 71072
  misc_feature 1..780: note = Description of Artificial Sequence: Synthetic coding sequence
  source 1..780: mol_type = other DNA

SEQ ID NO: 71075 - DNA, 237 bp, synthetic construct
  misc_feature 1..237: note = Description of Artificial Sequence: Synthetic coding sequence
  source 1..237: mol_type = other DNA
atgagcaagtacaagctgatcatgctgagacacggcgagggcgcctggaacaaggagaacagattctgcagctgggtggaccagaagctgaacagcgagggcatggaggaggccagaaactgcggcaagcagctgaaggccctgaacttcgagttcgacctggtgttcaccagcgtgctgaacagaagcatccacaccgcctggctgatcctggaggagctgggccaggagtggtag

SEQ ID NO: 71076 - DNA, 894 bp, synthetic construct
  misc_feature 1..894: note = Description of Artificial Sequence: Synthetic coding sequence
  source 1..894: mol_type = other DNA
atgaacagaggcttcagcagaaagagccacaccttcctgcccaagatcttcttcagaaagatgagcagcagcggcgccaaggacaagcccgagctgcagttccccttcctgcaggacgaggacaccgtggccaccctgctggagtgcaagaccctgttcatcctgagaggcctgcccggcagcggcaagagcaccctggccagagtgatcgtggacaagtacagagacggcaccaagatggtgagcgccgacgcctacaagatcacccccggcgccagaggcgccctgaaggagctgagacagttcgtgcccggcgacgagcccagagagaagatggacctggtgacctacttcggcaagagaccccccggcgtgctgcactgcaccaccaagttctgcgactacggcaaggcccccggcgccgaggagtacgcccagcaggacgtgctgaagaagagctacagcaaggccttcaccctgaccatcagcgccctgttcgtgacccccaagaccaccggcgccagagtggagctgagcgagcagcagctgcagctgtggcccagcgacgtggacaagctgagccccaccgacaacctgcccagaggcagcagagcccacatcaccctgggctgcgccgccgacgtggaggccgtgcagaccggcctggacctgctggagatcctgagacaggagaagggcggcagcagaggcgaggaggtgggcgagctgagcagaggcaagctgtacagcctgggcaacggcagatggatgctgaccctggccaagaacatggaggtgagagccatcttcaccggctactacggcaagggcaagcccgtgcccacccagggcagcagaaagggcggcgccctgcagagctgcaccatcatctag

SEQ ID NO: 71077 - DNA, 1206 bp, synthetic construct
  misc_feature 1..1206: note = Description of Artificial Sequence: Synthetic coding sequence
  source 1..1206: mol_type = other DNA
atgagcagcagcggcgccaaggacaagcccgagctgcagttccccttcctgcaggacgaggacaccgtggccaccctgctggagtgcaagaccctgttcatcctgagaggcctgcccggcagcggcaagagcaccctggccagagtgatcgtggacaagtacagagacggcaccaagatggtgagcgccgacgcctacaagatcacccccggcgccagaggcgccttcagcgaggagtacaagagactggacgaggacctggccgcctactgcagaagaagagacatcagaatcctggtgctggacgacaccaaccacgagagagagagactggagcagctgttcgagatggccgaccagtaccagtaccaggtggtgctggtggagcccaagaccgcctggagactggactgcgcccagctgaaggagaagaaccagtggcagctgagcgccgacgacctgaagaagctgaagcccggcctggagaaggacttcctgcccctgtacttcggctggttcctgaccaagaagagcagcgagaccctgagaaaggccggccaggtgttcctggaggagctgggcaaccacaaggccttcaagaaggagctgagacagttcgtgcccggcgacgagcccagagagaagatggacctggtgacctacttcggcaagagaccccccggcgtgctgcactgcaccaccaagttctgcgactacggcaaggcccccggcgccgaggagtacgcccagcaggacgtgctgaagaagagctacagcaaggccttcaccctgaccatcagcgccctgttcgtgacccccaagaccaccggcgccagagtggagctgagcgagcagcagctgcagctgtggcccagcgacgtggacaagctgagccccaccgacaacctgcccagaggcagcagagcccacatcaccctgggctgcgccgccgacgtggaggccgtgcagaccggcctggacctgctggagatcctgagacaggagaagggcggcagcagaggcgaggaggtgggcgagctgagcagaggcaagctgtacagcctgggcaacggcagatggatgctgaccctggccaagaacatggaggtgagagccatcttcaccggctactacggcaagggcaagcccgtgcccacccagggcagcagaaagggcggcgccctgcagagctgcaccatcatctag

SEQ ID NO: 71078 - DNA, 1266 bp, synthetic construct
  misc_feature 1..1266: note = Description of Artificial Sequence: Synthetic coding sequence
  source 1..1266: mol_type = other DNA
atgaacagaggcttcagcagaaagagccacaccttcctgcccaagatcttcttcagaaagatgagcagcagcggcgccaaggacaagcccgagctgcagttccccttcctgcaggacgaggacaccgtggccaccctgctggagtgcaagaccctgttcatcctgagaggcctgcccggcagcggcaagagcaccctggccagagtgatcgtggacaagtacagagacggcaccaagatggtgagcgccgacgcctacaagatcacccccggcgccagaggcgccttcagcgaggagtacaagagactggacgaggacctggccgcctactgcagaagaagagacatcagaatcctggtgctggacgacaccaaccacgagagagagagactggagcagctgttcgagatggccgaccagtaccagtaccaggtggtgctggtggagcccaagaccgcctggagactggactgcgcccagctgaaggagaagaaccagtggcagctgagcgccgacgacctgaagaagctgaagcccggcctggagaaggacttcctgcccctgtacttcggctggttcctgaccaagaagagcagcgagaccctgagaaaggccggccaggtgttcctggaggagctgggcaaccacaaggccttcaagaaggagctgagacagttcgtgcccggcgacgagcccagagagaagatggacctggtgacctacttcggcaagagaccccccggcgtgctgcactgcaccaccaagttctgcgactacggcaaggcccccggcgccgaggagtacgcccagcaggacgtgctgaagaagagctacagcaaggccttcaccctgaccatcagcgccctgttcgtgacccccaagaccaccggcgccagagtggagctgagcgagcagcagctgcagctgtggcccagcgacgtggacaagctgagccccaccgacaacctgcccagaggcagcagagcccacatcaccctgggctgcgccgccgacgtggaggccgtgcagaccggcctggacctgctggagatcctgagacaggagaagggcggcagcagaggcgaggaggtgggcgagctgagcagaggcaagctgtacagcctgggcaacggcagatggatgctgaccctggccaagaacatggaggtgagagccatcttcaccggctactacggcaagggcaagcccgtgcccacccagggcagcagaaagggcggcgccctgcagagctgcaccatcatctag

SEQ ID NO: 71079 - DNA, 174 bp, synthetic construct
  misc_feature 1..174: note = Description of Artificial Sequence: Synthetic coding sequence
  source 1..174: mol_type = other DNA
atgagcagcagcggcgccaaggacaagcccgagctgcagttccccttcctgcaggacgaggacaccgtggccaccctgctggagtgcaagaccctgttcatcctgagaggcctgcccggcagcggcaagagcaccctggccagagtgatcgtggacaagtacagagacggctag

SEQ ID NO: 71080 - DNA, 1419 bp, synthetic construct
  misc_feature 1..1419: note = Description of Artificial Sequence: Synthetic coding sequence
  source 1..1419: mol_type = other DNA
atgaagttcctgatcttcgccttcttcggcggcgtgcacctgctgagcctgtgcagcggcaaggccatctgcaagaacggcatcagcaagagaaccttcgaggagatcaaggaggagatcgccagctgcggcgacgtggccaaggccatcatcaacctggccgtgtacggcaaggcccagaacagaagctacgagagactggccctgctggtggacaccgtgggccccagactgagcggcagcaagaacctggagaaggccatccagatcatgtaccagaacctgcagcaggacggcctggagaaggtgcacctggagcccgtgagaatcccccactgggagagaggcgaggagagcgccgtgatgctggagcccagaatccacaagatcgccatcctgggcctgggcagcagcatcggcaccccccccgagggcatcaccgccgaggtgctggtggtgaccagcttcgacgagctgcagagaagagccagcgaggccagaggcaagatcgtggtgtacaaccagccctacatcaactacagcagaaccgtgcagtacagaacccagggcgccgtggaggccgccaaggtgggcgccctggccagcctgatcagaagcgtggccagcttcagcatctacagcccccacaccggcatccaggagtaccaggacggcgtgcccaagatccccaccgcctgcatcaccgtggaggacgccgagatgatgagcagaatggccagccacggcatcaagatcgtgatccagctgaagatgggcgccaagacctaccccgacaccgacagcttcaacaccgtggccgagatcaccggcagcaagtaccccgagcaggtggtgctggtgagcggccacctggacagctgggacgtgggccagggcgccatggacgacggcggcggcgccttcatcagctgggaggccctgagcctgatcaaggacctgggcctgagacccaagagaaccctgagactggtgctgtggaccgccgaggagcagggcggcgtgggcgccttccagtactaccagctgcacaaggtgaacatcagcaactacagcctggtgatggagagcgacgccggcaccttcctgcccaccggcctgcagttcaccggcagcgagaaggccagagccatcatggaggaggtgatgagcctgctgcagcccctgaacatcacccaggtgctgagccacggcgagggcaccgacatcaacttctggatccaggccggcgtgcccggcgccagcctgctggacgacctgtacaagtacttcttcttccaccacagccacggcgacaccatgaccgtgatggaccccaagcagatgaacgtggccgccgccgtgtgggccgtggtgagctacgtggtggccgacatggaggagatgctgcccagaagctag

SEQ ID NO: 71081 - DNA, 981 bp, synthetic construct
  misc_feature 1..981: note = Description of Artificial Sequence: Synthetic coding sequence
  source 1..981: mol_type = other DNA
atgagcggcctgggcaagaagcacctgctgctgatgggcgagttcttcagctacggcaccaagatcctgtaccagaacaccgaggccctgcagagcaagttcttcagccccctgcagaaggccatgctgccccccaacagcttccagggcaaggtggccttcatcaccggcggcggcaccggcctgggcaagggcatgaccaccctgctgagcagcctgggcgcccagtgcgtgatcgccagcagaaagatggacgtgctgaaggccaccgccgagcagatcagcagccagaccggcaacaaggtgcacgccatccagtgcgacgtgagagaccccgacatggtgcagaacaccgtgagcgagctgatcaaggtggccggccaccccaacatcgtgatcaacaacgccgccggcaacttcatcagccccaccgagagactgagccccaacgcctggaagaccatcaccgacatcgtgctgaacggcaccgccttcgtgaccctggagatcggcaagcagctgatcaaggcccagaagggcgccgccttcctgagcatcaccaccatctacgccgagaccggcagcggcttcgtggtgcccagcgccagcgccaaggccggcgtggaggccatgagcaagagcctggccgccgagtggggcaagtacggcatgagattcaacgtgatccagcccggccccatcaagaccaagggcgccttcagcagactggaccccaccggcaccttcgagaaggagatgatcggcagaatcccctgcggcagactgggcaccgtggaggagctggccaacctggccgccttcctgtgcagcgactacgccagctggatcaacggcgccgtgatcaagttcgacggcggcgaggaggtgctgatcagcggcgagttcaacgacctgagaaaggtgaccaaggagcagtgggacaccatcgaggagctgatcagaaagaccaagggcagctag

SEQ ID NO: 71082 - DNA, 1551 bp, synthetic construct
  misc_feature 1..1551: note = Description of Artificial Sequence: Synthetic coding sequence
  source 1..1551: mol_type = other DNA
atggagcccgccgtgagcctggccgtgtgcgccctgctgttcctgctgtgggtgagactgaagggcctggagttcgtgctgatccaccagagatgggtgttcgtgtgcctgttcctgctgcccctgagcctgatcttcgacatctactactacgtgagagcctgggtggtgttcaagctgagcagcgcccccagactgcacgagcagagagtgagagacatccagaagcaggtgagagagtggaaggagcagggcagcaagaccttcatgtgcaccggcagacccggctggctgaccgtgagcctgagagtgggcaagtacaagaagacccacaagaacatcatgatcaacctgatggacatcctggaggtggacaccaagaagcagatcgtgagagtggagcccctggtgaccatgggccaggtgaccgccctgctgaccagcatcggctggaccctgcccgtgctgcccgagctggacgacctgaccgtgggcggcctgatcatgggcaccggcatcgagagcagcagccacaagtacggcctgttccagcacatctgcaccgcctacgagctggtgctggccgacggcagcttcgtgagatgcacccccagcgagaacagcgacctgttctacgccgtgccctggagctgcggcaccctgggcttcctggtggccgccgagatcagaatcatccccgccaagaagtacgtgaagctgagattcgagcccgtgagaggcctggaggccatctgcgccaagttcacccacgagagccagagacaggagaaccacttcgtggagggcctgctgtacagcctggacgaggccgtgatcatgaccggcgtgatgaccgacgaggccgagcccagcaagctgaacagcatcggcaactactacaagccctggttcttcaagcacgtggagaactacctgaagaccaacagagagggcctggagtacatccccctgagacactactaccacagacacaccagaagcatcttctgggagctgcaggacatcatccccttcggcaacaaccccatcttcagatacctgttcggctggatggtgccccccaagatcagcctgctgaagctgacccagggcgagaccctgagaaagctgtacgagcagcaccacgtggtgcaggacatgctggtgcccatgaagtgcctgcagcaggccctgcacaccttccagaacgacatccacgtgtaccccatctggctgtgccccttcatcctgcccagccagcccggcctggtgcaccccaagggcaacgaggccgagctgtacatcgacatcggcgcctacggcgagcccagagtgaagcacttcgaggccagaagctgcatgagacagctggagaagttcgtgagaagcgtgcacggcttccagatgctgtacgccgactgctacatgaacagagaggagttctgggagatgttcgacggcagcctgtaccacaagctgagagagaagctgggctgccaggacgccttccccgaggtgtacgacaagatctgcaaggccgccagacactag

SEQ ID NO: 71083 - DNA, 465 bp, synthetic construct
  misc_feature 1..465: note = Description of Artificial Sequence: Synthetic coding sequence
  source 1..465: mol_type = other DNA
tgaagcctgctgaagctgacccagggcgagaccctgagaaagctgtacgagcagcaccacgtggtgcaggacatgctggtgcccatgaagtgcctgcagcaggccctgcacaccttccagaacgacatccacgtgtaccccatctggctgtgccccttcatcctgcccagccagcccggcctggtgcaccccaagggcaacgaggccgagctgtacatcgacatcggcgcctacggcgagcccagagtgaagcacttcgaggccagaagctgcatgagacagctggagaagttcgtgagaagcgtgcacggcttccagatgctgtacgccgactgctacatgaacagagaggagttctgggagatgttcgacggcagcctgtaccacaagctgagagagaagctgggctgccaggacgccttccccgaggtgtacgacaagatctgcaaggccgccagacactag

SEQ ID NO: 71084 - DNA, 1428 bp, synthetic construct
  misc_feature 1..1428: note = Description of Artificial Sequence: Synthetic coding sequence
  source 1..1428: mol_type = other DNA
atgggcgccggcgagcagaacagacagagcgcccactgcgtgcagggcatctgcggctacctggagggcgacgaggagggcgaggagggcgaggtgagaagcacccaggtgagagagtggaaggagcagggcagcaagaccttcatgtgcaccggcagacccggctggctgaccgtgagcctgagagtgggcaagtacaagaagacccacaagaacatcatgatcaacctgatggacatcctggaggtggacaccaagaagcagatcgtgagagtggagcccctggtgaccatgggccaggtgaccgccctgctgaccagcatcggctggaccctgcccgtgctgcccgagctggacgacctgaccgtgggcggcctgatcatgggcaccggcatcgagagcagcagccacaagtacggcctgttccagcacatctgcaccgcctacgagctggtgctggccgacggcagcttcgtgagatgcacccccagcgagaacagcgacctgttctacgccgtgccctggagctgcggcaccctgggcttcctggtggccgccgagatcagaatcatccccgccaagaagtacgtgaagctgagattcgagcccgtgagaggcctggaggccatctgcgccaagttcacccacgagagccagagacaggagaaccacttcgtggagggcctgctgtacagcctggacgaggccgtgatcatgaccggcgtgatgaccgacgaggccgagcccagcaagctgaacagcatcggcaactactacaagccctggttcttcaagcacgtggagaactacctgaagaccaacagagagggcctggagtacatccccctgagacactactaccacagacacaccagaagcatcttctgggagctgcaggacatcatccccttcggcaacaaccccatcttcagatacctgttcggctggatggtgccccccaagatcagcctgctgaagctgacccagggcgagaccctgagaaagctgtacgagcagcaccacgtggtgcaggacatgctggtgcccatgaagtgcctgcagcaggccctgcacaccttccagaacgacatccacgtgtaccccatctggctgtgccccttcatcctgcccagccagcccggcctggtgcaccccaagggcaacgaggccgagctgtacatcgacatcggcgcctacggcgagcccagagtgaagcacttcgaggccagaagctgcatgagacagctggagaagttcgtgagaagcgtgcacggcttccagatgctgtacgccgactgctacatgaacagagaggagttctgggagatgttcgacggcagcctgtaccacaagctgagagagaagctgggctgccaggacgccttccccgaggtgtacgacaagatctgcaaggccgccagacactag

SEQ ID NO: 71085 - DNA, 903 bp, synthetic construct
  misc_feature 1..903: note = Description of Artificial Sequence: Synthetic coding sequence
  source 1..903: mol_type = other DNA
atgggcaccggcatcgagagcagcagccacaagtacggcctgttccagcacatctgcaccgcctacgagctggtgctggccgacggcagcttcgtgagatgcacccccagcgagaacagcgacctgttctacgccgtgccctggagctgcggcaccctgggcttcctggtggccgccgagatcagaatcatccccgccaagaagtacgtgaagctgagattcgagcccgtgagaggcctggaggccatctgcgccaagttcacccacgagagccagagacaggagaaccacttcgtggagggcctgctgtacagcctggacgaggccgtgatcatgaccggcgtgatgaccgacgaggccgagcccagcaaggacatcatccccttcggcaacaaccccatcttcagatacctgttcggctggatggtgccccccaagatcagcctgctgaagctgacccagggcgagaccctgagaaagctgtacgagcagcaccacgtggtgcaggacatgctggtgcccatgaagtgcctgcagcaggccctgcacaccttccagaacgacatccacgtgtaccccatctggctgtgccccttcatcctgcccagccagcccggcctggtgcaccccaagggcaacgaggccgagctgtacatcgacatcggcgcctacggcgagcccagagtgaagcacttcgaggccagaagctgcatgagacagctggagaagttcgtgagaagcgtgcacggcttccagatgctgtacgccgactgctacatgaacagagaggagttctgggagatgttcgacggcagcctgtaccacaagctgagagagaagctgggctgccaggacgccttccccgaggtgtacgacaagatctgcaaggccgccagacactag

SEQ ID NO: 71086 - DNA, 729 bp, synthetic construct
  misc_feature 1..729: note = Description of Artificial Sequence: Synthetic coding sequence
  source 1..729: mol_type = other DNA
atggagcccgccgtgagcctggccgtgtgcgccctgctgttcctgctgtgggtgagactgaagggcctggagttcgtgctgatccaccagagatgggtgttcgtgtgcctgttcctgctgcccctgagcctgatcttcgacatctactactacgtgagagcctgggtggtgttcaagctgagcagcgcccccagactgcacgagcagagagtgagagacatccagaagcaggtgagagagtggaaggagcagggcagcaagaccttcatgtgcaccggcagacccggctggctgaccgtgagcctgagagtgggcaagtacaagaagacccacaagaacatcatgatcaacctgatggacatcctggaggtggacaccttccagaacgacatccacgtgtaccccatctggctgtgccccttcatcctgcccagccagcccggcctggtgcaccccaagggcaacgaggccgagctgtacatcgacatcggcgcctacggcgagcccagagtgaagcacttcgaggccagaagctgcatgagacagctggagaagttcgtgagaagcgtgcacggcttccagatgctgtacgccgactgctacatgaacagagaggagttctgggagatgttcgacggcagcctgtaccacaagctgagagagaagctgggctgccaggacgccttccccgaggtgtacgacaagatctgcaaggccgccagacactag

SEQ ID NO: 71087 - DNA, 1203 bp, synthetic construct
  misc_feature 1..1203: note = Description of Artificial Sequence: Synthetic coding sequence
  source 1..1203: mol_type = other DNA
atgatggacctgagaaacacccccgccaagagcctggacaagttcatcgaggactacctgctgcccgacacctgcttcagaatgcagatcaaccacgccatcgacatcatctgcggcttcctgaaggagagatgcttcagaggcagcagctaccccgtgtgcgtgagcaaggtggtgaagggcggcagcagcggcaagggcaccaccctgagaggcagaagcgacgccgacctggtggtgttcctgagccccctgaccaccttccaggaccagctgaacagaagaggcgagttcatccaggagatcagaagacagctggaggcctgccagagagagagagccttcagcgtgaagttcgaggtgcaggcccccagatggggcaaccccagagccctgagcttcgtgctgagcagcctgcagctgggcgagggcgtggagttcgacgtgctgcccgccttcgacgccctgggccagctgaccggcggctacaagcccaacccccagatctacgtgaagctgatcgaggagtgcaccgacctgcagaaggagggcgagttcagcacctgcttcaccgagctgcagagagacttcctgaagcagagacccaccaagctgaagagcctgatcagactggtgaagcactggtaccagaactgcaagaagaagctgggcaagctgcccccccagtacgccctggagctgctgaccgtgtacgcctgggagagaggcagcatgaagacccacttcaacaccgcccagggcttcagaaccgtgctggagctggtgatcaactaccagcagctgtgcatctactggaccaagtactacgacttcaagaaccccatcatcgagaagtacctgagaagacagctgaccaagcccagacccgtgatcctggaccccgccgaccccaccggcaacctgggcggcggcgaccccaagggctggagacagctggcccaggaggccgaggcctggctgaactacccctgcttcaagaactgggacggcagccccgtgagcagctggatcctgctggccgagagcaacagcgccgacgacgagaccgacgaccccagaagataccagaagtacggctacatcggcacccacgagtacccccacttcagccacagacccagcaccctgcaggccgccagcaccccccaggccgaggaggactggacctgcaccatcctgtag

SEQ ID NO: 71088 - DNA, 1146 bp, synthetic construct
  misc_feature 1..1146: note = Description of Artificial Sequence: Synthetic coding sequence
  source 1..1146: mol_type = other DNA
atgatggacctgagaaacacccccgccaagagcctggacaagttcatcgaggactacctgctgcccgacacctgcttcagaatgcagatcaaccacgccatcgacatcatctgcggcttcctgaaggagagatgcttcagaggcagcagctaccccgtgtgcgtgagcaaggtggtgaagggcggcagcagcggcaagggcaccaccctgagaggcagaagcgacgccgacctggtggtgttcctgagccccctgaccaccttccaggaccagctgaacagaagaggcgagttcatccaggagatcagaagacagctggaggcctgccagagagagagagccttcagcgtgaagttcgaggtgcaggcccccagatggggcaaccccagagccctgagcttcgtgctgagcagcctgcagctgggcgagggcgtggagttcgacgtgctgcccgccttcgacgccctgggccagctgaccggcggctacaagcccaacccccagatctacgtgaagctgatcgaggagtgcaccgacctgcagaaggagggcgagttcagcacctgcttcaccgagctgcagagagacttcctgaagcagagacccaccaagctgaagagcctgatcagactggtgaagcactggtaccagaactgcaagaagaagctgggcaagctgcccccccagtacgccctggagctgctgaccgtgtacgcctgggagagaggcagcatgaagacccacttcaacaccgcccagggcttcagaaccgtgctggagctggtgatcaactaccagcagctgtgcatctactggaccaagtactacgacttcaagaaccccatcatcgagaagtacctgagaagacagctgaccaagcccagacccgtgatcctggaccccgccgaccccaccggcaacctgggcggcggcgaccccaagggctggagacagctggcccaggaggccgaggcctggctgaactacccctgcttcaagaactgggacggcagccccgtgagcagctggatcctgctggtgaacctgaccctggtgggcagaagaaactacatcatcagcgagcacgccgtgaacctgcagcagaccagaggcgccagcctgagctacagcttccaggtggcctag

SEQ ID NO: 71089 - DNA, 1245 bp, synthetic construct
  misc_feature 1..1245: note = Description of Artificial Sequence: Synthetic coding sequence
  source 1..1245: mol_type = other DNA
atgatggacctgagaaacacccccgccaagagcctggacaagttcatcgaggactacctgctgcccgacacctgcttcagaatgcagatcaaccacgccatcgacatcatctgcggcttcctgaaggagagatgcttcagaggcagcagctaccccgtgtgcgtgagcaaggtggtgaagggcggcagcagcggcaagggcaccaccctgagaggcagaagcgacgccgacctggtggtgttcctgagccccctgaccaccttccaggaccagctgaacagaagaggcgagttcatccaggagatcagaagacagctggaggcctgccagagagagagagccttcagcgtgaagttcgaggtgcaggcccccagatggggcaaccccagagccctgagcttcgtgctgagcagcctgcagctgggcgagggcgtggagttcgacgtgctgcccgccttcgacgccctgggccagctgaccggcggctacaagcccaacccccagatctacgtgaagctgatcgaggagtgcaccgacctgcagaaggagggcgagttcagcacctgcttcaccgagctgcagagagacttcctgaagcagagacccaccaagctgaagagcctgatcagactggtgaagcactggtaccagaactgcaagaagaagctgggcaagctgcccccccagtacgccctggagctgctgaccgtgtacgcctgggagagaggcagcatgaagacccacttcaacaccgcccagggcttcagaaccgtgctggagctggtgatcaactaccagcagctgtgcatctactggaccaagtactacgacttcaagaaccccatcatcgagaagtacctgagaagacagctgaccaagcccagacccgtgatcctggaccccgccgaccccaccggcaacctgggcggcggcgaccccaagggctggagacagctggcccaggaggccgaggcctggctgaactacccctgcttcaagaactgggacggcagccccgtgagcagctggatcctgctgacccagcacacccccggcagcatccaccccaccggcagaagaggcctggacctgcaccaccccctgaacgccagcgccagctggggcaagggcctgcagtgctacctggaccagttcctgcacttccaggtgggcctgctgatccagagaggccagagcagcagcgtgagctggtgcatcatccaggacagaacccaggtgagctag

SEQ ID NO: 71090 - DNA, 1095 bp, synthetic construct
  misc_feature 1..1095: note = Description of Artificial Sequence: Synthetic coding sequence
  source 1..1095: mol_type = other DNA
atgatggacctgagaaacacccccgccaagagcctggacaagttcatcgaggactacctgctgcccgacacctgcttcagaatgcagatcaaccacgccatcgacatcatctgcggcttcctgaaggagagatgcttcagaggcagcagctaccccgtgtgcgtgagcaaggtggtgaagggcggcagcagcggcaagggcaccaccctgagaggcagaagcgacgccgacctggtggtgttcctgagccccctgaccaccttccaggaccagctgaacagaagaggcgagttcatccaggagatcagaagacagctggaggcctgccagagagagagagccttcagcgtgaagttcgaggtgcaggcccccagatggggcaaccccagagccctgagcttcgtgctgagcagcctgcagctgggcgagggcgtggagttcgacgtgctgcccgccttcgacgccctgggccagctgaccggcggctacaagcccaacccccagatctacgtgaagctgatcgaggagtgcaccgacctgcagaaggagggcgagttcagcacctgcttcaccgagctgcagagagacttcctgaagcagagacccaccaagctgaagagcctgatcagactggtgaagcactggtaccagaactgcaagaagaagctgggcaagctgcccccccagtacgccctggagctgctgaccgtgtacgcctgggagagaggcagcatgaagacccacttcaacaccgcccagggcttcagaaccgtgctggagctggtgatcaactaccagcagctgtgcatctactggaccaagtactacgacttcaagaaccccatcatcgagaagtacctgagaagacagctgaccaagcccagacccgtgatcctggaccccgccgaccccaccggcaacctgggcggcggcgaccccaagggctggagacagctggcccaggaggccgaggcctggctgaactacccctgcttcaagaactgggacggcagccccgtgagcagctggatcctgctggtgagaccccccgccagcagcctgcccttcatccccgcccccctgcacgaggcctag

SEQ ID NO: 71091 - DNA, 2160 bp, synthetic construct
  misc_feature 1..2160: note = Description of Artificial Sequence: Synthetic coding sequence
  source 1..2160: mol_type = other DNA
atgggcaacggcgagagccagctgagcagcgtgcccgcccagaagctgggctggttcatccaggagtacctgaagccctacgaggagtgccagaccctgatcgacgagatggtgaacaccatctgcgacgtgctgcaggagcccgagcagttccccctggtgcagggcgtggccatcggcggcagctacggcagaaagaccgtgctgagaggcaacagcgacggcaccctggtgctgttcttcagcgacctgaagcagttccaggaccagaagagaagccagagagacatcctggacaagaccggcgacaagctgaagttctgcctgttcaccaagtggctgaagaacaacttcgagatccagaagagcctggacggcttcaccatccaggtgttcaccaagaaccagagaatcagcttcgaggtgctggccgccttcaacgccctgagcctgaacgacaaccccagcccctggatctacagagagctgaagagaagcctggacaagaccaacgccagccccggcgagttcgccgtgtgcttcaccgagctgcagcagaagttcttcgacaacagacccggcaagctgaaggacctgatcctgctgatcaagcactggcaccagcagtgccagaagaagatcaaggacctgcccagcctgagcccctacgccctggagctgctgaccgtgtacgcctgggagcagggctgcagaaaggacaacttcgacatcgccgagggcgtgagaaccgtgctggagctgatcaagtgccaggagaagctgtgcatctactggatggtgaactacaacttcgaggacgagaccatcagaaacatcctgctgcaccagctgcagagcgccagacccgtgatcctggaccccgtggaccccaccaacaacgtgagcggcgacaagatctgctggcagtggctgaagaaggaggcccagacctggctgaccagccccaacctggacaacgagctgcccgcccccagctggaacgtgctgcccgcccccctgttcaccacccccggccacctgctggacaagttcatcaaggagttcctgcagcccaacaagtgcttcctggagcagatcgacagcgccgtgaacatcatcagaaccttcctgaaggagaactgcttcagacagagcaccgccaagatccagatcgtgagaggcggcagcaccgccaagggcaccgccctgaagaccggcagcgacgccgacctggtggtgttccacaacagcctgaagagctacaccagccagaagaacgagagacacaagatcgtgaaggagatccacgagcagctgaaggccttctggagagagaaggaggaggagctggaggtgagcttcgagccccccaagtggaaggcccccagagtgctgagcttcagcctgaagagcaaggtgctgaacgagagcgtgagcttcgacgtgctgcccgccttcaacgccctgggccagctgagcagcggcagcacccccagccccgaggtgtacgccggcctgatcgacctgtacaagagcagcgacctgcccggcggcgagttcagcacctgcttcaccgtgctgcagagaaacttcatcagaagcagacccaccaagctgaaggacctgatcagactggtgaagcactggtacaaggagtgcgagagaaagctgaagcccaagggcagcctgccccccaagtacgccctggagctgctgaccatctacgcctgggagcagggcagcggcgtgcccgacttcgacaccgccgagggcttcagaaccgtgctggagctggtgacccagtaccagcagctgtgcatcttctggaaggtgaactacaacttcgaggacgagaccgtgagaaagttcctgctgagccagctgcagaagaccagacccgtgatcctggaccccgccgagcccaccggcgacgtgggcggcggcgacagatggtgctggcacctgctggccaaggaggccaaggagtggctgagcagcccctgcttcaaggacggcaccggcaaccccatccccccctggaaggtgcccaccatgcagacccccggcagctgcggcgccagaatccaccccatcgtgaacgagatgttcagcagcagaagccacagaatcctgaacaacaacagcaagagaaacttctag

SEQ ID NO: 71092 - DNA, 2064 bp, synthetic construct
  misc_feature 1..2064: note = Description of Artificial Sequence: Synthetic coding sequence
  source 1..2064: mol_type = other DNA
atgggcaacggcgagagccagctgagcagcgtgcccgcccagaagctgggctggttcatccaggagtacctgaagccctacgaggagtgccagaccctgatcgacgagatggtgaacaccatctgcgacgtgctgcaggagcccgagcagttccccctggtgcagggcgtggccatcggcggcagctacggcagaaagaccgtgctgagaggcaacagcgacggcaccctggtgctgttcttcagcgacctgaagcagttccaggaccagaagagaagccagagagacatcctggacaagaccggcgacaagctgaagttctgcctgttcaccaagtggctgaagaacaacttcgagatccagaagagcctggacggcttcaccatccaggtgttcaccaagaaccagagaatcagcttcgaggtgctggccgccttcaacgccctgagcctgaacgacaaccccagcccctggatctacagagagctgaagagaagcctggacaagaccaacgccagccccggcgagttcgccgtgtgcttcaccgagctgcagcagaagttcttcgacaacagacccggcaagctgaaggacctgatcctgctgatcaagcactggcaccagcagtgccagaagaagatcaaggacctgcccagcctgagcccctacgccctggagctgctgaccgtgtacgcctgggagcagggctgcagaaaggacaacttcgacatcgccgagggcgtgagaaccgtgctggagctgatcaagtgccaggagaagctgtgcatctactggatggtgaactacaacttcgaggacgagaccatcagaaacatcctgctgcaccagctgcagagcgccagacccgtgatcctggaccccgtggaccccaccaacaacgtgagcggcgacaagatctgctggcagtggctgaagaaggaggcccagacctggctgaccagccccaacctggacaacgagctgcccgcccccagctggaacgtgctgcccgcccccctgttcaccacccccggccacctgctggacaagttcatcaaggagttcctgcagcccaacaagtgcttcctggagcagatcgacagcgccgtgaacatcatcagaaccttcctgaaggagaactgcttcagacagagcaccgccaagatccagatcgtgagaggcggcagcaccgccaagggcaccgccctgaagaccggcagcgacgccgacctggtggtgttccacaacagcctgaagagctacaccagccagaagaacgagagacacaagatcgtgaaggagatccacgagcagctgaaggccttctggagagagaaggaggaggagctggaggtgagcttcgagccccccaagtggaaggcccccagagtgctgagcttcagcctgaagagcaaggtgctgaacgagagcgtgagcttcgacgtgctgcccgccttcaacgccctgggccagctgagcagcggcagcacccccagccccgaggtgtacgccggcctgatcgacctgtacaagagcagcgacctgcccggcggcgagttcagcacctgcttcaccgtgctgcagagaaacttcatcagaagcagacccaccaagctgaaggacctgatcagactggtgaagcactggtacaaggagtgcgagagaaagctgaagcccaagggcagcctgccccccaagtacgccctggagctgctgaccatctacgcctgggagcagggcagcggcgtgcccgacttcgacaccgccgagggcttcagaaccgtgctggagctggtgacccagtaccagcagctgtgcatcttctggaaggtgaactacaacttcgaggacgagaccgtgagaaagttcctgctgagccagctgcagaagaccagacccgtgatcctggaccccgccgagcccaccggcgacgtgggcggcggcgacagatggtgctggcacctgctggccaaggaggccaaggagtggctgagcagcccctgcttcaaggacggcaccggcaaccccatccccccctggaaggtgcccgtgaaggtgatctag

SEQ ID NO: 71093 - DNA, 519 bp, synthetic construct
  misc_feature 1..519: note = Description of Artificial Sequence: Synthetic coding sequence
  source 1..519: mol_type = other DNA
atgggcaacggcgagagccagctgagcagcgtgcccgcccagaagctgggctggttcatccaggagtacctgaagccctacgaggagtgccagaccctgatcgacgagatggtgaacaccatctgcgacgtgctgcaggagcccgagcagttccccctggtgcagggcgtggccatcggcggcagctacggcagaaagaccgtgctgagaggcaacagcgacggcaccctggtgctgttcttcagcgacctgaagcagttccaggaccagaagagaagccagagagacatcctggacaagaccggcgacaagctgaagttctgcctgttcaccaagtggctgaagaacaacttcgagatccagaagagcctggacggcttcaccatccaggtgttcaccaagaaccagagaatcagcttcgaggtgctggccgccttcaacgccctgagcaagcactgctgggtgagcggcgagaagagccagagaagcggctgccagaccgccctgtgcaacctgtag

SEQ ID NO: 71094 - DNA, 1053 bp, synthetic construct
  misc_feature 1..1053: note = Description of Artificial Sequence: Synthetic coding sequence
  source 1..1053: mol_type = other DNA
atggccaccgtgggcgcccccagacacttctgcagatgcgcctgcttctgcaccgacaacctgtacgtggccagatacggcctgcacgtgagattcagaggcgagcagcagctgagaagagactacggccccatcctgagaagcagaggctgcgtgagcgccaaggacttccagcagctgctggccgagctggagcaggaggtggagagaagacagagactgggccaggagagcgccgccagaaaggccctgatcgccagcagctaccaccccgccagacccgaggtgtacgacagcctgcaggacgccgccctggcccccgagttcctggccgtgaccgagtacagcgtgagccccgacgccgacctgaagggcctgctgcagagactggagaccgtgagcgaggagaagagaatctacagagtgcccgtgttcaccgcccccttctgccaggccctgctggaggagctggagcacttcgagcagagcgacatgcccaagggcagacccaacaccatgaacaactacggcgtgctgctgcacgagctgggcctggacgagcccctgatgacccccctgagagagagattcctgcagcccctgatggccctgctgtaccccgactgcggcggcggcagactggacagccacagagccttcgtggtgaagtacgcccccggccaggacctggagctgggctgccactacgacaacgccgagctgaccctgaacgtggccctgggcaaggtgttcaccggcggcgccctgtacttcggcggcctgttccaggcccccaccgccctgaccgagcccctggaggtggagcacgtggtgggccagggcgtgctgcacagaggcggccagctgcacggcgccagacccctgggcaccggcgagagatggaacctggtggtgtggctgagagccagcgccgtgagaaacagcctgtgccccatgtgctgcagagagcccgacctggtggacgacgagggcttcggcgacggcttcaccagagaggagcccgccaccgtggacgtgtgcgccctgacctag

SEQ ID NO: 71095 - DNA, 3261 bp, synthetic construct
  misc_feature 1..3261: note = Description of Artificial Sequence: Synthetic coding sequence
  source 1..3261: mol_type = other DNA
atggacctgtacagcacccccgccgccgccctggacagattcgtggccagaagactgcagcccagaaaggagttcgtggagaaggccagaagagccctgggcgccctggccgccgccctgagagagagaggcggcagactgggcgccgccgcccccagagtgctgaagaccgtgaagggcggcagcagcggcagaggcaccgccctgaagggcggctgcgacagcgagctggtgatcttcctggactgcttcaagagctacgtggaccagagagccagaagagccgagatcctgagcgagatgagagccagcctggagagctggtggcagaaccccgtgcccggcctgagactgaccttccccgagcagagcgtgcccggcgccctgcagttcagactgaccagcgtggacctggaggactggatggacgtgagcctggtgcccgccttcaacgtgctgggccaggccggcagcggcgtgaagcccaagccccaggtgtacagcaccctgctgaacagcggctgccagggcggcgagcacgccgcctgcttcaccgagctgagaagaaacttcgtgaacatcagacccgccaagctgaagaacctgatcctgctggtgaagcactggtaccaccaggtgtgcctgcagggcctgtggaaggagaccctgccccccgtgtacgccctggagctgctgaccatcttcgcctgggagcagggctgcaagaaggacgccttcagcctggccgagggcctgagaaccgtgctgggcctgatccagcagcaccagcacctgtgcgtgttctggaccgtgaactacggcttcgaggaccccgccgtgggccagttcctgcagagacagctgaagagacccagacccgtgatcctggaccccgccgaccccacctgggacctgggcaacggcgccgcctggcactgggacctgctggcccaggaggccgccagctgctacgaccacccctgcttcctgagaggcatgggcgaccccgtgcagagctggaagggccccggcctgcccagagccggctgcagcggcctgggccaccccatccagctggaccccaaccagaagacccccgagaacagcaagagcctgaacgccgtgtaccccagagccggcagcaagccccccagctgccccgcccccggccccaccggccagcccgccagcagcagcgtgcccggcatggccctggacctgagccagatccccaccaaggagctggacagattcatccaggaccacctgaagcccagcccccagttccaggagcaggtgaagaaggccatcgacatcatcctgagatgcctgcacgagaactgcgtgcacaaggccagcagagtgagcaagggcggcagcttcggcagaggcaccgacctgagagacggctgcgacgtggagctgatcatcttcctgaactgcttcaccgactacaaggaccagggccccagaagagccgagatcctggacgagatgagagcccagctggagagctggtggcaggaccaggtgcccagcctgagcctgcagttccccgagcagaacgtgcccgaggccctgcagttccagctggtgagcaccgccctgaagagctggaccgacgtgagcctgctgcccgccttcgacgccgtgggccagctgagcagcggcaccaagcccaacccccaggtgtacagcagactgctgaccagcggctgccaggagggcgagcacaaggcctgcttcgccgagctgagaagaaacttcatgaacatcagacccgtgaagctgaagaacctgatcctgctggtgaagcactggtacagacaggtggccgcccagaacaagggcaagggccccgcccccgccagcctgccccccgcctacgccctggagctgctgaccatcttcgcctgggagcagggctgcagacaggactgcttcaacatggcccagggcttcagaaccgtgctgggcctggtgcagcagcaccagcagctgtgcgtgtactggaccgtgaactacagcaccgaggaccccgccatgagaatgcacctgctgggccagctgagaaagcccagacccctggtgctggaccccgccgaccccacctggaacgtgggccacggcagctgggagctgctggcccaggaggccgccgccctgggcatgcaggcctgcttcctgagcagagacggcaccagcgtgcagccctgggacgtgatgcccgccctgctgtaccagacccccgccggcgacctggacaagttcatcagcgagttcctgcagcccaacagacagttcctggcccaggtgaacaaggccgtggacaccatctgcagcttcctgaaggagaactgcttcagaaacagccccatcaaggtgatcaaggtggtgaagggcggcagcagcgccaagggcaccgccctgagaggcagaagcgacgccgacctggtggtgttcctgagctgcttcagccagttcaccgagcagggcaacaagagagccgagatcatcagcgagatcagagcccagctggaggcctgccagcaggagagacagttcgaggtgaagttcgaggtgagcaagtgggagaaccccagagtgctgagcttcagcctgaccagccagaccatgctggaccagagcgtggacttcgacgtgctgcccgccttcgacgccctgggccagctggtgagcggcagcagacccagcagccaggtgtacgtggacctgatccacagctacagcaacgccggcgagtacagcacctgcttcaccgagctgcagagagacttcatcatcagcagacccaccaagctgaagagcctgatcagactggtgaagcactggtaccagcagtgcaccaagatcagcaagggcagaggcagcctgcccccccagcacggcctggagctgctgaccgtgtacgcctgggagcagggcggcaaggacagccagttcaacatggccgagggcttcagaaccgtgctggagctggtgacccagtacagacagctgtgcatctactggaccatcaactacaacgccaaggacaagaccgtgggcgacttcctgaagcagcagctgcagaagcccagacccatcatcctggaccccgccgaccccaccggcaacctgggccacaacgccagatgggacctgctggccaaggaggccgccgcctgcaccagcgccctgtgctgcatgggcagaaacggcatccccatccagccctggcccgtgaaggccgccgtgtag

SEQ ID NO: 71096 - DNA, 1545 bp, synthetic construct
  misc_feature 1..1545: note = Description of Artificial Sequence: Synthetic coding sequence
  source 1..1545: mol_type = other DNA
atggccctgatgcaggagctgtacagcacccccgccagcagactggacagcttcgtggcccagtggctgcagccccacagagagtggaaggaggaggtgctggacgccgtgagaaccgtggaggagttcctgagacaggagcacttccagggcaagagaggcctggaccaggacgtgagagtgctgaaggtggtgaaggtgggcagcttcggcaacggcaccgtgctgagaagcaccagagaggtggagctggtggccttcctgagctgcttccacagcttccaggaggccgccaagcaccacaaggacgtgctgagactgatctggaagaccatgtggcagagccaggacctgctggacctgggcctggaggacctgagaatggagcagagagtgcccgacgccctggtgttcaccatccagaccagaggcaccgccgagcccatcaccgtgaccatcgtgcccgcctacagagccctgggccccagcctgcccaacagccagcccccccccgaggtgtacgtgagcctgatcaaggcctgcggcggccccggcaacttctgccccagcttcagcgagctgcagagaaacttcgtgaagcacagacccaccaagctgaagagcctgctgagactggtgaagcactggtaccagcagtacgtgaaggccagaagccccagagccaacctgccccccctgtacgccctggagctgctgaccatctacgcctgggagatgggcaccgaggaggacgagaacttcatgctggacgagggcttcaccaccgtgatggacctgctgctggagtacgaggtgatctgcatctactggaccaagtactacaccctgcacaacgccatcatcgaggactgcgtgagaaagcagctgaagaaggagagacccatcatcctggaccccgccgaccccaccctgaacgtggccgagggctacagatgggacatcgtggcccagagagccagccagtgcctgaagcaggactgctgctacgacaacagagagaaccccatcagcagctggaacgtgaagagagccagagacatccacctgaccgtggagcagagaggctaccccgacttcaacctgatcgtgaacccctacgagcccatcagaaaggtgaaggagaagatcagaagaaccagaggctacagcggcctgcagagactgagcttccaggtgcccggcagcgagagacagctgctgagcagcagatgcagcctggccaagtacggcatcttcagccacacccacatctacctgctggagaccatccccagcgagatccaggtgttcgtgaagaaccccgacggcggcagctacgcctacgccatcaaccccaacagcttcatcctgggcctgaagcagcagatcgaggaccagcagggcctgcccaagaagcagcagcagctggagttccagggccaggtgctgcaggactggctgggcctgggcatctacggcatccaggacagcgacaccctgatcctgagcaagaagaagggcgaggccctgttccccgccagctag

SEQ ID NO: 71097 - DNA, 768 bp, synthetic construct
  misc_feature 1..768: note = Description of Artificial Sequence: Synthetic coding sequence
  source 1..768: mol_type = other DNA
atggccctgatgcaggagctgtacagcacccccgccagcagactggacagcttcgtggcccagtggctgcagccccacagagagtggaaggaggaggtgctggacgccgtgagaaccgtggaggagttcctgagacaggagcacttccagggcaagagaggcctggaccaggacgtgagagtgctgaaggtggtgaaggtgggcagcttcggcaacggcaccgtgctgagaagcaccagagaggtggagctggtggccttcctgagctgcttccacagcttccaggaggccgccaagcaccacaaggacgtgctgagactgatctggaagaccatgtggcagagccaggacctgctggacctgggcctggaggacctgagaatggagcagagagtgcccgacgccctggtgttcaccatccagaccagaggcaccgccgagcccatcaccgtgaccatcgtgcccgcctacagagccctgggccccagcctgcccaacagccagcccccccccgaggtgtacgtgagcctgatcaaggcctgcggcggccccggcaacttctgccccagcttcagcgagctgcagagaaacttcgtgaagcacagacccaccaagctgaagagcctgctgagactggtgaagcactggtaccagcaggcccaccaccccggcagcggcagaccccacccccagagaggcagaagagtgcagatgggccacagatgcagcgagggcctgcccgtgcccgagaccggcctgctgctgtag

SEQ ID NO: 71098 - DNA, 1737 bp, synthetic construct
  misc_feature 1..1737: note = Description of Artificial Sequence: Synthetic coding sequence
  source 1..1737: mol_type = other DNA
atgcccgacagcaacttcgccgagagaagcgaggagcaggtgagcggcgccaaggtgatcgcccaggccctgaagacccaggacgtggagtacatcttcggcatcgtgggcatccccgtgaccgagatcgccatcgccgcccagcagctgggcatcaagtacatcggcatgagaaacgagcaggccgcctgctacgccgccagcgccatcggctacctgaccagcagacccggcgtgtgcctggtggtgagcggccccggcctgatccacgccctgggcggcatggccaacgccaacatgaactgctggcccctgctggtgatcggcggcagcagcgagagaaaccaggagaccatgggcgccttccaggagttcccccaggtggaggcctgcagactgtacaccaagttcagcgccagacccagcagcatcgaggccatccccttcgtgatcgagaaggccgtgagaagcagcatctacggcagacccggcgcctgctacgtggacatccccgccgacttcgtgaacctgcaggtgaacgtgaacagcatcaagtacatggagagatgcatgagcccccccatcagcatggccgagaccagcgccgtgtgcaccgccgccagcgtgatcagaaacgccaagcagcccctgctgatcatcggcaagggcgccgcctacgcccacgccgaggagagcatcaagaagctggtggagcagtacaagctgcccttcctgcccacccccatgggcaagggcgtggtgcccgacaaccacccctactgcgtgggcgccgccagaagcagagccctgcagttcgccgacgtgatcgtgctgttcggcgccagactgaactggatcctgcacttcggcctgccccccagataccagcccgacgtgaagttcatccaggtggacatctgcgccgaggagctgggcaacaacgtgaagcccgccgtgaccctgctgggcaacatccacgccgtgaccaagcagctgctggaggagctggacaagaccccctggcagtacccccccgagagcaagtggtggaagaccctgagagagaagatgaagagcaacgaggccgccagcaaggagctggccagcaagaagagcctgcccatgaactactacaccgtgttctaccacgtgcaggagcagctgcccagagactgcttcgtggtgagcgagggcgccaacaccatggacatcggcagaaccgtgctgcagaactacctgcccagacacagactggacgccggcaccttcggcaccatgggcgtgggcctgggcttcgccatcgccgccgccgtggtggccaaggacagaagccccggccagtggatcatctgcgtggagggcgacagcgccttcggcttcagcggcatggaggtggagaccatctgcagatacaacctgcccatcatcctgctggtggtgaacaacaacggcatctaccagggcttcgacaccgacacctggaaggagatgctgaagttccaggacgccaccgccgtggtgccccccatgtgcctgctgcccaacagccactacgagcaggtgatgaccgccttcggcggcaagggctacttcgtgcagacccccgaggagctgcagaagagcctgagacagagcctggccgacaccaccaagcccagcctgatcaacatcatgatcgagccccaggccaccagaaaggcccaggacttccactggctgaccagaagcaacatgtag

SEQ ID NO: 71099 - DNA, 1563 bp, synthetic construct
  misc_feature 1..1563: note = Description of Artificial Sequence: Synthetic coding sequence
  source 1..1563: mol_type = other DNA
atgcccggcagcctgcccctgaacgccgaggcctgctggcccaaggacgtgggcatcgtggccctggagatctacttccccagccagtacgtggaccaggccgagctggagaagtacgacggcgtggacgccggcaagtacaccatcggcctgggccaggccaagatgggcttctgcaccgacagagaggacatcaacagcctgtgcatgaccgtggtgcagaacctgatggagagaaacaacctgagctacgactgcatcggcagactggaggtgggcaccgagaccatcatcgacaagagcaagagcgtgaagaccaacctgatgcagctgttcgaggagagcggcaacaccgacatcgagggcatcgacaccaccaacgcctgctacggcggcaccgccgccgtgttcaacgccgtgaactggatcgagagcagcagctgggacggcagatacgccctggtggtggccggcgacatcgccgtgtacgccaccggcaacgccagacccaccggcggcgtgggcgccgtggccctgctgatcggccccaacgcccccctgatcttcgagagaggcctgagaggcacccacatgcagcacgcctacgacttctacaagcccgacatgctgagcgagtaccccatcgtggacggcaagctgagcatccagtgctacctgagcgccctggacagatgctacagcgtgtactgcaagaagatccacgcccagtggcagaaggagggcaacgacaaggacttcaccctgaacgacttcggcttcatgatcttccacagcccctactgcaagctggtgcagaagagcctggccagaatgctgctgaacgacttcctgaacgaccagaacagagacaagaacagcatctacagcggcctggaggccttcggcgacgtgaagctggaggacacctacttcgacagagacgtggagaaggccttcatgaaggccagcagcgagctgttcagccagaagaccaaggccagcctgctggtgagcaaccagaacggcaacatgtacaccagcagcgtgtacggcagcctggccagcgtgctggcccagtacagcccccagcagctggccggcaagagaatcggcgtgttcagctacggcagcggcctggccgccaccctgtacagcctgaaggtgacccaggacgccacccccggcagcgccctggacaagatcaccgccagcctgtgcgacctgaagagcagactggacagcagaaccggcgtggcccccgacgtgttcgccgagaacatgaagctgagagaggacacccaccacctggtgaactacatcccccagggcagcatcgacagcctgttcgagggcacctggtacctggtgagagtggacgagaagcacagaagaacctacgccagaagacccacccccaacgacgacaccctggacgagggcgtgggcctggtgcacagcaacatcgccaccgagcacatccccagccccgccaagaaggtgcccagactgcccgccaccgccgccgagcccgaggccgccgtgatcagcaacggcgagcactag

SEQ ID NO: 71100 - DNA, 1563 bp, synthetic construct; identical to SEQ ID NO: 71099
  misc_feature 1..1563: note = Description of Artificial Sequence: Synthetic coding sequence
  source 1..1563: mol_type = other DNA

SEQ ID NO: 71101 - DNA, 291 bp, synthetic construct
  misc_feature 1..291: note = Description of Artificial Sequence: Synthetic coding sequence
  source 1..291: mol_type = other DNA
atgcccggcagcctgcccctgaacgccgaggcctgctggcccaaggacgtgggcatcgtggccctggagatctacttccccagccagtacgtggaccaggccgagctggagaagtacgacggcgtggacgccggcaagtacaccatcggcctgggccaggccaagatgggcttctgcaccgacagagaggacatcaacagcctgtgcatgaccgtggtgcagaacctgatggagagaaacaacctgagctacgactgcatcggcagactggaggtgggcaccgagacctag

SEQ ID NO: 71102 - DNA, 1530 bp, synthetic construct
  misc_feature 1..1530: note = Description of Artificial Sequence: Synthetic coding sequence
  source 1..1530: mol_type = other DNA
atgcccggcagcctgcccctgaacgccgaggcctgctggcccaaggacgtgggcatcgtggccctggagatctacttccccagccagtacgtggaccaggccgagctggagaagtacgacggcgtggacgccggcaagtacaccatcggcctgggccaggccaagatgggcttctgcaccgacagagaggacatcaacagcctgtgcatgaccgtggtgcagaacctgatggagagaaacaacctgagctacgactgcatcggcagactggaggtgggcaccgagaccatcatcgacaagagcaagagcgtgaagaccaacctgatgcagctgttcgaggagagcggcaacaccgacatcgagggcatcgacaccaccaacgccgtgaactggatcgagagcagcagctgggacggcagatacgccctggtggtggccggcgacatcgccgtgtacgccaccggcaacgccagacccaccggcggcgtgggcgccgtggccctgctgatcggccccaacgcccccctgatcttcgagagaggcctgagaggcacccacatgcagcacgcctacgacttctacaagcccgacatgctgagcgagtaccccatcgtggacggcaagctgagcatccagtgctacctgagcgccctggacagatgctacagcgtgtactgcaagaagatccacgcccagtggcagaaggagggcaacgacaaggacttcaccctgaacgacttcggcttcatgatcttccacagcccctactgcaagctggtgcagaagagcctggccagaatgctgctgaacgacttcctgaacgaccagaacagagacaagaacagcatctacagcggcctggaggccttcggcgacgtgaagctggaggacacctacttcgacagagacgtggagaaggccttcatgaaggccagcagcgagctgttcagccagaagaccaaggccagcctgctggtgagcaaccagaacggcaacatgtacaccagcagcgtgtacggcagcctggccagcgtgctggcccagtacagcccccagcagctggccggcaagagaatcggcgtgttcagctacggcagcggcctggccgccaccctgtacagcctgaaggtgacccaggacgccacccccggcagcgccctggacaagatcaccgccagcctgtgcgacctgaagagcagactggacagcagaaccggcgtggcccccgacgtgttcgccgagaacatgaagctgagagaggacacccaccacctggtgaactacatcccccagggcagcatcgacagcctgttcgagggcacctggtacctggtgagagtggacgagaagcacagaagaacctacgccagaagacccacccccaacgacgacaccctggacgagggcgtgggcctggtgcacagcaacatcgccaccgagcacatccccagccccgccaagaaggtgcccagactgcccgccaccgccgccgagcccgaggccgccgtgatcagcaacggcgagcactag

SEQ ID NO: 71103 - DNA, 1527 bp, synthetic construct
  misc_feature 1..1527: note = Description of Artificial Sequence: Synthetic coding sequence
  source 1..1527: mol_type = other DNA
atgcagagactgctgacccccgtgaagagaatcctgcagctgaccagagccgtgcaggagaccagcctgacccccgccagactgctgcccgtggcccaccagagattcagcaccgccagcgccgtgcccctggccaagaccgacacctggcccaaggacgtgggcatcctggccctggaggtgtacttccccgcccagtacgtggaccagaccgacctggagaagtacaacaacgtggaggccggcaagtacaccgtgggcctgggccagaccagaatgggcttctgcagcgtgcaggaggacatcaacagcctgtgcctgaccgtggtgcagagactgatggagagaatccagctgccctgggacagcgtgggcagactggaggtgggcaccgagaccatcatcgacaagagcaaggccgtgaagaccgtgctgatggagctgttccaggacagcggcaacaccgacatcgagggcatcgacaccaccaacgcctgctacggcggcaccgccagcctgttcaacgccgccaactggatggagagcagcagctgggacggcagatacgccatggtggtgtgcggcgacatcgccgtgtaccccagcggcaacgccagacccaccggcggcgccggcgccgtggccatgctgatcggccccaaggcccccctggccctggagagaggcctgagaggcacccacatggagaacgtgtacgacttctacaagcccaacctggccagcgagtaccccatcgtggacggcaagctgagcatccagtgctacctgagagccctggacagatgctacaccagctacagaaagaagatccagaaccagtggaagcaggccggcagcgacagacccttcaccctggacgacctgcagtacatgatcttccacacccccttctgcaagatggtgcagaagagcctggccagactgatgttcaacgacttcctgagcgccagcagcgacacccagaccagcctgtacaagggcctggaggccttcggcggcctgaagctggaggacacctacaccaacaaggacctggacaaggccctgctgaaggccagccaggacatgttcgacaagaagaccaaggccagcctgtacctgagcacccacaacggcaacatgtacaccagcagcctgtacggctgcctggccagcctgctgagccaccacagcgcccaggagctggccggcagcagaatcggcgccttcagctacggcagcggcctggccgccagcttcttcagcttcagagtgagccaggacgccgcccccggcagccccctggacaagctggtgagcagcaccagcgacctgcccaagagactggccagcagaaagtgcgtgagccccgaggagttcaccgagatcatgaaccagagagagcagttctaccacaaggtgaacttcagcccccccggcgacaccaacagcctgttccccggcacctggtacctggagagagtggacgagcagcacagaagaaagtacgccagaagacccgtgtag

SEQ ID NO: 71104 - DNA, 1401 bp, synthetic construct
  misc_feature 1..1401: note = Description of Artificial Sequence: Synthetic coding sequence
  source 1..1401: mol_type = other DNA
atgcagagactgctgacccccgtgaagagaatcctgcagctgaccagagccgtgcaggagaccagcctgacccccgccagactgctgcccgtggcccaccagagattcagcaccgccagcgccgtgcccctggccaagaccgacacctggcccaaggacgtgggcatcctggccctggaggtgtacttccccgcccagtacgtggaccagaccgacctggagaagtacaacaacgtggaggccggcaagtacaccgtgggcctgggccagaccagaatgggcttctgcagcgtgcaggaggacatcaacagcctgtgcctgaccgtggtgcagagactgatggagagaatccagctgccctgggacagcgtgggcagactggaggtgggcaccgagaccatcatcgacaagagcaaggccgtgaagaccgtgctgatggagctgttccaggacagcggcaacaccgacatcgagggcatcgacaccaccaacgcctgctacggcggcaccgccagcctgttcaacgccgccaactggatggagagcagcagctgggacggcctgagaggcacccacatggagaacgtgtacgacttctacaagcccaacctggccagcgagtaccccatcgtggacggcaagctgagcatccagtgctacctgagagccctggacagatgctacaccagctacagaaagaagatccagaaccagtggaagcaggccggcagcgacagacccttcaccctggacgacctgcagtacatgatcttccacacccccttctgcaagatggtgcagaagagcctggccagactgatgttcaacgacttcctgagcgccagcagcgacacccagaccagcctgtacaagggcctggaggccttcggcggcctgaagctggaggacacctacaccaacaaggacctggacaaggccctgctgaaggccagccaggacatgttcgacaagaagaccaaggccagcctgtacctgagcacccacaacggcaacatgtacaccagcagcctgtacggctgcctggccagcctgctgagccaccacagcgcccaggagctggccggcagcagaatcggcgccttcagctacggcagcggcctggccgccagcttcttcagcttcagagtgagccaggacgccgcccccggcagccccctggacaagctggtgagcagcaccagcgacctgcccaagagactggccagcagaaagtgcgtgagccccgaggagttcaccgagatcatgaaccagagagagcagttctaccacaaggtgaacttcagcccccccggcgacaccaacagcctgttccccggcacctggtacctggagagagtggacgagcagcacagaagaaagtacgccagaagacccgtgtag

SEQ ID NO: 71105 - DNA, 1161 bp, synthetic construct
  misc_feature 1..1161: note = Description of Artificial Sequence: Synthetic coding sequence
  source 1..1161: mol_type = other DNA
atgggccagagagagatgtggagactgatgagcagattcaacgccttcaagagaaccaacaccatcctgcaccacctgagaatgagcaagcacaccgacgccgccgaggaggtgctgctggagaagaagggctgcaccggcgtgatcaccctgaacagacccaagttcctgaacgccctgaccctgaacatgatcagacagatctacccccagctgaagaagtgggagcaggaccccgagaccttcctgatcatcatcaagggcgccggcggcaaggccttctgcgccggcggcgacatcagagtgatcagcgaggccgagaaggccaagcagaagatcgcccccgtgttcttcagagaggagtacatgctgaacaacgccgtgggcagctgccagaagccctacgtggccctgatccacggcatcaccatgggcggcggcgtgggcctgagcgtgcacggccagttcagagtggccaccgagaagtgcctgttcgccatgcccgagaccgccatcggcctgttccccgacgtgggcggcggctacttcctgcccagactgcagggcaagctgggctacttcctggccctgaccggcttcagactgaagggcagagacgtgtacagagccggcatcgccacccacttcgtggacagcgagaagctggccatgctggaggaggacctgctggccctgaagagccccagcaaggagaacatcgccagcgtgctggagaactaccacaccgagagcaagatcgacagagacaagagcttcatcctggaggagcacatggacaagatcaacagctgcttcagcgccaacaccgtggaggagatcatcgagaacctgcagcaggacggcagcagcttcgccctggagcagctgaaggtgatcaacaagatgagccccaccagcctgaagatcaccctgagacagctgatggagggcagcagcaagaccctgcaggaggtgctgaccatggagtacagactgagccaggcctgcatgagaggccacgacttccacgagggcgtgagagccgtgctgatcgacaaggaccagagccccaagtggaagcccgccgacctgaaggaggtgaccgaggaggacctgaacaaccacttcaagagcctgggcagcagcgacctgaagttctag

SEQ ID NO: 71106 - DNA, 1017 bp, synthetic construct
  misc_feature 1..1017: note = Description of Artificial Sequence: Synthetic coding sequence
  source 1..1017: mol_type = other DNA
atgggccagagagagatgtggagactgatgagcagattcaacgccttcaagagaaccaacaccatcctgcaccacctgagaatgagcaagcacaccgacgccgccgaggaggtgctgctggagaagaagggctgcaccggcgtgatcaccctgaacagacccaagttcctgaacgccctgaccctgaacatgatcagacagatctacccccagctgaagaagtgggagcaggaccccgagaccttcctgatcatcatcaagggcgccggcggcaaggccttctgcgccggcggcgacatcagagtgatcagcgaggccgagaaggccaagcagaagatcgcccccgtgttcttcagagaggagtacatgctgaacaacgccgtgggcagctgccagaagccctacgtggccctgatccacggcatcaccatgggcggcggcgtgggcctgagcgtgcacggccagttcagagtggccaccgagaagtgcctgttcgccatgcccgagaccgccatcggcctgttccccgacgtgggcggcggctacttcctgcccagactgcagggcaagctgggctacttcctggccctgaccggcttcagactgaagggcagagacgtgtacagagccggcatcgccacccacttcgtggacagcgagaagctggccatgctggaggaggacctgctggccctgaagagccccagcaaggagaacatcgccagcgtgctggagaactaccacaccgagagcaagatcgacagagacaagagcttcatcctggaggagcacatggacaagatcaacagctgcttcagcgccaacaccgtggaggagatcatcgagaacctgcagcaggacggcagcagcttcgccctggagcagctgaaggtgatcaacaagatgagccccaccagcctgaagatcaccctgagacagctgatggagggcagcagcaagaccctgcaggaggtgctgaccatggagtacagactgagccaggcctgcatgttctag

SEQ ID NO: 71107 - DNA, 117 bp, synthetic construct
  misc_feature 1..117: note = Description of Artificial Sequence: Synthetic coding sequence
  source 1..117: mol_type = other DNA
tgactgatcgacaaggaccagagccccaagtggaagcccgccgacctgaaggaggtgaccgaggaggacctgaacaaccacttcaagagcctgggcagcagcgacctgaagttctag

SEQ ID NO: 71108 - DNA, 903 bp, synthetic construct
  misc_feature 1..903: note = Description of Artificial Sequence: Synthetic coding sequence
  source 1..903: mol_type = other DNA
atgggcaccctgcccaagagagtgaagatcgtggaggtgggccccagagacggcctgcagaacgagaagaacatcgtgagcacccccgtgaagatcaagctgatcgacatgctgagcgaggccggcctgagcgtgatcgagaccaccagcttcgtgagccccaagtgggtgccccagatgggcgaccacaccgaggtgctgaagggcatccagaagttccccggcatcaactaccccgtgctgacccccaacctgaagggcttcgaggccgccgtggccgccggcgccaaggaggtggtgatcttcggcgccgccagcgagctgttcaccaagaagaacatcaactgcagcatcgaggagagcttccagagattcgacgccatcctgaaggccgcccagagcgccaacatcagcgtgagaggctacgtgagctgcgccctgggctgcccctacgagggcaagatcagccccgccaaggtggccgaggtgaccaagaagttctacagcatgggctgctacgagatcagcctgggcgacaccatcggcgtgggcacccccggcatcatgaaggacatgctgagcgccgtgatgcaggaggtgcccctggccgccctggccgtgcactgccacgacacctacggccaggccctggccaacaccctgatggccctgcagatgggcgtgagcgtggtggacagcagcgtggccggcctgggcggctgcccctacgcccagggcgccagcggcaacctggccaccgaggacctggtgtacatgctggagggcctgggcatccacaccggcgtgaacctgcagaagctgctggaggccggcaacttcatctgccaggccctgaacagaaagaccagcagcaaggtggcccaggccacctgcaagctgtag

SEQ ID NO: 71109 - DNA, 978 bp, synthetic construct
  misc_feature 1..978: note = Description of Artificial Sequence: Synthetic coding sequence
  source 1..978: mol_type = other DNA
atggccgccatgagaaaggccctgcccagaagactggtgggcctggccagcctgagagccgtgagcaccagcagcatgggcaccctgcccaagagagtgaagatcgtggaggtgggccccagagacggcctgcagaacgagaagaacatcgtgagcacccccgtgaagatcaagctgatcgacatgctgagcgaggccggcctgagcgtgatcgagaccaccagcttcgtgagccccaagtgggtgccccagatgggcgaccacaccgaggtgctgaagggcatccagaagttccccggcatcaactaccccgtgctgacccccaacctgaagggcttcgaggccgccgtggccgccggcgccaaggaggtggtgatcttcggcgccgccagcgagctgttcaccaagaagaacatcaactgcagcatcgaggagagcttccagagattcgacgccatcctgaaggccgcccagagcgccaacatcagcgtgagaggctacgtgagctgcgccctgggctgcccctacgagggcaagatcagccccgccaaggtggccgaggtgaccaagaagttctacagcatgggctgctacgagatcagcctgggcgacaccatcggcgtgggcacccccggcatcatgaaggacatgctgagcgccgtgatgcaggaggtgcccctggccgccctggccgtgcactgccacgacacctacggccaggccctggccaacaccctgatggccctgcagatgggcgtgagcgtggtggacagcagcgtggccggcctgggcggctgcccctacgcccagggcgccagcggcaacctggccaccgaggacctggtgtacatgctggagggcctgggcatccacaccggcgtgaacctgcagaagctgctggaggccggcaacttcatctgccaggccctgaacagaaagaccagcagcaaggtggcccaggccacctgcaagctgtag

SEQ ID NO: 71110 - DNA, 765 bp, synthetic construct
  misc_feature 1..765: note = Description of Artificial Sequence: Synthetic coding sequence
  source 1..765: mol_type = other DNA
atggccgccatgagaaaggccctgcccagaagactggtgggcctggccagcctgagagccgtgagcaccagcagcatgggcaccctgcccaagagagtgaagatcgtggaggtgggccccagagacggcctgcagaacgagaagaacatcgtgagcacccccgtgaagatcaagctgatcgacatgctgagcgaggccggcctgagcgtgatcgagaccaccagcttcgtgagccccaagtgggtgccccagatgggcgaccacaccgaggtgctgaagggcatccagaagttccccggcatcaactaccccgtgctgacccccaacctgaagggcttcgaggccgccgtgaccaagaagttctacagcatgggctgctacgagatcagcctgggcgacaccatcggcgtgggcacccccggcatcatgaaggacatgctgagcgccgtgatgcaggaggtgcccctggccgccctggccgtgcactgccacgacacctacggccaggccctggccaacaccctgatggccctgcagatgggcgtgagcgtggtggacagcagcgtggccggcctgggcggctgcccctacgcccagggcgccagcggcaacctggccaccgaggacctggtgtacatgctggagggcctgggcatccacaccggcgtgaacctgcagaagctgctggaggccggcaacttcatctgccaggccctgaacagaaagaccagcagcaaggtggcccaggccacctgcaagctgtag

SEQ ID NO: 71111 - DNA, 501 bp, synthetic construct
  misc_feature 1..501: note = Description of Artificial Sequence: Synthetic coding sequence
  source 1..501: mol_type = other DNA
atgggcaccctgcccaagagagtgaagatcgtggaggtgggccccagagacggcctgcagaacgagaagaacatcgtgagcacccccgtgaagatcaagctgatcgacatgctgagcgaggccggcctgagcgtgatcgagaccaccagcttcgtgagccccaagtgggtgccccagatgggcgaccacaccgaggtgctgaagggcatccagaagttccccggcatcaactaccccgtgctgacccccaacctgaagggcttcgaggccgccatgggcgtgagcgtggtggacagcagcgtggccggcctgggcggctgcccctacgcccagggcgccagcggcaacctggccaccgaggacctggtgtacatgctggagggcctgggcatccacaccggcgtgaacctgcagaagctgctggaggccggcaacttcatctgccaggccctgaacagaaagaccagcagcaaggtggcccaggccacctgcaagctgtag

SEQ ID NO: 71112 - DNA, 1563 bp, synthetic construct
  misc_feature 1..1563: note = Description of Artificial Sequence: Synthetic coding sequence
  source 1..1563: mol_type = other DNA
atggccgccctgaagctgctgagcagcggcctgagactgtgcgccagcgccagaggcagcggcgccacctggtacaagggctgcgtgtgcagcttcagcaccagcgcccacagacacaccaagttctacaccgaccccgtggaggccgtgaaggacatccccgacggcgccaccgtgctggtgggcggcttcggcctgtgcggcatccccgagaacctgatcgacgccctgctgaagaccggcgtgaagggcctgaccgccgtgagcaacaacgccggcgtggacaacttcggcctgggcctgctgctgagaagcaagcagatcaagagaatggtgagcagctacgtgggcgagaacgccgagttcgagagacagtacctgagcggcgagctggaggtggagctgaccccccagggcaccctggccgagagaatcagagccggcggcgccggcgtgcccgccttctacacccccaccggctacggcaccctggtgcaggagggcggcagccccatcaagtacaacaaggacggcagcgtggccatcgccagcaagcccagagaggtgagagagttcaacggccagcacttcatcctggaggaggccatcaccggcgacttcgccctggtgaaggcctggaaggccgacagagccggcaacgtgatcttcagaaagagcgccagaaacttcaacctgcccatgtgcaaggccgccgagaccaccgtggtggaggtggaggagatcgtggacatcggcgccttcgcccccgaggacatccacatcccccagatctacgtgcacagactgatcaagggcgagaagtacgagaagagaatcgagagactgagcatcagaaaggagggcgacggcgaggccaagagcgccaagcccggcgacgacgtgagagagagaatcatcaagagagccgccctggagttcgaggacggcatgtacgccaacctgggcatcggcatccccctgctggccagcaacttcatcagccccaacatcaccgtgcacctgcagagcgagaacggcgtgctgggcctgggcccctaccccagacagcacgaggccgacgccgacctgatcaacgccggcaaggagaccgtgaccatcctgcccggcgccagcttcttcagcagcgacgagagcttcgccatgatcagaggcggccacgtggacctgaccatgctgggcgccatgcaggtgagcaagtacggcgacctggccaactggatgatccccggcaagatggtgaagggcatgggcggcgccatggacctggtgagcagcgccaagaccaaggtggtggtgaccatggagcacagcgccaagggcaacgcccacaagatcatggagaagtgcaccctgcccctgaccggcaagcagtgcgtgaacagaatcatcaccgagaaggccgtgttcgacgtggacaagaagaagggcctgaccctgatcgagctgtgggagggcctgaccgtggacgacgtgcagaagagcaccggctgcgacttcgccgtgagccccaagctgatgcccatgcagcagatcgccaactag

SEQ ID NO: 71113 - DNA, 1005 bp, synthetic construct
  misc_feature 1..1005: note = Description of Artificial Sequence: Synthetic coding sequence
  source 1..1005: mol_type = other DNA
atgatggtgagagagttcaacggccagcacttcatcctggaggaggccatcaccggcgacttcgccctggtgaaggcctggaaggccgacagagccggcaacgtgatcttcagaaagagcgccagaaacttcaacctgcccatgtgcaaggccgccgagaccaccgtggtggaggtggaggagatcgtggacatcggcgccttcgcccccgaggacatccacatcccccagatctacgtgcacagactgatcaagggcgagaagtacgagaagagaatcgagagactgagcatcagaaaggagggcgacggcgaggccaagagcgccaagcccggcgacgacgtgagagagagaatcatcaagagagccgccctggagttcgaggacggcatgtacgccaacctgggcatcggcatccccctgctggccagcaacttcatcagccccaacatcaccgtgcacctgcagagcgagaacggcgtgctgggcctgggcccctaccccagacagcacgaggccgacgccgacctgatcaacgccggcaaggagaccgtgaccatcctgcccggcgccagcttcttcagcagcgacgagagcttcgccatgatcagaggcggccacgtggacctgaccatgctgggcgccatgcaggtgagcaagtacggcgacctggccaactggatgatccccggcaagatggtgaagggcatgggcggcgccatggacctggtgagcagcgccaagaccaaggtggtggtgaccatggagcacagcgccaagggcaacgcccacaagatcatggagaagtgcaccctgcccctgaccggcaagcagtgcgtgaacagaatcatcaccgagaaggccgtgttcgacgtggacaagaagaagggcctgaccctgatcgagctgtgggagggcctgaccgtggacgacgtgcagaagagcaccggctgcgacttcgccgtgagccccaagctgatgcccatgcagcagatcgccaactag

SEQ ID NO: 71114 - DNA, 372 bp, synthetic construct
  misc_feature 1..372: note = Description of Artificial Sequence: Synthetic coding sequence
  source 1..372: mol_type = other DNA
atgctgggcgccatgcaggtgagcaagtacggcgacctggccaactggatgatccccggcaagatggtgaagggcatgggcggcgccatggacctggtgagcagcgccaagaccaaggtggtggtgaccatggagcacagcgccaagggcaacgcccacaagatcatggagaagtgcaccctgcccctgaccggcaagcagtgcgtgaacagaatcatcaccgagaaggccgtgttcgacgtggacaagaagaagggcctgaccctgatcgagctgtgggagggcctgaccgtggacgacgtgcagaagagcaccggctgcgacttcgccgtgagccccaagctgatgcccatgcagcagatcgccaactag

SEQ ID NO: 71115 - DNA, 372 bp, synthetic construct; identical to SEQ ID NO: 71114
  misc_feature 1..372: note = Description of Artificial Sequence: Synthetic coding sequence
  source 1..372: mol_type = other DNA

SEQ ID NO: 71116 - DNA, 453 bp, synthetic construct
  misc_feature 1..453: note = Description of Artificial Sequence: Synthetic coding sequence
  source 1..453: mol_type = other DNA
agcaacgcctacaaggtggacaacttcggcctgggcctgctgctgagaagcaagcagatcaagagaatggtgagcagctacgtgggcgagaacgccgagttcgagagacagtacctgagcggcgagctggaggtggagctgaccccccagggcaccctggccgagagaatcagagccggcggcgccggcgtgcccgccttctacacccccaccggctacggcaccctggtgcaggagggcggcagccccatcaagtacaacaaggacggcagcgtggccatcgccagcaagcccagagaggtgagagagttcaacggccagcacttcatcctggaggaggccatcaccggcgacttcgccctggtgaaggcctggaaggccgacagagccggcaacgtgatcttcagaaagagcgccagaaacttcaacctgcccatgtgcaaggccgcctag

SEQ ID NO: 71117 - DNA, 1131 bp, synthetic construct
  misc_feature 1..1131: note = Description of Artificial Sequence: Synthetic coding sequence
  source 1..1131: mol_type = other DNA
atgagcaactgcctgcagaacttcctgaagatcaccagcaccagactgctgtgcagcagactgtgccagcagctgagaagcaagagaaagttcttcggcaccgtgcccatcagcagactgcacagaagagtggtgatcaccggcatcggcctggtgacccccctgggcgtgggcacccacctggtgtgggacagactgatcggcggcgagagcggcatcgtgagcctggtgggcgaggagtacaagagcatcccctgcagcgtggccgcctacgtgcccagaggcagcgacgagggccagttcaacgagcagaacttcgtgagcaagagcgacatcaagagcatgagcagccccaccatcatggccatcggcgccgccgagctggccatgaaggacagcggctggcacccccagagcgaggccgaccaggtggccaccggcgtggccatcggcatgggcatgatccccctggaggtggtgagcgagaccgccctgaacttccagaccaagggctacaacaaggtgagccccttcttcgtgcccaagatcctggtgaacatggccgccggccaggtgagcatcagatacaagctgaagggccccaaccacgccgtgagcaccgcctgcaccaccggcgcccacgccgtgggcgacagcttcagattcatcgcccacggcgacgccggccacatcaccgcccccgaccccgagggcgagggcgccctgagatgcatggccgccgccctgaaggacgccggcgtgcagcccgaggagatcagctacatcaacgcccacgccaccagcacccccctgggcgacgccgccgagaacaaggccatcaagcacctgttcaaggaccacgcctacgccctggccgtgagcagcaccaagggcgccaccggccacctgctgggcgccgccggcgccgtggaggccgccttcaccaccctggcctgctactaccagaagctgccccccaccctgaacctggactgcagcgagcccgagttcgacctgaactacgtgcccctgaaggcccaggagtggaagaccgagaagagattcatcggcctgaccaacagcttcggcttcggcggcaccaacgccaccctgtgcatcgccggcctgtag

SEQ ID NO: 71118 - DNA, 1380 bp, synthetic construct
  misc_feature 1..1380: note = Description of Artificial Sequence: Synthetic coding sequence
  source 1..1380: mol_type = other DNA
atgagcaactgcctgcagaacttcctgaagatcaccagcaccagactgctgtgcagcagactgtgccagcagctgagaagcaagagaaagttcttcggcaccgtgcccatcagcagactgcacagaagagtggtgatcaccggcatcggcctggtgacccccctgggcgtgggcacccacctggtgtgggacagactgatcggcggcgagagcggcatcgtgagcctggtgggcgaggagtacaagagcatcccctgcagcgtggccgcctacgtgcccagaggcagcgacgagggccagttcaacgagcagaacttcgtgagcaagagcgacatcaagagcatgagcagccccaccatcatggccatcggcgccgccgagctggccatgaaggacagcggctggcacccccagagcgaggccgaccaggtggccaccggcgtggccatcggcatgggcatgatccccctggaggtggtgagcgagaccgccctgaacttccagaccaagggctacaacaaggtgagccccttcttcgtgcccaagatcctggtgaacatggccgccggccaggtgagcatcagatacaagctgaagggccccaaccacgccgtgagcaccgcctgcaccaccggcgcccacgccgtgggcgacagcttcagattcatcgcccacggcgacgccgacgtgatggtggccggcggcaccgacagctgcatcagccccctgagcctggccggcttcagcagagccagagccctgagcaccaacagcgaccccaagctggcctgcagacccttccaccccaagagagacggcttcgtgatgggcgagggcgccgccgtgctggtgctggaggagtacgagcacgccgtgcagagaagagccagaatctacgccgaggtgctgggctacggcctgagcggcgacgccggccacatcaccgcccccgaccccgagggcgagggcgccctgagatgcatggccgccgccctgaaggacgccggcgtgcagcccgaggagatcagctacatcaacgcccacgccaccagcacccccctgggcgacgccgccgagaacaaggccatcaagcacctgttcaaggaccacgcctacgccctggccgtgagcagcaccaagggcgccaccggccacctgctgggcgccgccggcgccgtggaggccgccttcaccaccctggcctgctactaccagaagctgccccccaccctgaacctggactgcagcgagcccgagttcgacctgaactacgtgcccctgaaggcccaggagtggaagaccgagaagagattcatcggcctgaccaacagcttcggcttcggcggcaccaacgccaccctgtgcatcgccggcctgtag

SEQ ID NO: 71119 - DNA, 696 bp, synthetic construct
  misc_feature 1..696: note = Description of Artificial Sequence: Synthetic coding sequence
  source 1..696: mol_type = other DNA
atgagcaactgcctgcagaacttcctgaagatcaccagcaccagactgctgtgcagcagactgtgccagcagctgagaagcaagagaaagttcttcggcaccgtgcccatcagcagactgcacagaagagtggtgatcaccggcatcggcctggtgacccccctgggcgtgggcacccacctggtgtgggacagactgatcggcggcgagagcggcatcgtgagcctggtgggcgaggagtacaagagcatcccctgcagcgtggccgcctacgtgcccagaggcagcgacgagggccagttcaacgagcagaacttcgtgagcaagagcgacatcaagagcatgagcagccccaccatcatggccatcggcgccgccgagctggccatgaaggacagcggctggcacccccagagcgaggccgaccaggtggccaccggcgtggccatcggcatgggcatgatccccctggaggtggtgagcgagaccgccctgaacttccagaccaagggctacaacaaggtgagccccttcttcgtgcccaagatcctggtgaacatggccgccggccaggtgagcatcagatacaagctgaagggccccaaccacgccgtgagcaccgcctgcaccaccggcgcccacgccgtgggcgacagcttcagattcatcgcccacggcgacgccgacgtgatgtag

SEQ ID NO: 71120 - DNA, 663 bp, synthetic construct
  misc_feature 1..663: note = Description of Artificial Sequence: Synthetic coding sequence
  source 1..663: mol_type = other DNA
atgagcaactgcctgcagaacttcctgaagatcaccagcaccagactgctgtgcagcagactgtgccagcagctgagaagcaagagaaagttcttcggcaccgtgcccatcagcagactgcacagaagagtggtgatcaccggcatcggcctggtgacccccctgggcgtgggcacccacctggtgtgggacagactgatcggcggcgagagcggcatcgtgagcctggtgggcgaggagtacaagagcatcccctgcagcgtggccgcctacgtgcccagaggcagcgacgagggccagttcaacgagcagaacttcgtgagcaagagcgacatcaagagcatgagcagccccaccatcatggccatcggcgccgccgagctggccatgaaggacagcggctggcacccccagagcgaggccgaccaggtggccaccggcgtggccatcggcatgggcatgatccccctggaggtggtgagcgagaccgccctgaacttccagaccaagggctacaacaaggtgagccccttcttcgtgcccaagatcctggtgaacatggccgccggccaggtgagcatcagatacaagctgaagggccccaaccacgccgtgagcaccgcctgcaccaccggcgcccacgccgtgggcgacagcttctag

SEQ ID NO: 71121 - DNA, 1875 bp, synthetic construct
  misc_feature 1..1875: note = Description of Artificial Sequence: Synthetic coding sequence
  source 1..1875: mol_type = other DNA
atggagatccccggcagcctgtgcaagaaggtgaagctgagcaacaacgcccagaactggggcatgcagagagccaccaacgtgacctaccaggcccaccacgtgagcagaaacaagagaggccaggtggtgggcaccagaggcggcttcagaggctgcaccgtgtggctgaccggcctgagcggcgccggcaagaccaccgtgagcatggccctggaggagtacctggtgtgccacggcatcccctgctacaccctggacggcgacaacatcagacagggcctgaacaagaacctgggcttcagccccgaggacagagaggagaacgtgagaagaatcgccgaggtggccaagctgttcgccgacgccggcctggtgtgcatcaccagcttcatcagcccctacacccaggacagaaacaacgccagacagatccacgagggcgccagcctgcccttcttcgaggtgttcgtggacgcccccctgcacgtgtgcgagcagagagacgtgaagggcctgtacaagaaggccagagccggcgagatcaagggcttcaccggcatcgacagcgagtacgagaagcccgaggcccccgagctggtgctgaagaccgacagctgcgacgtgaacgactgcgtgcagcaggtggtggagctgctgcaggagagagacatcgtgcccgtggacgccagctacgaggtgaaggagctgtacgtgcccgagaacaagctgcacctggccaagaccgacgccgagaccctgcccgccctgaagatcaacaaggtggacatgcagtgggtgcaggtgctggccgagggctgggccacccccctgaacggcttcatgagagagagagagtacctgcagtgcctgcacttcgactgcctgctggacggcggcgtgatcaacctgagcgtgcccatcgtgctgaccgccacccacgaggacaaggagagactggacggctgcaccgccttcgccctgatgtacgagggcagaagagtggccatcctgagaaaccccgagttcttcgagcacagaaaggaggagagatgcgccagacagtggggcaccacctgcaagaaccacccctacatcaagatggtgatggagcagggcgactggctgatcggcggcgacctgcaggtgctggacagagtgtactggaacgacggcctggaccagtacagactgacccccaccgagctgaagcagaagttcaaggacatgaacgccgacgccgtgttcgccttccagctgagaaaccccgtgcacaacggccacgccctgctgatgcaggacacccacaagcagctgctggagagaggctacagaagacccgtgctgctgctgcaccccctgggcggctggaccaaggacgacgacgtgcccctgatgtggagaatgaagcagcacgccgccgtgctggaggagggcgtgctgaaccccgagaccaccgtggtggccatcttccccagccccatgatgtacgccggccccaccgaggtgcagtggcactgcagagccagaatggtggccggcgccaacttctacatcgtgggcagagaccccgccggcatgccccaccccgagaccggcaaggacctgtacgagcccagccacggcgccaaggtgctgaccatggcccccggcctgatcaccctggagatcgtgcccttcagagtggccgcctacaacaagaagaagaagagaatggactactacgacagcgagcaccacgaggacttcgagttcatcagcggcaccagaatgagaaagctggccagagagggccagaagccccccgagggcttcatggcccccaaggcctggaccgtgctgaccgagtactacaagagcctggagaaggcctag

SEQ ID NO: 71122 - DNA, 1845 bp, synthetic construct
  misc_feature 1..1845: note = Description of Artificial Sequence: Synthetic coding sequence
  source 1..1845: mol_type = other DNA
atgagcggcatcaagaagcagaagaccgagaaccagcagaagagcaccaacgtggtgtaccaggcccaccacgtgagcagaaacaagagaggccaggtggtgggcaccagaggcggcttcagaggctgcaccgtgtggctgaccggcctgagcggcgccggcaagaccaccatcagcttcgccctggaggagtacctggtgagccacgccatcccctgctacagcctggacggcgacaacgtgagacacggcctgaacagaaacctgggcttcagccccggcgacagagaggagaacatcagaagaatcgccgaggtggccaagctgttcgccgacgccggcctggtgtgcatcaccagcttcatcagccccttcgccaaggacagagagaacgccagaaagatccacgagagcgccggcctgcccttcttcgagatcttcgtggacgcccccctgaacatctgcgagagcagagacgtgaagggcctgtacaagagagccagagccggcgagatcaagggcttcaccggcatcgacagcgactacgagaagcccgagacccccgagagagtgctgaagaccaacctgagcaccgtgagcgactgcgtgcaccaggtggtggagctgctgcaggagcagaacatcgtgccctacaccatcatcaaggacatccacgagctgttcgtgcccgagaacaagctggaccacgtgagagccgaggccgagaccctgcccagcctgagcatcaccaagctggacctgcagtgggtgcaggtgctgagcgagggctgggccacccccctgaagggcttcatgagagagaaggagtacctgcaggtgatgcacttcgacaccctgctggacgacggcgtgatcaacatgagcatccccatcgtgctgcccgtgagcgccgaggacaagaccagactggagggctgcagcaagttcgtgctggcccacggcggcagaagagtggccatcctgagagacgccgagttctacgagcacagaaaggaggagagatgcagcagagtgtggggcaccacctgcaccaagcacccccacatcaagatggtgatggagagcggcgactggctggtgggcggcgacctgcaggtgctggagaagatcagatggaacgacggcctggaccagtacagactgacccccctggagctgaagcagaagtgcaaggagatgaacgccgacgccgtgttcgccttccagctgagaaaccccgtgcacaacggccacgccctgctgatgcaggacaccagaagaagactgctggagagaggctacaagcaccccgtgctgctgctgcaccccctgggcggctggaccaaggacgacgacgtgcccctggactggagaatgaagcagcacgccgccgtgctggaggagggcgtgctggaccccaagagcaccatcgtggccatcttccccagccccatgctgtacgccggccccaccgaggtgcagtggcactgcagaagcagaatgatcgccggcgccaacttctacatcgtgggcagagaccccgccggcatgccccaccccgagaccaagaaggacctgtacgagcccacccacggcggcaaggtgctgagcatggcccccggcctgaccagcgtggagatcatccccttcagagtggccgcctacaacaaggccaagaaggccatggacttctacgaccccgccagacacaacgagttcgacttcatcagcggcaccagaatgagaaagctggccagagagggcgagaacccccccgacggcttcatggcccccaaggcctggaaggtgctgaccgactactacagaagcctggagaagaactag

SEQ ID NO: 71123 - DNA, 1857 bp, synthetic construct
  misc_feature 1..1857: note = Description of Artificial Sequence: Synthetic coding sequence
  source 1..1857: mol_type = other DNA
agcggcaagaagcaggagaaggaggagaaccagcagaagagcaccaacgtggtgtaccaggcccaccacgtgagcagaaacaagagaggccaggtggtgggcaccagaggcggcttcagaggctgcaccgtgtggctgaccggcctgagcggcgccggcaagaccaccatcagcttcgccctggaggagtacctggtgagccacgccatcccctgctacagcctggacggcgacaacgtgagacacggcctgaacagaaacctgggcttcagccccggcgacagagaggagaacatcagaagaatcgccgaggtggccaagctgttcgccgacgccggcctggtgtgcatcaccagcttcatcagccccttcgccaaggacagagagaacgccagaaagatccacgagagcgccggcctgcccttcttcgagatcttcgtggacgcccccctgaacatctgcgagagcagagacgtgaagggcctgtacaagagagccagagccggcgagatcaagggcttcaccggcatcgacagcgactacgagaagcccgagacccccgagagagtgctgaagaccaacctgagcaccgtgagcgactgcgtgcaccaggtggtggagctgctgcaggagcagaacatcgtgccctacaccatcatcaaggacatccacgagctgttcgtgcccgagaacaagctggaccacgtgagagccgaggccgagaccctgcccagcctgagcatcaccaagctggacctgcagtgggtgcaggtgctgagcgagggctgggccacccccctgaagggcttcatgagagagaaggagtacctgcaggtgatgcacttcgacaccctgctggacggcatgttcctgctggacggcgtgatcaacatgagcatccccatcgtgctgcccgtgagcgccgaggacaagaccagactggagggctgcagcaagttcgtgctggcccacggcggcagaagagtggccatcctgagagacgccgagttctacgagcacagaaaggaggagagatgcagcagagtgtggggcaccacctgcaccaagcacccccacatcaagatggtgatggagagcggcgactggctggtgggcggcgacctgcaggtgctggagaagatcagatggaacgacggcctggaccagtacagactgacccccctggagctgaagcagaagtgcaaggagatgaacgccgacgccgtgttcgccttccagctgagaaaccccgtgcacaacggccacgccctgctgatgcaggacaccagaagaagactgctggagagaggctacaagcaccccgtgctgctgctgcaccccctgggcggctggaccaaggacgacgacgtgcccctggactggagaatgaagcagcacgccgccgtgctggaggagggcgtgctggaccccaagagcaccatcgtggccatcttccccagccccatgctgtacgccggccccaccgaggtgcagtggcactgcagaagcagaatgatcgccggcgccaacttctacatcgtgggcagagaccccgccggcatgccccaccccgagaccaagaaggacctgtacgagcccacccacggcggcaaggtgctgagcatggcccccggcctgaccagcgtggagatcatccccttcagagtggccgcctacaacaaggccaagaaggccatggacttctacgaccccgccagacacaacgagttcgacttcatcagcggcaccagaatgagaaagctggccagagagggcgagaacccccccgacggcttcatggcccccaaggcctggaaggtgctgaccgactactacagaagcctggagaagaactag

SEQ ID NO: 71124 - DNA, 1857 bp, synthetic construct
  misc_feature 1..1857: note = Description of Artificial Sequence: Synthetic coding sequence
  source 1..1857: mol_type = other DNA
atgatcgtgctggtgaccgagtgggtggacctgagcctggagaaccagcagaagagcaccaacgtggtgtaccaggcccaccacgtgagcagaaacaagagaggccaggtggtgggcaccagaggcggcttcagaggctgcaccgtgtggctgaccggcctgagcggcgccggcaagaccaccatcagcttcgccctggaggagtacctggtgagccacgccatcccctgctacagcctggacggcgacaacgtgagacacggcctgaacagaaacctgggcttcagccccggcgacagagaggagaacatcagaagaatcgccgaggtggccaagctgttcgccgacgccggcctggtgtgcatcaccagcttcatcagccccttcgccaaggacagagagaacgccagaaagatccacgagagcgccggcctgcccttcttcgagatcttcgtggacgcccccctgaacatctgcgagagcagagacgtgaagggcctgtacaagagagccagagccggcgagatcaagggcttcaccggcatcgacagcgactacgagaagcccgagacccccgagagagtgctgaagaccaacctgagcaccgtgagcgactgcgtgcaccaggtggtggagctgctgcaggagcagaacatcgtgccctacaccatcatcaaggacatccacgagctgttcgtgcccgagaacaagctggaccacgtgagagccgaggccgagaccctgcccagcctgagcatcaccaagctggacctgcagtgggtgcaggtgctgagcgagggctgggccacccccctgaagggcttcatgagagagaaggagtacctgcaggtgatgcacttcgacaccctgctggacgacggcgtgatcaacatgagcatccccatcgtgctgcccgtgagcgccgaggacaagaccagactggagggctgcagcaagttcgtgctggcccacggcggcagaagagtggccatcctgagagacgccgagttctacgagcacagaaaggaggagagatgcagcagagtgtggggcaccacctgcaccaagcacccccacatcaagatggtgatggagagcggcgactggctggtgggcggcgacctgcaggtgctggagaagatcagatggaacgacggcctggaccagtacagactgacccccctggagctgaagcagaagtgcaaggagatgaacgccgacgccgtgttcgccttccagctgagaaaccccgtgcacaacggccacgccctgctgatgcaggacaccagaagaagactgctggagagaggctacaagcaccccgtgctgctgctgcaccccctgggcggctggaccaaggacgacgacgtgcccctggactggagaatgaagcagcacgccgccgtgctggaggagggcgtgctggaccccaagagcaccatcgtggccatcttccccagccccatgctgtacgccggccccaccgaggtgcagtggcactgcagaagcagaatgatcgccggcgccaacttctacatcgtgggcagagaccccgccggcatgccccaccccgagaccaagaaggacctgtacgagcccacccacggcggcaaggtgctgagcatggcccccggcctgaccagcgtggagatcatccccttcagagtggccgcctacaacaaggccaagaaggccatggacttctacgaccccgccagacacaacgagttcgacttcatcagcggcaccagaatgagaaagctggccagagagggcgagaacccccccgacggcttcatggcccccaaggcctggaaggtgctgaccgactactacagaagcctggagaagaactag

SEQ ID NO: 71125 - DNA, 1860 bp, synthetic construct
  misc_feature 1..1860: note = Description of Artificial Sequence: Synthetic coding sequence
  source 1..1860: mol_type = other DNA
atgagcggcatcaagaagcagaagaccgagaaccagcagaagagcaccaacgtggtgtaccaggcccaccacgtgagcagaaacaagagaggccaggtggtgggcaccagaggcggcttcagaggctgcaccgtgtggctgaccggcctgagcggcgccggcaagaccaccatcagcttcgccctggaggagtacctggtgagccacgccatcccctgctacagcctggacggcgacaacgtgagacacggcctgaacagaaacctgggcttcagccccggcgacagagaggagaacatcagaagaatcgccgaggtggccaagctgttcgccgacgccggcctggtgtgcatcaccagcttcatcagccccttcgccaaggacagagagaacgccagaaagatccacgagagcgccggcctgcccttcttcgagatcttcgtggacgcccccctgaacatctgcgagagcagagacgtgaagggcctgtacaagagagccagagccggcgagatcaagggcttcaccggcatcgacagcgactacgagaagcccgagacccccgagagagtgctgaagaccaacctgagcaccgtgagcgactgcgtgcaccaggtggtggagctgctgcaggagcagaacatcgtgccctacaccatcatcaaggacatccacgagctgttcgtgcccgagaacaagctggaccacgtgagagccgaggccgagaccctgcccagcctgagcatcaccaagctggacctgcagtgggtgcaggtgctgagcgagggctgggccacccccctgaagggcttcatgagagagaaggagtacctgcaggtgatgcacttcgacaccctgctggacggcatggccctgcccgacggcgtgatcaacatgagcatccccatcgtgctgcccgtgagcgccgaggacaagaccagactggagggctgcagcaagttcgtgctggcccacggcggcagaagagtggccatcctgagagacgccgagttctacgagcacagaaaggaggagagatgcagcagagtgtggggcaccacctgcaccaagcacccccacatcaagatggtgatggagagcggcgactggctggtgggcggcgacctgcaggtgctggagaagatcagatggaacgacggcctggaccagtacagactgacccccctggagctgaagcagaagtgcaaggagatgaacgccgacgccgtgttcgccttccagctgagaaaccccgtgcacaacggccacgccctgctgatgcaggacaccagaagaagactgctggagagaggctacaagcaccccgtgctgctgctgcaccccctgggcggctggaccaaggacgacgacgtgcccctggactggagaatgaagcagcacgccgccgtgctggaggagggcgtgctggaccccaagagcaccatcgtggccatcttccccagccccatgctgtacgccggccccaccgaggtgcagtggcactgcagaagcagaatgatcgccggcgccaacttctacatcgtgggcagagaccccgccggcatgccccaccccgagaccaagaaggacctgtacgagcccacccacggcggcaaggtgctgagcatggcccccggcctgaccagcgtggagatcatccccttcagagtggccgcctacaacaaggccaagaaggccatggacttctacgaccccgccagacacaacgagttcgacttcatcagcggcaccagaatgagaaagctggccagagagggcgagaacccccccgacggcttcatggcccccaaggcctggaaggtgctgaccgactactacagaagcctggagaagaactag

SEQ ID NO: 71126 - DNA, 1503 bp, synthetic construct
  misc_feature 1..1503: note = Description of Artificial Sequence: Synthetic coding sequence
  source 1..1503: mol_type = other DNA
atggccagcatgctgctggcccagagactggcctgcagcttccagcacagctacagactgctggtgcccggcagcagacacatcagccaggccgccgccaaggtggacgtggagttcgactacgacggccccctgatgaagaccgaggtgcccggccccagaagccaggagctgatgaagcagctgaacatcatccagaacgccgaggccgtgcacttcttctgcaactacgaggagagcagaggcaactacctggtggacgtggacggcaacagaatgctggacctgtacagccagatcagcagcgtgcccatcggctacagccaccccgccctgctgaagctgatccagcagccccagaacgccagcatgttcgtgaacagacccgccctgggcatcctgccccccgagaacttcgtggagaagctgagacagagcctgctgagcgtggcccccaagggcatgagccagctgatcaccatggcctgcggcagctgcagcaacgagaacgccctgaagaccatcttcatgtggtacagaagcaaggagagaggccagagaggcttcagccaggaggagctggagacctgcatgatcaaccaggcccccggctgccccgactacagcatcctgagcttcatgggcgccttccacggcagaaccatgggctgcctggccaccacccacagcaaggccatccacaagatcgacatccccagcttcgactggcccatcgcccccttccccagactgaagtaccccctggaggagttcgtgaaggagaaccagcaggaggaggccagatgcctggaggaggtggaggacctgatcgtgaagtacagaaagaagaagaagaccgtggccggcatcatcgtggagcccatccagagcgagggcggcgacaaccacgccagcgacgacttcttcagaaagctgagagacatcgccagaaagcacggctgcgccttcctggtggacgaggtgcagaccggcggcggctgcaccggcaagttctgggcccacgagcactggggcctggacgaccccgccgacgtgatgaccttcagcaagaagatgatgaccggcggcttcttccacaaggaggagttcagacccaacgccccctacagaatcttcaacacctggctgggcgaccccagcaagaacctgctgctggccgaggtgatcaacatcatcaagagagaggacctgctgaacaacgccgcccacgccggcaaggccctgctgaccggcctgctggacctgcaggccagatacccccagttcatcagcagagtgagaggcagaggcaccttctgcagcttcgacacccccgacgacagcatcagaaacaagctgatcctgatcgccagaaacaagggcgtggtgctgggcggctgcggcgacaagagcatcagattcagacccaccctggtgttcagagaccaccacgcccacctgttcctgaacatcttcagcgacatcctggccgacttcaagtag

SEQ ID NO: 71127 - DNA, 1503 bp, synthetic construct; identical to SEQ ID NO: 71126
  misc_feature 1..1503: note = Description of Artificial Sequence: Synthetic coding sequence
  source 1..1503: mol_type = other DNA

SEQ ID NO: 71128 - DNA, 1503 bp, synthetic construct; identical to SEQ ID NO: 71126
  misc_feature 1..1503: note = Description of Artificial Sequence: Synthetic coding sequence
  source 1..1503: mol_type = other DNA

SEQ ID NO: 71129 - DNA, 462 bp, synthetic construct
  misc_feature 1..462: note = Description of Artificial Sequence: Synthetic coding sequence
  source 1..462: mol_type = other DNA
gtggacatggacggcgtgctggccgacttcgaggccggcctgctgagaggcttcagaagaagattccccgaggagccccacgtgcccctggagcagagaagaggcttcctggccagagagcagtacagagccctgagacccgacctggccgacaaggtggccagcgtgtacgaggcccccggcttcttcctggacctggagcccatccccggcgccctggacgccgtgagagagatgaacgacctgcccgacacccaggtgttcatctgcaccagccccctgctgaagtaccaccactgcgtgggcgagaaggaggagacccccagctgggagcacatcctgttcacctgctgccacaacagacacctggtgctgccccccaccagaagaagactgctgagctggagcgacaactggagagagatcctggacagcaagagaggcgccgcccagagagagtag

SEQ ID NO: 71130 - DNA, 606 bp, synthetic construct
  misc_feature 1..606: note = Description of Artificial Sequence: Synthetic coding sequence
  source 1..606: mol_type = other DNA
atggccagaagcgtgagagtgctggtggacatggacggcgtgctggccgacttcgaggccggcctgctgagaggcttcagaagaagattccccgaggagccccacgtgcccctggagcagagaagaggcttcctggccagagagcagtacagagccctgagacccgacctggccgacaaggtggccagcgtgtacgaggcccccggcttcttcctggacctggagcccatccccggcgccctggacgccgtgagagagatgaacgacctgcccgacacccaggtgttcatctgcaccagccccctgctgaagtaccaccactgcgtgggcgagaagtacagatgggtggagcagcacctgggcccccagttcgtggagagaatcatcctgaccagagacaagaccgtggtgctgggcgacctgctgatcgacgacaaggacaccgtgagaggccaggaggagacccccagctgggagcacatcctgttcacctgctgccacaacagacacctggtgctgccccccaccagaagaagactgctgagctggagcgacaactggagagagatcctggacagcaagagaggcgccgcccagagagagtag

SEQ ID NO: 71131 - DNA, 687 bp, synthetic construct
  misc_feature 1..687: note = Description of Artificial Sequence: Synthetic coding sequence
  source 1..687: mol_type = other DNA
atgatcagactgggcggctggtgcgccagaagactgtgcagcgccgccgtgcccgccggcagaagaggcgccgccggcggcctgggcctggccggcggcagagccctgagagtgctggtggacatggacggcgtgctggccgacttcgagggcggcttcctgagaaagttcagagccagattccccgaccagcccttcatcgccctggaggacagaagaggcttctgggtgagcgagcagtacggcagactgagacccggcctgagcgagaaggccatcagcatctgggagagcaagaacttcttcttcgagctggagcccctgcccggcgccgtggaggccgtgaaggagatggccagcctgcagaacaccgacgtgttcatctgcaccagccccatcaagatgttcaagtactgcccctacgagaagtacgcctgggtggagaagtacttcggccccgacttcctggagcagatcgtgctgaccagagacaagaccgtggtgagcgccgacctgctgatcgacgacagacccgacatcaccggcgccgagcccacccccagctgggagcacgtgctgttcaccgcctgccacaaccagcacctgcagctgcagccccccagaagaagactgcacagctgggccgacgactggaaggccatcctggacagcaagagaccctgctag

SEQ ID NO: 71132 - DNA, 720 bp, synthetic construct
  misc_feature 1..720: note = Description of Artificial Sequence: Synthetic coding sequence
  source 1..720: mol_type = other DNA
atgatcagactgggcggctggtgcgccagaagactgtgcagcgccgccgtgcccgccggcagaagaggcgccgccggcggcctgggcctggccggcggcagagccctgagagtgctggtggacatggacggcgtgctggccgacttcgagggcggcttcctgagaaagttcagagccagattccccgaccagcccttcatcgccctggaggacagaagaggcttctgggtgagcgagcagtacggcagactgagacccggcctgagcgagaaggccatcagcatctgggagagcaagaacttcttcttcgagctggagcccctgcccggcgccgtggaggccgtgaaggagatggccagcctgcagaacaccgacgtgttcatctgcaccagccccatcaagatgttcaagtactgcccctacgagaagtacgcctgggtggagaagtacttcggccccgacttcctggagcagatcgtgctgaccagagacaagaccgtggtgagcgccgacctgctgatcgacgacagacccgacatcaccggcaaccagccccccgccggcagcatgagcagcagcccccccgccaccaccagcacctgcagctgcagcccccccgccgccggctgcaccagaggcagaaccaccggcagacccttctggaccgccagcggccccgccgagctggactgcgccagcggcagcagcgtgggcctgtag

SEQ ID NO: 71133 - DNA, 2853 bp, synthetic construct
  misc_feature 1..2853: note = Description of Artificial Sequence: Synthetic coding sequence
  source 1..2853: mol_type = other DNA
atgggcgtgcccgccttcttcagatggctgagcagaaagtaccccagcatcatcgtgaactgcgtggaggagaagcccaaggagtgcaacggcgtgaagatccccgtggacgccagcaagcccaaccccaacgacgtggagttcgacaacctgtacctggacatgaacggcatcatccacccctgcacccaccccgaggacaagcccgcccccaagaacgaggacgagatgatggtggccatcttcgagtacatcgacagactgttcagcatcgtgagacccagaagactgctgtacatggccatcgacggcgtggcccccagagccaagatgaaccagcagagaagcagaagattcagagccagcaaggagggcatggaggccgccgtggagaagcagagagtgagagaggagatcctggccaagggcggcttcctgccccccgaggagatcaaggagagattcgacagcaactgcatcacccccggcaccgagttcatggacaacctggccaagtgcctgagatactacatcgccgacagactgaacaacgaccccggctggaagaacctgaccgtgatcctgagcgacgccagcgcccccggcgagggcgagcacaagatcatggactacatcagaagacagagagcccagcccaaccacgaccccaacacccaccactgcctgtgcggcgccgacgccgacctgatcatgctgggcctggccacccacgagcccaacttcaccatcatcagagaggagttcaagcccaacaagcccaagccctgcggcctgtgcaaccagttcggccacgaggtgaaggactgcgagggcctgcccagagagaagaagggcaagcacgacgagctggccgacagcctgccctgcgccgagggcgagttcatcttcctgagactgaacgtgctgagagagtacctggagagagagctgaccatggccagcctgcccttcaccttcgacgtggagagaagcatcgacgactgggtgttcatgtgcttcttcgtgggcaacgacttcctgccccacctgcccagcctggagatcagagagaacgccatcgacagactggtgaacatctacaagaacgtggtgcacaagaccggcggctacctgaccgagagcggctacgtgaacctgcagagagtgcagatgatcatgctggccgtgggcgaggtggaggacagcatcttcaagaagagaaaggacgacgaggacagcttcagaagaagacagaaggagaagagaaagagaatgaagagagaccagcccgccttcacccccagcggcatcctgaccccccacgccctgggcagcagaaacagccccggcagccaggtggccagcaaccccagacaggccgcctacgagatgagaatgcagaacaacagcagccccagcatcagccccaacaccagcttcaccagcgacggcagccccagccccctgggcggcatcaagagaaaggccgaggacagcgacagcgagcccgagcccgaggacaacgtgagactgtgggaggccggctggaagcagagatactacaagaacaagttcgacgtggacgccgccgacgagaagttcagaagaaaggtggtgcagagctacgtggagggcctgtgctgggtgctgagatactactaccagggctgcgccagctggaagtggtactaccccttccactacgcccccttcgccagcgacttcgagggcatcgccgacatgcccagcgacttcgagaagggcaccaagcccttcaagcccctggagcagctgatgggcgtgttccccgccgccagcggcaacttcctgccccccagctggagaaagctgatgagcgaccccgacagcagcatcatcgacttctaccccgaggacttcgccatcgacctgaacggcaagaagtacgcctggcagggcgtggccctgctgcccttcgtggacgagagaagactgagagccgccctggaggaggtgtaccccgacctgacccccgaggagaccagaagaaacagcctgggcggcgacgtgctgttcgtgggcaagcaccaccccctgcacgacttcatcctggagctgtaccagaccggcagcaccgagcccgtggaggtgccccccgagctgtgccacggcatccagggcaagttcagcctggacgaggaggccatcctgcccgaccagatcgtgtgcagccccgtgcccatgctgagagacctgacccagaacaccgtggtgagcatcaacttcaaggacccccagttcgccgaggactacatcttcaaggccgtgatgctgcccggcgccagaaagcccgccgccgtgctgaagcccagcgactgggagaagagcagcaacggcagacagtggaagccccagctgggcttcaacagagacagaagacccgtgcacctggaccaggccgccttcagaaccctgggccacgtgatgcccagaggcagcggcaccggcatctacagcaacgccgcccccccccccgtgacctaccagggcaacctgtacagacccctgctgagaggccaggcccagatccccaagctgatgagcaacatgagaccccaggacagctggagaggccccccccccctgttccagcagcagagattcgacagaggcgtgggcgccgagcccctgctgccctggaacagaatgctgcagacccagaacgccgccttccagcccaaccagtaccagatgctggccggccccggcggctacccccccagaagagacgacagaggcggcagacagggctaccccagagagggcagaaagtaccccctgcccccccccagcggcagatacaactggaactag

SEQ ID NO: 71134 - DNA, 2625 bp, synthetic construct
  misc_feature 1..2625: note = Description of Artificial Sequence: Synthetic coding sequence
  source 1..2625: mol_type = other DNA
atgatggtggccatcttcgagtacatcgacagactgttcagcatcgtgagacccagaagactgctgtacatggccatcgacggcgtggcccccagagccaagatgaaccagcagagaagcagaagattcagagccagcaaggagggcatggaggccgccgtggagaagcagagagtgagagaggagatcctggccaagggcggcttcctgccccccgaggagatcaaggagagattcgacagcaactgcatcacccccggcaccgagttcatggacaacctggccaagtgcctgagatactacatcgccgacagactgaacaacgaccccggctggaagaacctgaccgtgatcctgagcgacgccagcgcccccggcgagggcgagcacaagatcatggactacatcagaagacagagagcccagcccaaccacgaccccaacacccaccactgcctgtgcggcgccgacgccgacctgatcatgctgggcctggccacccacgagcccaacttcaccatcatcagagaggagttcaagcccaacaagcccaagccctgcggcctgtgcaaccagttcggccacgaggtgaaggactgcgagggcctgcccagagagaagaagggcaagcacgacgagctggccgacagcctgccctgcgccgagggcgagttcatcttcctgagactgaacgtgctgagagagtacctggagagagagctgaccatggccagcctgcccttcaccttcgacgtggagagaagcatcgacgactgggtgttcatgtgcttcttcgtgggcaacgacttcctgccccacctgcccagcctggagatcagagagaacgccatcgacagactggtgaacatctacaagaacgtggtgcacaagaccggcggctacctgaccgagagcggctacgtgaacctgcagagagtgcagatgatcatgctggccgtgggcgaggtggaggacagcatcttcaagaagagaaaggacgacgaggacagcttcagaagaagacagaaggagaagagaaagagaatgaagagagaccagcccgccttcacccccagcggcatcctgaccccccacgccctgggcagcagaaacagccccggcagccaggtggccagcaaccccagacaggccgcctacgagatgagaatgcagaacaacagcagccccagcatcagccccaacaccagcttcaccagcgacggcagccccagccccctgggcggcatcaagagaaaggccgaggacagcgacagcgagcccgagcccgaggacaacgtgagactgtgggaggccggctggaagcagagatactacaagaacaagttcgacgtggacgccgccgacgagaagttcagaagaaaggtggtgcagagctacgtggagggcctgtgctgggtgctgagatactactaccagggctgcgccagctggaagtggtactaccccttccactacgcccccttcgccagcgacttcgagggcatcgccgacatgcccagcgacttcgagaagggcaccaagcccttcaagcccctggagcagctgatgggcgtgttccccgccgccagcggcaacttcctgccccccagctggagaaagctgatgagcgaccccgacagcagcatcatcgacttctaccccgaggacttcgccatcgacctgaacggcaagaagtacgcctggcagggcgtggccctgctgcccttcgtggacgagagaagactgagagccgccctggaggaggtgtaccccgacctgacccccgaggagaccagaagaaacagcctgggcggcgacgtgctgttcgtgggcaagcaccaccccctgcacgacttcatcctggagctgtaccagaccggcagcaccgagcccgtggaggtgccccccgagctgtgccacggcatccagggcaagttcagcctggacgaggaggccatcctgcccgaccagatcgtgtgcagccccgtgcccatgctgagagacctgacccagaacaccgtggtgagcatcaacttcaaggacccccagttcgccgaggactacatcttcaaggccgtgatgctgcccggcgccagaaagcccgccgccgtgctgaagcccagcgactgggagaagagcagcaacggcagacagtggaagccccagctgggcttcaacagagacagaagacccgtgcacctggaccaggccgccttcagaaccctgggccacgtgatgcccagaggcagcggcaccggcatctacagcaacgccgcccccccccccgtgacctaccagggcaacctgtacagacccctgctgagaggccaggcccagatccccaagctgatgagcaacatgagaccccaggacagctggagaggccccccccccctgttccagcagcagagattcgacagaggcgtgggcgccgagcccctgctgccctggaacagaatgctgcagacccagaacgccgccttccagcccaaccagtaccagatgctggccggccccggcggctacccccccagaagagacgacagaggcggcagacagggctaccccagagagggcagaaagtaccccctgcccccccccagcggcagatacaactggaactag

SEQ ID NO: 71135 - DNA, 2691 bp, synthetic construct
  misc_feature 1..2691: note = Description of Artificial Sequence: Synthetic coding sequence
  source 1..2691: mol_type = other DNA
atgaacggcatcatccacccctgcacccaccccgaggacaagcccgcccccaagaacgaggacgagatgatggtggccatcttcgagtacatcgacagactgttcagcatcgtgagacccagaagactgctgtacatggccatcgacggcgtggcccccagagccaagatgaaccagcagagaagcagaagattcagagccagcaaggagggcatggaggccgccgtggagaagcagagagtgagagaggagatcctggccaagggcggcttcctgccccccgaggagatcaaggagagattcgacagcaactgcatcacccccggcaccgagttcatggacaacctggccaagtgcctgagatactacatcgccgacagactgaacaacgaccccggctggaagaacctgaccgtgatcctgagcgacgccagcgcccccggcgagggcgagcacaagatcatggactacatcagaagacagagagcccagcccaaccacgaccccaacacccaccactgcctgtgcggcgccgacgccgacctgatcatgctgggcctggccacccacgagcccaacttcaccatcatcagagaggagttcaagcccaacaagcccaagccctgcggcctgtgcaaccagttcggccacgaggtgaaggactgcgagggcctgcccagagagaagaagggcaagcacgacgagctggccgacagcctgccctgcgccgagggcgagttcatcttcctgagactgaacgtgctgagagagtacctggagagagagctgaccatggccagcctgcccttcaccttcgacgtggagagaagcatcgacgactgggtgttcatgtgcttcttcgtgggcaacgacttcctgccccacctgcccagcctggagatcagagagaacgccatcgacagactggtgaacatctacaagaacgtggtgcacaagaccggcggctacctgaccgagagcggctacgtgaacctgcagagagtgcagatgatcatgctggccgtgggcgaggtggaggacagcatcttcaagaagagaaaggacgacgaggacagcttcagaagaagacagaaggagaagagaaagagaatgaagagagaccagcccgccttcacccccagcggcatcctgaccccccacgccctgggcagcagaaacagccccggcagccaggtggccagcaaccccagacaggccgcctacgagatgagaatgcagaacaacagcagccccagcatcagccccaacaccagcttcaccagcgacggcagccccagccccctgggcggcatcaagagaaaggccgaggacagcgacagcgagcccgagcccgaggacaacgtgagactgtgggaggccggctggaagcagagatactacaagaacaagttcgacgtggacgccgccgacgagaagttcagaagaaaggtggtgcagagctacgtggagggcctgtgctgggtgctgagatactactaccagggctgcgccagctggaagtggtactaccccttccactacgcccccttcgccagcgacttcgagggcatcgccgacatgcccagcgacttcgagaagggcaccaagcccttcaagcccctggagcagctgatgggcgtgttccccgccgccagcggcaacttcctgccccccagctggagaaagctgatgagcgaccccgacagcagcatcatcgacttctaccccgaggacttcgccatcgacctgaacggcaagaagtacgcctggcagggcgtggccctgctgcccttcgtggacgagagaagactgagagccgccctggaggaggtgtaccccgacctgacccccgaggagaccagaagaaacagcctgggcggcgacgtgctgttcgtgggcaagcaccaccccctgcacgacttcatcctggagctgtaccagaccggcagcaccgagcccgtggaggtgccccccgagctgtgccacggcatccagggcaagttcagcctggacgaggaggccatcctgcccgaccagatcgtgtgcagccccgtgcccatgctgagagacctgacccagaacaccgtggtgagcatcaacttcaaggacccccagttcgccgaggactacatcttcaaggccgtgatgctgcccggcgccagaaagcccgccgccgtgctgaagcccagcgactgggagaagagcagcaacggcagacagtggaagccccagctgggcttcaacagagacagaagacccgtgcacctggaccaggccgccttcagaaccctgggccacgtgatgcccagaggcagcggcaccggcatctacagcaacgccgcccccccccccgtgacctaccagggcaacctgtacagacccctgctgagaggccaggcccagatccccaagctgatgagcaacatgagaccccaggacagctggagaggccccccccccctgttccagcagcagagattcgacagaggcgtgggcgccgagcccctgctgccctggaacagaatgctgcagacccagaacgccgccttccagcccaaccagtaccagatgctggccggccccggcggctacccccccagaagagacgacagaggcggcagacagggctaccccagagagggcagaaagtaccccctgcccccccccagcggcagatacaactggaactag

SEQ ID NO: 71136 - DNA, 1779 bp, synthetic construct
  misc_feature 1..1779: note = Description of Artificial Sequence: Synthetic coding sequence
  source 1..1779: mol_type = other DNA
atggcccccggccagctggccctgttcagcgtgagcgacaagaccggcctggtggagttcgccagaaacctgaccgccctgggcctgaacctggtggccagcggcggcaccgccaaggccctgagagacgccggcctggccgtgagagacgtgagcgagctgaccggcttccccgagatgctgggcggcagagtgaagaccctgcaccccgccgtgcacgccggcatcctggccagaaacatccccgaggacaacgccgacatggccagactggacttcaacctgatcagagtggtggcctgcaacctgtaccccttcgtgaagaccgtggccagccccggcgtgaccgtggaggaggccgtggagcagatcgacatcggcggcgtgaccctgctgagagccgccgccaagaaccacgccagagtgaccgtggtgtgcgagcccgaggactacgtggtggtgagcaccgagatgcagagcagcgagagcaaggacaccagcctggagaccagaagacagctggccctgaaggccttcacccacaccgcccagtacgacgaggccatcagcgactacttcagaaagcagtacagcaagggcgtgagccagatgcccctgagatacggcatgaacccccaccagacccccgcccagctgtacaccctgcagcccaagctgcccatcaccgtgctgaacggcgcccccggcttcatcaacctgtgcgacgccctgaacgcctggcagctggtgaaggagctgaaggaggccctgggcatccccgccgccgccagcttcaagcacgtgagccccgccggcgccgccgtgggcatccccctgagcgaggacgaggccaaggtgtgcatggtgtacgacctgtacaagaccctgacccccatcagcgccgcctacgccagagccagaggcgccgacagaatgagcagcttcggcgacttcgtggccctgagcgacgtgtgcgacgtgcccaccgccaagatcatcagcagagaggtgagcgacggcatcatcgcccccggctacgaggaggaggccctgaccatcctgagcaagaagaagaacggcaactactgcgtgctgcagatggaccagagctacaagcccgacgagaacgaggtgagaaccctgttcggcctgcacctgagccagaagagaaacaacggcgtggtggacaagagcctgttcagcaacgtggtgaccaagaacaaggacctgcccgagagcgccctgagagacctgatcgtggccaccatcgccgtgaagtacacccagagcaacagcgtgtgctacgccaagaacggccaggtgatcggcatcggcgccggccagcagagcagaatccactgcaccagactggccggcgacaaggccaactactggtggctgagacaccacccccaggtgctgagcatgaagttcaagaccggcgtgaagagagccgagatcagcaacgccatcgaccagtacgtgaccggcaccatcggcgaggacgaggacctgatcaagtggaaggccctgttcgaggaggtgcccgagctgctgaccgaggccgagaagaaggagtgggtggagaagctgaccgaggtgagcatcagcagcgacgccttcttccccttcagagacaacgtggacagagccaagagaagcggcgtggcctacatcgccgcccccagcggcagcgccgccgacaaggtggtgatcgaggcctgcgacgagctgggcatcatcctggcccacaccaacctgagactgttccaccactag

SEQ ID NO: 71137 - DNA, 1602 bp, synthetic construct
  misc_feature 1..1602: note = Description of Artificial Sequence: Synthetic coding sequence
  source 1..1602: mol_type = other DNA
atgctgggcggcagagtgaagaccctgcaccccgccgtgcacgccggcatcctggccagaaacatccccgaggacaacgccgacatggccagactggacttcaacctgatcagagtggtggcctgcaacctgtaccccttcgtgaagaccgtggccagccccggcgtgaccgtggaggaggccgtggagcagatcgacatcggcggcgtgaccctgctgagagccgccgccaagaaccacgccagagtgaccgtggtgtgcgagcccgaggactacgtggtggtgagcaccgagatgcagagcagcgagagcaaggacaccagcctggagaccagaagacagctggccctgaaggccttcacccacaccgcccagtacgacgaggccatcagcgactacttcagaaagcagtacagcaagggcgtgagccagatgcccctgagatacggcatgaacccccaccagacccccgcccagctgtacaccctgcagcccaagctgcccatcaccgtgctgaacggcgcccccggcttcatcaacctgtgcgacgccctgaacgcctggcagctggtgaaggagctgaaggaggccctgggcatccccgccgccgccagcttcaagcacgtgagccccgccggcgccgccgtgggcatccccctgagcgaggacgaggccaaggtgtgcatggtgtacgacctgtacaagaccctgacccccatcagcgccgcctacgccagagccagaggcgccgacagaatgagcagcttcggcgacttcgtggccctgagcgacgtgtgcgacgtgcccaccgccaagatcatcagcagagaggtgagcgacggcatcatcgcccccggctacgaggaggaggccctgaccatcctgagcaagaagaagaacggcaactactgcgtgctgcagatggaccagagctacaagcccgacgagaacgaggtgagaaccctgttcggcctgcacctgagccagaagagaaacaacggcgtggtggacaagagcctgttcagcaacgtggtgaccaagaacaaggacctgcccgagagcgccctgagagacctgatcgtggccaccatcgccgtgaagtacacccagagcaacagcgtgtgctacgccaagaacggccaggtgatcggcatcggcgccggccagcagagcagaatccactgcaccagactggccggcgacaaggccaactactggtggctgagacaccacccccaggtgctgagcatgaagttcaagaccggcgtgaagagagccgagatcagcaacgccatcgaccagtacgtgaccggcaccatcggcgaggacgaggacctgatcaagtggaaggccctgttcgaggaggtgcccgagctgctgaccgaggccgagaagaaggagtgggtggagaagctgaccgaggtgagcatcagcagcgacgccttcttccccttcagagacaacgtggacagagccaagagaagcggcgtggcctacatcgccgcccccagcggcagcgccgccgacaaggtggtgatcgaggcctgcgacgagctgggcatcatcctggcccacaccaacctgagactgttccaccactag

SEQ ID NO: 71138 - DNA, 3252 bp, synthetic construct
  misc_feature 1..3252: note = Description of Artificial Sequence: Synthetic coding sequence
  source 1..3252: mol_type = other DNA
atgaagggcaccagagccatcggcagcgtgcccgagagaagccccgccggcgtggacctgagcctgaccggcctgcccccccccgtgagcagaagacccggcagcgccgccaccaccaagcccatcgtgagaagcgtgagcgtggtgaccggcagcgagcagaagagaaaggtgctggaggccaccggccccggcggcagccaggccatcaacaacctgagaagaagcaacagcaccacccaggtgagccagcccagaagcggcagccccagacccaccgagcccaccgacttcctgatgctgttcgagggcagccccagcggcaagaagagacccgccagcctgagcaccgcccccagcgagaagggcgccacctggaacgtgctggacgaccagcccagaggcttcaccctgcccagcaacgccagaagcagcagcgccctggacagccccgccggccccagaagaaaggagtgcaccgtggccctggcccccaacttcaccgccaacaacagaagcaacaagggcgccgtgggcaactgcgtgaccaccatggtgcacaacagatacacccccagcgagagagccccccccctgaagagcagcaaccagaccgcccccagcctgaacaacatcatcaaggccgccacctgcgagggcagcgagagcagcggcttcggcaagctgcccaagaacgtgagcagcgccacccacagcgccagaaacaacaccggcggcagcaccggcctgcccagaagaaaggaggtgaccgaggaggaggccgagagattcatccaccaggtgaaccaggccaccgtgaccatccagagatggtacagacaccaggtgcagagaagaggcgccggcgccgccagactggagcacctgctgcaggccaagagagaggagcagagacagagaagcggcgagggcaccctgctggacctgcaccagcagaaggaggccgccagaagaaaggccagagaggagaaggccagacaggccagaagagccgccatccaggagctgcagcagaagagagccctgagagcccagaaggccagcaccgccgagagaggcccccccgagaaccccagagagaccagagtgcccggcatgagacagcccgcccaggagctgagccccacccccggcggcaccgcccaccaggccctgaaggccaacaacaccggcggcggcctgcccgccgccggccccggcgacagatgcctgcccaccagcgacagcagccccgagccccagcagccccccgaggacagaacccaggacgtgctggcccaggacgccgccggcgacaacctggagatgatggcccccagcagaggcagcgccaagagcagaggccccctggaggagctgctgcacaccctgcagctgctggagaaggagcccgacgtgctgcccagacccagaacccaccacagaggcagatacgcctgggccagcgaggtgaccaccgaggacgacgccagcagcctgaccgccgacaacctggagaagttcggcaagctgagcgccttccccgagccccccgaggacggcaccctgctgagcgaggccaagctgcagagcatcatgagcttcctggacgagatggagaagagcggccaggaccagctggacagccagcaggagggctgggtgcccgaggccggccccggccccctggagctgggcagcgaggtgagcaccagcgtgatgagactgaagctggaggtggaggagaagaagcaggccatgctgctgctgcagagagccctggcccagcagagagacctgaccgccagaagagtgaaggagaccgagaaggccctgagcagacagctgcagagacagagagagcactacgaggccaccatccagagacacctggccttcatcgaccagctgatcgaggacaagaaggtgctgagcgagaagtgcgaggccgtggtggccgagctgaagcaggaggaccagagatgcaccgagagagtggcccaggcccaggcccagcacgagctggagatcaagaagctgaaggagctgatgagcgccaccgagaaggccagaagagagaagtggatcagcgagaagaccaagaagatcaaggaggtgaccgtgagaggcctggagcccgagatccagaagctgatcgccagacacaagcaggaggtgagaagactgaagagcctgcacgaggccgagctgctgcagagcgacgagagagccagccagagatgcctgagacaggccgaggagctgagagagcagctggagagagagaaggaggccctgggccagcaggagagagagagagccagacagagattccagcagcacctggagcaggagcagtgggccctgcagcagcagagacagagactgtacagcgaggtggccgaggagagagagagactgggccagcaggccgccagacagagagccgagctggaggagctgagacagcagctggaggagagcagcagcgccctgaccagagccctgagagccgagttcgagaagggcagagaggagcaggagagaagacaccagatggagctgaacaccctgaagcagcagctggagctggagagacaggcctgggaggccggcagaaccagaaaggaggaggcctggctgctgaacagagagcaggagctgagagaggagatcagaaagggcagagacaaggagatcgagctggtgatccacagactggaggccgacatggccctggccaaggaggagagcgagaaggccgccgagagcagaatcaagagactgagagacaagtacgaggccgagctgagcgagctggagcagagcgagagaaagctgcaggagagatgcagcgagctgaagggccagctgggcgaggccgagggcgagaacctgagactgcagggcctggtgagacagaaggagagagccctggaggacgcccaggccgtgaacgagcagctgagcagcgagagaagcaacctggcccaggtgatcagacaggagttcgaggacagactggccgccagcgaggaggagaccagacaggccaaggccgagctggccaccctgcaggccagacagcagctggagctggaggaggtgcacagaagagtgaagaccgccctggccagaaaggaggaggccgtgagcagcctgagaacccagcacgaggccgccgtgaagagagccgaccacctggaggagctgctggagcagcacagaagacccacccccagcaccaagtag

SEQ ID NO: 71139 - DNA, 3135 bp, synthetic construct
  misc_feature 1..3135: note = Description of Artificial Sequence: Synthetic coding sequence
  source 1..3135: mol_type = other DNA
atgaagggcaccagagccatcggcagcgtgcccgagagaagccccgccggcgtggacctgagcctgaccggcctgcccccccccgtgagcagaagacccggcagcgccgccaccaccaagcccatcgtgagaagcgtgagcgtggtgaccggcagcgagcagaagagaaaggtgctggaggccaccggccccggcggcagccaggccatcaacaacctgagaagaagcaacagcaccacccaggtgagccagcccagaagcggcagccccagacccaccgagcccaccgacttcctgatgctgttcgagggcagccccagcggcaagaagagacccgccagcctgagcaccgcccccagcgagaagggcgccacctggaacgtgctggacgaccagcccagaggcttcaccctgcccagcaacgccagaagcagcagcgccctggacagccccgccggccccagaagaaaggagtgcaccgtggccctggcccccaacttcaccgccaacaacagaagcaacaagggcgccgtgggcaactgcgtgaccaccatggtgcacaacagatacacccccagcgagagagccccccccctgaagagcagcaaccagaccgcccccagcctgaacaacatcatcaaggccgccacctgcgagggcagcgagagcagcggcttcggcaagctgcccaagaacgtgagcagcgccacccacagcgccagaaacaacaccggcggcagcaccggcctgcccagaagaaaggaggtgaccgaggaggaggccgagagattcatccaccaggtgaaccaggccaccgtgaccatccagagatggtacagacaccaggtgcagagaagaggcgccggcgccgccagactggagcacctgctgcaggccaagagagaggagcagagacagagaagcggcgagggcaccctgctggacctgcaccagcagaaggaggccgccagaagaaaggccagagaggagaaggccagacaggccagaagagccgccatccaggagctgcagcagaagagagccctgagagcccagaaggccagcaccgccgagagaggcccccccgagaaccccagagagaccagagtgcccggcatgagacagcccgcccaggagctgagccccacccccggcggcaccgcccaccaggccctgaaggccaacaacaccggcggcggcctgcccgccgccggccccggcgacagatgcctgcccaccagcgacagcagccccgagccccagcagccccccgaggacagaacccaggacgtgctggcccaggacgccgccggcgacaacctggagatgatggcccccagcagaggcagcgccaagagcagaggccccctggaggagctgctgcacaccctgcagctgctggagaaggagcccgacgtgctgcccagacccagaacccaccacagaggcagatacgcctgggccagcgaggaggacgacgccagcagcctgaccgccgacaacctggagaagttcggcaagctgagcgccttccccgagccccccgaggacggcaccctgctgagcgaggccaagctgcagagcatcatgagcttcctggacgagatggagaagagcggccaggaccagctggacagccagcaggagggctgggtgcccgaggccggccccggccccctggagctgggcagcgaggtgagcaccagcgtgatgagactgaagctggaggtggaggagaagaagcaggccatgctgctgctgcagagagccctggcccagcagagagacctgaccgccagaagagtgaaggagaccgagaaggccctgagcagacagctgcagagacagagagagcactacgaggccaccatccagagacacctggccttcatcgaccagctgatcgaggacaagaaggtgctgagcgagaagtgcgaggccgtggtggccgagctgaagcaggaggaccagagatgcaccgagagagtggcccaggcccaggcccagcacgagctggagatcaagaagctgaaggagctgatgagcgccaccgagaaggccagaagagagaagtggatcagcgagaagaccaagaagatcaaggaggtgaccgtgagaggcctggagcccgagatccagaagctgatcgccagacacaagcaggaggtgagaagactgaagagcctgcacgaggccgagctgctgcagagcgacgagagagccagccagagatgcctgagacaggccgaggagctgagagagcagctggagagagagaaggaggccctgggccagcaggagagagagagagccagacagagacagagagccgagctggaggagctgagacagcagctggaggagagcagcagcgccctgaccagagccctgagagccgagttcgagaagggcagagaggagcaggagagaagacaccagatggagctgaacaccctgaagcagcagctggagctggagagacaggcctgggaggccggcagaaccagaaaggaggaggcctggctgctgaacagagagcaggagctgagagaggagatcagaaagggcagagacaaggagatcgagctggtgatccacagactggaggccgacatggccctggccaaggaggagagcgagaaggccgccgagagcagaatcaagagactgagagacaagtacgaggccgagctgagcgagctggagcagagcgagagaaagctgcaggagagatgcagcgagctgaagggccagctgggcgaggccgagggcgagaacctgagactgcagggcctggtgagacagaaggagagagccctggaggacgcccaggccgtgaacgagcagctgagcagcgagagaagcaacctggcccaggtgatcagacaggagttcgaggacagactggccgccagcgaggaggagaccagacaggccaaggccgagctggccaccctgcaggccagacagcagctggagctggaggaggtgcacagaagagtgaagaccgccctggccagaaaggaggaggccgtgagcagcctgagaacccagcacgaggccgccgtgaagagagccgaccacctggaggagctgctggagcagcacagaagacccacccccagcaccaagtag

SEQ ID NO: 71140 - DNA, 3243 bp, synthetic construct
  misc_feature 1..3243: note = Description of Artificial Sequence: Synthetic coding sequence
  source 1..3243: mol_type = other DNA
atgaagggcaccagagccatcggcagcgtgcccgagagaagccccgccggcgtggacctgagcctgaccggcctgcccccccccgtgagcagaagacccggcagcgccgccaccaccaagcccatcgtgagaagcgtgagcgtggtgaccggcagcgagcagaagagaaaggtgctggaggccaccggccccggcggcagccaggccatcaacaacctgagaagaagcaacagcaccacccaggtgagccagcccagaagcggcagccccagacccaccgagcccaccgacttcctgatgctgttcgagggcagccccagcggcaagaagagacccgccagcctgagcaccgcccccagcgagaagggcgccacctggaacgtgctggacgaccagcccagaggcttcaccctgcccagcaacgccagaagcagcagcgccctggacagccccgccggccccagaagaaaggagtgcaccgtggccctggcccccaacttcaccgccaacaacagaagcaacaagggcgccgtgggcaactgcgtgaccaccatggtgcacaacagatacacccccagcgagagagccccccccctgaagagcagcaaccagaccgcccccagcctgaacaacatcatcaaggccgccacctgcgagggcagcgagagcagcggcttcggcaagctgcccaagaacgtgagcagcgccacccacagcgccagaaacaacaccggcggcagcaccggcctgcccagaagaaaggaggtgaccgaggaggaggccgagagattcatccaccaggtgaaccaggccaccgtgaccatccagagatggtacagacaccaggtgcagagaagaggcgccggcgccgccagactggagcacctgctgcaggccaagagagaggagcagagacagagaagcggcgagggcaccctgctggacctgcaccagcagaaggaggccgccagaagaaaggccagagaggagaaggccagacaggccagaagagccgccatccaggagctgcagcagaagagagccctgagagcccagaaggccagcaccgccgagagaggcccccccgagaaccccagagagaccagagtgcccggcatgagacagcccgcccaggagctgagccccacccccggcggcaccgcccaccaggccctgaaggccaacaacaccggcggcggcctgcccgccgccggccccggcgacagatgcctgcccaccagcgacagcagccccgagccccagcagccccccgaggacagaacccaggacgtgctggcccaggacgccgccggcgacaacctggagatgatggcccccagcagaggcagcgccaagagcagaggccccctggaggagctgctgcacaccctgcagctgctggagaaggagcccgacgtgctgcccagacccagaacccaccacagaggcagatacgcctgggccagcgaggaggacgacgccagcagcctgaccgccgacaacctggagaagttcggcaagctgagcgccttccccgagccccccgaggacggcaccctgctgagcgaggccaagctgcagagcatcatgagcttcctggacgagatggagaagagcggccaggaccagctggacagccagcaggagggctgggtgcccgaggccggccccggccccctggagctgggcagcgaggtgagcaccagcgtgatgagactgaagctggaggtggaggagaagaagcaggccatgctgctgctgcagagagccctggcccagcagagagacctgaccgccagaagagtgaaggagaccgagaaggccctgagcagacagctgcagagacagagagagcactacgaggccaccatccagagacacctggccttcatcgaccagctgatcgaggacaagaaggtgctgagcgagaagtgcgaggccgtggtggccgagctgaagcaggaggaccagagatgcaccgagagagtggcccaggcccaggcccagcacgagctggagatcaagaagctgaaggagctgatgagcgccaccgagaaggccagaagagagaagtggatcagcgagaagaccaagaagatcaaggaggtgaccgtgagaggcctggagcccgagatccagaagctgatcgccagacacaagcaggaggtgagaagactgaagagcctgcacgaggccgagctgctgcagagcgacgagagagccagccagagatgcctgagacaggccgaggagctgagagagcagctggagagagagaaggaggccctgggccagcaggagagagagagagccagacagagattccagcagcacctggagcaggagcagtgggccctgcagcagcagagacagagactgtacagcgaggtggccgaggagagagagagactgggccagcaggccgccagacagagagccgagctggaggagctgagacagcagctggaggagagcagcagcgccctgaccagagccctgagagccgagttcgagaagggcagagaggagcaggagagaagacaccagatggagctgaacaccctgaagcagcagctggagctggagagacaggcctgggaggccggcagaaccagaaaggaggaggcctggctgctgaacagagagcaggagctgagagaggagatcagaaagggcagagacaaggagatcgagctggtgatccacagactggaggccgacatggccctggccaaggaggagagcgagaaggccgccgagagcagaatcaagagactgagagacaagtacgaggccgagctgagcgagctggagcagagcgagagaaagctgcaggagagatgcagcgagctgaagggccagctgggcgaggccgagggcgagaacctgagactgcagggcctggtgagacagaaggagagagccctggaggacgcccaggccgtgaacgagcagctgagcagcgagagaagcaacctggcccaggtgatcagacaggagttcgaggacagactggccgccagcgaggaggagaccagacaggccaaggccgagctggccaccctgcaggccagacagcagctggagctggaggaggtgcacagaagagtgaagaccgccctggccagaaaggaggaggccgtgagcagcctgagaacccagcacgaggccgccgtgaagagagccgaccacctggaggagctgctggagcagcacagaagacccacccccagcaccaagtag

SEQ ID NO: 71141 - DNA, 699 bp, synthetic construct
  misc_feature 1..699: note = Description of Artificial Sequence: Synthetic coding sequence
  source 1..699: mol_type = other DNA
atggacgccctggtggaggacgacatctgcatcctgaaccacgagaaggcccacaagagagacaccgtgacccccgtgagcatctacagcggcgacgagagcgtggccagccacttcgccctggtgaccgcctacgaggacatcaagaagagactgaaggacagcgagaaggagaacagcctgctgaagaagagaatcagattcctggaggagaagctgatcgccagattcgaggaggagaccagcagcgtgggcagagagcaggtgaacaaggcctaccacgcctacagagaggtgtgcatcgacagagacaacctgaagagcaagctggacaagatgaacaaggacaacagcgagagcctgaaggtgctgaacgagcagctgcagagcaaggaggtggagctgctgcagctgagaaccgaggtggagacccagcaggtgatgagaaacctgaacccccccagcagcaactgggaggtggagaagctgagctgcgacctgaagatccacggcctggagcaggagctggagctgatgagaaaggagtgcagcgacctgaagatcgagctgcagaaggccaagcagaccgacccctaccaggaggacaacctgaagagcagagacctgcagaagctgagcatcagcagagtgagcgtggcccagcccggcgtgcagtggagaaaccacggcatcgcctag

SEQ ID NO: 71142 - DNA, 648 bp, synthetic construct
  misc_feature 1..648: note = Description of Artificial Sequence: Synthetic coding sequence
  source 1..648: mol_type = other DNA
atggacgccctggtggaggacgacatctgcatcctgaaccacgagaaggcccacaagagagacaccgtgacccccgtgagcatctacagcggcgacgagagcgtggccagccacttcgccctggtgaccgcctacgaggacatcaagaagagactgaaggacagcgagaaggagaacagcctgctgaagaagagaatcagattcctggaggagaagctgatcgccagattcgaggaggagaccagcagcgtgggcagagagcaggtgaacaaggcctaccacgcctacagagaggtgtgcatcgacagagacaacctgaagagcaagctggacaagatgaacaaggacaacagcgagagcctgaaggtgctgaacgagcagctgcagagcaaggaggtggagctgctgcagctgagaaccgaggtggagacccagcaggtgatgagaaacctgaacccccccagcagcaactgggaggtggagaagctgagctgcgacctgaagatccacggcctggagcaggagctggagctgatgagaaaggagtgcagcgacctgaagatcgagctgcagaaggccaagcagaccgacccctaccaggaggacaacctgaagagcagagacctgcagaagctgagcatcagctag

SEQ ID NO: 71143 - DNA, 288 bp, synthetic construct
  misc_feature 1..288: note = Description of Artificial Sequence: Synthetic coding sequence
  source 1..288: mol_type = other DNA
atggacgccctggtggaggacgacatctgcatcctgaaccacgagaaggcccacaagagagacaccgtgacccccgtgagcatctacagcggcgacgagagcgtggccagccacttcgccctggtgaccgcctacgaggacatcaagaagagactgaaggacagcgagaaggagaacagcctgctgaagaagagaatcagattcctggaggagaagctgatcgccagattcgaggaggagaccagcagcgtgggcagagagcaggtgaacaaggcctaccacgcctag

SEQ ID NO: 71144 - DNA, 732 bp, synthetic construct
  misc_feature 1..732: note = Description of Artificial Sequence: Synthetic coding sequence
  source 1..732: mol_type = other DNA
atggacgccctggtggaggacgacatctgcatcctgaaccacgagaaggcccacaagagagacaccgtgacccccgtgagcatctacagcggcgacgagagcgtggccagccacttcgccctggtgaccgcctacgaggacatcaagaagagactgaaggacagcgagaaggagaacagcctgctgaagaagagaatcagattcctggaggagaagctgatcgccagattcgaggaggagaccagcagcgtgggcagagagcaggtgaacaaggcctaccacgcctacagagaggtgtgcatcgacagagacaacctgaagagcaagctggacaagatgaacaaggacaacagcgagagcctgaaggtgctgaacgagcagctgcagagcaaggaggtggagctgctgcagctgagaaccgaggtggagacccagcaggtgatgagaaacctgaacccccccagcagcaactgggaggtggagaagctgagctgcgacctgaagatccacggcctggagcaggagctggagctgatgagaaaggagtgcagcgacctgaagatcgagctgcagaaggccaagcagaccgacccctaccaggaggacaacctgaagagcagagacctgcagaagctgagcatcagcagacagagcatctgcagcaccgcctggagcgccgtggcccagagctgggacagcatgaacttcgaggactgcagcctgttcgcctag

SEQ ID NO: 71145 - DNA, 732 bp, synthetic construct; identical to SEQ ID NO: 71144
  misc_feature 1..732: note = Description of Artificial Sequence: Synthetic coding sequence
  source 1..732: mol_type = other DNA

SEQ ID NO: 71146 - DNA, 1179 bp, synthetic construct
  misc_feature 1..1179: note = Description of Artificial Sequence: Synthetic coding sequence
  source 1..1179: mol_type = other DNA
atggacgccctggtggaggacgacatctgcatcctgaaccacgagaaggcccacaagagagacaccgtgacccccgtgagcatctacagcggcgacgagagcgtggccagccacttcgccctggtgaccgcctacgaggacatcaagaagagactgaaggacagcgagaaggagaacagcctgctgaagaagagaatcagattcctggaggagaagctgatcgccagattcgaggaggagaccagcagcgtgggcagagagcaggtgaacaaggcctaccacgcctacagagaggtgtgcatcgacagagacaacctgaagagcaagctggacaagatgaacaaggacaacagcgagagcctgaaggtgctgaacgagcagctgcagagcaaggaggtggagctgctgcagctgagaaccgaggtggagacccagcaggtgatgagaaacctgaacccccccagcagcaactgggaggtggagaagctgagctgcgacctgaagatccacggcctggagcaggagctggagctgatgagaaaggagtgcagcgacctgaagatcgagctgcagaaggccaagcagaccgacccctaccaggaggacaacctgaagagcagagacctgcagaagctgagcatcagcagcgacaacatgcagcacgcctactgggagctgaagagagagatgagcaacctgcacctggtgacccaggtgcaggccgagctgctgagaaagctgaagaccagcaccgccatcaagaaggcctgcgcccccgtgggctgcagcgaggacctgggcagagacagcaccaagctgcacctgatgaacttcaccgccacctacaccagacacccccccctgctgcccaacggcaaggccctgtgccacaccaccagcagccccctgcccggcgacgtgaaggtgctgagcgagaaggccatcctgcagagctggaccgacaacgagagaagcatccccaacgacggcacctgcttccaggagcacagcagctacggcagaaacagcctggaggacaacagctgggtgttccccagcccccccaagagcagcgagaccgccttcggcgagaccaagaccaagaccctgcccctgcccaacctgccccccctgcactacctggaccagcacaaccagaactgcctgtacaagaactag

SEQ ID NO: 71147 - DNA, 1269 bp, synthetic construct
  misc_feature 1..1269: note = Description of Artificial Sequence: Synthetic coding sequence
  source 1..1269: mol_type = other DNA
atggacgtgctgagccccggccagggcaacaacaccaccagcccccccgcccccttcgagaccggcggcaacaccaccggcatcagcgacgtgaccgtgagctaccaggtgatcaccagcctgctgctgggcaccctgatcttctgcgccgtgctgggcaacgcctgcgtggtggccgccatcgccctggagagaagcctgcagaacgtggccaactacctgatcggcagcctggccgtgaccgacctgatggtgagcgtgctggtgctgcccatggccgccctgtaccaggtgctgaacaagtggaccctgggccaggtgacctgcgacctgttcatcgccctggacgtgctgtgctgcaccagcagcatcctgcacctgtgcgccatcgccctggacagatactgggccatcaccgaccccatcgactacgtgaacaagagaacccccagaagagccgccgccctgatcagcctgacctggctgatcggcttcctgatcagcatcccccccatgctgggctggagaacccccgaggacagaagcgaccccgacgcctgcaccatcagcaaggaccacggctacaccatctacagcaccttcggcgccttctacatccccctgctgctgatgctggtgctgtacggcagaatcttcagagccgccagattcagaatcagaaagaccgtgaagaaggtggagaagaccggcgccgacaccagacacggcgccagccccgccccccagcccaagaagagcgtgaacggcgagagcggcagcagaaactggagactgggcgtggagagcaaggccggcggcgccctgtgcgccaacggcgccgtgagacagggcgacgacggcgccgccctggaggtgatcgaggtgcacagagtgggcaacagcaaggagcacctgcccctgcccagcgaggccggccccaccccctgcgcccccgccagcttcgagagaaagaacgagagaaacgccgaggccaagagaaagatggccctggccagagagagaaagaccgtgaagaccctgggcatcatcatgggcaccttcatcctgtgctggctgcccttcttcatcgtggccctggtgctgcccttctgcgagagcagctgccacatgcccaccctgctgggcgccatcatcaactggctgggctacagcaacagcctgctgaaccccgtgatctacgcctacttcaacaaggacttccagaacgccttcaagaagatcatcaagtgcaagttctgcagacagtag

SEQ ID NO: 71148 - DNA, 129 bp, synthetic construct
  misc_feature 1..129: note = Description of Artificial Sequence: Synthetic coding sequence
  source 1..129: mol_type = other DNA
atggacgtgctgagccccggccagggcaacaacaccaccagcccccccgcccccttcgagaccggcggcaacaccaccggcatcagcgacgtgaccgtgagctaccaggtgatcaccagcctgctgtag

SEQ ID NO: 71149 - DNA, 1173 bp, synthetic construct
  misc_feature 1..1173: note = Description of Artificial Sequence: Synthetic coding sequence
  source 1..1173: mol_type = other DNA
atggaggagcccggcgcccagtgcgccccccccccccccgccggcagcgagacctgggtgccccaggccaacctgagcagcgcccccagccagaactgcagcgccaaggactacatctaccaggacagcatcagcctgccctggaaggtgctgctggtgatgctgctggccctgatcaccctggccaccaccctgagcaacgccttcgtgatcgccaccgtgtacagaaccagaaagctgcacacccccgccaactacctgatcgccagcctggccgtgaccgacctgctggtgagcatcctggtgatgcccatcagcaccatgtacaccgtgaccggcagatggaccctgggccaggtggtgtgcgacttctggctgagcagcgacatcacctgctgcaccgccagcatcctgcacctgtgcgtgatcgccctggacagatactgggccatcaccgacgccgtggagtacagcgccaagagaacccccaagagagccgccgtgatgatcgccctggtgtgggtgttcagcatcagcatcagcctgccccccttcttctggagacaggccaaggccgaggaggaggtgagcgagtgcgtggtgaacaccgaccacatcctgtacaccgtgtacagcaccgtgggcgccttctacttccccaccctgctgctgatcgccctgtacggcagaatctacgtggaggccagaagcagaatcctgaagcagacccccaacagaaccggcaagagactgaccagagcccagctgatcaccgacagccccggcagcaccagcagcgtgaccagcatcaacagcagagtgcccgacgtgcccagcgagagcggcagccccgtgtacgtgaaccaggtgaaggtgagagtgagcgacgccctgctggagaagaagaagctgatggccgccagagagagaaaggccaccaagaccctgggcatcatcctgggcgccttcatcgtgtgctggctgcccttcttcatcatcagcctggtgatgcccatctgcaaggacgcctgctggttccacctggccatcttcgacttcttcacctggctgggctacctgaacagcctgatcaaccccatcatctacaccatgagcaacgaggacttcaagcaggccttccacaagctgatcagattcaagtgcaccagctag

SEQ ID NO: 71150 - DNA, 1134 bp, synthetic construct
  misc_feature 1..1134: note = Description of Artificial Sequence: Synthetic coding sequence
  source 1..1134: mol_type = other DNA
atgagccccctgaaccagagcgccgagggcctgccccaggaggccagcaacagaagcctgaacgccaccgagaccagcgaggcctgggaccccagaaccctgcaggccctgaagatcagcctggccgtggtgctgagcgtgatcaccctggccaccgtgctgagcaacgccttcgtgctgaccaccatcctgctgaccagaaagctgcacacccccgccaactacctgatcggcagcctggccaccaccgacctgctggtgagcatcctggtgatgcccatcagcatcgcctacaccatcacccacacctggaacttcggccagatcctgtgcgacatctggctgagcagcgacatcacctgctgcaccgccagcatcctgcacctgtgcgtgatcgccctggacagatactgggccatcaccgacgccctggagtacagcaagagaagaaccgccggccacgccgccaccatgatcgccatcgtgtgggccatcagcatctgcatcagcatcccccccctgttctggagacaggccaaggcccaggaggagatgagcgactgcctggtgaacaccagccagatcagctacaccatctacagcacctgcggcgccttctacatccccagcgtgctgctgatcatcctgtacggcagaatctacagagccgccagaaacagaatcctgaacccccccagcctgtacggcaagagattcaccaccgcccacctgatcaccggcagcgccggcagcagcctgtgcagcctgaacagcagcctgcacgagggccacagccacagcgccggcagccccctgttcttcaaccacgtgaagatcaagctggccgacagcgccctggagagaaagagaatcagcgccgccagagagagaaaggccaccaagatcctgggcatcatcctgggcgccttcatcatctgctggctgcccttcttcgtggtgagcctggtgctgcccatctgcagagacagctgctggatccaccccgccctgttcgacttcttcacctggctgggctacctgaacagcctgatcaaccccatcatctacaccgtgttcaacgaggagttcagacaggccttccagaagatcgtgcccttcagaaaggccagctag

SEQ ID NO: 71151 - DNA, 1134 bp, synthetic construct; identical to SEQ ID NO: 71150
  misc_feature 1..1134: note = Description of Artificial Sequence: Synthetic coding sequence
  source 1..1134: mol_type = other DNA

SEQ ID NO: 71152 - DNA, 1098 bp, synthetic construct
  misc_feature 1..1098: note = Description of Artificial Sequence: Synthetic coding sequence
  source 1..1098: mol_type = other DNA
atgaacatcaccaactgcaccaccgaggccagcatggccatcagacccaagaccatcaccgagaagatgctgatctgcatgaccctggtggtgatcaccaccctgaccaccctgctgaacctggccgtgatcatggccatcggcaccaccaagaagctgcaccagcccgccaactacctgatctgcagcctggccgtgaccgacctgctggtggccgtgctggtgatgcccctgagcatcatctacatcgtgatggacagatggaagctgggctacttcctgtgcgaggtgtggctgagcgtggacatgacctgctgcacctgcagcatcctgcacctgtgcgtgatcgccctggacagatactgggccatcaccaacgccatcgagtacgccagaaagagaaccgccaagagagccgccctgatgatcctgaccgtgtggaccatcagcatcttcatcagcatgccccccctgttctggagaagccacagaagactgagccccccccccagccagtgcaccatccagcacgaccacgtgatctacaccatctacagcaccctgggcgccttctacatccccctgaccctgatcctgatcctgtactacagaatctaccacgccgccaagagcctgtaccagaagagaggcagcagcagacacctgagcaacagaagcaccgacagccagaacagcttcgccagctgcaagctgacccagaccttctgcgtgagcgacttcagcaccagcgaccccaccaccgagttcgagaagttccacgccagcatcagaatcccccccttcgacaacgacctggaccaccccggcgagagacagcagatcagcagcaccagagagagaaaggccgccagaatcctgggcctgatcctgggcgccttcatcctgagctggctgcccttcttcatcaaggagctgatcgtgggcctgagcatctacaccgtgagcagcgaggtggccgacttcctgacctggctgggctacgtgaacagcctgatcaaccccctgctgtacaccagcttcaacgaggacttcaagctggccttcaagaagctgatcagatgcagagagcacacctag

SEQ ID NO: 71153 - DNA, 1098 bp, synthetic construct; identical to SEQ ID NO: 71152
  misc_feature 1..1098: note = Description of Artificial Sequence: Synthetic coding sequence
  source 1..1098: mol_type = other DNA

SEQ ID NO: 71154 - DNA, 1101 bp, synthetic construct
  misc_feature 1..1101: note = Description of Artificial Sequence: Synthetic coding sequence
  source 1..1101: mol_type = other DNA
atggacttcctgaacagcagcgaccagaacctgaccagcgaggagctgctgaacagaatgcccagcaagatcctggtgagcctgaccctgagcggcctggccctgatgaccaccaccatcaacagcctggtgatcgccgccatcatcgtgaccagaaagctgcaccaccccgccaactacctgatctgcagcctggccgtgaccgacttcctggtggccgtgctggtgatgcccttcagcatcgtgtacatcgtgagagagagctggatcatgggccaggtggtgtgcgacatctggctgagcgtggacatcacctgctgcacctgcagcatcctgcacctgagcgccatcgccctggacagatacagagccatcaccgacgccgtggagtacgccagaaagagaacccccaagcacgccggcatcatgatcaccatcgtgtggatcatcagcgtgttcatcagcatgccccccctgttctggagacaccagggcaccagcagagacgacgagtgcatcatcaagcacgaccacatcgtgagcaccatctacagcaccttcggcgccttctacatccccctggccctgatcctgatcctgtactacaagatctacagagccgccaagaccctgtaccacaagagacaggccagcagaatcgccaaggaggaggtgaacggccaggtgctgctggagagcggcgagaagagcaccaagagcgtgagcaccagctacgtgctggagaagagcctgagcgaccccagcaccgacttcgacaagatccacagcaccgtgagaagcctgagaagcgagttcaagcacgagaagagctggagaagacagaagatcagcggcaccagagagagaaaggccgccaccaccctgggcctgatcctgggcgccttcgtgatctgctggctgcccttcttcgtgaaggagctggtggtgaacgtgtgcgacaagtgcaagatcagcgaggagatgagcaacttcctggcctggctgggctacctgaacagcctgatcaaccccctgatctacaccatcttcaacgaggacttcaagaaggccttccagaagctggtgagatgcagatgctag

SEQ ID NO: 71155 - DNA, 1416 bp, synthetic construct
  misc_feature 1..1416: note = Description of Artificial Sequence: Synthetic coding sequence
  source 1..1416: mol_type = other DNA
atggacatcctgtgcgaggagaacaccagcctgagcagcaccaccaacagcctgatgcagctgaacgacgacaccagactgtacagcaacgacttcaacagcggcgaggccaacaccagcgacgccttcaactggaccgtggacagcgagaacagaaccaacctgagctgcgagggctgcctgagccccagctgcctgagcctgctgcacctgcaggagaagaactggagcgccctgctgaccgccgtggtgatcatcctgaccatcgccggcaacatcctggtgatcatggccgtgagcctggagaagaagctgcagaacgccaccaactacttcctgatgagcctggccatcgccgacatgctgctgggcttcctggtgatgcccgtgagcatgctgaccatcctgtacggctacagatggcccctgcccagcaagctgtgcgccgtgtggatctacctggacgtgctgttcagcaccgccagcatcatgcacctgtgcgccatcagcctggacagatacgtggccatccagaaccccatccaccacagcagattcaacagcagaaccaaggccttcctgaagatcatcgccgtgtggaccatcagcgtgggcatcagcatgcccatccccgtgttcggcctgcaggacgacagcaaggtgttcaaggagggcagctgcctgctggccgacgacaacttcgtgctgatcggcagcttcgtgagcttcttcatccccctgaccatcatggtgatcacctacttcctgaccatcaagagcctgcagaaggaggccaccctgtgcgtgagcgacctgggcaccagagccaagctggccagcttcagcttcctgccccagagcagcctgagcagcgagaagctgttccagagaagcatccacagagagcccggcagctacaccggcagaagaaccatgcagagcatcagcaacgagcagaaggcctgcaaggtgctgggcatcgtgttcttcctgttcgtggtgatgtggtgccccttcttcatcaccaacatcatggccgtgatctgcaaggagagctgcaacgaggacgtgatcggcgccctgctgaacgtgttcgtgtggatcggctacctgagcagcgccgtgaaccccctggtgtacaccctgttcaacaagacctacagaagcgccttcagcagatacatccagtgccagtacaaggagaacaagaagcccctgcagctgatcctggtgaacaccatccccgccctggcctacaagagcagccagctgcagatgggccagaagaagaacagcaagcaggacgccaagaccaccgacaacgactgcagcatggtggccctgggcaagcagcacagcgaggaggccagcaaggacaacagcgacggcgtgaacgagaaggtgagctgcgtgtag

SEQ ID NO: 71156 - DNA, 1416 bp, synthetic construct; identical to SEQ ID NO: 71155
  misc_feature 1..1416: note = Description of Artificial Sequence: Synthetic coding sequence
  source 1..1416: mol_type = other DNA

SEQ ID NO: 71157 - DNA, 1164 bp, synthetic construct
  misc_feature 1..1164: note = Description of Artificial Sequence: Synthetic coding sequence
  source 1..1164: mol_type = other DNA
atgcagttcctgaagagcgccaagcagaagcccaactactaccacatcatgctggtggaggaccaggaggagggcaccctgcaccagttcaactactgcgagagatgcagcgagagccagaacaacaagtgcatcagctgcgtggaccccgaggacaagtggtacagatggcccctgcccagcaagctgtgcgccgtgtggatctacctggacgtgctgttcagcaccgccagcatcatgcacctgtgcgccatcagcctggacagatacgtggccatccagaaccccatccaccacagcagattcaacagcagaaccaaggccttcctgaagatcatcgccgtgtggaccatcagcgtgggcatcagcatgcccatccccgtgttcggcctgcaggacgacagcaaggtgttcaaggagggcagctgcctgctggccgacgacaacttcgtgctgatcggcagcttcgtgagcttcttcatccccctgaccatcatggtgatcacctacttcctgaccatcaagagcctgcagaaggaggccaccctgtgcgtgagcgacctgggcaccagagccaagctggccagcttcagcttcctgccccagagcagcctgagcagcgagaagctgttccagagaagcatccacagagagcccggcagctacaccggcagaagaaccatgcagagcatcagcaacgagcagaaggcctgcaaggtgctgggcatcgtgttcttcctgttcgtggtgatgtggtgccccttcttcatcaccaacatcatggccgtgatctgcaaggagagctgcaacgaggacgtgatcggcgccctgctgaacgtgttcgtgtggatcggctacctgagcagcgccgtgaaccccctggtgtacaccctgttcaacaagacctacagaagcgccttcagcagatacatccagtgccagtacaaggagaacaagaagcccctgcagctgatcctggtgaacaccatccccgccctggcctacaagagcagccagctgcagatgggccagaagaagaacagcaagcaggacgccaagaccaccgacaacgactgcagcatggtggccctgggcaagcagcacagcgaggaggccagcaaggacaacagcgacggcgtgaacgagaaggtgagctgcgtgtag

SEQ ID NO: 71158 - DNA, 1446 bp, synthetic construct
  misc_feature 1..1446: note = Description of Artificial Sequence: Synthetic coding sequence
  source 1..1446: mol_type = other DNA
atggccctgagctacagagtgagcgagctgcagagcaccatccccgagcacatcctgcagagcaccttcgtgcacgtgatcagcagcaactggagcggcctgcagaccgagagcatccccgaggagatgaagcagatcgtggaggagcagggcaacaagctgcactgggccgccctgctgatcctgatggtgatcatccccaccatcggcggcaacaccctggtgatcctggccgtgagcctggagaagaagctgcagtacgccaccaactacttcctgatgagcctggccgtggccgacctgctggtgggcctgttcgtgatgcccatcgccctgctgaccatcatgttcgaggccatgtggcccctgcccctggtgctgtgccccgcctggctgttcctggacgtgctgttcagcaccgccagcatcatgcacctgtgcgccatcagcgtggacagatacatcgccatcaagaagcccatccaggccaaccagtacaacagcagagccaccgccttcatcaagatcaccgtggtgtggctgatcagcatcggcatcgccatccccgtgcccatcaagggcatcgagaccgacgtggacaaccccaacaacatcacctgcgtgctgaccaaggagagattcggcgacttcatgctgttcggcagcctggccgccttcttcacccccctggccatcatgatcgtgacctacttcctgaccatccacgccctgcagaagaaggcctacctggtgaagaacaagcccccccagagactgacctggctgaccgtgagcaccgtgttccagagagacgagaccccctgcagcagccccgagaaggtggccatgctggacggcagcagaaaggacaaggccctgcccaacagcggcgacgagaccctgatgagaagaaccagcaccatcggcaagaagagcgtgcagaccatcagcaacgagcagagagccagcaaggtgctgggcatcgtgttcttcctgttcctgctgatgtggtgccccttcttcatcaccaacatcaccctggtgctgtgcgacagctgcaaccagaccaccctgcagatgctgctggagatcttcgtgtggatcggctacgtgagcagcggcgtgaaccccctggtgtacaccctgttcaacaagaccttcagagacgccttcggcagatacatcacctgcaactacagagccaccaagagcgtgaagaccctgagaaagagaagcagcaagatctacttcagaaaccccatggccgagaacagcaagttcttcaagaagcacggcatcagaaacggcatcaaccccgccatgtaccagagccccatgagactgagaagcagcaccatccagagcagcagcatcatcctgctggacaccctgctgctgaccgagaacgagggcgacaagaccgaggagcaggtgagctacgtgtag

SEQ ID NO: 71159 - DNA, 195 bp, synthetic construct
  misc_feature 1..195: note = Description of Artificial Sequence: Synthetic coding sequence
  source 1..195: mol_type = other DNA
atggtgatcatccccaccatcggcggcaacaccctggtgatcctggccgtgagcctggagaagaagctgcagtacgccaccaactacttcctgatgagcctggccgtggccgacctgctggtgggcctgttcgtgatgcccatcgccctgctgaccatcatgttcggcatcgccatccccgtgcccatcaagtag

SEQ ID NO: 71160 - DNA, 1377 bp, synthetic construct
  misc_feature 1..1377: note = Description of Artificial Sequence: Synthetic coding sequence
  source 1..1377: mol_type = other DNA
atggtgaacctgagaaacgccgtgcacagcttcctggtgcacctgatcggcctgctggtgtggcagtgcgacatcagcgtgagccccgtggccgccatcgtgaccgacatcttcaacaccagcgacggcggcagattcaagttccccgacggcgtgcagaactggcccgccctgagcatcgtgatcatcatcatcatgaccatcggcggcaacatcctggtgatcatggccgtgagcatggagaagaagctgcacaacgccaccaactacttcctgatgagcctggccatcgccgacatgctggtgggcctgctggtgatgcccctgagcctgctggccatcctgtacgactacgtgtggcccctgcccagatacctgtgccccgtgtggatcagcctggacgtgctgttcagcaccgccagcatcatgcacctgtgcgccatcagcctggacagatacgtggccatcagaaaccccatcgagcacagcagattcaacagcagaaccaaggccatcatgaagatcgccatcgtgtgggccatcagcatcggcgtgagcgtgcccatccccgtgatcggcctgagagacgaggagaaggtgttcgtgaacaacaccacctgcgtgctgaacgaccccaacttcgtgctgatcggcagcttcgtggccttcttcatccccctgaccatcatggtgatcacctactgcctgaccatctacgtgctgagaagacaggccctgatgctgctgcacggccacaccgaggagccccccggcctgagcctggacttcctgaagtgctgcaagagaaacaccgccgaggaggagaacagcgccaaccccaaccaggaccagaacgccagaagaagaaagaagaaggagagaagacccagaggcaccatgcaggccatcaacaacgagagaaaggccagcaaggtgctgggcatcgtgttcttcgtgttcctgatcatgtggtgccccttcttcatcaccaacatcctgagcgtgctgtgcgagaagagctgcaaccagaagctgatggagaagctgctgaacgtgttcgtgtggatcggctacgtgtgcagcggcatcaaccccctggtgtacaccctgttcaacaagatctacagaagagccttcagcaactacctgagatgcaactacaaggtggagaagaagccccccgtgagacagatccccagagtggccgccaccgccctgagcggcagagagctgaacgtgaacatctacagacacaccaacgagcccgtgatcgagaaggccagcgacaacgagcccggcatcgagatgcaggtggagaacctggagctgcccgtgaaccccagcagcgtggtgagcgagagaatcagcagcgtgtag

SEQ ID NO: 71161 - DNA, 747 bp, synthetic construct
  misc_feature 1..747: note = Description of Artificial Sequence: Synthetic coding sequence
  source 1..747: mol_type = other DNA
atggtgaacctgagaaacgccgtgcacagcttcctggtgcacctgatcggcctgctggtgtggcagtgcgacatcagcgtgagccccgtggccgccatcgtgaccgacatcttcaacaccagcgacggcggcagattcaagttccccgacggcgtgcagaactggcccgccctgagcatcgtgatcatcatcatcatgaccatcggcggcaacatcctggtgatcatggccgtgagcatggagaagaagctgcacaacgccaccaactacttcctgatgagcctggccatcgccgacatgctggtgggcctgctggtgatgcccctgagcctgctggccatcctgtacgactacgtgtggcccctgcccagatacctgtgccccgtgtggatcagcctggacgtgctgttcagcaccgccagcatcatgcacctgtgcgccatcagcctggacagatgcatcagcagctacccctgcgactggaccgagggcagaagaaagggcgtgagagagcagcacgacgtgagagcccagagacccaagttcagaagctactgggtgctgagaagcttcctgcacaccgccgacgactacggcgactacgtgctgcccgaccacctgagaagcgcccccaccagcttcgacgtgaccgccagaccccacagaggcaccgcctggaccaagagcggcttccccgaggtgctgcaggaggagtacggcagaggcagagagctgtgcaagccctag

SEQ ID NO: 71162 - DNA, 1377 bp, synthetic construct; identical to SEQ ID NO: 71160
  misc_feature 1..1377: note = Description of Artificial Sequence: Synthetic coding sequence
  source 1..1377: mol_type = other DNA

SEQ ID NO: 71163 - DNA, 840 bp, synthetic construct
  misc_feature 1..840: note = Description of Artificial Sequence: Synthetic coding sequence
  source 1..840: mol_type = other DNA
atggccagcatgagcatcgtgaaggccaccagcaacaccatcagccagtgcggctggagcgccagcgccaactggacccccagcatcagccccagcatggacagaggcgagagaagccccagcgccctgagccccacccaggtggccatcagaagaagatgcagacccagcccctacgtggtgaacttcctggtgcccagcggcatcctgatcgccatcgacgccctgagcttctacctgcccctggagagcggcaactgcgcccccttcaagatgaccgtgctgctgggctacagcgtgttcctgctgatgatgaacgacctgctgcccgccaccagcaccagcagccacgccagcctggtgagaccccaccccagcagagaccagaagagaggcgtgtacttcgccctgtgcctgagcctgatggtgggcagcctgctggagaccatcttcatcacccacctgctgcacgtggccaccacccagcccctgcccctgcccagatggctgcacagcctgctgctgcactgcaccggccagggcagatgctgccccaccgccccccagaagggcaacaagggccccggcctgacccccacccacctgcccggcgtgaaggagcccgaggtgagcgccggccagatgcccggccccggcgaggccgagctgaccggcggcagcgagtggaccagagcccagagagagcacgaggcccagaagcagcacagcgtggagctgtgggtgcagttcagccacgccatggacgccctgctgttcagactgtacctgctgttcatggccagcagcatcatcaccgtgatctgcctgtggaacacctag

SEQ ID NO: 71164 - DNA, 1365 bp, synthetic construct
  misc_feature 1..1365: note = Description of Artificial Sequence: Synthetic coding sequence
  source 1..1365: mol_type = other DNA
atgcagaagcacagccccggcccccccgccctggccctgctgagccagagcctgctgaccaccggcaacggcgacaccctgatcatcaactgccccggcttcggccagcacagagtggaccccgccgccttccaggccgtgttcgacagaaaggccatcggccccgtgaccaactacagcgtggccacccacgtgaacatcagcttcaccctgagcgccatctggaactgctacagcagaatccacaccttcaactgccaccacgccagaccctggcacaaccagttcgtgcagtggaaccccgacgagtgcggcggcatcaagaagagcggcatggccaccgagaacctgtggctgagcgacgtgttcatcgaggagagcgtggaccagacccccgccggcctgatggccagcatgagcatcgtgaaggccaccagcaacaccatcagccagtgcggctggagcgccagcgccaactggacccccagcatcagccccagcatggacagagccagagcctggagaagaatgagcagaagcttccagatccaccacagaaccagcttcagaaccagaagagagtgggtgctgctgggcatccagaagagaaccatcaaggtgaccgtggccaccaaccagtacgagcaggccatcttccacgtggccatcagaagaagatgcagacccagcccctacgtggtgaacttcctggtgcccagcggcatcctgatcgccatcgacgccctgagcttctacctgcccctggagagcggcaactgcgcccccttcaagatgaccgtgctgctgggctacagcgtgttcctgctgatgatgaacgacctgctgcccgccaccagcaccagcagccacgccagcctggtggcccccctggccctgatgcagacccccctgcccgccggcgtgtacttcgccctgtgcctgagcctgatggtgggcagcctgctggagaccatcttcatcacccacctgctgcacgtggccaccacccagcccctgcccctgcccagatggctgcacagcctgctgctgcactgcaccggccagggcagatgctgccccaccgccccccagaagggcaacaagggccccggcctgacccccacccacctgcccggcgtgaaggagcccgaggtgagcgccggccagatgcccggccccggcgaggccgagctgaccggcggcagcgagtggaccagagcccagagagagcacgaggcccagaagcagcacagcgtggagctgtgggtgcagttcagccacgccatggacgccctgctgttcagactgtacctgctgttcatggccagcagcatcatcaccgtgatctgcctgtggaacacctag

SEQ ID NO: 71165 - DNA, 1215 bp, synthetic construct
  misc_feature 1..1215: note = Description of Artificial Sequence: Synthetic coding sequence
  source 1..1215: mol_type = other DNA
atggagagaggctggttccacggcaagggcttcctgctgggcttcatcctgcacctgctgctgcaggacagccacctgcagctggtgaccagcttcctgtggctgaacatgtggaaccccgacgagtgcggcggcatcaagaagagcggcatggccaccgagaacctgtggctgagcgacgtgttcatcgaggagagcgtggaccagacccccgccggcctgatggccagcatgagcatcgtgaaggccaccagcaacaccatcagccagtgcggctggagcgccagcgccaactggacccccagcatcagccccagcatggacagaggcgagagaagccccagcgccctgagccccacccaggtgaccagagcctggagaagaatgagcagaagcttccagatccaccacagaaccagcttcagaaccagaagagagtgggtgctgctgggcatccagaagagaaccatcaaggtgaccgtggccaccaaccagtacgagcaggccatcttccacgtggccatcagaagaagatgcagacccagcccctacgtggtgaacttcctggtgcccagcggcatcctgatcgccatcgacgccctgagcttctacctgcccctggagagcggcaactgcgcccccttcaagatgaccgtgctgctgggctacagcgtgttcctgctgatgatgaacgacctgctgcccgccaccagcaccagcagccacgccagcctggtgagaccccaccccagcagagaccagaagagaggcgtgtacttcgccctgtgcctgagcctgatggtgggcagcctgctggagaccatcttcatcacccacctgctgcacgtggccaccacccagcccctgcccctgcccagatggctgcacagcctgctgctgcactgcaccggccagggcagatgctgccccaccgccccccagaagggcaacaagggccccggcctgacccccacccacctgcccggcgtgaaggagcccgaggtgagcgccggccagatgcccggccccggcgaggccgagctgaccggcggcagcgagtggaccagagcccagagagagcacgaggcccagaagcagcacagcgtggagctgtgggtgcagttcagccacgccatggacgccctgctgttcagactgtacctgctgttcatggccagcagcatcatcaccgtgatctgcctgtggaacacctag

SEQ ID NO: 71166 - DNA, 702 bp, synthetic construct
  misc_feature 1..702: note = Description of Artificial Sequence: Synthetic coding sequence
  source 1..702: mol_type = other DNA
atggtggccatcagaagaagatgcagacccagcccctacgtggtgaacttcctggtgcccagcggcatcctgatcgccatcgacgccctgagcttctacctgcccctggagagcggcaactgcgcccccttcaagatgaccgtgctgctgggctacagcgtgttcctgctgatgatgaacgacctgctgcccgccaccagcaccagcagccacgccagcctggtgagaccccaccccagcagagaccagaagagaggcgtgtacttcgccctgtgcctgagcctgatggtgggcagcctgctggagaccatcttcatcacccacctgctgcacgtggccaccacccagcccctgcccctgcccagatggctgcacagcctgctgctgcactgcaccggccagggcagatgctgccccaccgccccccagaagggcaacaagggccccggcctgacccccacccacctgcccggcgtgaaggagcccgaggtgagcgccggccagatgcccggccccggcgaggccgagctgaccggcggcagcgagtggaccagagcccagagagagcacgaggcccagaagcagcacagcgtggagctgtgggtgcagttcagccacgccatggacgccctgctgttcagactgtacctgctgttcatggccagcagcatcatcaccgtgatctgcctgtggaacacctag

SEQ ID NO: 71167 - DNA, 1344 bp, synthetic construct
  misc_feature 1..1344: note = Description of Artificial Sequence: Synthetic coding sequence
  source 1..1344: mol_type = other DNA
atggagggcggctggcccgccagacagagcgccctgctgtgcctgaccgtgagcctgctgctgcagggcagaggcgacgccttcaccatcaactgcagcggcttcgaccagcacggcgtggaccccgccgtgttccaggccgtgttcgacagaaaggccttcagacccttcaccaactacagcatccccaccagagtgaacatcagcttcaccctgagcgccatcctgggcgtggacgcccagctgcagctgctgaccagcttcctgtggatggacctggtgtgggacaaccccttcatcaactggaaccccaaggagtgcgtgggcatcaacaagctgaccgtgctggccgagaacctgtggctgcccgacatcttcatcgtggagagcatggacgtggaccagacccccagcggcctgaccgcctacatcagcagcgagggcagaatcaagtacgacaagcccatgagagtgaccagcatctgcaacctggacatcttctacttccccttcgaccagcagaactgcaccttcaccttcagcagcttcctgtacaccgtggacagcatgctgctgggcatggacaaggaggtgtgggagatcaccgacaccagcagaaaggtgatccagacccagggcgagtgggagctgctgggcatcaacaaggccacccccaagatgagcatgggcaacaacctgtacgaccagatcatgttctacgtggccatcagaagaagacccagcctgtacatcatcaacctgctggtgcccagcagcttcctggtggccatcgacgccctgagcttctacctgcccgccgagagcgagaacagagcccccttcaagatcaccctgctgctgggctacaacgtgttcctgctgatgatgaacgacctgctgcccgccagcggcacccccctgatcagcgtgtacttcgccctgtgcctgagcctgatggtggtgagcctgctggagaccgtgttcatcacctacctgctgcacgtggccaccacccagcccccccccatgcccagatggctgcacagcctgctgctgcactgcaccagccccggcagatgctgccccaccgccccccagaagggcaacaagggcctgggcctgaccctgacccacctgcccggccccaaggagcccggcgagctggccggcaagaagctgggccccagagagaccgagcccgacggcggcagcggctggaccaagacccagctgatggagctgtgggtgcagttcagccacgccatggacaccctgctgttcagactgtacctgctgttcatggccagcagcatcctgaccgtgatcgtgctgtggaacacctag

SEQ ID NO: 71168 - DNA, 1416 bp, synthetic construct
  misc_feature 1..1416: note = Description of Artificial Sequence: Synthetic coding sequence
  source 1..1416: mol_type = other DNA
atgctggccttcatcctgagcagagccacccccagacccgccctgggccccctgagctacagagagcacagagtggccctgctgcacctgacccacagcatgagcaccaccggcagaggcgtgaccttcaccatcaactgcagcggcttcggccagcacggcgccgaccccaccgccctgaacagcgtgttcaacagaaagcccttcagacccgtgaccaacatcagcgtgcccacccaggtgaacatcagcttcgccatgagcgccatcctggacgtgaacgagcagctgcacctgctgagcagcttcctgtggctggagatggtgtgggacaaccccttcatcagctggaaccccgaggagtgcgagggcatcaccaagatgagcatggccgccaagaacctgtggctgcccgacatcttcatcatcgagctgatggacgtggacaagacccccaagggcctgaccgcctacgtgagcaacgagggcagaatcagatacaagaagcccatgaaggtggacagcatctgcaacctggacatcttctacttccccttcgaccagcagaactgcaccctgaccttcagcagcttcctgtacaccgtggacagcatgctgctggacatggagaaggaggtgtgggagatcaccgacgccagcagaaacatcctgcagacccacggcgagtgggagctgctgggcctgagcaaggccaccgccaagctgagcagaggcggcaacctgtacgaccagatcgtgttctacgtggccatcagaagaagacccagcctgtacgtgatcaacctgctggtgcccagcggcttcctggtggccatcgacgccctgagcttctacctgcccgtgaagagcggcaacagagtgcccttcaagatcaccctgctgctgggctacaacgtgttcctgctgatgatgagcgacctgctgcccaccagcggcacccccctgatcggcgtgtacttcgccctgtgcctgagcctgatggtgggcagcctgctggagaccatcttcatcacccacctgctgcacgtggccaccacccagcccccccccctgcccagatggctgcacagcctgctgctgcactgcaacagccccggcagatgctgccccaccgccccccagaaggagaacaagggccccggcctgacccccacccacctgcccggcgtgaaggagcccgaggtgagcgccggccagatgcccggccccgccgaggccgagctgaccggcggcagcgagtggaccagagcccagagagagcacgaggcccagaagcagcacagcgtggagctgtggctgcagttcagccacgccatggacgccatgctgttcagactgtacctgctgttcatggccagcagcatcatcaccgtgatctgcctgtggaacacctag

SEQ ID NO: 71169 - DNA, 1371 bp, synthetic construct
  misc_feature 1..1371: note = Description of Artificial Sequence: Synthetic coding sequence
  source 1..1371: mol_type = other DNA
atggagggcagctggttccacagaaagagattcagcttctacctgctgctgggcttcctgctgcagggcagaggcgtgaccttcaccatcaactgcagcggcttcggccagcacggcgccgaccccaccgccctgaacagcgtgttcaacagaaagcccttcagacccgtgaccaacatcagcgtgcccacccaggtgaacatcagcttcgccatgagcgccatcctggacgtgaacgagcagctgcacctgctgagcagcttcctgtggctggagatggtgtgggacaaccccttcatcagctggaaccccgaggagtgcgagggcatcaccaagatgagcatggccgccaagaacctgtggctgcccgacatcttcatcatcgagctgatggacgtggacaagacccccaagggcctgaccgcctacgtgagcaacgagggcagaatcagatacaagaagcccatgaaggtggacagcatctgcaacctggacatcttctacttccccttcgaccagcagaactgcaccctgaccttcagcagcttcctgtacaccgtggacagcatgctgctggacatggagaaggaggtgtgggagatcaccgacgccagcagaaacatcctgcagacccacggcgagtgggagctgctgggcctgagcaaggccaccgccaagctgagcagaggcggcaacctgtacgaccagatcgtgttctacgtggccatcagaagaagacccagcctgtacgtgatcaacctgctggtgcccagcggcttcctggtggccatcgacgccctgagcttctacctgcccgtgaagagcggcaacagagtgcccttcaagatcaccctgctgctgggctacaacgtgttcctgctgatgatgagcgacctgctgcccaccagcggcacccccctgatcggcgtgtacttcgccctgtgcctgagcctgatggtgggcagcctgctggagaccatcttcatcacccacctgctgcacgtggccaccacccagcccccccccctgcccagatggctgcacagcctgctgctgcactgcaacagccccggcagatgctgccccaccgccccccagaaggagaacaagggccccggcctgacccccacccacctgcccggcgtgaaggagcccgaggtgagcgccggccagatgcccggccccgccgaggccgagctgaccggcggcagcgagtggaccagagcccagagagagcacgaggcccagaagcagcacagcgtggagctgtggctgcagttcagccacgccatggacgccatgctgttcagactgtacctgctgttcatggccagcagcatcatcaccgtgatctgcctgtggaacacctag

SEQ ID NO: 71170 - DNA, 1326 bp, synthetic construct
  misc_feature 1..1326: note = Description of Artificial Sequence: Synthetic coding sequence
  source 1..1326: mol_type = other DNA
atggagggcagctggttccacagaaagagattcagcttctacctgctgctgggcttcctgctgcagggcagaggcgtgaccttcaccatcaactgcagcggcttcggccagcacggcgccgaccccaccgccctgaacagcgtgttcaacagaaagcccttcagacccgtgaccaacatcagcgtgcccacccaggtgaacatcagcttcgccatgagcgccatcctggacgtggtgtgggacaaccccttcatcagctggaaccccgaggagtgcgagggcatcaccaagatgagcatggccgccaagaacctgtggctgcccgacatcttcatcatcgagctgatggacgtggacaagacccccaagggcctgaccgcctacgtgagcaacgagggcagaatcagatacaagaagcccatgaaggtggacagcatctgcaacctggacatcttctacttccccttcgaccagcagaactgcaccctgaccttcagcagcttcctgtacaccgtggacagcatgctgctggacatggagaaggaggtgtgggagatcaccgacgccagcagaaacatcctgcagacccacggcgagtgggagctgctgggcctgagcaaggccaccgccaagctgagcagaggcggcaacctgtacgaccagatcgtgttctacgtggccatcagaagaagacccagcctgtacgtgatcaacctgctggtgcccagcggcttcctggtggccatcgacgccctgagcttctacctgcccgtgaagagcggcaacagagtgcccttcaagatcaccctgctgctgggctacaacgtgttcctgctgatgatgagcgacctgctgcccaccagcggcacccccctgatcggcgtgtacttcgccctgtgcctgagcctgatggtgggcagcctgctggagaccatcttcatcacccacctgctgcacgtggccaccacccagcccccccccctgcccagatggctgcacagcctgctgctgcactgcaacagccccggcagatgctgccccaccgccccccagaaggagaacaagggccccggcctgacccccacccacctgcccggcgtgaaggagcccgaggtgagcgccggccagatgcccggccccgccgaggccgagctgaccggcggcagcgagtggaccagagcccagagagagcacgaggcccagaagcagcacagcgtggagctgtggctgcagttcagccacgccatggacgccatgctgttcagactgtacctgctgttcatggccagcagcatcatcaccgtgatctgcctgtggaacacctag

SEQ ID NO: 71171 - DNA, 1371 bp, synthetic construct
  misc_feature 1..1371: note = Description of Artificial Sequence: Synthetic coding sequence
  source 1..1371: mol_type = other DNA
atgctggccttcatcctgagcagagccacccccagacccgccctgggccccctgagctacagagagcacagagtggccctgctgcacctgacccacagcatgagcaccaccggcagaggcgtgaccttcaccatcaactgcagcggcttcggccagcacggcgccgaccccaccgccctgaacagcgtgttcaacagaaagcccttcagacccgtgaccaacatcagcgtgcccacccaggtgaacatcagcttcgccatgagcgccatcctggacgtggtgtgggacaaccccttcatcagctggaaccccgaggagtgcgagggcatcaccaagatgagcatggccgccaagaacctgtggctgcccgacatcttcatcatcgagctgatggacgtggacaagacccccaagggcctgaccgcctacgtgagcaacgagggcagaatcagatacaagaagcccatgaaggtggacagcatctgcaacctggacatcttctacttccccttcgaccagcagaactgcaccctgaccttcagcagcttcctgtacaccgtggacagcatgctgctggacatggagaaggaggtgtgggagatcaccgacgccagcagaaacatcctgcagacccacggcgagtgggagctgctgggcctgagcaaggccaccgccaagctgagcagaggcggcaacctgtacgaccagatcgtgttctacgtggccatcagaagaagacccagcctgtacgtgatcaacctgctggtgcccagcggcttcctggtggccatcgacgccctgagcttctacctgcccgtgaagagcggcaacagagtgcccttcaagatcaccctgctgctgggctacaacgtgttcctgctgatgatgagcgacctgctgcccaccagcggcacccccctgatcggcgtgtacttcgccctgtgcctgagcctgatggtgggcagcctgctggagaccatcttcatcacccacctgctgcacgtggccaccacccagcccccccccctgcccagatggctgcacagcctgctgctgcactgcaacagccccggcagatgctgccccaccgccccccagaaggagaacaagggccccggcctgacccccacccacctgcccggcgtgaaggagcccgaggtgagcgccggccagatgcccggccccgccgaggccgagctgaccggcggcagcgagtggaccagagcccagagagagcacgaggcccagaagcagcacagcgtggagctgtggctgcagttcagccacgccatggacgccatgctgttcagactgtacctgctgttcatggccagcagcatcatcaccgtgatctgcctgtggaacacctag

SEQ ID NO: 71172 - DNA, 1326 bp, synthetic construct
  misc_feature 1..1326: note = Description of Artificial Sequence: Synthetic coding sequence
  source 1..1326: mol_type = other DNA
atgctgagcagcgtgatggcccccctgtgggcctgcatcctggtggccgccggcatcctggccaccgacacccaccacccccaggacagcgccctgtaccacctgagcaagcagctgctgcagaagtaccacaaggaggtgagacccgtgtacaactggaccaaggccaccaccgtgtacctggacctgttcgtgcacgccatcctggacgtggacgccgagaaccagatcctgaagaccagcgtgtggtaccaggaggtgtggaacgacgagttcctgagctggaacagcagcatgttcgacgagatcagagagatcagcctgcccctgagcgccatctgggcccccgacatcatcatcaacgagttcgtggacatcgagagataccccgacctgccctacgtgtacgtgaacagcagcggcaccatcgagaactacaagcccatccaggtggtgagcgcctgcagcctggagacctacgccttccccttcgacgtgcagaactgcagcctgaccttcaagagcatcctgcacaccgtggaggacgtggacctggccttcctgagaagccccgaggacatccagcacgacaagaaggccttcctgaacgacagcgagtgggagctgctgagcgtgagcagcacctacagcatcctgcagagcagcgccggcggcttcgcccagatccagttcaacgtggtgatgagaagacaccccctggtgtacgtggtgagcctgctgatccccagcatcttcctgatgctggtggacctgggcagcttctacctgccccccaactgcagagccagaatcgtgttcaagaccagcgtgctggtgggctacaccgtgttcagagtgaacatgagcaaccaggtgcccagaagcgtgggcagcacccccctgatcggccacttcttcaccatctgcatggccttcctggtgctgagcctggccaagagcatcgtgctggtgaagttcctgcacgacgagcagagaggcggccaggagcagcccttcctgtgcctgagaggcgacaccgacgccgacagacccagagtggagcccagagcccagagagccgtggtgaccgagagcagcctgtacggcgagcacctggcccagcccggcaccctgaaggaggtgtggagccagctgcagagcatcagcaactacctgcagacccaggaccagaccgaccagcaggaggccgagtggctggtgctgctgagcagattcgacagactgctgttccagagctacctgttcatgctgggcatctacaccatcaccctgtgcagcctgtgggccctgtggggcggcgtgtag

SEQ ID NO: 71173 - DNA, 1293 bp, synthetic construct
  misc_feature 1..1293: note = Description of Artificial Sequence: Synthetic coding sequence
  source 1..1293: mol_type = other DNA
atgatcgtgtacttccccggcatcctggccaccgacacccaccacccccaggacagcgccctgtaccacctgagcaagcagctgctgcagaagtaccacaaggaggtgagacccgtgtacaactggaccaaggccaccaccgtgtacctggacctgttcgtgcacgccatcctggacgtggacgccgagaaccagatcctgaagaccagcgtgtggtaccaggaggtgtggaacgacgagttcctgagctggaacagcagcatgttcgacgagatcagagagatcagcctgcccctgagcgccatctgggcccccgacatcatcatcaacgagttcgtggacatcgagagataccccgacctgccctacgtgtacgtgaacagcagcggcaccatcgagaactacaagcccatccaggtggtgagcgcctgcagcctggagacctacgccttccccttcgacgtgcagaactgcagcctgaccttcaagagcatcctgcacaccgtggaggacgtggacctggccttcctgagaagccccgaggacatccagcacgacaagaaggccttcctgaacgacagcgagtgggagctgctgagcgtgagcagcacctacagcatcctgcagagcagcgccggcggcttcgcccagatccagttcaacgtggtgatgagaagacaccccctggtgtacgtggtgagcctgctgatccccagcatcttcctgatgctggtggacctgggcagcttctacctgccccccaactgcagagccagaatcgtgttcaagaccagcgtgctggtgggctacaccgtgttcagagtgaacatgagcaaccaggtgcccagaagcgtgggcagcacccccctgatcggccacttcttcaccatctgcatggccttcctggtgctgagcctggccaagagcatcgtgctggtgaagttcctgcacgacgagcagagaggcggccaggagcagcccttcctgtgcctgagaggcgacaccgacgccgacagacccagagtggagcccagagcccagagagccgtggtgaccgagagcagcctgtacggcgagcacctggcccagcccggcaccctgaaggaggtgtggagccagctgcagagcatcagcaactacctgcagacccaggaccagaccgaccagcaggaggccgagtggctggtgctgctgagcagattcgacagactgctgttccagagctacctgttcatgctgggcatctacaccatcaccctgtgcagcctgtgggccctgtggggcggcgtgtag

SEQ ID NO: 71174 - DNA, 528 bp, synthetic construct
  misc_feature 1..528: note = Description of Artificial Sequence: Synthetic coding sequence
  source 1..528: mol_type = other DNA
tgagccgagaaccagatcctgaagaccagcgtgtggtaccaggaggtgtggaacgacgagttcctgagctggaacagcagcatgttcgacgagatcagagagatcagcctgcccctgagcgccatctgggcccccgacatcatcatcaacgagttcgtggacatcgagagataccccgacctgccctacgtgtacgtgaacagcagcggcaccatcgagaactacaagcccatccaggtggtgagcgcctgcagcctggagacctacgccttccccttcgacgtgcagaactgcagcctgaccttcaagagcatcctgcacaccgtggaggacgtggacctggccttcctgagaagccccgaggacatccagcacgacaagaaggccttcctgaacgacagcgagtgggagctgctgagcgtgagcagcacctacagcatcctgcagagcagcgccggcggcttcgcccagatccagttcaacggcaccagcagccccagcgcctggcccagctggttcagcgcctag

SEQ ID NO: 71175 - DNA, 1449 bp, synthetic construct
  misc_feature 1..1449: note = Description of Artificial Sequence: Synthetic coding sequence
  source 1..1449: mol_type = other DNA
atgctggccttcatcctgagcagagccacccccagacccgccctgggccccctgagctacagagagcacagagtggccctgctgcacctgacccacagcatgagcaccaccggcagaggcgtgaccttcaccatcaactgcagcggcttcggccagcacggcgccgaccccaccgccctgaacagcgtgttcaacagaaagcccttcagacccgtgaccaacatcagcgtgcccacccaggtgaacatcagcttcgccatgagcgccatcctggacgtggtgtgggacaaccccttcatcagctggaaccccgaggagtgcgagggcatcaccaagatgagcatggccgccaagaacctgtggctgcccgacatcttcatcatcgagctgtgcgtgagcagagccggccagagagaggtgcccagccccggcagccacagagaccacagcctgcccctgggccccctgatggacgtggacaagacccccaagggcctgaccgcctacgtgagcaacgagggcagaatcagatacaagaagcccatgaaggtggacagcatctgcaacctggacatcttctacttccccttcgaccagcagaactgcaccctgaccttcagcagcttcctgtacaccgtggacagcatgctgctggacatggagaaggaggtgtgggagatcaccgacgccagcagaaacatcctgcagacccacggcgagtgggagctgctgggcctgagcaaggccaccgccaagctgagcagaggcggcaacctgtacgaccagatcgtgttctacgtggccatcagaagaagacccagcctgtacgtgatcaacctgctggtgcccagcggcttcctggtggccatcgacgccctgagcttctacctgcccgtgaagagcggcaacagagtgcccttcaagatcaccctgctgctgggctacaacgtgttcctgctgatgatgagcgacctgctgcccaccagcggcacccccctgatcggcgtgtacttcgccctgtgcctgagcctgatggtgggcagcctgctggagaccatcttcatcacccacctgctgcacgtggccaccacccagcccccccccctgcccagatggctgcacagcctgctgctgcactgcaacagccccggcagatgctgccccaccgccccccagaaggagaacaagggccccggcctgacccccacccacctgcccggcgtgaaggagcccgaggtgagcgccggccagatgcccggccccgccgaggccgagctgaccggcggcagcgagtggaccagagcccagagagagcacgaggcccagaagcagcacagcgtggagctgtggctgcagttcagccacgccatggacgccatgctgttcagactgtacctgctgttcatggccagcagcatcatcaccgtgatctgcctgtggaacacctag

SEQ ID NO: 71176 - DNA, 1137 bp, synthetic construct
  misc_feature 1..1137: note = Description of Artificial Sequence: Synthetic coding sequence
  source 1..1137: mol_type = other DNA
atggacaagctggacgccaacgtgagcagcgaggagggcttcggcagcgtggagaaggtggtgctgctgaccttcctgagcaccgtgatcctgatggccatcctgggcaacctgctggtgatggtggccgtgtgctgggacagacagctgagaaagatcaagaccaactacttcatcgtgagcctggccttcgccgacctgctggtgagcgtgctggtgatgcccttcggcgccatcgagctggtgcaggacatctggatctacggcgaggtgttctgcctggtgagaaccagcctggacgtgctgctgaccaccgccagcatcttccacctgtgctgcatcagcctggacagatactacgccatctgctgccagcccctggtgtacagaaacaagatgacccccctgagaatcgccctgatgctgggcggctgctgggtgatccccaccttcatcagcttcctgcccatcatgcagggctggaacaacatcggcatcatcgacctgatcgagaagagaaagttcaaccagaacagcaacagcacctactgcgtgttcatggtgaacaagccctacgccatcacctgcagcgtggtggccttctacatccccttcctgctgatggtgctggcctactacagaatctacgtgaccgccaaggagcacgcccaccagatccagatgctgcagagagccggcgccagcagcgagagcagaccccagagcgccgaccagcacagcacccacagaatgagaaccgagaccaaggccgccaagaccctgtgcatcatcatgggctgcttctgcctgtgctgggcccccttcttcgtgaccaacatcgtggaccccttcatcgactacaccgtgcccggccaggtgtggaccgccttcctgtggctgggctacatcaacagcggcctgaaccccttcctgtacgccttcctgaacaagagcttcagaagagccttcctgatcatcctgtgctgcgacgacgagagatacagaagacccagcatcctgggccagaccgtgccctgcagcaccaccaccatcaacggcagcacccacgtgctgagcggctgcagccccgtgagcagcttcctgctgctgttctgcaacagacccgtgcccgtgtag

SEQ ID NO: 71177 - DNA, 1164 bp, synthetic construct
  misc_feature 1..1164: note = Description of Artificial Sequence: Synthetic coding sequence
  source 1..1164: mol_type = other DNA
atggacaagctggacgccaacgtgagcagcgaggagggcttcggcagcgtggagaaggtggtgctgctgaccttcctgagcaccgtgatcctgatggccatcctgggcaacctgctggtgatggtggccgtgtgctgggacagacagctgagaaagatcaagaccaactacttcatcgtgagcctggccttcgccgacctgctggtgagcgtgctggtgatgcccttcggcgccatcgagctggtgcaggacatctggatctacggcgaggtgttctgcctggtgagaaccagcctggacgtgctgctgaccaccgccagcatcttccacctgtgctgcatcagcctggacagatactacgccatctgctgccagcccctggtgtacagaaacaagatgacccccctgagaatcgccctgatgctgggcggctgctgggtgatccccaccttcatcagcttcctgcccatcatgcagggctggaacaacatcggcatcatcgacctgatcgagaagagaaagttcaaccagaacagcaacagcacctactgcgtgttcatggtgaacaagccctacgccatcacctgcagcgtggtggccttctacatccccttcctgctgatggtgctggcctactacagaatctacgtgaccgccaaggagcacgcccaccagatccagatgctgcagagagccggcgccagcagcgagagcagaccccagagcgccgaccagcacagcacccacagaatgagaaccgagaccaaggccgccaagaccctgtgcatcatcatgggctgcttctgcctgtgctgggcccccttcttcgtgaccaacatcgtggaccccttcatcgactacaccgtgcccggccaggtgtggaccgccttcctgtggctgggctacatcaacagcggcctgaaccccttcctgtacgccttcctgaacaagagcttcagaagagccttcctgatcatcctgtgctgcgacgacgagagatacagaagacccagcatcctgggccagaccgtgccctgcagcaccaccaccatcaacggcagcacccacgtgctgagatacaccgtgctgcacagaggccaccaccaggagctggagaagctgcccatccacaacgaccccgagagcctggagagctgcttctag

SEQ ID NO: 71178 - DNA, 1287 bp, synthetic construct
  misc_feature 1..1287: note = Description of Artificial Sequence: Synthetic coding sequence
  source 1..1287: mol_type = other DNA
atggacaagctggacgccaacgtgagcagcgaggagggcttcggcagcgtggagaaggtggtgctgctgaccttcctgagcaccgtgatcctgatggccatcctgggcaacctgctggtgatggtggccgtgtgctgggacagacagctgagaaagatcaagaccaactacttcatcgtgagcctggccttcgccgacctgctggtgagcgtgctggtgatgcccttcggcgccatcgagctggtgcaggacatctggatctacggcgaggtgttctgcctggtgagaaccagcctggacgtgctgctgaccaccgccagcatcttccacctgtgctgcatcagcctggacagatactacgccatctgctgccagcccctggtgtacagaaacaagatgacccccctgagaatcgccctgatgctgggcggctgctgggtgatccccaccttcatcagcttcctgcccatcatgcagggctggaacaacatcggcatcatcgacctgatcgagaagagaaagttcaaccagaacagcaacagcacctactgcgtgttcatggtgaacaagccctacgccatcacctgcagcgtggtggccttctacatccccttcctgctgatggtgctggcctactacagaatctacgtgaccgccaaggagcacgcccaccagatccagatgctgcagagagccggcgccagcagcgagagcagaccccagagcgccgaccagcacagcacccacagaatgagaaccgagaccaaggccgccaagaccctgtgcatcatcatgggctgcttctgcctgtgctgggcccccttcttcgtgaccaacatcgtggaccccttcatcgactacaccgtgcccggccaggtgtggaccgccttcctgtggctgggctacatcaacagcggcctgaaccccttcctgtacgccttcctgaacaagagcttcagaagagccttcctgatcatcctgtgctgcgacgacgagagatacagaagacccagcatcctgggccagaccgtgccctgcagcaccaccaccatcaacggcagcacccacgtgctgagaaccgacttcctgttcgacagagacatcctggccagatactggaccaagcccgccagagccggccccttcagcggcaccctgagcatcagatgcctgaccgccagaaagcccgtgctgggcgacgccgtggagtgcggcggccagtgggagagccagtgccacccccccgccaccagccccctggtggccgcccagcccagcgacacctag

SEQ ID NO: 71179 - DNA, 1209 bp, synthetic construct
  misc_feature 1..1209: note = Description of Artificial Sequence: Synthetic coding sequence
  source 1..1209: mol_type = other DNA
atggacaagctggacgccaacgtgagcagcgaggagggcttcggcagcgtggagaaggtggtgctgctgaccttcctgagcaccgtgatcctgatggccatcctgggcaacctgctggtgatggtggccgtgtgctgggacagacagctgagaaagatcaagaccaactacttcatcgtgagcctggccttcgccgacctgctggtgagcgtgctggtgatgcccttcggcgccatcgagctggtgcaggacatctggatctacggcgaggtgttctgcctggtgagaaccagcctggacgtgctgctgaccaccgccagcatcttccacctgtgctgcatcagcctggacagatactacgccatctgctgccagcccctggtgtacagaaacaagatgacccccctgagaatcgccctgatgctgggcggctgctgggtgatccccaccttcatcagcttcctgcccatcatgcagggctggaacaacatcggcatcatcgacctggagagaagcctgaaccagggcctgggccaggacttccacgccatcgagaagagaaagttcaaccagaacagcaacagcacctactgcgtgttcatggtgaacaagccctacgccatcacctgcagcgtggtggccttctacatccccttcctgctgatggtgctggcctactacagaatctacgtgaccgccaaggagcacgcccaccagatccagatgctgcagagagccggcgccagcagcgagagcagaccccagagcgccgaccagcacagcacccacagaatgagaaccgagaccaaggccgccaagaccctgtgcatcatcatgggctgcttctgcctgtgctgggcccccttcttcgtgaccaacatcgtggaccccttcatcgactacaccgtgcccggccaggtgtggaccgccttcctgtggctgggctacatcaacagcggcctgaaccccttcctgtacgccttcctgaacaagagcttcagaagagccttcctgatcatcctgtgctgcgacgacgagagatacagaagacccagcatcctgggccagaccgtgccctgcagcaccaccaccatcaacggcagcacccacgtgctgagagacgccgtggagtgcggcggccagtgggagagccagtgccacccccccgccaccagccccctggtggccgcccagcccagcgacacctag

SEQ ID NO: 71180 - DNA, 1167 bp, synthetic construct
  misc_feature 1..1167: note = Description of Artificial Sequence: Synthetic coding sequence
  source 1..1167: mol_type = other DNA
atggacaagctggacgccaacgtgagcagcgaggagggcttcggcagcgtggagaaggtggtgctgctgaccttcctgagcaccgtgatcctgatggccatcctgggcaacctgctggtgatggtggccgtgtgctgggacagacagctgagaaagatcaagaccaactacttcatcgtgagcctggccttcgccgacctgctggtgagcgtgctggtgatgcccttcggcgccatcgagctggtgcaggacatctggatctacggcgaggtgttctgcctggtgagaaccagcctggacgtgctgctgaccaccgccagcatcttccacctgtgctgcatcagcctggacagatactacgccatctgctgccagcccctggtgtacagaaacaagatgacccccctgagaatcgccctgatgctgggcggctgctgggtgatccccaccttcatcagcttcctgcccatcatgcagggctggaacaacatcggcatcatcgacctgatcgagaagagaaagttcaaccagaacagcaacagcacctactgcgtgttcatggtgaacaagccctacgccatcacctgcagcgtggtggccttctacatccccttcctgctgatggtgctggcctactacagaatctacgtgaccgccaaggagcacgcccaccagatccagatgctgcagagagccggcgccagcagcgagagcagaccccagagcgccgaccagcacagcacccacagaatgagaaccgagaccaaggccgccaagaccctgtgcatcatcatgggctgcttctgcctgtgctgggcccccttcttcgtgaccaacatcgtggaccccttcatcgactacaccgtgcccggccaggtgtggaccgccttcctgtggctgggctacatcaacagcggcctgaaccccttcctgtacgccttcctgaacaagagcttcagaagagccttcctgatcatcctgtgctgcgacgacgagagatacagaagacccagcatcctgggccagaccgtgccctgcagcaccaccaccatcaacggcagcacccacgtgctgagagacgccgtggagtgcggcggccagtgggagagccagtgccacccccccgccaccagccccctggtggccgcccagcccagcgacacctag

SEQ ID NO: 71181 - DNA, 1083 bp, synthetic construct
  misc_feature 1..1083: note = Description of Artificial Sequence: Synthetic coding sequence
  source 1..1083: mol_type = other DNA
atggacaagctggacgccaacgtgagcagcgaggagggcttcggcagcgtggagaaggtggtgctgctgaccttcctgagcaccgtgatcctgatggccatcctgggcaacctgctggtgatggtggccgtgtgctgggacagacagctgagaaagatcaagaccaactacttcatcgtgagcctggccttcgccgacctgctggtgagcgtgctggtgatgcccttcggcgccatcgagctggtgcaggacatctggatctacggcgaggtgttctgcctggtgagaaccagcctggacgtgctgctgaccaccgccagcatcttccacctgtgctgcatcagcctggacagatactacgccatctgctgccagcccctggtgtacagaaacaagatgacccccctgagaatcgccctgatgctgggcggctgctgggtgatccccaccttcatcagcttcctgcccatcatgcagggctggaacaacatcggcatcatcgacctgatcgagaagagaaagttcaaccagaacagcaacagcacctactgcgtgttcatggtgaacaagccctacgccatcacctgcagcgtggtggccttctacatccccttcctgctgatggtgctggcctactacagaatctacgtgaccgccaaggagcacgcccaccagatccagatgctgcagagagccggcgccagcagcgagagcagaccccagagcgccgaccagcacagcacccacagaatgagaaccgagaccaaggccgccaagaccctgtgcatcatcatgggctgcttctgcctgtgctgggcccccttcttcgtgaccaacatcgtggaccccttcatcgactacaccgtgcccggccaggtgtggaccgccttcctgtggctgggctacatcaacagcggcctgaaccccttcctgtacgccttcctgaacaagagcttcagaagagccttcctgatcatcctgtgctgcgacgacgagagatacagaagacccagcatcctgggccagaccgtgccctgcagcaccaccaccatcaacggcagcacccacgtgctgagattctag

SEQ ID NO: 71182 - DNA, 1236 bp, synthetic construct
  misc_feature 1..1236: note = Description of Artificial Sequence: Synthetic coding sequence
  source 1..1236: mol_type = other DNA
atggacaagctggacgccaacgtgagcagcgaggagggcttcggcagcgtggagaaggtggtgctgctgaccttcctgagcaccgtgatcctgatggccatcctgggcaacctgctggtgatggtggccgtgtgctgggacagacagctgagaaagatcaagaccaactacttcatcgtgagcctggccttcgccgacctgctggtgagcgtgctggtgatgcccttcggcgccatcgagctggtgcaggacatctggatctacggcgaggtgttctgcctggtgagaaccagcctggacgtgctgctgaccaccgccagcatcttccacctgtgctgcatcagcctggacagatactacgccatctgctgccagcccctggtgtacagaaacaagatgacccccctgagaatcgccctgatgctgggcggctgctgggtgatccccaccttcatcagcttcctgcccatcatgcagggctggaacaacatcggcatcatcgacctgatcgagaagagaaagttcaaccagaacagcaacagcacctactgcgtgttcatggtgaacaagccctacgccatcacctgcagcgtggtggccttctacatccccttcctgctgatggtgctggcctactacagaatctacgtgaccgccaaggagcacgcccaccagatccagatgctgcagagagccggcgccagcagcgagagcagaccccagagcgccgaccagcacagcacccacagaatgagaaccgagaccaaggccgccaagaccctgtgcatcatcatgggctgcttctgcctgtgctgggcccccttcttcgtgaccaacatcgtggaccccttcatcgactacaccgtgcccggccaggtgtggaccgccttcctgtggctgggctacatcaacagcggcctgaaccccttcctgtacgccttcctgaacaagagcttcagaagagccttcctgatcatcctgtgctgcgacgacgagagatacagaagacccagcatcctgggccagaccgtgccctgcagcaccaccaccatcaacggcagcacccacgtgctgagcagcggcaccgagaccgacagaaagaagctgtggaacaaggaggagaagatcgaccagaccatccagatgcccaagagaaagagaaagaagaaggccagcctgagctacgaggacctgatcctgctgggcagaaagagctgcttcagagagggcaagtag

SEQ ID NO: 71183 - DNA, 1164 bp, synthetic construct; identical to SEQ ID NO: 71177
  misc_feature 1..1164: note = Description of Artificial Sequence: Synthetic coding sequence
  source 1..1164: mol_type = other DNA

SEQ ID NO: 71184 - DNA, 1137 bp, synthetic construct; identical to SEQ ID NO: 71176
  misc_feature 1..1137: note = Description of Artificial Sequence: Synthetic coding sequence
  source 1..1137: mol_type = other DNA

SEQ ID NO: 71185 - DNA, 1137 bp, synthetic construct; identical to SEQ ID NO: 71176
  misc_feature 1..1137: note = Description of Artificial Sequence: Synthetic coding sequence
  source 1..1137: mol_type = other DNA

SEQ ID NO: 71186 - DNA, 1074 bp, synthetic construct
  misc_feature 1..1074: note = Description of Artificial Sequence: Synthetic coding sequence
  source 1..1074: mol_type = other DNA
atggacctgcccgtgaacctgaccagcttcagcctgagcacccccagccccctggagaccaaccacagcctgggcaaggacgacctgagacccagcagccccctgctgagcgtgttcggcgtgctgatcctgaccctgctgggcttcctggtggccgccaccttcgcctggaacctgctggtgctggccaccatcctgagagtgagaaccttccacagagtgccccacaacctggtggccagcatggccgtgagcgacgtgctggtggccgccctggtgatgcccctgagcctggtgcacgagctgagcggcagaagatggcagctgggcagaagactgtgccagctgtggatcgcctgcgacgtgctgtgctgcaccgccagcatctggaacgtgaccgccatcgccctggacagatactggagcatcaccagacacatggagtacaccctgagaaccagaaagtgcgtgagcaacgtgatgatcgccctgacctgggccctgagcgccgtgatcagcctggcccccctgctgttcggctggggcgagacctacagcgagggcagcgaggagtgccaggtgagcagagagcccagctacgccgtgttcagcaccgtgggcgccttctacctgcccctgtgcgtggtgctgttcgtgtactggaagatctacaaggccgccaagttcagagtgggcagcagaaagaccaacagcgtgagccccatcagcgaggccgtggaggtgaaggacagcgccaagcagccccagatggtgttcaccgtgagacacgccaccgtgaccttccagcccgagggcgacacctggagagagcagaaggagcagagagccgccctgatggtgggcatcctgatcggcgtgttcgtgctgtgctggatccccttcttcctgaccgagctgatcagccccctgtgcagctgcgacatccccgccatctggaagagcatcttcctgtggctgggctacagcaacagcttcttcaaccccctgatctacaccgccttcaacaagaactacaacagcgccttcaagaacttcttcagcagacagcactag

SEQ ID NO: 71187 - DNA, 1323 bp, synthetic construct
  misc_feature 1..1323: note = Description of Artificial Sequence: Synthetic coding sequence
  source 1..1323: mol_type = other DNA
atggtgcccgagcccggccccaccgccaacagcacccccgcctggggcgccggcccccccagcgcccccggcggcagcggctgggtggccgccgccctgtgcgtggtgatcgccctgaccgccgccgccaacagcctgctgatcgccctgatctgcacccagcccgccctgagaaacaccagcaacttcttcctggtgagcctgttcaccagcgacctgatggtgggcctggtggtgatgccccccgccatgctgaacgccctgtacggcagatgggtgctggccagaggcctgtgcctgctgtggaccgccttcgacgtgatgtgctgcagcgccagcatcctgaacctgtgcctgatcagcctggacagatacctgctgatcctgagccccctgagatacaagctgagaatgacccccctgagagccctggccctggtgctgggcgcctggagcctggccgccctggccagcttcctgcccctgctgctgggctggcacgagctgggccacgccagaccccccgtgcccggccagtgcagactgctggccagcctgcccttcgtgctggtggccagcggcctgaccttcttcctgcccagcggcgccatctgcttcacctactgcagaatcctgctggccgccagaaagcaggccgtgcaggtggccagcctgaccaccggcatggccagccaggccagcgagaccctgcaggtgcccagaacccccagacccggcgtggagagcgccgacagcagaagactggccaccaagcacagcagaaaggccctgaaggccagcctgaccctgggcatcctgctgggcatgttcttcgtgacctggctgcccttcttcgtggccaacatcgtgcaggccgtgtgcgactgcatcagccccggcctgttcgacgtgctgacctggctgggctactgcaacagcaccatgaaccccatcatctaccccctgttcatgagagacttcaagagagccctgggcagattcctgccctgccccagatgccccagagagagacaggccagcctggccagccccagcctgagaaccagccacagcggccccagacccggcctgagcctgcagcaggtgctgcccctgcccctgccccccgacagcgacagcgacagcgacgccggcagcggcggcagcagcggcctgagactgaccgcccagctgctgctgcccggcgaggccacccaggacccccccctgcccaccagagccgccgccgccgtgaacttcttcaacatcgaccccgccgagcccgagctgagaccccaccccctgggcatccccaccaactag

SEQ ID NO: 71188 - DNA, 1338 bp, synthetic construct
  misc_feature 1..1338: note = Description of Artificial Sequence: Synthetic coding sequence
  source 1..1338: mol_type = other DNA
atgatggacgtgaacagcagcggcagacccgacctgtacggccacctgagaagcttcctgctgcccgaggtgggcagaggcctgcccgacctgagccccgacggcggcgccgaccccgtggccggcagctgggccccccacctgctgagcgaggtgaccgccagccccgcccccacctgggacgccccccccgacaacgccagcggctgcggcgagcagatcaactacggcagagtggagaaggtggtgatcggcagcatcctgaccctgatcaccctgctgaccatcgccggcaactgcctggtggtgatcagcgtgtgcttcgtgaagaagctgagacagcccagcaactacctgatcgtgagcctggccctggccgacctgagcgtggccgtggccgtgatgcccttcgtgagcgtgaccgacctgatcggcggcaagtggatcttcggccacttcttctgcaacgtgttcatcgccatggacgtgatgtgctgcaccgccagcatcatgaccctgtgcgtgatcagcatcgacagatacctgggcatcaccagacccctgacctaccccgtgagacagaacggcaagtgcatggccaagatgatcctgagcgtgtggctgctgagcgccagcatcaccctgccccccctgttcggctgggcccagaacgtgaacgacgacaaggtgtgcctgatcagccaggacttcggctacaccatctacagcaccgccgtggccttctacatccccatgagcgtgatgctgttcatgtactaccagatctacaaggccgccagaaagagcgccgccaagcacaagttccccggcttccccagagtggagcccgacagcgtgatcgccctgaacggcatcgtgaagctgcagaaggaggtggaggagtgcgccaacctgagcagactgctgaagcacgagagaaagaacatcagcatcttcaagagagagcagaaggccgccaccaccctgggcatcatcgtgggcgccttcaccgtgtgctggctgcccttcttcctgctgagcaccgccagacccttcatctgcggcaccagctgcagctgcatccccctgtgggtggagagaaccttcctgtggctgggctacgccaacagcctgatcaaccccttcatctacgccttcttcaacagagacctgagaaccacctacagaagcctgctgcagtgccagtacagaaacatcaacagaaagctgagcgccgccggcatgcacgaggccctgaagctggccgagagacccgagagacccgagttcgtgctgcagaacgccgactactgcagaaagaagggccacgacagctag

SEQ ID NO: 71189 - DNA, 1440 bp, synthetic construct
  misc_feature 1..1440: note = Description of Artificial Sequence: Synthetic coding sequence
  source 1..1440: mol_type = other DNA
atgatggacgtgaacagcagcggcagacccgacctgtacggccacctgagaagcttcctgctgcccgaggtgggcagaggcctgcccgacctgagccccgacggcggcgccgaccccgtggccggcagctgggccccccacctgctgagcgaggtgaccgccagccccgcccccacctgggacgccccccccgacaacgccagcggctgcggcgagcagatcaactacggcagagtggagaaggtggtgatcggcagcatcctgaccctgatcaccctgctgaccatcgccggcaactgcctggtggtgatcagcgtgtgcttcgtgaagaagctgagacagcccagcaactacctgatcgtgagcctggccctggccgacctgagcgtggccgtggccgtgatgcccttcgtgagcgtgaccgacctgatcggcggcaagtggatcttcggccacttcttctgcaacgtgttcatcgccatggacgtgatgtgctgcaccgccagcatcatgaccctgtgcgtgatcagcatcgacagatacctgggcatcaccagacccctgacctaccccgtgagacagaacggcaagtgcatggccaagatgatcctgagcgtgtggctgctgagcgccagcatcaccctgccccccctgttcggctgggcccagaacgtgaacgacgacaaggtgtgcctgatcagccaggacttcggctacaccatctacagcaccgccgtggccttctacatccccatgagcgtgatgctgttcatgtactaccagatctacaaggccgccagaaagagcgccgccaagcacaagttccccggcttccccagagtggagcccgacagcgtgatcgccctgaacggcatcgtgaagctgcagaaggaggtggaggagtgcgccaacctgagcagactgctgaagcacgagagaaagaacatcagcatcttcaagagagagcagaaggccgccaccaccctgggcatcatcgtgggcgccttcaccgtgtgctggctgcccttcttcctgctgagcaccgccagacccttcatctgcggcaccagctgcagctgcatccccctgtgggtggagagaaccttcctgtggctgggctacgccaacagcctgatcaaccccttcatctacgccttcttcaacagagacctgagaaccacctacagaagcctgctgcagtgccagtacagaaacatcaacagaaagctgagcgccgccggcatgcacgaggccctgaagctggccgagagacccgagagacccgagttcgtgctgagagcctgcaccagaagagtgctgctgagacccgagaagagaccccccgtgagcgtgtgggtgctgcagagccccgaccaccacaactggctggccgacaagatgctgaccaccgtggagaagaaggtgatgatccacgactag

SEQ ID NO: 71190 - DNA, 1299 bp, synthetic construct
  misc_feature 1..1299: note = Description of Artificial Sequence: Synthetic coding sequence
  source 1..1299: mol_type = other DNA
atgatggacgtgaacagcagcggcagacccgacctgtacggccacctgagaagcttcctgctgcccgaggtgggcagaggcctgcccgacctgagccccgacggcggcgccgaccccgtggccggcagctgggccccccacctgctgagcgaggtgaccgccagccccgcccccacctgggacgccccccccgacaacgccagcggctgcggcgagcagatcaactacggcagagtggagaaggtggtgatcggcagcatcctgaccctgatcaccctgctgaccatcgccggcaactgcctggtggtgatcagcgtgtgcttcgtgaagaagctgagacagcccagcaactacctgatcgtgagcctggccctggccgacctgagcgtggccgtggccgtgatgcccttcgtgagcgtgaccgacctgatcggcggcaagtggatcttcggccacttcttctgcaacgtgttcatcgccatggacgtgatgtgctgcaccgccagcatcatgaccctgtgcgtgatcagcatcgacagatacctgggcatcaccagacccctgacctaccccgtgagacagaacggcaagtgcatggccaagatgatcctgagcgtgtggctgctgagcgccagcatcaccctgccccccctgttcggctgggcccagaacgtgaacgacgacaaggtgtgcctgatcagccaggacttcggctacaccatctacagcaccgccgtggccttctacatccccatgagcgtgatgctgttcatgtactaccagatctacaaggccgccagaaagagcgccgccaagcacaagttccccggcttccccagagtggagcccgacagcgtgatcgccctgaacggcatcgtgaagctgcagaaggaggtggaggagtgcgccaacctgagcagactgctgaagcacgagagaaagaacatcagcatcttcaagagagagcagaaggccgccaccaccctgggcatcatcgtgggcgccttcaccgtgtgctggctgcccttcttcctgctgagcaccgccagacccttcatctgcggcaccagctgcagctgcatccccctgtgggtggagagaaccttcctgtggctgggctacgccaacagcctgatcaaccccttcatctacgccttcttcaacagagacctgagaaccacctacagaagcctgctgcagtgccagtacagaaacatcaacagaaagctgagcgccgccggcatgcacgaggccctgaagctggccgagagacccgagagacccgagttcgtgctgtag

SEQ ID NO: 71191 - DNA, 1440 bp, synthetic construct
  misc_feature 1..1440: note = Description of Artificial Sequence: Synthetic coding sequence
  source 1..1440: mol_type = other DNA
atgatggacgtgaacagcagcggcagacccgacctgtacggccacctgagaagcttcctgctgcccgaggtgggcagaggcctgcccgacctgagccccgacggcggcgccgaccccgtggccggcagctgggccccccacctgctgagcgaggtgaccgccagccccgcccccacctgggacgccccccccgacaacgccagcggctgcggcgagcagatcaactacggcagagtggagaaggtggtgatcggcagcatcctgaccctgatcaccctgctgaccatcgccggcaactgcctggtggtgatcagcgtgtgcttcgtgaagaagctgagacagcccagcaactacctgatcgtgagcctggccctggccgacctgagcgtggccgtggccgtgatgcccttcgtgagcgtgaccgacctgatcggcggcaagtggatcttcggccacttcttctgcaacgtgttcatcgccatggacgtgatgtgctgcaccgccagcatcatgaccctgtgcgtgatcagcatcgacagatacctgggcatcaccagacccctgacctaccccgtgagacagaacggcaagtgcatggccaagatgatcctgagcgtgtggctgctgagcgccagcatcaccctgccccccctgttcggctgggcccagaacgtgaacgacgacaaggtgtgcctgatcagccaggacttcggctacaccatctacagcaccgccgtggccttctacatccccatgagcgtgatgctgttcatgtactaccagatctacaaggccgccagaaagagcgccgccaagcacaagttccccggcttccccagagtggagcccgacagcgtgatcgccctgaacggcatcgtgaagctgcagaaggaggtggaggagtgcgccaacctgagcagactgctgaagcacgagagaaagaacatcagcatcttcaagagagagcagaaggccgccaccaccctgggcatcatcgtgggcgccttcaccgtgtgctggctgcccttcttcctgctgagcaccgccagacccttcatctgcggcaccagctgcagctgcatccccctgtgggtggagagaaccttcctgtggctgggctacgccaacagcctgatcaaccccttcatctacgccttcttcaacagagacctgagaaccacctacagaagcctgctgcagtgccagtacagaaacatcaacagaaagctgagcgccgccggcatgcacgaggccctgaagctggccgagagacccgagagacccgagttcgtgctgatcaccagaaccagcggcgtgcaccaggccctggagaacttcccctggggcaacgaggtgaacagatggagaaagagctgcgagtacttctgcaccgacaagatgctgaccaccgtggagaagaaggtgatgatccacgactag

SEQ ID NO: 71192 - DNA, 2460 bp, synthetic construct
  misc_feature 1..2460: note = Description of Artificial Sequence: Synthetic coding sequence
  source 1..2460: mol_type = other DNA
ggcatgctggacggccccagcgccatgaccagattctgcaacctgatcgccagcgagcccgacatcgccaaggtgcccctgtgcatcgacagcagcaacttcgccgtgatcgaggccggcctgaagtgctgccagggcaagtgcatcgtgaacagcatcagcctgaaggagggcgaggccaccgagaccgacaccaagatcagagtgtgcaccagagcctaccacctgctggtgaagaagctgggcttcaaccccaacgacatcatcttcgaccccaacatcctgaccatcggcaccggcatggaggagcacaacctgtacgccatcaacttcatccacgccaccaaggtgatcaaggagaccctgcccggcgccagaatcagcggcggcctgagcaacctgagcttcagcttcagaggcatggaggccatcagagaggccatgcacggcgtgttcctgtaccacgccatcaagagcggcatggacatgggcatcgtgaacgccggcaacctgcccgtgtacgacgacatccacaaggagctgctgcagctgtgcgaggacctgatctggaacaaggaccccgaggccaccgagaagctgctgagatacgcccagacccagggcaccggcggcaagaaggtgatccagaccgacgagtggagaaacggccccgtggaggagagactggagtacgccctggtgaagggcatcgagaagcacatcatcgaggacaccgaggaggccagactgaaccagaagaagtaccccagacccctgaacatcatcgagggccccctgatgaacggcatgaagatcgtgggcgacctgttcggcgccggcaagatgttcctgccccaggtgatcaagagcgccagagtgatgaagaaggccgtgggccacctgatccccttcatggagaaggagagagaggagaccagagtgctgaacggcaccgtggaggaggaggacccctaccagggcaccatcgtgctggccaccgtgaagggcgacgtgcacgacatcggcaagaacatcgtgggcgtggtgctgggctgcaacaacttcagagtgatcgacctgggcgtgatgaccccctgcgacaagatcctgaaggccgccctggaccacaaggccgacatcatcggcctgagcggcctgatcacccccagcctggacgagatgatcttcgtggccaaggagatggagagactggccatcagaatccccctgctgatcggcggcgccaccaccagcaagacccacaccgccgtgaagatcgcccccagatacagcgcccccgtgatccacgtgctggacgccagcaagagcgtggtggtgtgcagccagctgctggacgagaacctgaaggacgagtacttcgaggagatcatggaggagtacgaggacatcagacaggaccactacgagagcctgaaggagagaagatacctgcccctgagccaggccagaaagagcggcttccagatggactggctgagcgagccccaccccgtgaagcccaccttcatcggcacccaggtgttcgaggactacgacctgcagaagctggtggactacatcgactggaagcccttcttcgacgtgtggcagctgagaggcaagtaccccaacagaggcttccccaagatcttcaacgacaagaccgtgggcggcgaggccagaaaggtgtacgacgacgcccacaacatgctgaacaccctgatcagccagaagaagctgagagccagaggcgtggtgggcttctggcccgcccagagcatccaggacgacatccacctgtacgccgaggccgccgtgccccaggccgccgagcccatcgccaccttctacggcctgagacagcaggccgagaaggacagcgccagcaccgagccctactactgcctgagcgacttcatcgcccccctgcacagcggcatcagagactacctgggcctgttcgccgtggcctgcttcggcgtggaggagctgagcaaggcctacgaggacgacggcgacgactacagcagcatcatggtgaaggccctgggcgacagactggccgaggccttcgccgaggagctgcacgagagagtgagaagagagctgtgggcctactgcggcagcgagcagctggacgtggccgacctgagaagactgagatacaagggcatcagacccgcccccggctaccccagccagcccgaccacaccgagaagctgaccatgtggagactggccgacatcgagcagagcaccggcatcagactgaccgagagcctggccatggcccccgccagcgccgtgagcggcctgtacttcagcaacctgaagagcaagtacttcgccgtgggcaagatcagcaaggaccaggtggaggactacgccctgagaaagaacatcagcgtggccgaggtggagaagtggctgggccccatcctgggctacgacaccgactag

SEQ ID NO: 71193 - DNA, 3798 bp, synthetic construct
  misc_feature 1..3798: note = Description of Artificial Sequence: Synthetic coding sequence
  source 1..3798: mol_type = other DNA
atgagccccgccctgcaggacctgagccagcccgagggcctgaagaagaccctgagagacgagatcaacgccatcctgcagaagagaatcatggtgctggacggcggcatgggcaccatgatccagagagagaagctgaacgaggagcacttcagaggccaggagttcaaggaccacgccagacccctgaagggcaacaacgacatcctgagcatcacccagcccgacgtgatctaccagatccacaaggagtacctgctggccggcgccgacatcatcgagaccaacaccttcagcagcaccagcatcgcccaggccgactacggcctggagcacctggcctacagaatgaacatgtgcagcgccggcgtggccagaaaggccgccgaggaggtgaccctgcagaccggcatcaagagattcgtggccggcgccctgggccccaccaacaagaccctgagcgtgagccccagcgtggagagacccgactacagaaacatcaccttcgacgagctggtggaggcctaccaggagcaggccaagggcctgctggacggcggcgtggacatcctgctgatcgagaccatcttcgacaccgccaacgccaaggccgccctgttcgccctgcagaacctgttcgaggagaagtacgcccccagacccatcttcatcagcggcaccatcgtggacaagagcggcagaaccctgagcggccagaccggcgagggcttcgtgatcagcgtgagccacggcgagcccctgtgcatcggcctgaactgcgccctgggcgccgccgagatgagacccttcatcgagatcatcggcaagtgcaccaccgcctacgtgctgtgctaccccaacgccggcctgcccaacaccttcggcgactacgacgagacccccagcatgatggccaagcacctgaaggacttcgccatggacggcctggtgaacatcgtgggcggctgctgcggcagcacccccgaccacatcagagagatcgccgaggccgtgaagaactgcaagcccagagtgccccccgccaccgccttcgagggccacatgctgctgagcggcctggagcccttcagaatcggcccctacaccaacttcgtgaacatcggcgagagatgcaacgtggccggcagcagaaagttcgccaagctgatcatggccggcaactacgaggaggccctgtgcgtggccaaggtgcaggtggagatgggcgcccaggtgctggacgtgaacatggacgacggcatgctggacggccccagcgccatgaccagattctgcaacctgatcgccagcgagcccgacatcgccaaggtgcccctgtgcatcgacagcagcaacttcgccgtgatcgaggccggcctgaagtgctgccagggcaagtgcatcgtgaacagcatcagcctgaaggagggcgaggacgacttcctggagaaggccagaaagatcaagaagtacggcgccgccatggtggtgatggccttcgacgaggagggccaggccaccgagaccgacaccaagatcagagtgtgcaccagagcctaccacctgctggtgaagaagctgggcttcaaccccaacgacatcatcttcgaccccaacatcctgaccatcggcaccggcatggaggagcacaacctgtacgccatcaacttcatccacgccaccaaggtgatcaaggagaccctgcccggcgccagaatcagcggcggcctgagcaacctgagcttcagcttcagaggcatggaggccatcagagaggccatgcacggcgtgttcctgtaccacgccatcaagagcggcatggacatgggcatcgtgaacgccggcaacctgcccgtgtacgacgacatccacaaggagctgctgcagctgtgcgaggacctgatctggaacaaggaccccgaggccaccgagaagctgctgagatacgcccagacccagggcaccggcggcaagaaggtgatccagaccgacgagtggagaaacggccccgtggaggagagactggagtacgccctggtgaagggcatcgagaagcacatcatcgaggacaccgaggaggccagactgaaccagaagaagtaccccagacccctgaacatcatcgagggccccctgatgaacggcatgaagatcgtgggcgacctgttcggcgccggcaagatgttcctgccccaggtgatcaagagcgccagagtgatgaagaaggccgtgggccacctgatccccttcatggagaaggagagagaggagaccagagtgctgaacggcaccgtggaggaggaggacccctaccagggcaccatcgtgctggccaccgtgaagggcgacgtgcacgacatcggcaagaacatcgtgggcgtggtgctgggctgcaacaacttcagagtgatcgacctgggcgtgatgaccccctgcgacaagatcctgaaggccgccctggaccacaaggccgacatcatcggcctgagcggcctgatcacccccagcctggacgagatgatcttcgtggccaaggagatggagagactggccatcagaatccccctgctgatcggcggcgccaccaccagcaagacccacaccgccgtgaagatcgcccccagatacagcgcccccgtgatccacgtgctggacgccagcaagagcgtggtggtgtgcagccagctgctggacgagaacctgaaggacgagtacttcgaggagatcatggaggagtacgaggacatcagacaggaccactacgagagcctgaaggagagaagatacctgcccctgagccaggccagaaagagcggcttccagatggactggctgagcgagccccaccccgtgaagcccaccttcatcggcacccaggtgttcgaggactacgacctgcagaagctggtggactacatcgactggaagcccttcttcgacgtgtggcagctgagaggcaagtaccccaacagaggcttccccaagatcttcaacgacaagaccgtgggcggcgaggccagaaaggtgtacgacgacgcccacaacatgctgaacaccctgatcagccagaagaagctgagagccagaggcgtggtgggcttctggcccgcccagagcatccaggacgacatccacctgtacgccgaggccgccgtgccccaggccgccgagcccatcgccaccttctacggcctgagacagcaggccgagaaggacagcgccagcaccgagccctactactgcctgagcgacttcatcgcccccctgcacagcggcatcagagactacctgggcctgttcgccgtggcctgcttcggcgtggaggagctgagcaaggcctacgaggacgacggcgacgactacagcagcatcatggtgaaggccctgggcgacagactggccgaggccttcgccgaggagctgcacgagagagtgagaagagagctgtgggcctactgcggcagcgagcagctggacgtggccgacctgagaagactgagatacaagggcatcagacccgcccccggctaccccagccagcccgaccacaccgagaagctgaccatgtggagactggccgacatcgagcagagcaccggcatcagactgaccgagagcctggccatggcccccgccagcgccgtgagcggcctgtacttcagcaacctgaagagcaagtacttcgccgtgggcaagatcagcaaggaccaggtggaggactacgccctgagaaagaacatcagcgtggccgaggtggagaagtggctgggccccatcctgggctacgacaccgactag

SEQ ID NO: 71194 - DNA, 3357 bp, synthetic construct
  misc_feature 1..3357: note = Description of Artificial Sequence: Synthetic coding sequence
  source 1..3357: mol_type = other DNA
atgagccccgccctgcaggacctgagccagcccgagggcctgaagaagaccctgagagacgagatcaacgccatcctgcagaagagaatcatggtgctggacggcggcatgggcaccatgatccagagagagaagctgaacgaggagcacttcagaggccaggagttcaaggaccacgccagacccctgaagggcaacaacgacatcctgagcatcacccagcccgacgtgatctaccagatccacaaggagtacctgctggccggcgccgacatcatcgagaccaacaccttcagcagcaccagcatcgcccaggccgactacggcctggagcacctggcctacagaatgaacatgtgcagcgccggcgtggccagaaaggccgccgaggaggtgaccctgcagaccggcatcaagagattcgtggccggcgccctgggccccaccaacaagaccctgagcgtgagccccagcgtggagagacccgactacagaaacatcaccttcgacgagctggtggaggcctaccaggagcaggccaagggcctgctggacggcggcgtggacatcctgctgatcgagaccatcttcgacaccgccaacgccaaggccgccctgttcgccctgcagaacctgttcgaggagaagtacgcccccagacccatcttcatcagcggcaccatcgtggacaagagcggcagaaccctgagcggccagaccggcgagggcttcgtgatcagcgtgagccacggcgagcccctgtgcatcggcctgaactgcgccctgggcgccgccgagatgagacccttcatcgagatcatcggcaagtgcaccaccgcctacgtgctgtgctaccccaacgccggcctgcccaacaccttcggcgactacgacgagacccccagcatgatggccaagcacctgaaggacttcgccatggacggcctggtgaacatcgtgggcggctgctgcggcagcacccccgaccacatcagagagatcgccgaggccgtgaagaactgcaagcccagagtgccccccgccaccgccttcgagggccacatgctgctgagcggcctggagcccttcagaatcggcccctacaccaacttcgtgaacatcggcgagagatgcaacgtggccggcagcagaaagttcgccaagctgatcatggccggcaactacgaggaggccctgtgcgtggccaaggtgcaggtggagatgggcgcccaggtgctggacgtgaacatggacgacggcatgctggacggccccagcgccatgaccagattctgcaacctgatcgccagcgagcccgacatcgccaaggtgcccctgtgcatcgacagcagcaacttcgccgtgatcgaggccggcctgaagtgctgccagggcaagtgcatcgtgaacagcatcagcctgaaggagggcgaggacgacttcctggagaaggccagaaagatcaagaagtacggcgccgccatggtggtgatggccttcgacgaggagggccagacccagggcaccggcggcaagaaggtgatccagaccgacgagtggagaaacggccccgtggaggagagactggagtacgccctggtgaagggcatcgagaagcacatcatcgaggacaccgaggaggccagactgaaccagaagaagtaccccagacccctgaacatcatcgagggccccctgatgaacggcatgaagatcgtgggcgacctgttcggcgccggcaagatgttcctgccccaggtgatcaagagcgccagagtgatgaagaaggccgtgggccacctgatccccttcatggagaaggagagagaggagaccagagtgctgaacggcaccgtggaggaggaggacccctaccagggcaccatcgtgctggccaccgtgaagggcgacgtgcacgacatcggcaagaacatcgtgggcgtggtgctgggctgcaacaacttcagagtgatcgacctgggcgtgatgaccccctgcgacaagatcctgaaggccgccctggaccacaaggccgacatcatcggcctgagcggcctgatcacccccagcctggacgagatgatcttcgtggccaaggagatggagagactggccatcagaatccccctgctgatcggcggcgccaccaccagcaagacccacaccgccgtgaagatcgcccccagatacagcgcccccgtgatccacgtgctggacgccagcaagagcgtggtggtgtgcagccagctgctggacgagaacctgaaggacgagtacttcgaggagatcatggaggagtacgaggacatcagacaggaccactacgagagcctgaaggagagaagatacctgcccctgagccaggccagaaagagcggcttccagatggactggctgagcgagccccaccccgtgaagcccaccttcatcggcacccaggtgttcgaggactacgacctgcagaagctggtggactacatcgactggaagcccttcttcgacgtgtggcagctgagaggcaagtaccccaacagaggcttccccaagatcttcaacgacaagaccgtgggcggcgaggccagaaaggtgtacgacgacgcccacaacatgctgaacaccctgatcagccagaagaagctgagagccagaggcgtggtgggcttctggcccgcccagagcatccaggacgacatccacctgtacgccgaggccgccgtgccccaggccgccgagcccatcgccaccttctacggcctgagacagcaggccgagaaggacagcgccagcaccgagccctactactgcctgagcgacttcatcgcccccctgcacagcggcatcagagactacctgggcctgttcgccgtggcctgcttcggcgtggaggagctgagcaaggcctacgaggacgacggcgacgactacagcagcatcatggtgaaggccctgggcgacagactggccgaggccttcgccgaggagctgcacgagagagtgagaagagagctgtgggcctactgcggcagcgagcagctggacgtggccgacctgagaagactgagatacaagggcatcagacccgcccccggctaccccagccagcccgaccacaccgagaagctgaccatgtggagactggccgacatcgagcagagcaccggcatcagactgaccgagagcctggccatggcccccgccagcgccgtgagcggcctgtacttcagcaacctgaagagcaagtacttcgccgtgggcaagatcagcaaggaccaggtggaggactacgccctgagaaagaacatcagcgtggccgaggtggagaagtgcatgagcgtgtacagaaagatcggcgagtag

SEQ ID NO: 71195 - DNA, 690 bp, synthetic construct
  misc_feature 1..690: note = Description of Artificial Sequence: Synthetic coding sequence
  source 1..690: mol_type = other DNA
atgagcgccggcctgagagccggctgccacgtggtgctgctgtgcagattcagcctgggcagcttcagcgtgcccagcagagacagcgccagcggcagagcctgcctggccgccagacccacccccagaaccggcagagtgcccggcaagaaggccagagcccccgccgtggccgcccccagccccgagagaggccccagagccctgagagccttcggcgtgagaagcccccccgccaccagagccaacggcagaagacagaagaccagagccctgtgcggcagactggcctggagatggctggcctggcccctggccgtggtgacctgcggcgagcacgtgttcagcgccgcccccagcgcccagggcggcgacagcaccacctgccaccccagaagcaagacctgcagaaaccccgagtacctgctggccggcgccgacatcatcgagaccaacaccttcagcagcaccagcatcgcccaggccgactacggcctggagcacctggcctacagaatgaacatgtgcagcgccggcgtggccagaaaggccgccgaggaggtgaccctgcagaccggcatcaagagattcgtggccggcgccctgggccccaccaacaagaccctgagcgtgagccccagcgtggagagacccgactacagaaacatcaacctgcccgtgggcagctag

SEQ ID NO: 71196 - DNA, 3645 bp, synthetic construct
  misc_feature 1..3645: note = Description of Artificial Sequence: Synthetic coding sequence
  source 1..3645: mol_type = other DNA
atgagccccgccctgcaggacctgagccagcccgagggcctgaagaagaccctgagagacgagatcaacgccatcctgcagaagagaatcatggtgctggacggcggcatgggcaccatgatccagagagagaagctgaacgaggagcacttcagaggccaggagttcaaggaccacgccagacccctgaagggcaacaacgacatcctgagcatcacccagcccgacgtgatctaccagatccacaaggagtacctgctggccggcgccgacatcatcgagaccaacaccttcagcagcaccagcatcgcccaggccgactacggcctggagcacctggcctacagaatgaacatgtgcagcgccggcgtggccagaaaggccgccgaggaggtgaccctgcagaccggcatcaagagattcgtggccggcgccctgggccccaccaacaagaccctgagcgtgagccccagcgtggagagacccgactacagaaacatcaccttcgacgagctggtggaggcctaccaggagcaggccaagggcctgctggacggcggcgtggacatcctgctgatcgagaccatcttcgacaccgccaacgccaaggccgccctgttcgccctgcagaacctgttcgaggagaagtacgcccccagacccatcttcatcagcggcaccatcgtggacaagagcggcagaaccctgagcggccagaccggcgagggcttcgtgatcagcgtgagccacggcgagcccctgtgcatcggcctgaactgcgccctgggcgccgccgagatgagacccttcatcgagatcatcggcaagtgcaccaccgcctacgtgctgtgctaccccaacgccggcctgcccaacaccttcggcgactacgacgagacccccagcatgatggccaagcacctgaaggacttcgccatggacggcctggtgaacatcgtgggcggctgctgcggcagcacccccgaccacatcagagagatcgccgaggccgtgaagaactgcaagcccagagtgccccccgccaccgccttcgagggccacatgctgctgagcggcctggagcccttcagaatcggcccctacaccaacttcgtgaacatcggcgagagatgcaacgtggccggcagcagaaagttcgccaagctgatcatggccggcaactacgaggaggccctgtgcgtggccaaggtgcaggtggagatgggcgcccaggtgctggacgtgaacatggacgacggcatgctggacggccccagcgccatgaccagattctgcaacctgatcgccagcgagcccgacatcgccaaggtgcccctgtgcatcgacagcagcaacttcgccgtgatcgaggccggcctgaagtgctgccagggcaagtgcatcgtgaacagcatcagcctgaaggagggcgaggacgacttcctggagaaggccagaaagatcaagaagtacggcgccgccatggtggtgatggccttcgacgaggagggccaggccaccgagaccgacaccaagatcagagtgtgcaccagagcctaccacctgctggtgaagaagctgggcttcaaccccaacgacatcatcttcgaccccaacatcctgaccatcggcaccggcatggaggagcacaacctgtacgccatcaacttcatccacgccaccaaggtgatcaaggagaccctgcccggcgccagaatcagcggcggcctgagcaacctgagcttcagcttcagaggcatggaggccatcagagaggccatgcacggcgtgttcctgtaccacgccatcaagagcggcatggacatgggcatcgtgaacgccggcaacctgcccgtgtacgacgacatccacaaggagctgctgcagctgtgcgaggacctgatctggaacaaggaccccgaggccaccgagaagctgctgagatacgcccagacccagggcaccggcggcaagaaggtgatccagaccgacgagtggagaaacggccccgtggaggagagactggagtacgccctggtgaaggtgatcaagagcgccagagtgatgaagaaggccgtgggccacctgatccccttcatggagaaggagagagaggagaccagagtgctgaacggcaccgtggaggaggaggacccctaccagggcaccatcgtgctggccaccgtgaagggcgacgtgcacgacatcggcaagaacatcgtgggcgtggtgctgggctgcaacaacttcagagtgatcgacctgggcgtgatgaccccctgcgacaagatcctgaaggccgccctggaccacaaggccgacatcatcggcctgagcggcctgatcacccccagcctggacgagatgatcttcgtggccaaggagatggagagactggccatcagaatccccctgctgatcggcggcgccaccaccagcaagacccacaccgccgtgaagatcgcccccagatacagcgcccccgtgatccacgtgctggacgccagcaagagcgtggtggtgtgcagccagctgctggacgagaacctgaaggacgagtacttcgaggagatcatggaggagtacgaggacatcagacaggaccactacgagagcctgaaggagagaagatacctgcccctgagccaggccagaaagagcggcttccagatggactggctgagcgagccccaccccgtgaagcccaccttcatcggcacccaggtgttcgaggactacgacctgcagaagctggtggactacatcgactggaagcccttcttcgacgtgtggcagctgagaggcaagtaccccaacagaggcttccccaagatcttcaacgacaagaccgtgggcggcgaggccagaaaggtgtacgacgacgcccacaacatgctgaacaccctgatcagccagaagaagctgagagccagaggcgtggtgggcttctggcccgcccagagcatccaggacgacatccacctgtacgccgaggccgccgtgccccaggccgccgagcccatcgccaccttctacggcctgagacagcaggccgagaaggacagcgccagcaccgagccctactactgcctgagcgacttcatcgcccccctgcacagcggcatcagagactacctgggcctgttcgccgtggcctgcttcggcgtggaggagctgagcaaggcctacgaggacgacggcgacgactacagcagcatcatggtgaaggccctgggcgacagactggccgaggccttcgccgaggagctgcacgagagagtgagaagagagctgtgggcctactgcggcagcgagcagctggacgtggccgacctgagaagactgagatacaagggcatcagacccgcccccggctaccccagccagcccgaccacaccgagaagctgaccatgtggagactggccgacatcgagcagagcaccggcatcagactgaccgagagcctggccatggcccccgccagcgccgtgagcggcctgtacttcagcaacctgaagagcaagtacttcgccgtgggcaagatcagcaaggaccaggtggaggactacgccctgagaaagaacatcagcgtggccgaggtggagaagtggctgggccccatcctgggctacgacaccgactag

SEQ ID NO: 71197 - DNA, 2178 bp, synthetic construct
  misc_feature 1..2178: note = Description of Artificial Sequence: Synthetic coding sequence
  source 1..2178: mol_type = other DNA
atgggcgccgccagcgtgagagccggcgccagactggtggaggtggccctgtgcagcttcaccgtgacctgcctggaggtgatgagaagattcctgctgctgtacgccacccagcagggccaggccaaggccatcgccgaggagatctgcgagcaggccgtggtgcacggcttcagcgccgacctgcactgcatcagcgagagcgacaagtacgacctgaagaccgagaccgcccccctggtggtggtggtgagcaccaccggcaccggcgacccccccgacaccgccagaaagttcgtgaaggagatccagaaccagaccctgcccgtggacttcttcgcccacctgagatacggcctgctgggcctgggcgacagcgagtacacctacttctgcaacggcggcaagatcatcgacaagagactgcaggagctgggcgccagacacttctacgacaccggccacgccgacgactgcgtgggcctggagctggtggtggagccctggatcgccggcctgtggcccgccctgagaaagcacttcagaagcagcagaggccaggaggagatcagcggcgccctgcccgtggccagccccgccagcagcagaaccgacctggtgaagagcgagctgctgcacatcgagagccaggtggagctgctgagattcgacgacagcggcagaaaggacagcgaggtgctgaagcagaacgccgtgaacagcaaccagagcaacgtggtgatcgaggacttcgagagcagcctgaccagaagcgtgccccccctgagccaggccagcctgaacatccccggcctgccccccgagtacctgcaggtgcacctgcaggagagcctgggccaggaggagagccaggtgagcgtgaccagcgccgaccccgtgttccaggtgcccatcagcaaggccgtgcagctgaccaccaacgacgccatcaagaccaccctgctggtggagctggacatcagcaacaccgacttcagctaccagcccggcgacgccttcagcgtgatctgccccaacagcgacagcgaggtgcagagcctgctgcagagactgcagctggaggacaagagagagcactgcgtgctgctgaagatcaaggccgacaccaagaagaagggcgccaccctgccccagcacatccccgccggctgcagcctgcagttcatcttcacctggtgcctggagatcagagccatccccaagaaggccttcctgagagccctggtggactacaccagcgacagcgccgagaagagaagactgcaggagctgtgcagcaagcagggcgccgccgactacagcagattcgtgagagacgcctgcgcctgcctgctggacctgctgctggccttccccagctgccagccccccctgagcctgctgctggagcacctgcccaagctgcagcccagaccctacagctgcgccagcagcagcctgttccaccccggcaagctgcacttcgtgttcaacatcgtggagttcctgagcaccgccaccaccgaggtgctgagaaagggcgtgtgcaccggctggctggccctgctggtggccagcgtgctgcagcccaacatccacgccagccacgaggacagcggcaaggccctggcccccaagatcagcatcagccccagaaccaccaacagcttccacctgcccgacgaccccagcatccccatcatcatggtgggccccggcaccggcatcgcccccttcatcggcttcctgcagcacagagagaagctgcaggagcagcaccccgacggcaacttcggcgccatgtggctgttcttcggctgcagacacaaggacagagactacctgttcagaaaggagctgagacacttcctgaagcacggcatcctgacccacctgaaggtgagcttcagcagagacgcccccgtgggcgaggaggaggcccccgccaagtacgtgcaggacaacatccagctgcacggccagcaggtggccagaatcctgctgcaggagaacggccacatctacgtgtgcggcgacgccaagaacatggccaaggacgtgcacgacgccctggtgcagatcatcagcaaggaggtgggcgtggagaagctggaggccatgaagaccctggccaccctgaaggaggagaagagatacctgcaggacatctggagctag

SEQ ID NO: 71198 - DNA, 177 bp, synthetic construct
  misc_feature 1..177: note = Description of Artificial Sequence: Synthetic coding sequence
  source 1..177: mol_type = other DNA
atgagaagattcctgctgctgtacgccacccagcagggccaggccaaggccatcgccgaggagatctgcgagcaggccgtggtgcacggcttcagcgccgacctgcactgcatcagcgagagcgacaaggtgagcgtgatccagaacacccccaccttcgccatgggcggcagatag

SEQ ID NO: 71199 - DNA, 2097 bp, synthetic construct
  misc_feature 1..2097: note = Description of Artificial Sequence: Synthetic coding sequence
  source 1..2097: mol_type = other DNA
atgagaagattcctgctgctgtacgccacccagcagggccaggccaaggccatcgccgaggagatctgcgagcaggccgtggtgcacggcttcagcgccgacctgcactgcatcagcgagagcgacaagtacgacctgaagaccgagaccgcccccctggtggtggtggtgagcaccaccggcaccggcgacccccccgacaccgccagaaagttcgtgaaggagatccagaaccagaccctgcccgtggacttcttcgcccacctgagatacggcctgctgggcctgggcgacagcgagtacacctacttctgcaacggcggcaagatcatcgacaagagactgcaggagctgggcgccagacacttctacgacaccggccacgccgacgactgcgtgggcctggagctggtggtggagccctggatcgccggcctgtggcccgccctgagaaagcacttcagaagcagcagaggccaggaggagatcagcggcgccctgcccgtggccagccccgccagcagcagaaccgacctggtgaagagcgagctgctgcacatcgagagccaggtggagctgctgagattcgacgacagcggcagaaaggacagcgaggtgctgaagcagaacgccgtgaacagcaaccagagcaacgtggtgatcgaggacttcgagagcagcctgaccagaagcgtgccccccctgagccaggccagcctgaacatccccggcctgccccccgagtacctgcaggtgcacctgcaggagagcctgggccaggaggagagccaggtgagcgtgaccagcgccgaccccgtgttccaggtgcccatcagcaaggccgtgcagctgaccaccaacgacgccatcaagaccaccctgctggtggagctggacatcagcaacaccgacttcagctaccagcccggcgacgccttcagcgtgatctgccccaacagcgacagcgaggtgcagagcctgctgcagagactgcagctggaggacaagagagagcactgcgtgctgctgaagatcaaggccgacaccaagaagaagggcgccaccctgccccagcacatccccgccggctgcagcctgcagttcatcttcacctggtgcctggagatcagagccatccccaagaaggccttcctgagagccctggtggactacaccagcgacagcgccgagaagagaagactgcaggagctgtgcagcaagcagggcgccgccgactacagcagattcgtgagagacgcctgcgcctgcctgctggacctgctgctggccttccccagctgccagccccccctgagcctgctgctggagcacctgcccaagctgcagcccagaccctacagctgcgccagcagcagcctgttccaccccggcaagctgcacttcgtgttcaacatcgtggagttcctgagcaccgccaccaccgaggtgctgagaaagggcgtgtgcaccggctggctggccctgctggtggccagcgtgctgcagcccaacatccacgccagccacgaggacagcggcaaggccctggcccccaagatcagcatcagccccagaaccaccaacagcttccacctgcccgacgaccccagcatccccatcatcatggtgggccccggcaccggcatcgcccccttcatcggcttcctgcagcacagagagaagctgcaggagcagcaccccgacggcaacttcggcgccatgtggctgttcttcggctgcagacacaaggacagagactacctgttcagaaaggagctgagacacttcctgaagcacggcatcctgacccacctgaaggtgagcttcagcagagacgcccccgtgggcgaggaggaggcccccgccaagtacgtgcaggacaacatccagctgcacggccagcaggtggccagaatcctgctgcaggagaacggccacatctacgtgtgcggcgacgccaagaacatggccaaggacgtgcacgacgccctggtgcagatcatcagcaaggaggtgggcgtggagaagctggaggccatgaagaccctggccaccctgaaggaggagaagagatacctgcaggacatctggagctag

SEQ ID NO: 71200 - DNA, 471 bp, synthetic construct
  misc_feature 1..471: note = Description of Artificial Sequence: Synthetic coding sequence
  source 1..471: mol_type = other DNA
atgagaagattcctgctgctgtacgccacccagcagggccaggccaaggccatcgccgaggagatctgcgagcaggccgtggtgcacggcttcagcgccgacctgcactgcatcagcgagagcgacaagtacgacctgaagaccgagaccgcccccctggtggtggtggtgagcaccaccggcaccggcgacccccccgacaccgccagaaagttcgtgaaggagatccagaaccagaccctgcccgtggacttcttcgcccacctgagatacggcctgctgggcctgggcgacagcgagtacacctacttctgcaacggcggcaagatcatcgacaagagactgcaggagctgggcgccagacacttctacgacaccggccacgccgacgactgcgtgggcctggagctggtggtggagccctggatcgccggcctgtggcccgccctgagaaagcacttcagaagctag

SEQ ID NO: 71201 - DNA, 126 bp, synthetic construct
  misc_feature 1..126: note = Description of Artificial Sequence: Synthetic coding sequence
  source 1..126: mol_type = other DNA
atgagaagattcctgctgctgtacgccacccagcagggccaggccaaggccatcgccgaggagatctgcgagcaggccgtggtgcacggcttcagcgccgacctgcactgcatcagcgagagctag

SEQ ID NO: 71202 - DNA, 339 bp, synthetic construct
  misc_feature 1..339: note = Description of Artificial Sequence: Synthetic coding sequence
  source 1..339: mol_type = other DNA
atgagaagattcctgctgctgtacgccacccagcagggccaggccaaggccatcgccgaggagatctgcgagcaggccgtggtgcacggcttcagcgccgacctgcactgcatcagcgagagcgacaagtacgacctgaagaccgagaccgcccccctggtggtggtggtgagcaccaccggcaccggcgacccccccgacaccgccagaaagttcgtgaaggagatccagaaccagaccctgcccgtggacttcttcgcccacctgagatacggcctgctgggcctgggcgacagcgagtacacctacttctgcaacggcggcaagatcatcgactag

SEQ ID NO: 71203 - DNA, 249 bp, synthetic construct
  misc_feature 1..249: note = Description of Artificial Sequence: Synthetic coding sequence
  source 1..249: mol_type = other DNA
atgctgtgggaccccgccctgcccagactggccgtgtacgccagctgcctgttcttcagctgcctggacgcccacgagggccccgtgcacggccccagaggcagaggcgagggcggcagaggcagcgagagacagagagtgagacccggcggcggcggcggcgccggcagcgtgcacatccacctggaggaggaggacggcgccgaggaccaggaccacagagacgaggactggatcaccaagaagtag

SEQ ID NO: 71204 - DNA, 1647 bp, synthetic construct
  misc_feature 1..1647: note = Description of Artificial Sequence: Synthetic coding sequence
  source 1..1647: mol_type = other DNA
atgaccatggccgccgccgccgtggtggccagaggcgccggcgccagagccgccaccgccgccgccctgagaggcggctgcggcaccgccgccagaggcagaccctgcgccggccccgccagacccctgtgcaccgcccccggcaccgcccccgacatgaagagatacctgtgggagagatacagagaggccaagagaagcaccgaggagctggtgcccagcatcatgagcaacctgctgaaccccgacgccatcttcagcaacaacgagatgagcctgagcgacatcgagatctacggcttcgactacgactacaccctggtgttctacagcaagcacctgcacaccctgatcttcaacgccgccagagacctgctgatcaacgagcacagataccccgccgagatcagaaagtacgagtacgaccccaacttcgccatcagaggcctgcactacgacgtgcagagagccgtgctgatgaagatcgacgccttccactacatccagctgggcaccgtgtacagaggcctgagcgtggtgcccgacgaggaggtgatcgagatgtacgagggcagccacgtgcccctggagcagatgagcgacttctacggcaagagcagccacggcaacaccatgaagcagttcatggacatcttcagcctgcccgagatgaccctgctgagctgcgtgaacgagtacttcctgaagaacaacatcgactacgagcccgtgcacctgtacaaggacgtgaaggacagcatcagagacgtgcacatcaagggcatcatgtacagagccatcgaggccgacatcgagaagtacatctgctacgccgagcagaccagagccgtgctggccaagctggccgaccacggcaagaagatgttcctgatcaccaacagccccagcagcttcgtggacaagggcatgagctacatcgtgggcaaggactggagagacctgttcgacgtggtgatcgtgcaggccgagaagcccaacttcttcaacgacaagagaagacccttcagaaagatgaacgagaagggcgtgctgctgtgggacaagatccacaagctgcagaagggccagatctacaagcagggcaacctgtacgagttcctgaagctgaccggctggagaggcagcagagtgctgtacttcggcgaccacatctacagcgacctggccgacctgaccctgaagcacggctggagaaccggcgccatcatccccgagctgagaagcgagctgaagatcatgaacaccgagcagtacatccagaccatgacctggctgcagaccctgaccggcctgctggagcagatgcaggtgcacagagacgccgagagccagctggtgctgcaggagtggaagaaggagagaaaggagatgagagagatgaccaagagcttcttcaacgcccagttcggcagcctgttcagaaccgaccagaaccccacctacttcctgagaagactgagcagattcgccgacatctacatggccagcctgagctgcctgctgaactacgacgtgagccacaccttctaccccagaagaacccccctgcagcacgagctgcccgcctggagcgagagaccccccaccttcggcacccccctgctgcaggaggcccaggccaagtag

SEQ ID NO: 71205 - DNA, 1686 bp, synthetic construct
  misc_feature 1..1686: note = Description of Artificial Sequence: Synthetic coding sequence
  source 1..1686: mol_type = other DNA
atgagcaccagctggagcgacagactgcagaacgccgccgacatgcccgccaacatggacaagcacgccctgaagaagtacagaagagaggcctaccacagagtgttcgtgaacagaagcctggccatggagaagatcaagtgcttcggcttcgacatggactacaccctggccgtgtacaagagccccgagtacgagagcctgggcttcgagctgaccgtggagagactggtgagcatcggctacccccaggagctgctgagcttcgcctacgacagcaccttccccaccagaggcctggtgttcgacaccctgtacggcaacctgctgaaggtggacgcctacggcaacctgctggtgtgcgcccacggcttcaacttcatcagaggccccgagaccagagagcagtaccccaacaagttcatccagagagacgacaccgagagattctacatcctgaacaccctgttcaacctgcccgagacctacctgctggcctgcctggtggacttcttcaccaactgccccagatacaccagctgcgagaccggcttcaaggacggcgacctgttcatgagctacagaagcatgttccaggacgtgagagacgccgtggactgggtgcactacaagggcagcctgaaggagaagaccgtggagaacctggagaagtacgtggtgaaggacggcaagctgcccctgctgctgagcagaatgaaggaggtgggcaaggtgttcctggccaccaacagcgactacaagtacaccgacaagatcatgacctacctgttcgacttcccccacggccccaagcccggcagcagccacagaccctggcagagctacttcgacctgatcctggtggacgccagaaagcccctgttcttcggcgagggcaccgtgctgagacaggtggacaccaagaccggcaagctgaagatcggcacctacaccggccccctgcagcacggcatcgtgtacagcggcggcagcagcgacaccatctgcgacctgctgggcgccaagggcaaggacatcctgtacatcggcgaccacatcttcggcgacatcctgaagagcaagaagagacagggctggagaaccttcctggtgatccccgagctggcccaggagctgcacgtgtggaccgacaagagcagcctgttcgaggagctgcagagcctggacatcttcctggccgagctgtacaagcacctggacagcagcagcaacgagagacccgacatcagcagcatccagagaagaatcaagaaggtgacccacgacatggacatgtgctacggcatgatgggcagcctgttcagaagcggcagcagacagaccctgttcgccagccaggtgatgagatacgccgacctgtacgccgccagcttcatcaacctgctgtactaccccttcagctacctgttcagagccgcccacgtgctgatgccccacgagagcaccgtggagcacacccacgtggacatcaacgagatggagagccccctggccaccagaaacagaaccagcgtggacttcaaggacaccgactacaagagacaccagctgaccagaagcatcagcgagatcaagccccccaacctgttccccctggccccccaggagatcacccactgccacgacgaggacgacgacgaggaggaggaggaggaggaggagtag

SEQ ID NO: 71206 - DNA, 600 bp, synthetic construct
  misc_feature 1..600: note = Description of Artificial Sequence: Synthetic coding sequence
  source 1..600: mol_type = other DNA
atggactacaccctggccgtgtacaagagccccgagtacgagagcctgggcttcgagctgaccgtggagagactggtgagcatcggctacccccaggagctgctgagcttcgcctacgacagcaccttccccaccagaggcctggtgttcgacaccctgtacggcaacctgctgaaggtggacgcctacggcaacctgctggtgtgcgcccacggcttcaacttcatcagaggcagccaggtggccgtgcagaagagacccgagaccagagagcagtaccccaacaagttcatccagagagacgacaccgagagattctacatcctgaacaccctgttcaacctgcccgagacctacctgctggcctgcctggtggacttcttcaccaactgccccagatacaccagctgcgagaccggcttcaaggacggcgacctgttcatgagctacagaagcatgttccaggacgtgagagacgccgtggactgggtgcactacaagggcagcctgaaggagaagaccgtggagaacctggagaagtacgtggtgaaggacagcaagagcagcagaatccagtacttcctgaaggtgctgtggtag

SEQ ID NO: 71207 - DNA, 1686 bp, synthetic construct; identical to SEQ ID NO: 71205
  misc_feature 1..1686: note = Description of Artificial Sequence: Synthetic coding sequence
  source 1..1686: mol_type = other DNA

SEQ ID NO: 71208 - DNA, 444 bp, synthetic construct
  misc_feature 1..444: note = Description of Artificial Sequence: Synthetic coding sequence
  source 1..444: mol_type = other DNA
gtgctgagacaggtggacaccaagaccggcaagctgaagatcggcacctacaccggccccctgcagcacggcatcgtgtacagcggcggcagcagcgacaccatctgcgacctgctgggcgccaagggcaaggacatcctgtacatcggcgaccacatcttcggcgacatcctgaagagcaagaagagacagggctggagaaccttcctggtgatccccgagctggcccaggagctgcacgtgtggaccgacaagagcagcctgttcgaggagctgcagagcctggacatcttcctggccgagctgtacaagcacctggacagcagcagcaacgagagacccgacatcagcagcatccagagaagaatcaagatgccccacgagagcaccgtggagcacacccacgtggacatcaacgagatggagagccccctggccacctag

SEQ ID NO: 71209 - DNA, 1599 bp, synthetic construct
  misc_feature 1..1599: note = Description of Artificial Sequence: Synthetic coding sequence
  source 1..1599: mol_type = other DNA
atgagcaaggagggcgtgttcgtgaacagaagcctggccatggagaagatcaagtgcttcggcttcgacatggactacaccctggccgtgtacaagagccccgagtacgagagcctgggcttcgagctgaccgtggagagactggtgagcatcggctacccccaggagctgctgagcttcgcctacgacagcaccttccccaccagaggcctggtgttcgacaccctgtacggcaacctgctgaaggtggacgcctacggcaacctgctggtgtgcgcccacggcttcaacttcatcagaggccccgagaccagagagcagtaccccaacaagttcatccagagagacgacaccgagagattctacatcctgaacaccctgttcaacctgcccgagacctacctgctggcctgcctggtggacttcttcaccaactgccccagatacaccagctgcgagaccggcttcaaggacggcgacctgttcatgagctacagaagcatgttccaggacgtgagagacgccgtggactgggtgcactacaagggcagcctgaaggagaagaccgtggagaacctggagaagtacgtggtgaaggacggcaagctgcccctgctgctgagcagaatgaaggaggtgggcaaggtgttcctggccaccaacagcgactacaagtacaccgacaagatcatgacctacctgttcgacttcccccacggccccaagcccggcagcagccacagaccctggcagagctacttcgacctgatcctggtggacgccagaaagcccctgttcttcggcgagggcaccgtgctgagacaggtggacaccaagaccggcaagctgaagatcggcacctacaccggccccctgcagcacggcatcgtgtacagcggcggcagcagcgacaccatctgcgacctgctgggcgccaagggcaaggacatcctgtacatcggcgaccacatcttcggcgacatcctgaagagcaagaagagacagggctggagaaccttcctggtgatccccgagctggcccaggagctgcacgtgtggaccgacaagagcagcctgttcgaggagctgcagagcctggacatcttcctggccgagctgtacaagcacctggacagcagcagcaacgagagacccgacatcagcagcatccagagaagaatcaagaaggtgacccacgacatggacatgtgctacggcatgatgggcagcctgttcagaagcggcagcagacagaccctgttcgccagccaggtgatgagatacgccgacctgtacgccgccagcttcatcaacctgctgtactaccccttcagctacctgttcagagccgcccacgtgctgatgccccacgagagcaccgtggagcacacccacgtggacatcaacgagatggagagccccctggccaccagaaacagaaccagcgtggacttcaaggacaccgactacaagagacaccagctgaccagaagcatcagcgagatcaagccccccaacctgttccccctggccccccaggagatcacccactgccacgacgaggacgacgacgaggaggaggaggaggaggaggagtag

SEQ ID NO: 71210 - DNA, 798 bp, synthetic construct
  misc_feature 1..798: note = Description of Artificial Sequence: Synthetic coding sequence
  source 1..798: mol_type = other DNA
atgagcaccagctggagcgacagactgcagaacgccgccgacatgcccgccaacatggacaagcacgccctgaagaagtacagaagagaggcctaccacagagtgttcgtgaacagaagcctggccatggagaagatcaagtgcttcggcttcgacatggactacaccctggccgtgtacaagagccccgagtacgagagcctgggcttcgagctgaccgtggagagactggtgagcatcggctacccccaggagctgctgagcttcgcctacgacagcaccttccccaccagaggcctggtgttcgacaccctgtacggcaacctgctgaaggtggacgcctacggcaacctgctggtgtgcgcccacggcttcaacttcatcagaggcagccaggtggccgtgcagaagagacccgagaccagagagcagtaccccaacaagttcatccagagagacgacaccgagagattctacatcctgaacaccctgttcaacctgcccgagacctacctgctggcctgcctggtggacttcttcaccaactgccccagatacaccagctgcgagaccggcttcaaggacggcgacctgttcatgagctacagaagcatgttccaggacgtgagagacgccgtggactgggtgcactacaagggcagcctgaaggagaagaccgtggagaacctggagaagtacgtggtgaaggacggcaagctgcccctgctgctgagcagaatgaaggaggtgggcaaggtgttcctggccaccaacagcgactacaagtacaccgactag

SEQ ID NO: 71211 - DNA, 525 bp, synthetic construct
  misc_feature 1..525: note = Description of Artificial Sequence: Synthetic coding sequence
  source 1..525: mol_type = other DNA
gtgagcatcggctacccccaggagctgctgagcttcgcctacgacagcaccttccccaccagaggcctggtgttcgacaccctgtacggcaacctgctgaaggtggacgcctacggcaacctgctggtgtgcgcccacggcttcaacttcatcagaggcagccaggtggccgtgcagaagagacccgagaccagagagcagtaccccaacaagttcatccagagagacgacaccgagagattctacatcctgaacaccctgttcaacctgcccgagacctacctgctggcctgcctggtggacttcttcaccaactgccccagatacaccagctgcgagaccggcttcaaggacggcgacctgttcatgagctacagaagcatgttccaggacgtgagagacgccgtggactgggtgcactacaagggcagcctgaaggagaagaccgtggagaacctggagaagtacgtggtgaaggacagcaagagcagcagaatccagtacttcctgaaggtgctgtggtag

SEQ ID NO: 71212 - DNA, 1011 bp, synthetic construct
  misc_feature 1..1011: note = Description of Artificial Sequence: Synthetic coding sequence
  source 1..1011: mol_type = other DNA
atgagagcccccagcatggacagagccgccgtggccagagtgggcgccgtggccagcgccagcgtgtgcgccctggtggccggcgtggtgctggcccagtacatcttcaccctgaagagaaagaccggcagaaagaccaagatcatcgagatgatgcccgagttccagaagagcagcgtgagaatcaagaaccccaccagagtggaggagatcatctgcggcctgatcaagggcggcgccgccaagctgcagatcatcaccgacttcgacatgaccctgagcagattcagctacaagggcaagagatgccccacctgccacaacatcatcgacaactgcaagctggtgaccgacgagtgcagaaagaagctgctgcagctgaaggagaagtactacgccatcgaggtggaccccgtgctgaccgtggaggagaagtacccctacatggtggagtggtacaccaagagccacggcctgctggtgcagcaggccctgcccaaggccaagctgaaggagatcgtggccgagagcgacgtgatgctgaaggagggctacgagaacttcttcgacaagctgcagcagcacagcatccccgtgttcatcttcagcgccggcatcggcgacgtgctggaggaggtgatcagacaggccggcgtgtaccaccccaacgtgaaggtggtgagcaacttcatggacttcgacgagaccggcgtgctgaagggcttcaagggcgagctgatccacgtgttcaacaagcacgacggcgccctgagaaacaccgagtacttcaaccagctgaaggacaacagcaacatcatcctgctgggcgacagccagggcgacctgagaatggccgacggcgtggccaacgtggagcacatcctgaagatcggctacctgaacgacagagtggacgagctgctggagaagtacatggacagctacgacatcgtgctggtgcaggacgagagcctggaggtggccaacagcatcctgcagaagatcctgtag

SEQ ID NO: 71213 - DNA, 858 bp, synthetic construct
  misc_feature 1..858: note = Description of Artificial Sequence: Synthetic coding sequence
  source 1..858: mol_type = other DNA
atgcccgagttccagaagagcagcgtgagaatcaagaaccccaccagagtggaggagatcatctgcggcctgatcaagggcggcgccgccaagctgcagatcatcaccgacttcgacatgaccctgagcagattcagctacaagggcaagagatgccccacctgccacaacatcatcgacaactgcaagctggtgaccgacgagtgcagaaagaagctgctgcagctgaaggagaagtactacgccatcgaggtggaccccgtgctgaccgtggaggagaagtacccctacatggtggagtggtacaccaagagccacggcctgctggtgcagcaggccctgcccaaggccaagctgaaggagatcgtggccgagagcgacgtgatgctgaaggagggctacgagaacttcttcgacaagctgcagcagcacagcatccccgtgttcatcttcagcgccggcatcggcgacgtgctggaggaggtgatcagacaggccggcgtgtaccaccccaacgtgaaggtggtgagcaacttcatggacttcgacgagaccggcgtgctgaagggcttcaagggcgagctgatccacgtgttcaacaagcacgacggcgccctgagaaacaccgagtacttcaaccagctgaaggacaacagcaacatcatcctgctgggcgacagccagggcgacctgagaatggccgacggcgtggccaacgtggagcacatcctgaagatcggctacctgaacgacagagtggacgagctgctggagaagtacatggacagctacgacatcgtgctggtgcaggacgagagcctggaggtggccaacagcatcctgcagaagatcctgtag

SEQ ID NO: 71214 - DNA, 894 bp, synthetic construct
  misc_feature 1..894: note = Description of Artificial Sequence: Synthetic coding sequence
  source 1..894: mol_type = other DNA
atgaccaaccaggagagcgccgtgcacgtgaagatgatgcccgagttccagaagagcagcgtgagaatcaagaaccccaccagagtggaggagatcatctgcggcctgatcaagggcggcgccgccaagctgcagatcatcaccgacttcgacatgaccctgagcagattcagctacaagggcaagagatgccccacctgccacaacatcatcgacaactgcaagctggtgaccgacgagtgcagaaagaagctgctgcagctgaaggagaagtactacgccatcgaggtggaccccgtgctgaccgtggaggagaagtacccctacatggtggagtggtacaccaagagccacggcctgctggtgcagcaggccctgcccaaggccaagctgaaggagatcgtggccgagagcgacgtgatgctgaaggagggctacgagaacttcttcgacaagctgcagcagcacagcatccccgtgttcatcttcagcgccggcatcggcgacgtgctggaggaggtgatcagacaggccggcgtgtaccaccccaacgtgaaggtggtgagcaacttcatggacttcgacgagaccggcgtgctgaagggcttcaagggcgagctgatccacgtgttcaacaagcacgacggcgccctgagaaacaccgagtacttcaaccagctgaaggacaacagcaacatcatcctgctgggcgacagccagggcgacctgagaatggccgacggcgtggccaacgtggagcacatcctgaagatcggctacctgaacgacagagtggacgagctgctggagaagtacatggacagctacgacatcgtgctggtgcaggacgagagcctggaggtggccaacagcatcctgcagaagatcctgtag

SEQ ID NO: 71215 - DNA, 894 bp, synthetic construct; identical to SEQ ID NO: 71214
  misc_feature 1..894: note = Description of Artificial Sequence: Synthetic coding sequence
  source 1..894: mol_type = other DNA

SEQ ID NO: 71216 - DNA, 858 bp, synthetic construct; identical to SEQ ID NO: 71213
  misc_feature 1..858: note = Description of Artificial Sequence: Synthetic coding sequence
  source 1..858: mol_type = other DNA

SEQ ID NO: 71217 - DNA, 129 bp, synthetic construct
  misc_feature 1..129: note = Description of Artificial Sequence: Synthetic coding sequence
  source 1..129: mol_type = other DNA
atgcccgagttccagaagagcagcgtgagaatcaagaaccccaccagagtggaggagatcatctgcggcctgatcaagggcggcgccgccaagctgcagatcatcaccgacttcgacatgaccctgtag

SEQ ID NO: 71218 - DNA, 1725 bp, synthetic construct
  misc_feature 1..1725: note = Description of Artificial Sequence: Synthetic coding sequence
  source 1..1725: mol_type = other DNA
atgtgccccagagccgccagagcccccgccaccctgctgctggccctgggcgccgtgctgtggcccgccgccggcgcctgggagctgaccatcctgcacaccaacgacgtgcacagcagactggagcagaccagcgaggacagcagcaagtgcgtgaacgccagcagatgcatgggcggcgtggccagactgttcaccaaggtgcagcagatcagaagagccgagcccaacgtgctgctgctggacgccggcgaccagtaccagggcaccatctggttcaccgtgtacaagggcgccgaggtggcccacttcatgaacgccctgagatacgacgccatggccctgggcaaccacgagttcgacaacggcgtggagggcctgatcgagcccctgctgaaggaggccaagttccccatcctgagcgccaacatcaaggccaagggccccctggccagccagatcagcggcctgtacctgccctacaaggtgctgcccgtgggcgacgaggtggtgggcatcgtgggctacaccagcaaggagacccccttcctgagcaaccccggcaccaacctggtgttcgaggacgagatcaccgccctgcagcccgaggtggacaagctgaagaccctgaacgtgaacaagatcatcgccctgggccacagcggcttcgagatggacaagctgatcgcccagaaggtgagaggcgtggacgtggtggtgggcggccacagcaacaccttcctgtacaccggcaacccccccagcaaggaggtgcccgccggcaagtaccccttcatcgtgaccagcgacgacggcagaaaggtgcccgtggtgcaggcctacgccttcggcaagtacctgggctacctgaagatcgagttcgacgagagaggcaacgtgatcagcagccacggcaaccccatcctgctgaacagcagcatccccgaggaccccagcatcaaggccgacatcaacaagtggagaatcaagctggacaactacagcacccaggagctgggcaagaccatcgtgtacctggacggcagcagccagagctgcagattcagagagtgcaacatgggcaacctgatctgcgacgccatgatcaacaacaacctgagacacaccgacgagatgttctggaaccacgtgagcatgtgcatcctgaacggcggcggcatcagaagccccatcgacgagagaaacaacggcaccatcacctgggagaacctggccgccgtgctgcccttcggcggcaccttcgacctggtgcagctgaagggcagcaccctgaagaaggccttcgagcacagcgtgcacagatacggccagagcaccggcgagttcctgcaggtgggcggcatccacgtggtgtacgacctgagcagaaagcccggcgacagagtggtgaagctggacgtgctgtgcaccaagtgcagagtgcccagctacgaccccctgaagatggacgaggtgtacaaggtgatcctgcccaacttcctggccaacggcggcgacggcttccagatgatcaaggacgagctgctgagacacgacagcggcgaccaggacatcaacgtggtgagcacctacatcagcaagatgaaggtgatctaccccgccgtggagggcagaatcaagttcagcaccggcagccactgccacggcagcttcagcctgatcttcctgagcctgtgggccgtgatcttcgtgctgtaccagtag

SEQ ID NO: 71219 - DNA, 795 bp, synthetic construct
  misc_feature 1..795: note = Description of Artificial Sequence: Synthetic coding sequence
  source 1..795: mol_type = other DNA
atgtgccccagagccgccagagcccccgccaccctgctgctggccctgggcgccgtgctgtggcccgccgccggcgcctgggagctgaccatcctgcacaccaacgacgtgcacagcagactggagcagaccagcgaggacagcagcaagtgcgtgaacgccagcagatgcatgggcggcgtggccagactgttcaccaaggtgcagcagatcagaagagccgagcccaacgtgctgctgctggacgccggcgaccagtaccagggcaccatctggttcaccgtgtacaagggcgccgaggtggcccacttcatgaacgccctgagatacgacgccatggccctgggcaaccacgagttcgacaacggcgtggagggcctgatcgagcccctgctgaaggaggccaagttccccatcctgagcgccaacatcaaggccaagggccccctggccagccagatcagcggcctgtacctgccctacaaggtgctgcccgtgggcgacgaggtggtgggcatcgtgggctacaccagcaaggagacccccttcctgagcaaccccggcaccaacctggtgttcgaggacgagatcaccgccctgcagcccgaggtggacaagctgaagaccctgaacgtgaacaagatcatcgccctgggccacagcggcttcgagatggacaagctgatcgcccagaaggtgagaggcgtggacgtggtggtgggcggccacagcaacaccttcctgtacaccggcaactgcttcaagagaatcgcctgggccagaatgagcagatag

SEQ ID NO: 71220 - DNA, 780 bp, synthetic construct
  misc_feature 1..780: note = Description of Artificial Sequence: Synthetic coding sequence
  source 1..780: mol_type = other DNA
atggacaagctgatcgcccagaaggtgagaggcgtggacgtggtggtgggcggccacagcaacaccttcctgtacaccggcaacccccccagcaaggaggtgcccgccggcaagtaccccttcatcgtgaccagcgacgacggcagaaaggtgcccgtggtgcaggcctacgccttcggcaagtacctgggctacctgaagatcgagttcgacgagagaggcaacgtgatcagcagccacggcaaccccatcctgctgaacagcagcatccccgaggaccccagcatcaaggccgacatcaacaagtggagaatcaagctggacaactacagcacccaggagctgggcaagaccatcgtgtacctggacggcagcagccagagctgcagattcagagagtgcaacatgggcaacctgatctgcgacgccatgatcaacaacaacctgagacacaccgacgagatgttctggaaccacgtgagcatgtgcatcctgaacggcggcggcatcagaagccccatcgacgagagaaacaacggcaccatcacctgggagaacctggccgccgtgctgcccttcggcggcaccttcgacctggtgcagctgaagggcagcaccctgaagaaggccttcgagcacagcgtgcacagatacggccagagcaccggcgagttcctgcaggtgggcgacctgaaggagtgctgccccatctgcatcaaccaggacgacagctggaaggagcagcccaccgcccagacctacctgaacacctggttctag

SEQ ID NO: 71221 - DNA, 1575 bp, synthetic construct
  misc_feature 1..1575: note = Description of Artificial Sequence: Synthetic coding sequence
  source 1..1575: mol_type = other DNA
atgtgccccagagccgccagagcccccgccaccctgctgctggccctgggcgccgtgctgtggcccgccgccggcgcctgggagctgaccatcctgcacaccaacgacgtgcacagcagactggagcagaccagcgaggacagcagcaagtgcgtgaacgccagcagatgcatgggcggcgtggccagactgttcaccaaggtgcagcagatcagaagagccgagcccaacgtgctgctgctggacgccggcgaccagtaccagggcaccatctggttcaccgtgtacaagggcgccgaggtggcccacttcatgaacgccctgagatacgacgccatggccctgggcaaccacgagttcgacaacggcgtggagggcctgatcgagcccctgctgaaggaggccaagttccccatcctgagcgccaacatcaaggccaagggccccctggccagccagatcagcggcctgtacctgccctacaaggtgctgcccgtgggcgacgaggtggtgggcatcgtgggctacaccagcaaggagacccccttcctgagcaaccccggcaccaacctggtgttcgaggacgagatcaccgccctgcagcccgaggtggacaagctgaagaccctgaacgtgaacaagatcatcgccctgggccacagcggcttcgagatggacaagctgatcgcccagaaggtgagaggcgtggacgtggtggtgggcggccacagcaacaccttcctgtacaccggcaacccccccagcaaggaggtgcccgccggcaagtaccccttcatcgtgaccagcgacgacggcagaaaggtgcccgtggtgcaggcctacgccttcggcaagtacctgggctacctgaagatcgagttcgacgagagaggcaacgtgatcagcagccacggcaaccccatcctgctgaacagcagcatccccgaggaccccagcatcaaggccgacatcaacaagtggagaatcaagctggacaactacagcacccaggagctgggcaagaccatcgtgtacctggacggcagcagccagagctgcagattcagagagtgcaacatgggcaacctgatctgcgacgccatgatcaacaacaacctgagacacaccgacgagatgttctggaaccacgtgagcatgtgcatcctgaacggcggcggcatcagaagccccatcgacgagagaaacaacggcatccacgtggtgtacgacctgagcagaaagcccggcgacagagtggtgaagctggacgtgctgtgcaccaagtgcagagtgcccagctacgaccccctgaagatggacgaggtgtacaaggtgatcctgcccaacttcctggccaacggcggcgacggcttccagatgatcaaggacgagctgctgagacacgacagcggcgaccaggacatcaacgtggtgagcacctacatcagcaagatgaaggtgatctaccccgccgtggagggcagaatcaagttcagcaccggcagccactgccacggcagcttcagcctgatcttcctgagcctgtgggccgtgatcttcgtgctgtaccagtag

SEQ ID NO: 71222 - DNA, 693 bp, synthetic construct
  misc_feature 1..693: note = Description of Artificial Sequence: Synthetic coding sequence
  source 1..693: mol_type = other DNA
tgagacgtggtggtgggcggccacagcaacaccttcctgtacaccggcaacccccccagcaaggaggtgcccgccggcaagtaccccttcatcgtgaccagcgacgacggcagaaaggtgcccgtggtgcaggcctacgccttcggcaagtacctgggctacctgaagatcgagttcgacgagagaggcaacgtgatcagcagccacggcaaccccatcctgctgaacagcagcatccccgaggaccccagcatcaaggccgacatcaacaagtggagaatcaagctggacaactacagcacccaggagctgggcaagaccatcgtgtacctggacggcagcagccagagctgcagattcagagagtgcaacatgggcaacctgatctgcgacgccatgatcaacaacaacctgagacacaccgacgagatgttctggaaccacgtgagcatgtgcatcctgaacggcggcggcatcagaagccccatcgacgagagaaacaacggcatccacgtggtgtacgacctgagcagaaagcccggcgacagagtggtgaagctggacgtgctgtgcaccaagtgcagagtgcccagctacgaccccctgaagatggacgaggtgtacaaggtgatcctgcccaacttcctggccaacggcggcgacggcttccagatgatcaaggacgagctgtag

SEQ ID NO: 71223 - DNA, 540 bp, synthetic construct
  misc_feature 1..540: note = Description of Artificial Sequence: Synthetic coding sequence
  source 1..540: mol_type = other DNA
tgaaaccccatcctgctgaacagcagcatccccgaggaccccagcatcaaggccgacatcaacaagtggagaatcaagctggacaactacagcacccaggagctgggcaagaccatcgtgtacctggacggcagcagccagagctgcagattcagagagtgcaacatgggcaacctgatctgcgacgccatgatcaacaacaacctgagacacaccgacgagatgttctggaaccacgtgagcatgtgcatcctgaacggcggcggcatcagaagccccatcgacgagagaaacaacggcaccatcacctgggagaacctggccgccgtgctgcccttcggcggcaccttcgacctggtgcagctgaagggcagcaccctgaagaaggccttcgagcacagcgtgcacagatacggccagagcaccggcgagttcctgcaggtgggcgacctgaaggagtgctgccccatctgcatcaaccaggacgacagctggaaggagcagcccaccgcccagacctacctgaacacctggttctag

SEQ ID NO: 71224 - DNA, 687 bp, synthetic construct
  misc_feature 1..687: note = Description of Artificial Sequence: Synthetic coding sequence
  source 1..687: mol_type = other DNA
atggtgagatacagcctggaccccgagaaccccaccaagagctgcaagagcagaggcagcaacctgagagtgcacttcaagaacaccagagagaccgcccaggccatcaagggcatgcacatcagaaaggccaccaagtacctgaaggacgtgaccctgcagaagcagtgcgtgcccttcagaagatacaacggcggcgtgggcagatgcgcccaggccaagcagtggggctggacccagggcagatggcccaagaagagcgccgagttcctgctgcacatgctgaagaacgccgagagcaacgccgagctgaagggcctggacgtggacagcctggtgatcgagcacatccaggtgaacaaggcccccaagatgagaagaagaacctacagagcccacggcagaatcaacccctacatgagcagcccctgccacatcgagatgatcctgaccgagaaggagcagatcgtgcccaagcccgaggaggaggtggcccagaagaagaagctgagaagcagcagcctgggcaagtggtgcgccttcctggtgagcagcttccagttctgcagcggcagcaccaagaacagctggagccacatctacaccctgtggttcccccccagcctggtggtgtacggcctgagaaagcagtacaagaaccccatgatccagaccaaggccaagtag

SEQ ID NO: 71225 - DNA, 816 bp, synthetic construct
  misc_feature 1..816: note = Description of Artificial Sequence: Synthetic coding sequence
  source 1..816: mol_type = other DNA
atgagccccgagatgggcgagctgacccagaccagactgcagaagatctggatcccccacagcagcggcagcagcagactgcagagaagaagaggcagcagcatcccccagttcaccaacagccccaccatggtgatcatggtgggcctgcccgccagaggcaagacctacatcagcaccaagctgaccagatacctgaactggatcggcacccccaccaaggacaacatggaggccctgcagatcagaaagcagtgcgccctggccgccctgaaggacgtgcacaactacctgagccacgaggagggccacgtggccgtgttcgacgccaccaacaccaccagagagagaagaagcctgatcctgcagttcgccaaggagcacggctacaagggcgtgtgcgaggagatgacctacgaggagatccaggagcactaccccgaggagttcgccctgagagaccaggacaagtacagatacagataccccaagggcgagagctacgaggacctggtgcagagactggagcccgtgatcatggagctggagagacaggagaacgtgctggtgatctgccaccaggccgtgatgagatgcctgctggcctacttcctggacaagagcagcgacgagctgccctacctgaagtgccccctgcacaccgtgctgaagctgacccccgtggcctacggctgcaaggtggagagcatctacctgaacgtggaggccgtgaacacccacagagagaagcccgagaacgtggacatcaccagagagcccgaggaggccctggacaccgtgcccgcccactactag

SEQ ID NO: 71226 - DNA, 1416 bp, synthetic construct
  misc_feature 1..1416: note = Description of Artificial Sequence: Synthetic coding sequence
  source 1..1416: mol_type = other DNA
atgagccccgagatgggcgagctgacccagaccagactgcagaagatctggatcccccacagcagcggcagcagcagactgcagagaagaagaggcagcagcatcccccagttcaccaacagccccaccatggtgatcatggtgggcctgcccgccagaggcaagacctacatcagcaccaagctgaccagatacctgaactggatcggcacccccaccaaggtgttcaacctgggccagtacagaagagaggccgtgagctacaagaactacgagttcttcctgcccgacaacatggaggccctgcagatcagaaagcagtgcgccctggccgccctgaaggacgtgcacaactacctgagccacgaggagggccacgtggccgtgttcgacgccaccaacaccaccagagagagaagaagcctgatcctgcagttcgccaaggagcacggctacaaggtgttcttcatcgagagcatctgcaacgaccccggcatcatcgccgagaacatcagacaggtgaagctgggcagccccgactacatcgactgcgacagagagaaggtgctggaggacttcctgaagagaatcgagtgctacgaggtgaactaccagcccctggacgaggagctggacagccacctgagctacatcaagatcttcgacgtgggcaccagatacatggtgaacagagtgcaggaccacatccagagcagaaccgtgtactacctgatgaacatccacgtgacccccagaagcatctacctgtgcagacacggcgagagcgagctgaacatcagaggcagaatcggcggcgacagcggcctgagcgtgagaggcaagcagtacgcctacgccctggccaacttcatccagagccagggcatcagcagcctgaaggtgtggaccagccacatgaagagaaccatccagaccgccgaggccctgggcgtgccctacgagcagtggaaggccctgaacgagatcgacgccggcgtgtgcgaggagatgacctacgaggagatccaggagcactaccccgaggagttcgccctgagagaccaggacaagtacagatacagataccccaagggcgagagctacgaggacctggtgcagagactggagcccgtgatcatggagctggagagacaggagaacgtgctggtgatctgccaccaggccgtgatgagatgcctgctggcctacttcctggacaagagcagcgacgagctgccctacctgaagtgccccctgcacaccgtgctgaagctgacccccgtggcctacggctgcaaggtggagagcatctacctgaacgtggaggccgtgaacacccacagagagaagcccgagaacgtggacatcaccagagagcccgaggaggccctggacaccgtgcccgcccactactag

SEQ ID NO: 71227 - DNA, 1221 bp, synthetic construct
  misc_feature 1..1221: note = Description of Artificial Sequence: Synthetic coding sequence
  source 1..1221: mol_type = other DNA
atggaggagaagaccagcagaatcaaggtgttcaacctgggccagtacagaagagaggccgtgagctacaagaactacgagttcttcctgcccgacaacatggaggccctgcagatcagaaagcagtgcgccctggccgccctgaaggacgtgcacaactacctgagccacgaggagggccacgtggccgtgttcgacgccaccaacaccaccagagagagaagaagcctgatcctgcagttcgccaaggagcacggctacaaggtgttcttcatcgagagcatctgcaacgaccccggcatcatcgccgagaacatcagacaggtgaagctgggcagccccgactacatcgactgcgacagagagaaggtgctggaggacttcctgaagagaatcgagtgctacgaggtgaactaccagcccctggacgaggagctggacagccacctgagctacatcaagatcttcgacgtgggcaccagatacatggtgaacagagtgcaggaccacatccagagcagaaccgtgtactacctgatgaacatccacgtgacccccagaagcatctacctgtgcagacacggcgagagcgagctgaacatcagaggcagaatcggcggcgacagcggcctgagcgtgagaggcaagcagtacgcctacgccctggccaacttcatccagagccagggcatcagcagcctgaaggtgtggaccagccacatgaagagaaccatccagaccgccgaggccctgggcgtgccctacgagcagtggaaggccctgaacgagatcgacgccggcgtgtgcgaggagatgacctacgaggagatccaggagcactaccccgaggagttcgccctgagagaccaggacaagtacagatacagataccccaagggcgagagctacgaggacctggtgcagagactggagcccgtgatcatggagctggagagacaggagaacgtgctggtgatctgccaccaggccgtgatgagatgcctgctggcctacttcctggacaagagcagcgacgagctgccctacctgaagtgccccctgcacaccgtgctgaagctgacccccgtggcctacggctgcaaggtggagagcatctacctgaacgtggaggccgtgaacacccacagagagaagcccgagaacgtggacatcaccagagagcccgaggaggccctggacaccgtgcccgcccactactag

SEQ ID NO: 71228 - DNA, 1416 bp, synthetic construct
  misc_feature 1..1416: note = Description of Artificial Sequence: Synthetic coding sequence
  source 1..1416: mol_type = other DNA
atgagcggcgccagcagcagcgagcagaacaacaacagctacgagaccaagacccccaacctgagaatgagcgagaagaagtgcagctgggccagctacatgaccaacagccccaccctgatcgtgatgatcggcctgcccgccagaggcaagacctacgtgagcaagaagctgaccagatacctgaactggatcggcgtgcccaccaaggtgttcaacctgggcgtgtacagaagagaggccgtgaagagctacaagagctacgacttcttcagacacgacaacgaggaggccatgaagatcagaaagcagtgcgccctggtggccctggaggacgtgaaggcctacctgaccgaggagaacggccagatcgccgtgttcgacgccaccaacaccaccagagagagaagagacatgatcctgaacttcgccgagcagaacagcttcaaggtgttcttcgtggagagcgtgtgcgacgaccccgacgtgatcgccgccaacatcctggaggtgaaggtgagcagccccgactaccccgagagaaacagagagaacgtgatggaggacttcctgaagagaatcgagtgctacaaggtgacctacagacccctggaccccgacaactacgacaaggacctgagcttcatcaaggtgatcaacgtgggccagagattcctggtgaacagagtgcaggactacatccagagcaagatcgtgtactacctgatgaacatccacgtgcagcccagaaccatctacctgtgcagacacggcgagagcgagttcaacctgctgggcaagatcggcggcgacagcggcctgagcgtgagaggcaagcagttcgcccaggccctgagaaagttcctggaggagcaggagatcaccgacctgaaggtgtggaccagccagctgaagagaaccatccagaccgccgagagcctgggcgtgccctacgagcagtggaagatcctgaacgagatcgacgccggcgtgtgcgaggagatgacctacgccgagatcgagaagagataccccgaggagttcgccctgagagaccaggagaagtacctgtacagataccccggcggcgagagctaccaggacctggtgcagagactggagcccgtgatcatggagctggagagacagggcaacgtgctggtgatcagccaccaggccgtgatgagatgcctgctggcctacttcctggacaagggcgccgacgagctgccctacctgagatgccccctgcacaccatcttcaagctgacccccgtggcctacggctgcaaggtggagaccatcaagctgaacgtggaggccgtgaacacccacagagacaagcccaccgccgccgagaccaccctggccgtgagaagaagacccagcgccgccagcctgatgctgccctgctag

SEQ ID NO: 71229 - DNA, 1518 bp, synthetic construct
  misc_feature 1..1518: note = Description of Artificial Sequence: Synthetic coding sequence
  source 1..1518: mol_type = other DNA
atgagcggcgccagcagcagcgagcagaacaacaacagctacgagaccaagacccccaacctgagaatgagcgagaagaagtgcagctgggccagctacatgaccaacagccccaccctgatcgtgatgatcggcctgcccgccagaggcaagacctacgtgagcaagaagctgaccagatacctgaactggatcggcgtgcccaccaaggtgttcaacctgggcgtgtacagaagagaggccgtgaagagctacaagagctacgacttcttcagacacgacaacgaggaggccatgaagatcagaaagcagtgcgccctggtggccctggaggacgtgaaggcctacctgaccgaggagaacggccagatcgccgtgttcgacgccaccaacaccaccagagagagaagagacatgatcctgaacttcgccgagcagaacagcttcaaggtgttcttcgtggagagcgtgtgcgacgaccccgacgtgatcgccgccaacatcctggaggtgaaggtgagcagccccgactaccccgagagaaacagagagaacgtgatggaggacttcctgaagagaatcgagtgctacaaggtgacctacagacccctggaccccgacaactacgacaaggacctgagcttcatcaaggtgatcaacgtgggccagagattcctggtgaacagagtgcaggactacatccagagcaagatcgtgtactacctgatgaacatccacgtgcagcccagaaccatctacctgtgcagacacggcgagagcgagttcaacctgctgggcaagatcggcggcgacagcggcctgagcgtgagaggcaagcagttcgcccaggccctgagaaagttcctggaggagcaggagatcaccgacctgaaggtgtggaccagccagctgaagagaaccatccagaccgccgagagcctgggcgtgccctacgagcagtggaagatcctgaacgagatcgacgccggcgtgtgcgaggagatgacctacgccgagatcgagaagagataccccgaggagttcgccctgagagaccaggagaagtacctgtacagataccccggcggcgagagctaccaggacctggtgcagagactggagcccgtgatcatggagctggagagacagggcaacgtgctggtgatcagccaccaggccgtgatgagatgcctgctggcctacttcctggacaagggcgccgacgagctgccctacctgagatgccccctgcacaccatcttcaagctgacccccgtggcctacggctgcaaggtggagaccatcaagctgaacgtggaggccgtgaacacccacagagacaagcccaccaacaacttccccaagaaccagacccccgtgagaatgagaagaaacagcttcacccccctgagcagcagcaacaccatcagaagacccagaaactacagcgtgggcagcagacccctgaagcccctgagccccctgagagcccaggacatgcaggagggcgccgactag

SEQ ID NO: 71230 - DNA, 1122 bp, synthetic construct
  misc_feature 1..1122: note = Description of Artificial Sequence: Synthetic coding sequence
  source 1..1122: mol_type = other DNA
atgaagatcagaaagcagtgcgccctggtggccctggaggacgtgaaggcctacctgaccgaggagaacggccagatcgccgtgttcgacgccaccaacaccaccagagagagaagagacatgatcctgaacttcgccgagcagaacagcttcaaggtgttcttcgtggagagcgtgtgcgacgaccccgacgtgatcgccgccaacatcctggaggtgaaggtgagcagccccgactaccccgagagaaacagagagaacgtgatggaggacttcctgaagagaatcgagtgctacaaggtgacctacagacccctggaccccgacaactacgacaaggacctgagcttcatcaaggtgatcaacgtgggccagagattcctggtgaacagagtgcaggactacatccagagcaagatcgtgtactacctgatgaacatccacgtgcagcccagaaccatctacctgtgcagacacggcgagagcgagttcaacctgctgggcaagatcggcggcgacagcggcctgagcgtgagaggcaagcagttcgcccaggccctgagaaagttcctggaggagcaggagatcaccgacctgaaggtgtggaccagccagctgaagagaaccatccagaccgccgagagcctgggcgtgccctacgagcagtggaagatcctgaacgagatcgacgccggcgtgtgcgaggagatgacctacgccgagatcgagaagagataccccgaggagttcgccctgagagaccaggagaagtacctgtacagataccccggcggcgagagctaccaggacctggtgcagagactggagcccgtgatcatggagctggagagacagggcaacgtgctggtgatcagccaccaggccgtgatgagatgcctgctggcctacttcctggacaagggcgccgacgagctgccctacctgagatgccccctgcacaccatcttcaagctgacccccgtggcctacggctgcaaggtggagaccatcaagctgaacgtggaggccgtgaacacccacagagacaagcccaccgccgccgagaccaccctggccgtgagaagaagacccagcgccgccagcctgatgctgccctgctag

SEQ ID NO: 71231 - DNA, 795 bp, synthetic construct
  misc_feature 1..795: note = Description of Artificial Sequence: Synthetic coding sequence
  source 1..795: mol_type = other DNA
atggaggacttcctgaagagaatcgagtgctacaaggtgacctacagacccctggaccccgacaactacgacaaggacctgagcttcatcaaggtgatcaacgtgggccagagattcctggtgaacagagtgcaggactacatccagagcaagatcgtgtactacctgatgaacatccacgtgcagcccagaaccatctacctgtgcagacacggcgagagcgagttcaacctgctgggcaagatcggcggcgacagcggcctgagcgtgagaggcaagcagttcgcccaggccctgagaaagttcctggaggagcaggagatcaccgacctgaaggtgtggaccagccagctgaagagaaccatccagaccgccgagagcctgggcgtgccctacgagcagtggaagatcctgaacgagatcgacgccggcgtgtgcgaggagatgacctacgccgagatcgagaagagataccccgaggagttcgccctgagagaccaggagaagtacctgtacagataccccggcggcgagagctaccaggacctggtgcagagactggagcccgtgatcatggagctggagagacagggcaacgtgctggtgatcagccaccaggccgtgatgagatgcctgctggcctacttcctggacaagggcgccggctgcaaggtggagaccatcaagctgaacgtggaggccgtgaacacccacagagacaagcccaccgccgccgagaccaccctggccgtgagaagaagacccagcgccgccagcctgatgctgccctgctag

SEQ ID NO: 71232 - DNA, 1419 bp, synthetic construct
  misc_feature 1..1419: note = Description of Artificial Sequence: Synthetic coding sequence
  source 1..1419: mol_type = other DNA
atgaccaacagccccaccctgatcgtgatgatcggcctgcccgccagaggcaagacctacgtgagcaagaagctgaccagatacctgaactggatcggcgtgcccaccaaggtgttcaacctgggcgtgtacagaagagaggccgtgaagagctacaagagctacgacttcttcagacacgacaacgaggaggccatgaagatcagaaagcagtgcgccctggtggccctggaggacgtgaaggcctacctgaccgaggagaacggccagatcgccgtgttcgacgccaccaacaccaccagagagagaagagacatgatcctgaacttcgccgagcagaacagcttcaaggtgttcttcgtggagagcgtgtgcgacgaccccgacgtgatcgccgccaacatcctggaggtgaaggtgagcagccccgactaccccgagagaaacagagagaacgtgatggaggacttcctgaagagaatcgagtgctacaaggtgacctacagacccctggaccccgacaactacgacaaggacctgagcttcatcaaggtgatcaacgtgggccagagattcctggtgaacagagtgcaggactacatccagagcaagatcgtgtactacctgatgaacatccacgtgcagcccagaaccatctacctgtgcagacacggcgagagcgagttcaacctgctgggcaagatcggcggcgacagcggcctgagcgtgagaggcaagcagttcgcccaggccctgagaaagttcctggaggagcaggagatcaccgacctgaaggtgtggaccagccagctgaagagaaccatccagaccgccgagagcctgggcgtgccctacgagcagtggaagatcctgaacgagatcgacgccggcgtgtgcgaggagatgacctacgccgagatcgagaagagataccccgaggagttcgccctgagagaccaggagaagtacctgtacagataccccggcggcgagagctaccaggacctggtgcagagactggagcccgtgatcatggagctggagagacagggcaacgtgctggtgatcagccaccaggccgtgatgagatgcctgctggcctacttcctggacaagggcgccgacgagctgccctacctgagatgccccctgcacaccatcttcaagctgacccccgtggcctacggctgcaaggtggagaccatcaagctgaacgtggaggccgtgaacacccacagagacaagcccaccaacaacttccccaagaaccagacccccgtgagaatgagaagaaacagcttcacccccctgagcagcagcaacaccatcagaagacccagaaactacagcgtgggcagcagacccctgaagcccctgagccccctgagagcccaggacatgcaggagggcgccgactag

SEQ ID NO: 71233 - DNA, 1542 bp, synthetic construct
  misc_feature 1..1542: note = Description of Artificial Sequence: Synthetic coding sequence
  source 1..1542: mol_type = other DNA
atgcccctggagctgacccagagcagagtgcagaagatctgggtgcccgtggaccacagacccagcctgcccagaagctgcggccccaagctgaccaacagccccaccgtgatcgtgatggtgggcctgcccgccagaggcaagacctacatcagcaagaagctgaccagatacctgaactggatcggcgtgcccaccaaggtgttcaacgtgggcgagtacagaagagaggccgtgaagcagtacagcagctacaacttcttcagacccgacaacgaggaggccatgaaggtgagaaagcagtgcgccctggccgccctgagagacgtgaagagctacctggccaaggagggcggccagatcgccgtgttcgacgccaccaacaccaccagagagagaagacacatgatcctgcacttcgccaaggagaacgacttcaaggccttcttcatcgagagcgtgtgcgacgaccccaccgtggtggccagcaacatcatggaggtgaagatcagcagccccgactacaaggactgcaacagcgccgaggccatggacgacttcatgaagagaatcagctgctacgaggccagctaccagcccctggaccccgacaagtgcgacagagacctgagcctgatcaaggtgatcgacgtgggcagaagattcctggtgaacagagtgcaggaccacatccagagcagaatcgtgtactacctgatgaacatccacgtgcagcccagaaccatctacctgtgcagacacggcgagaacgagcacaacctgcagggcagaatcggcggcgacagcggcctgagcagcagaggcaagaagttcgccagcgccctgagcaagttcgtggaggagcagaacctgaaggacctgagagtgtggaccagccagctgaagagcaccatccagaccgccgaggccctgagactgccctacgagcagtggaaggccctgaacgagatcgacgccggcgtgtgcgaggagctgacctacgaggagatcagagacacctaccccgaggagtacgccctgagagagcaggacaagtactactacagataccccaccggcgagagctaccaggacctggtgcagagactggagcccgtgatcatggagctggagagacaggagaacgtgctggtgatctgccaccaggccgtgctgagatgcctgctggcctacttcctggacaagagcgccgaggagatgccctacctgaagtgccccctgcacaccgtgctgaagctgacccccgtggcctacggctgcagagtggagagcatctacctgaacgtggagagcgtgtgcacccacagagagagaagcgaggacgccaagaagggccccaaccccctgatgagaagaaacagcgtgacccccctggccagccccgagcccaccaagaagcccagaatcaacagcttcgaggagcacgtggccagcaccagcgccgccctgcccagctgcctgccccccgaggtgcccacccagctgcccggccagcccctgctgggccaggcctgcctgtag

SEQ ID NO: 71234 - DNA, 1545 bp, synthetic construct
  misc_feature 1..1545: note = Description of Artificial Sequence: Synthetic coding sequence
  source 1..1545: mol_type = other DNA
atgcccctggagctgacccagagcagagtgcagaagatctgggtgcccgtggaccacagacccagcctgcccagaagctgcggccccaagctgaccaacagccccaccgtgatcgtgatggtgggcctgcccgccagaggcaagacctacatcagcaagaagctgaccagatacctgaactggatcggcgtgcccaccaaggtgttcaacgtgggcgagtacagaagagaggccgtgaagcagtacagcagctacaacttcttcagacccgacaacgaggaggccatgaaggtgagaaagcagtgcgccctggccgccctgagagacgtgaagagctacctggccaaggagggcggccagatcgccgtgttcgacgccaccaacaccaccagagagagaagacacatgatcctgcacttcgccaaggagaacgacttcaaggccttcttcatcgagagcgtgtgcgacgaccccaccgtggtggccagcaacatcatggaggtgaagatcagcagccccgactacaaggactgcaacagcgccgaggccatggacgacttcatgaagagaatcagctgctacgaggccagctaccagcccctggaccccgacaagtgcgacagagacctgagcctgatcaaggtgatcgacgtgggcagaagattcctggtgaacagagtgcaggaccacatccagagcagaatcgtgtactacctgatgaacatccacgtgcagcccagaaccatctacctgtgcagacacggcgagaacgagcacaacctgcagggcagaatcggcggcgacagcggcctgagcagcagaggcaagaagttcgccagcgccctgagcaagttcgtggaggagcagaacctgaaggacctgagagtgtggaccagccagctgaagagcaccatccagaccgccgaggccctgagactgccctacgagcagtggaaggccctgaacgagatcgacgccggcgtgtgcgaggagctgacctacgaggagatcagagacacctaccccgaggagtacgccctgagagagcaggacaagtactactacagataccccaccggcgagagctaccaggacctggtgcagagactggagcccgtgatcatggagctggagagacaggagaacgtgctggtgatctgccaccaggccgtgctgagatgcctgctggcctacttcctggacaagagcgccgaggagatgccctacctgaagtgccccctgcacaccgtgctgaagctgacccccgtggcctacggctgcagagtggagagcatctacctgaacgtggagagcgtgtgcacccacagagagagaagcgaggacgccaagaagggccccaaccccctgatgagaagaaacagcgtgacccccctggccagccccgagcccaccaagaagcccagaatcaacagcttcgaggagcacgtggccagcaccagcgccgccctgcccagctgcctgccccccgaggtgcccacccagctgcccggccagcccctgctgggccaggcctgcctgacctag

SEQ ID NO: 71235 - DNA, 1545 bp, synthetic construct; identical to SEQ ID NO: 71234
  misc_feature 1..1545: note = Description of Artificial Sequence: Synthetic coding sequence
  source 1..1545: mol_type = other DNA

SEQ ID NO: 71236 - DNA, 1563 bp, synthetic construct
  misc_feature 1..1563: note = Description of Artificial Sequence: Synthetic coding sequence
  source 1..1563: mol_type = other DNA
atgcccctggagctgacccagagcagagtgcagaagatctgggtgcccgtggaccacagacccagcctgcccagaagctgcggccccaagctgaccaacagccccaccgtgatcgtgatggtgggcctgcccgccagaggcaagacctacatcagcaagaagctgaccagatacctgaactggatcggcgtgcccaccaaggtgttcaacgtgggcgagtacagaagagaggccgtgaagcagtacagcagctacaacttcttcagacccgacaacgaggaggccatgaaggtgagaaagcagtgcgccctggccgccctgagagacgtgaagagctacctggccaaggagggcggccagatcgccgtgttcgacgccaccaacaccaccagagagagaagacacatgatcctgcacttcgccaaggagaacgacttcaaggccttcttcatcgagagcgtgtgcgacgaccccaccgtggtggccagcaacatcatggaggtgaagatcagcagccccgactacaaggactgcaacagcgccgaggccatggacgacttcatgaagagaatcagctgctacgaggccagctaccagcccctggaccccgacaagtgcgacagagacctgagcctgatcaaggtgatcgacgtgggcagaagattcctggtgaacagagtgcaggaccacatccagagcagaatcgtgtactacctgatgaacatccacgtgcagcccagaaccatctacctgtgcagacacggcgagaacgagcacaacctgcagggcagaatcggcggcgacagcggcctgagcagcagaggcaagaagttcgccagcgccctgagcaagttcgtggaggagcagaacctgaaggacctgagagtgtggaccagccagctgaagagcaccatccagaccgccgaggccctgagactgccctacgagcagtggaaggccctgaacgagatcgacgccggcgtgtgcgaggagctgacctacgaggagatcagagacacctaccccgaggagtacgccctgagagagcaggacaagtactactacagataccccaccggcgagagctaccaggacctggtgcagagactggagcccgtgatcatggagctggagagacaggagaacgtgctggtgatctgccaccaggccgtgctgagatgcctgctggcctacttcctggacaagagcgccgaggagatgccctacctgaagtgccccctgcacaccgtgctgaagctgacccccgtggcctacggctgcagagtggagagcatctacctgaacgtggagagcgtgtgcacccacagagagagaagcgaggacgccaagaagggccccaaccccctgatgagaagaaacagcgtgacccccctggccagccccgagcccaccaagaagcccagaatcaacagcttcgaggagcacgtggccagcaccagcgccgccctgcccagctgcctgccccccgaggtgcccacccagctgcccggccagaacatgaagggcagcagaagcagcgccgacagcagcagaaagcactag

SEQ ID NO: 71237 - DNA, 354 bp, synthetic construct
  misc_feature 1..354: note = Description of Artificial Sequence: Synthetic coding sequence
  source 1..354: mol_type = other DNA
atgccctacctgaagtgccccctgcacaccgtgctgaagctgacccccgtggcctacggctgcagagtggagagcatctacctgaacgtggagagcgtgtgcacccacagagagagaagcgaggacgccaagaagggccccaaccccctgatgagaagaaacagcgtgacccccctggccagccccgagcccaccaagaagcccagaatcaacagcttcgaggagcacgtggccagcaccagcgccgccctgcccagctgcctgccccccgaggtgcccacccagctgcccggccagcccctgctgggccaggcctgcctgaactggaagggcgtgatgagaaacgccgcctag

SEQ ID NO: 71238 - DNA, 1581 bp, synthetic construct
  misc_feature 1..1581: note = Description of Artificial Sequence: Synthetic coding sequence
  source 1..1581: mol_type = other DNA
atgcccctggagctgacccagagcagagtgcagaagatctgggtgcccgtggaccacagacccagcctgcccagaagctgcggccccaagctgaccaacagccccaccgtgatcgtgatggtgggcctgcccgccagaggcaagacctacatcagcaagaagctgaccagatacctgaactggatcggcgtgcccaccaaggtgttcaacgtgggcgagtacagaagagaggccgtgaagcagtacagcagctacaacttcttcagacccgacaacgaggaggccatgaaggtgagaaagcagtgcgccctggccgccctgagagacgtgaagagctacctggccaaggagggcggccagatcgccgtgttcgacgccaccaacaccaccagagagagaagacacatgatcctgcacttcgccaaggagaacgacttcaaggccttcttcatcgagagcgtgtgcgacgaccccaccgtggtggccagcaacatcatggaggtgaagatcagcagccccgactacaaggactgcaacagcgccgaggccatggacgacttcatgaagagaatcagctgctacgaggccagctaccagcccctggaccccgacaagtgcgacagagacctgagcctgatcaaggtgatcgacgtgggcagaagattcctggtgaacagagtgcaggaccacatccagagcagaatcgtgtactacctgatgaacatccacgtgcagcccagaaccatctacctgtgcagacacggcgagaacgagcacaacctgcagggcagaatcggcggcgacagcggcctgagcagcagaggcaagaagttcgccagcgccctgagcaagttcgtggaggagcagaacctgaaggacctgagagtgtggaccagccagctgaagagcaccatccagaccgccgaggccctgagactgccctacgagcagtggaaggccctgaacgagatcgacgccggcgtgtgcgaggagctgacctacgaggagatcagagacacctaccccgaggagtacgccctgagagagcaggacaagtactactacagataccccaccggcgagagctaccaggacctggtgcagagactggagcccgtgatcatggagctggagagacaggagaacgtgctggtgatctgccaccaggccgtgctgagatgcctgctggcctacttcctggacaagagcgccgaggagatgccctacctgaagtgccccctgcacaccgtgctgaagctgacccccgtggcctacggctgcagagtggagagcatctacctgaacgtggagagcgtgtgcacccacagagagagaagcgaggacgccaagaagggccccaaccccctgatgagaagaaacagcgtgacccccctggccagccccgagcccaccaagaagcccagaatcaacagcttcgaggagcacgtggccagcaccagcgccgccctgcccagctgcctgccccccgaggtgcccacccagctgcccggccagcccctgctgggccaggcctgcctgagaaccgtgtgccacatcttcagcaagttcagcccctactag

SEQ ID NO: 71239 - DNA, 567 bp, synthetic construct
  misc_feature 1..567: note = Description of Artificial Sequence: Synthetic coding sequence
  source 1..567: mol_type = other DNA
atgaacatccacgtgcagcccagaaccatctacctgtgcagacacggcgagaacgagcacaacctgcagggcagaatcggcggcgacagcggcctgagcagcagaggcaagaagttcgccagcgccctgagcaagttcgtggaggagcagaacctgaaggacctgagagtgtggaccagccagctgaagagcaccatccagaccgccgaggccctgagactgccctacgagcagtggaaggccctgaacgagatcgacgccagctaccaggacctggtgcagagactggagcccgtgatcatggagctggagagacaggagaacgtgctggtgatctgccaccaggccgtgctgagatgcctgctggcctacttcctggacaagagcgccgaggagatgccctacctgaagtgccccctgcacaccgtgctgaagctgacccccgtggcctacggctgcagagtggagagcatctacctgaacgtggagagcgtgtgcacccacagagagagaagcgagaacatgaagggcagcagaagcagcgccgacagcagcagaaagcactag

SEQ ID NO: 71240 - DNA, 1581 bp, synthetic construct; identical to SEQ ID NO: 71238
  misc_feature 1..1581: note = Description of Artificial Sequence: Synthetic coding sequence
  source 1..1581: mol_type = other DNA

SEQ ID NO: 71241 - DNA, 1503 bp, synthetic construct
  misc_feature 1..1503: note = Description of Artificial Sequence: Synthetic coding sequence
  source 1..1503: mol_type = other DNA
atgcccttcagaaaggcctgcggccccaagctgaccaacagccccaccgtgatcgtgatggtgggcctgcccgccagaggcaagacctacatcagcaagaagctgaccagatacctgaactggatcggcgtgcccaccaaggtgttcaacgtgggcgagtacagaagagaggccgtgaagcagtacagcagctacaacttcttcagacccgacaacgaggaggccatgaaggtgagaaagcagtgcgccctggccgccctgagagacgtgaagagctacctggccaaggagggcggccagatcgccgtgttcgacgccaccaacaccaccagagagagaagacacatgatcctgcacttcgccaaggagaacgacttcaaggccttcttcatcgagagcgtgtgcgacgaccccaccgtggtggccagcaacatcatggaggtgaagatcagcagccccgactacaaggactgcaacagcgccgaggccatggacgacttcatgaagagaatcagctgctacgaggccagctaccagcccctggaccccgacaagtgcgacagagacctgagcctgatcaaggtgatcgacgtgggcagaagattcctggtgaacagagtgcaggaccacatccagagcagaatcgtgtactacctgatgaacatccacgtgcagcccagaaccatctacctgtgcagacacggcgagaacgagcacaacctgcagggcagaatcggcggcgacagcggcctgagcagcagaggcaagaagttcgccagcgccctgagcaagttcgtggaggagcagaacctgaaggacctgagagtgtggaccagccagctgaagagcaccatccagaccgccgaggccctgagactgccctacgagcagtggaaggccctgaacgagatcgacgccggcgtgtgcgaggagctgacctacgaggagatcagagacacctaccccgaggagtacgccctgagagagcaggacaagtactactacagataccccaccggcgagagctaccaggacctggtgcagagactggagcccgtgatcatggagctggagagacaggagaacgtgctggtgatctgccaccaggccgtgctgagatgcctgctggcctacttcctggacaagagcgccgaggagatgccctacctgaagtgccccctgcacaccgtgctgaagctgacccccgtggcctacggctgcagagtggagagcatctacctgaacgtggagagcgtgtgcacccacagagagagaagcgaggacgccaagaagggccccaaccccctgatgagaagaaacagcgtgacccccctggccagccccgagcccaccaagaagcccagaatcaacagcttcgaggagcacgtggccagcaccagcgccgccctgcccagctgcctgccccccgaggtgcccacccagctgcccggccagaacatgaagggcagcagaagcagcgccgacagcagcagaaagcactag

SEQ ID NO: 71242 - DNA, 279 bp, synthetic construct
  misc_feature 1..279: note = Description of Artificial Sequence: Synthetic coding sequence
  source 1..279: mol_type = other DNA
atctacctgaacgtggagagcgtgtgcacccacagagagagaagcgaggacgccaagaagggccccaaccccctgatgagaagaaacagcgtgacccccctggccagccccgagcccaccaagaagcccagaatcaacagcttcgaggagcacgtggccagcaccagcgccgccctgcccagctgcctgccccccgaggtgcccacccagctgcccggccagcccctgctgggccaggcctgcctgaactggaagggcgtgatgagaaacgccgcctag

SEQ ID NO: 71243 - DNA, 96 bp, synthetic construct
  misc_feature 1..96: note = Description of Artificial Sequence: Synthetic coding sequence
  source 1..96: mol_type = other DNA
atctacctgaacgtggagagcgtgtgcacccacagagagagaagcgagaacatgaagggcagcagaagcagcgccgacagcagcagaaagcactag

SEQ ID NO: 71244 - DNA, 261 bp, synthetic construct
  misc_feature 1..261: note = Description of Artificial Sequence: Synthetic coding sequence
  source 1..261: mol_type = other DNA
atgccctacctgaagtgccccctgcacaccgtgctgaagctgacccccgtggcctacggctgcagagtggagagcatctacctgaacgtggagagcgtgtgcacccacagagagagaagcgagggcctgagcctgttccccagactggagtgcggcggcgccgtgaccgcccactgcagcctgaacctgctgggcagcagcgacccccccgccagcgccagcagagtggccgagaccaccggctgcaaggagggcacctag

SEQ ID NO: 71245 - DNA, 432 bp, synthetic construct
  misc_feature 1..432: note = Description of Artificial Sequence: Synthetic coding sequence
  source 1..432: mol_type = other DNA
tgagtggaggagcagaacctgaaggacctgagagtgtggaccagccagctgaagagcaccatccagaccgccgaggccctgagactgccctacgagcagtggaaggccctgaacgagatcgacgccagctaccaggacctggtgcagagactggagcccgtgatcatggagctggagagacaggagaacgtgctggtgatctgccaccaggccgtgctgagatgcctgctggcctacttcctggacaagagcgccgaggagatgccctacctgaagtgccccctgcacaccgtgctgaagctgacccccgtggcctacggctgcagagtggagagcatctacctgaacgtggagagcgtgtgcacccacagagagagaagcgagaacatgaagggcagcagaagcagcgccgacagcagcagaaagcactag

SEQ ID NO: 71246 - DNA, 555 bp, synthetic construct
  misc_feature 1..555: note = Description of Artificial Sequence: Synthetic coding sequence
  source 1..555: mol_type = other DNA
atgcccttcagaaaggcctgcggccccaagctgaccaacagccccaccgtgatcgtgatggtgggcctgcccgccagaggcaagacctacatcagcaagaagctgaccagatacctgaactggatcggcgtgcccaccaaggtgttcaacgtgggcgagtacagaagagaggccgtgaagcagtacagcagctacaacttcttcagacccgacaacgaggaggccatgaaggtgagaaagcagtgcgccctggccgccctgagagacgtgaagagctacctggccaaggagggcggccagatcgccgtgttcgacgccaccaacaccaccagagagagaagacacatgatcctgcacttcgccaaggagaacgacttcaaggccttcttcatcgagagcgtgtgcgacgaccccaccgtggtggccagcaacatcatgcagaaggccttccagagagacctgagcgccacccccctgtggtgctgcagaaagctgaagagccccgccagaatcaccaagaccgccaccagacagaagccctggaccaccagctag

SEQ ID NO: 71247 - DNA, 1605 bp, synthetic construct
  misc_feature 1..1605: note = Description of Artificial Sequence: Synthetic coding sequence
  source 1..1605: mol_type = other DNA
atgggcgagggcggccagaaggagggcgacagccagcaggccggcgccctgcccctgctgtgccagctggacaccttcagccccaaggccaccgtgttcggcgtgagcatcaaccccgcctgcggccccaagctgaccaacagccccaccgtgatcgtgatggtgggcctgcccgccagaggcaagacctacatcagcaagaagctgaccagatacctgaactggatcggcgtgcccaccaaggtgttcaacgtgggcgagtacagaagagaggccgtgaagcagtacagcagctacaacttcttcagacccgacaacgaggaggccatgaaggtgagaaagcagtgcgccctggccgccctgagagacgtgaagagctacctggccaaggagggcggccagatcgccgtgttcgacgccaccaacaccaccagagagagaagacacatgatcctgcacttcgccaaggagaacgacttcaaggccttcttcatcgagagcgtgtgcgacgaccccaccgtggtggccagcaacatcatggaggtgaagatcagcagccccgactacaaggactgcaacagcgccgaggccatggacgacttcatgaagagaatcagctgctacgaggccagctaccagcccctggaccccgacaagtgcgacagagacctgagcctgatcaaggtgatcgacgtgggcagaagattcctggtgaacagagtgcaggaccacatccagagcagaatcgtgtactacctgatgaacatccacgtgcagcccagaaccatctacctgtgcagacacggcgagaacgagcacaacctgcagggcagaatcggcggcgacagcggcctgagcagcagaggcaagaagttcgccagcgccctgagcaagttcgtggaggagcagaacctgaaggacctgagagtgtggaccagccagctgaagagcaccatccagaccgccgaggccctgagactgccctacgagcagtggaaggccctgaacgagatcgacgccggcgtgtgcgaggagctgacctacgaggagatcagagacacctaccccgaggagtacgccctgagagagcaggacaagtactactacagataccccaccggcgagagctaccaggacctggtgcagagactggagcccgtgatcatggagctggagagacaggagaacgtgctggtgatctgccaccaggccgtgctgagatgcctgctggcctacttcctggacaagagcgccgaggagatgccctacctgaagtgccccctgcacaccgtgctgaagctgacccccgtggcctacggctgcagagtggagagcatctacctgaacgtggagagcgtgtgcacccacagagagagaagcgaggacgccaagaagggccccaaccccctgatgagaagaaacagcgtgacccccctggccagccccgagcccaccaagaagcccagaatcaacagcttcgaggagcacgtggccagcaccagcgccgccctgcccagctgcctgccccccgaggtgcccacccagctgcccggccagaacatgaagggcagcagaagcagcgccgacagcagcagaaagcactag

SEQ ID NO: 71248 - DNA, 594 bp, synthetic construct
  misc_feature 1..594: note = Description of Artificial Sequence: Synthetic coding sequence
  source 1..594: mol_type = other DNA
atggacccccccgccggcttcgtgagagccggcaaccccgccgtggccgccccccagagccccctgagccccgagggcgcccacttcagagccgcccaccaccccagaagcaccggcagcagatgccccggcagcctgcagcccagcagacccctggtggccaactggctgcagagcctgcccgagatgcccgtggacttcaccggctactggaagatgctggtgaacgagaacttcgaggagtacctgagagccctggacgtgaacgtggccctgagaaagatcgccaacctgctgaagcccgacaaggagatcgtgcaggacggcgaccacatgatcatcagaaccctgagcaccttcagaaactacatcatggacttccaggtgggcaaggagttcgaggaggacctgaccggcatcgacgacagaaagtgcatgaccaccgtgagctgggacggcgacaagctgcagtgcgtgcagaagggcgagaaggagggcagaggctggacccagtggatcgagggcgacgagctgcacctggagatgagagtggagggcgtggtgtgcaagcaggtgttcaagaaggtgcagtag

SEQ ID NO: 71249 - DNA, 528 bp, synthetic construct
  misc_feature 1..528: note = Description of Artificial Sequence: Synthetic coding sequence
  source 1..528: mol_type = other DNA
atgaccaactgccccaccctgatcgtgatggtgggcctgcccgccagaggcaagacctacatcagcaagaagctgaccagatacctgaactggatcggcgtgcccaccagagagttcaacgtgggccagtacagaagagacgtggtgaagacctacaagagcttcgagttcttcctgcccgacaacgaggagggcctgaagatcagaaagcagtgcgccctggccgccctgagagacgtgagaagattcctgagcgaggagggcggccacgtggccgtgttcgacgccaccaacaccaccagagagagaagagccaccatcttcaacttcggcgagcagaacggctacaagaccttcttcgtggagagcatctgcgtggaccccgaggtgatcgccgccaacatcgtgcaggtgaagctgggcagccccgactacgtgaacagagacagcgacgaggccaccgaggacttcatgagaagaatcgagtgctacgagaacagctacgagagcctggacgaggacctgtag

SEQ ID NO: 71250 - DNA, 1377 bp, synthetic construct
  misc_feature 1..1377: note = Description of Artificial Sequence: Synthetic coding sequence
  source 1..1377: mol_type = other DNA
atggacagaggcagcctgggcggcagcagcctgaccgacctgggccccggcagcagcagaagagtgtgcatgaccaactgccccaccctgatcgtgatggtgggcctgcccgccagaggcaagacctacatcagcaagaagctgaccagatacctgaactggatcggcgtgcccaccagagagttcaacgtgggccagtacagaagagacgtggtgaagacctacaagagcttcgagttcttcctgcccgacaacgaggagggcctgaagatcagaaagcagtgcgccctggccgccctgagagacgtgagaagattcctgagcgaggagggcggccacgtggccgtgttcgacgccaccaacaccaccagagagagaagagccaccatcttcaacttcggcgagcagaacggctacaagaccttcttcgtggagagcatctgcgtggaccccgaggtgatcgccgccaacatcgtgcaggtgaagctgggcagccccgactacgtgaacagagacagcgacgaggccaccgaggacttcatgagaagaatcgagtgctacgagaacagctacgagagcctggacgaggacctggacagagacctgagctacatcaagatcatggacgtgggccagagctacgtggtgaacagagtggccgaccacatccagagcagaatcgtgtactacctgatgaacatccacgtgacccccagaagcatctacctgtgcagacacggcgagagcgagctgaacctgaagggcagaatcggcggcgaccccggcctgagccccagaggcagagagttcgccaagagcctggcccagttcatcagcgaccagaacatcaaggacctgaaggtgtggaccagccagatgaagagaaccatccagaccgccgaggccctgggcgtgccctacgagcagtggaaggtgctgaacgagatcgacgccggcgtgtgcgaggagatgacctacgaggagatccaggacaactaccccctggagttcgccctgagagaccaggacaagtacagatacagataccccaagggcgagagctacgaggacctggtgcagagactggagcccgtgatcatggagctggagagacaggagaacgtgctggtgatctgccaccaggccgtgatgagatgcctgctggcctacttcctggacaaggccgccgagcagctgccctacctgaagtgccccctgcacaccgtgctgaagctgacccccgtggcctacggctgcaaggtggagagcatcttcctgaacgtggccgccgtgaacacccacagagacagaccccagaacgtggacatcagcagaccccccgaggaggccctggtgaccgtgcccgcccaccagtag

SEQ ID NO: 71251 - DNA, 1308 bp, synthetic construct
  misc_feature 1..1308: note = Description of Artificial Sequence: Synthetic coding sequence
  source 1..1308: mol_type = other DNA
atgaccaactgccccaccctgatcgtgatggtgggcctgcccgccagaggcaagacctacatcagcaagaagctgaccagatacctgaactggatcggcgtgcccaccagagagttcaacgtgggccagtacagaagagacgtggtgaagacctacaagagcttcgagttcttcctgcccgacaacgaggagggcctgaagatcagaaagcagtgcgccctggccgccctgagagacgtgagaagattcctgagcgaggagggcggccacgtggccgtgttcgacgccaccaacaccaccagagagagaagagccaccatcttcaacttcggcgagcagaacggctacaagaccttcttcgtggagagcatctgcgtggaccccgaggtgatcgccgccaacatcgtgcaggtgaagctgggcagccccgactacgtgaacagagacagcgacgaggccaccgaggacttcatgagaagaatcgagtgctacgagaacagctacgagagcctggacgaggacctggacagagacctgagctacatcaagatcatggacgtgggccagagctacgtggtgaacagagtggccgaccacatccagagcagaatcgtgtactacctgatgaacatccacgtgacccccagaagcatctacctgtgcagacacggcgagagcgagctgaacctgaagggcagaatcggcggcgaccccggcctgagccccagaggcagagagttcgccaagagcctggcccagttcatcagcgaccagaacatcaaggacctgaaggtgtggaccagccagatgaagagaaccatccagaccgccgaggccctgggcgtgccctacgagcagtggaaggtgctgaacgagatcgacgccggcgtgtgcgaggagatgacctacgaggagatccaggacaactaccccctggagttcgccctgagagaccaggacaagtacagatacagataccccaagggcgagagctacgaggacctggtgcagagactggagcccgtgatcatggagctggagagacaggagaacgtgctggtgatctgccaccaggccgtgatgagatgcctgctggcctacttcctggacaaggccgccgagcagctgccctacctgaagtgccccctgcacaccgtgctgaagctgacccccgtggcctacggctgcaaggtggagagcatcttcctgaacgtggccgccgtgaacacccacagagacagaccccagaacgtggacatcagcagaccccccgaggaggccctggtgaccgtgcccgcccaccagtag

SEQ ID NO: 71252 - DNA, 429 bp, synthetic construct
  misc_feature 1..429: note = Description of Artificial Sequence: Synthetic coding sequence
  source 1..429: mol_type = other DNA
atggccagccccagagagctgacccagaaccccctgaagaagatctggatgccctacagcaacggcagacccgccctgcacgcctgccagagaggcgtgtgcatgaccaactgccccaccctgatcgtgatggtgggcctgcccgccagaggcaagacctacatcagcaagaagctgaccagatacctgaactggatcggcgtgcccaccagagagttcaacgtgggccagtacagaagagacgtggtgaagacctacaagagcttcgagttcttcctgcccgacaacgaggagggcctgaagatcagaaagttcctgatgccccagaccccccccgagaacggcgagagacccagcctgatcctggagaacagaatggccaccagacccttcctgagcagccccagcgtgtggatcctgagaagctag

SEQ ID NO: 71253 - DNA, 777 bp, synthetic construct
  misc_feature 1..777: note = Description of Artificial Sequence: Synthetic coding sequence
  source 1..777: mol_type = other DNA
atggccgcccccgcccccggcctgatcagcgtgttcagcagcagccaggagctgggcgccgccctggcccagctggtggcccagagagccgcctgctgcctggccggcgccagagccagattcgccctgggcctgagcggcggcagcctggtgagcatgctggccagagagctgcccgccgccgtggcccccgccggccccgccagcctggccagatggaccctgggcttctgcgacgagagactggtgcccttcgaccacgccgagagcacctacggcctgtacagaacccacctgctgagcagactgcccatccccgagagccaggtgatcaccatcaaccccgagctgcccgtggaggaggccgccgaggactacgccaagaagctgagacaggccttccagggcgacagcatccccgtgttcgacctgctgatcctgggcgtgggccccgacggccacacctgcagcctgttccccgaccaccccctgctgcaggagagagagaagatcgtggcccccatcagcgacagccccaagccccccccccagagagtgaccctgaccctgcccgtgctgaacgccgccagaaccgtgatcttcgtggccaccggcgagggcaaggccgccgtgctgaagagaatcctggaggaccaggaggagaaccccctgcccgccgccctggtgcagccccacaccggcaagctgtgctggttcctggacgaggccgccgccagactgctgaccgtgcccttcgagaagcacagcaccctgtag

SEQ ID NO: 71254 - DNA, 1428 bp, synthetic construct
  misc_feature 1..1428: note = Description of Artificial Sequence: Synthetic coding sequence
  source 1..1428: mol_type = other DNA
atggccgccaagagccagcccaacatccccaaggccaagagcctggacggcgtgaccaacgacagaaccgccagccagggccagtggggcagagcctgggaggtggactggttcagcctggccagcgtgatcttcctgctgctgttcgcccccttcatcgtgtactacttcatcatggcctgcgaccagtacagctgcgccctgaccggccccgtggtggacatcgtgaccggccacgccagactgagcgacatctgggccaagaccccccccatcaccagaaaggccgcccagctgtacaccctgtgggtgaccttccaggtgctgctgtacaccagcctgcccgacttctgccacaagttcctgcccggctacgtgggcggcatccaggagggcgccgtgacccccgccggcgtggtgaacaagtaccagatcaacggcctgcaggcctggctgctgacccacctgctgtggttcgccaacgcccacctgctgagctggttcagccccaccatcatcttcgacaactggatccccctgctgtggtgcgccaacatcctgggctacgccgtgagcaccttcgccatggtgaagggctacttcttccccaccagcgccagagactgcaagttcaccggcaacttcttctacaactacatgatgggcatcgagttcaaccccagaatcggcaagtggttcgacttcaagctgttcttcaacggcagacccggcatcgtggcctggaccctgatcaacctgagcttcgccgccaagcagagagagctgcacagccacgtgaccaacgccatggtgctggtgaacgtgctgcaggccatctacgtgatcgacttcttctggaacgagacctggtacctgaagaccatcgacatctgccacgaccacttcggctggtacctgggctggggcgactgcgtgtggctgccctacctgtacaccctgcagggcctgtacctggtgtaccaccccgtgcagctgagcaccccccacgccgtgggcgtgctgctgctgggcctggtgggctactacatcttcagagtggccaaccaccagaaggacctgttcagaagaaccgacggcagatgcctgatctggggcagaaagcccaaggtgatcgagtgcagctacaccagcgccgacggccagagacaccacagcaagctgctggtgagcggcttctggggcgtggccagacacttcaactacgtgggcgacctgatgggcagcctggcctactgcctggcctgcggcggcggccacctgctgccctacttctacatcatctacatggccatcctgctgacccacagatgcctgagagacgagcacagatgcgccagcaagtacggcagagactgggagagatacaccgccgccgtgccctacagactgctgcccggcatcttctag

SEQ ID NO: 71255 - DNA, 1428 bp, synthetic construct; identical to SEQ ID NO: 71254
  misc_feature 1..1428: note = Description of Artificial Sequence: Synthetic coding sequence
  source 1..1428: mol_type = other DNA

SEQ ID NO: 71256 - DNA, 327 bp, synthetic construct
  misc_feature 1..327: note = Description of Artificial Sequence: Synthetic coding sequence
  source 1..327: mol_type = other DNA
atggccgccaagagccagcccaacatccccaaggccaagagcctggacggcgtgaccaacgacagaaccgccagccagggccagtggggcagagcctgggaggtggactggttcagcctggccagcgtgatcttcctgctgctgttcgcccccttcatcgtgtactacttcatcatggcctgcgaccagtacagctgcgccctgaccggccccgtggtggacatcgtgaccggccacgccagactgagcgacatctgggccaagaccccccccatcaccagaaaggccgcccagctgtacaccctgtgggtgaccttccaggtgtag

SEQ ID NO: 71257 - DNA, 495 bp, synthetic construct
  misc_feature 1..495: note = Description of Artificial Sequence: Synthetic coding sequence
  source 1..495: mol_type = other DNA
atggccgccaagagccagcccaacatccccaaggccaagagcctggacggcgtgaccaacgacagaaccgccagccagggccagtggggcagagcctgggaggtggactggttcagcctggccagcgtgatcttcctgctgctgttcgcccccttcatcgtgtactacttcatcatggcctgcgaccagtacagctgcgccctgaccggccccgtggtggacatcgtgaccggccacgccagactgagcgacatctgggccaagaccccccccatcaccagaaaggccgcccagctgtacaccctgtgggtgaccttccaggtgctgctgtacaccagcctgcccgacttctgccacaagttcctgcccggctacgtgggcggcatccaggagggcgccgtgacccccgccggcgtggtgaacaagtaccagatcaacggcctgcaggcctggctgctgacccacctgctgtggttcgccaacgcccacctgtag

SEQ ID NO: 71258 - DNA, 276 bp, synthetic construct
  misc_feature 1..276: note = Description of Artificial Sequence: Synthetic coding sequence
  source 1..276: mol_type = other DNA
atggccgccaagagccagcccaacatccccaaggccaagagcctggacggcgtgaccaacgacagaaccgccagccagggccagtggggcagagcctgggaggtggactggttcagcctggccagcgtgatcttcctgctgctgttcgcccccttcatcgtgtactacttcatcatggcctgcgaccagtacagctgcgccctgaccggccccgtggtggacatcgtgaccggccacgccagactgagcgacatctgggccaagacccccccctag

SEQ ID NO: 71259 - DNA, 318 bp, synthetic construct
  misc_feature 1..318: note = Description of Artificial Sequence: Synthetic coding sequence
  source 1..318: mol_type = other DNA
atggccgccaagagccagcccaacatccccaaggccaagagcctggacggcgtgaccaacgacagaaccgccagccagggccagtggggcagagcctgggaggtggactggttcagcctggccagcgtgatcttcctgctgctgttcgcccccttcatcgtgtactacttcatcatggcctgcgaccagtacagctgcgccctgaccggccccgtggtggacatcgtgaccggccacgccagactgagcgacatctgggccaagaccccccccatcaccagaaaggccgcccagctgtacaccctgtgggtgacctag

SEQ ID NO: 71260 - DNA, 846 bp, synthetic construct
  misc_feature 1..846: note = Description of Artificial Sequence: Synthetic coding sequence
  source 1..846: mol_type = other DNA
atggacagctacagcacctacctggccaccgtgaaggtgagcggcagctggctggaggagcaggacgaggacatctacgaggtggagagcagagtgcccctgccccaccccttccccctgtgcgagcacctggacgagaacaacagcgtgatcgtgaacaccagcatcttccacttcatccacaagagaaacggccacatcctgaagctgatcagcaagatcagcctgcccacccccccctacagcctggagcacgccaaggtgacccagaccgagctgatgagagagagcttcagacagaagcaggaggccaccgagagcctgaagtgccaggaggagctgagagagagactgcacgaggagagcagagccagagagcagctggccgtggagctgagcaaggccgagggcgtgatcgacggctacgccgacgagaagaccctgttcgagagacagatccaggagaagaccgacatcatcgacagactggagcaggagctgctgtgcgccagcaacagactgcaggagctggaggccgagcagcagcagatccaggaggagagagagctgctgagcagacagaaggaggccatgaaggccgaggccggccccgtggagcagcagctgctgcaggagaccgagaagctgatgaaggagaagctggaggtgcagtgccaggccgagaaggtgagagacgacctgcagaagcaggtgaaggccctggagatcgacgtggaggagcaggtgagcagattcatcgagctggagcaggagaagaacaccgagctgatggacctgagacagcagaaccaggccctggagaagcagctggagaagatgagatag

SEQ ID NO: 71261 - DNA, 11724 bp, synthetic construct
  misc_feature 1..11724: note = Description of Artificial Sequence: Synthetic coding sequence
  source 1..11724: mol_type = other DNA
atggaggacgaggagagacagaagaagctggaggccggcaaggccaagctggcccagttcagacagagaaaggcccagagcgacggccagagccccagcaagaagcagaagaagaagagaaagaccagcagcagcaagcacgacgtgagcgcccaccacgacctgaacatcgaccagagccagtgcaacgagatgtacatcaacagcagccagagagtggagagcaccgtgatccccgagagcaccatcatgagaaccctgcacagcggcgagatcaccagccacgagcagggcttcagcgtggagctggagagcgagatcagcaccaccgccgacgactgcagcagcgaggtgaacggctgcagcttcgtgatgagaaccggcaagcccaccaacctgctgagagaggaggagttcggcgtggacgacagctacagcgagcagggcgcccaggacagccccacccacctggagatgatggagagcgagctggccggcaagcagcacgagatcgaggagctgaacagagagctggaggagatgagagtgacctacggcaccgagggcctgcagcagctgcaggagttcgaggccgccatcaagcagagagacggcatcatcacccagctgaccgccaacctgcagcaggccagaagagagaaggacgagaccatgagagagttcctggagctgaccgagcagagccagaagctgcagatccagttccagcagctgcaggccagcgagaccctgagaaacagcacccacagcagcaccgccgccgacctgctgcaggccaagcagcagatcctgacccaccagcagcagctggaggagcaggaccacctgctggaggactaccagaagaagaaggaggacttcaccatgcagatcagcttcctgcaggagaagatcaaggtgtacgagatggagcaggacaagaaggtggagaacagcaacaaggaggagatccaggagaaggagaccatcatcgaggagctgaacaccaagatcatcgaggaggagaagaagaccctggagctgaaggacaagctgaccaccgccgacaagctgctgggcgagctgcaggagcagatcgtgcagaagaaccaggagatcaagaacatgaagctggagctgaccaacagcaagcagaaggagagacagagcagcgaggagatcaagcagctgatgggcaccgtggaggagctgcagaagagaaaccacaaggacagccagttcgagaccgacatcgtgcagagaatggagcaggagacccagagaaagctggagcagctgagagccgagctggacgagatgtacggccagcagatcgtgcagatgaagcaggagctgatcagacagcacatggcccagatggaggagatgaagaccagacacaagggcgagatggagaacgccctgagaagctacagcaacatcaccgtgaacgaggaccagatcaagctgatgaacgtggccatcaacgagctgaacatcaagctgcaggacaccaacagccagaaggagaagctgaaggaggagctgggcctgatcctggaggagaagtgcgccctgcagagacagctggaggacctggtggaggagctgagcttcagcagagagcagatccagagagccagacagaccatcgccgagcaggagagcaagctgaacgaggcccacaagagcctgagcaccgtggaggacctgaaggccgagatcgtgagcgccagcgagagcagaaaggagctggagctgaagcacgaggccgaggtgaccaactacaagatcaagctggagatgctggagaaggagaagaacgccgtgctggacagaatggccgagagccaggaggccgagctggagagactgagaacccagctgctgttcagccacgaggaggagctgagcaagctgaaggaggacctggagatcgagcacagaatcaacatcgagaagctgaaggacaacctgggcatccactacaagcagcagatcgacggcctgcagaacgagatgagccagaagatcgagaccatgcagttcgagaaggacaacctgatcaccaagcagaaccagctgatcctggagatcagcaagctgaaggacctgcagcagagcctggtgaacagcaagagcgaggagatgaccctgcagatcaacgagctgcagaaggagatcgagatcctgagacaggaggagaaggagaagggcaccctggagcaggaggtgcaggagctgcagctgaagaccgagctgctggagaagcagatgaaggagaaggagaacgacctgcaggagaagttcgcccagctggaggccgagaacagcatcctgaaggacgagaagaagaccctggaggacatgctgaagatccacacccccgtgagccaggaggagagactgatcttcctggacagcatcaagagcaagagcaaggacagcgtgtgggagaaggagatcgagatcctgatcgaggagaacgaggacctgaagcagcagtgcatccagctgaacgaggagatcgagaagcagagaaacaccttcagcttcgccgagaagaacttcgaggtgaactaccaggagctgcaggaggagtacgcctgcctgctgaaggtgaaggacgacctggaggacagcaagaacaagcaggagctggagtacaagagcaagctgaaggccctgaacgaggagctgcacctgcagagaatcaaccccaccaccgtgaagatgaagagcagcgtgttcgacgaggacaagaccttcgtggccgagaccctggagatgggcgaggtggtggagaaggacaccaccgagctgatggagaagctggaggtgaccaagagagagaagctggagctgagccagagactgagcgacctgagcgagcagctgaagcagaagcacggcgagatcagcttcctgaacgaggaggtgaagagcctgaagcaggagaaggagcaggtgagcctgagatgcagagagctggagatcatcatcaaccacaacagagccgagaacgtgcagagctgcgacacccaggtgagcagcctgctggacggcgtggtgaccatgaccagcagaggcgccgagggcagcgtgagcaaggtgaacaagagcttcggcgaggagagcaagatcatggtggaggacaaggtgagcttcgagaacatgaccgtgggcgaggagagcaagcaggagcagctgatcctggaccacctgcccagcgtgaccaaggagagcagcctgagagccacccagcccagcgagaacgacaagctgcagaaggagctgaacgtgctgaagagcgagcagaacgacctgagactgcagatggaggcccagagaatctgcctgagcctggtgtacagcacccacgtggaccaggtgagagagtacatggagaacgagaaggacaaggccctgtgcagcctgaaggaggagctgatcttcgcccaggaggagaagatcaaggagctgcagaagatccaccagctggagctgcagaccatgaagacccaggagaccggcgacgagggcaagcccctgcacctgctgatcggcaagctgcagaaggccgtgagcgaggagtgcagctacttcctgcagaccctgtgcagcgtgctgggcgagtactacacccccgccctgaagtgcgaggtgaacgccgaggacaaggagaacagcggcgactacatcagcgagaacgaggaccccgagctgcaggactacagatacgaggtgcaggacttccaggagaacatgcacaccctgctgaacaaggtgaccgaggagtacaacaagctgctggtgctgcagaccagactgagcaagatctggggccagcagaccgacggcatgaagctggagttcggcgaggagaacctgcccaaggaggagaccgagttcctgagcatccacagccagatgaccaacctggaggacatcgacgtgaaccacaagagcaagctgagcagcctgcaggacctggagaagaccaagctggaggagcaggtgcaggagctggagagcctgatcagcagcctgcagcagcagctgaaggagaccgagcagaactacgaggccgagatccactgcctgcagaagagactgcaggccgtgagcgagagcaccgtgccccccagcctgcccgtggacagcgtggtgatcaccgagagcgacgcccagagaaccatgtaccccggcagctgcgtgaagaagaacatcgacggcaccatcgagttcagcggcgagttcggcgtgaaggaggagaccaacatcgtgaagctgctggagaagcagtaccaggagcagctggaggaggaggtggccaaggtgatcgtgagcatgagcatcgccttcgcccagcagaccgagctgagcagaatcagcggcggcaaggagaacaccgccagcagcaagcaggcccacgccgtgtgccagcaggagcagcactacttcaacgagatgaagctgagccaggaccagatcggcttccagaccttcgagaccgtggacgtgaagttcaaggaggagttcaagcccctgagcaaggagctgggcgagcacggcaaggagatcctgctgagcaacagcgacccccacgacatccccgagagcaaggactgcgtgctgaccatcagcgaggagatgttcagcaaggacaagaccttcatcgtgagacagagcatccacgacgagatcagcgtgagcagcatggacgccagcagacagctgatgctgaacgaggagcagctggaggacatgagacaggagctggtgagacagtaccaggagcaccagcaggccaccgagctgctgagacaggcccacatgagacagatggagagacagagagaggaccaggagcagctgcaggaggagatcaagagactgaacagacagctggcccagagaagcagcatcgacaacgagaacctggtgagcgagagagagagagtgctgctggaggagctggaggccctgaagcagctgagcctggccggcagagagaagctgtgctgcgagctgagaaacagcagcacccagacccagaacggcaacgagaaccagggcgaggtggaggagcagaccttcaaggagaaggagctggacagaaagcccgaggacgtgccccccgagatcctgagcaacgagagatacgccctgcagaaggccaacaacagactgctgaagatcctgctggaggtggtgaagaccaccgccgccgtggaggagaccatcggcagacacgtgctgggcatcctggacagaagcagcaagagccagagcagcgccagcctgatctggagaagcgaggccgaggccagcgtgaagagctgcgtgcacgaggagcacaccagagtgaccgacgagagcatccccagctacagcggcagcgacatgcccagaaacgacatcaacatgtggagcaaggtgaccgaggagggcaccgagctgagccagagactggtgagaagcggcttcgccggcaccgagatcgaccccgagaacgaggagctgatgctgaacatcagcagcagactgcaggccgccgtggagaagctgctggaggccatcagcgagaccagcagccagctggagcacgccaaggtgacccagaccgagctgatgagagagagcttcagacagaagcaggaggccaccgagagcctgaagtgccaggaggagctgagagagagactgcacgaggagagcagagccagagagcagctggccgtggagctgagcaaggccgagggcgtgatcgacggctacgccgacgagaagaccctgttcgagagacagatccaggagaagaccgacatcatcgacagactggagcaggagctgctgtgcgccagcaacagactgcaggagctggaggccgagcagcagcagatccaggaggagagagagctgctgagcagacagaaggaggccatgaaggccgaggccggccccgtggagcagcagctgctgcaggagaccgagaagctgatgaaggagaagctggaggtgcagtgccaggccgagaaggtgagagacgacctgcagaagcaggtgaaggccctggagatcgacgtggaggagcaggtgagcagattcatcgagctggagcaggagaagaacaccgagctgatggacctgagacagcagaaccaggccctggagaagcagctggagaagatgagaaagttcctggacgagcaggccatcgacagagagcacgagagagacgtgttccagcaggagatccagaagctggagcagcagctgaaggtggtgcccagattccagcccatcagcgagcaccagaccagagaggtggagcagctggccaaccacctgaaggagaagaccgacaagtgcagcgagctgctgctgagcaaggagcagctgcagagagacatccaggagagaaacgaggagatcgagaagctggagttcagagtgagagagctggagcaggccctgctggtgagcgccgacaccttccagaaggtggaggacagaaagcacttcggcgccgtggaggccaagcccgagctgagcctggaggtgcagctgcaggccgagagagacgccatcgacagaaaggagaaggagatcaccaacctggaggagcagctggagcagttcagagaggagctggagaacaagaacgaggaggtgcagcagctgcacatgcagctggagatccagaagaaggagagcaccaccagactgcaggagctggagcaggagaacaagctgttcaaggacgacatggagaagctgggcctggccatcaaggagagcgacgccatgagcacccaggaccagcacgtgctgttcggcaagttcgcccagatcatccaggagaaggaggtggagatcgaccagctgaacgagcaggtgaccaagctgcagcagcagctgaagatcaccaccgacaacaaggtgatcgaggagaagaacgagctgatcagagacctggagacccagatcgagtgcctgatgagcgaccaggagtgcgtgaagagaaacagagaggaggagatcgagcagctgaacgaggtgatcgagaagctgcagcaggagctggccaacatcggccagaagaccagcatgaacgcccacagcctgagcgaggaggccgacagcctgaagcaccagctggacgtggtgatcgccgagaagctggccctggagcagcaggtggagaccgccaacgaggagatgaccttcatgaagaacgtgctgaaggagaccaacttcaagatgaaccagctgacccaggagctgttcagcctgaagagagagagagagagcgtggagaagatccagagcatccccgagaacagcgtgaacgtggccatcgaccacctgagcaaggacaagcccgagctggaggtggtgctgaccgaggacgccctgaagagcctggagaaccagacctacttcaagagcttcgaggagaacggcaagggcagcatcatcaacctggagaccagactgctgcagctggagagcaccgtgagcgccaaggacctggagctgacccagtgctacaagcagatcaaggacatgcaggagcagggccagttcgagaccgagatgctgcagaagaagatcgtgaacctgcagaagatcgtggaggagaaggtggccgccgccctggtgagccagatccagctggaggccgtgcaggagtacgccaagttctgccaggacaaccagaccatcagcagcgagcccgagagaaccaacatccagaacctgaaccagctgagagaggacgagctgggcagcgacatcagcgccctgaccctgagaatcagcgagctggagagccaggtggtggagatgcacaccagcctgatcctggagaaggagcaggtggagatcgccgagaagaacgtgctggagaaggagaagaagctgctggagctgcagaagctgctggagggcaacgagaagaagcagagagagaaggagaagaagagaagcccccaggacgtggaggtgctgaagaccaccaccgagctgttccacagcaacgaggagagcggcttcttcaacgagctggaggccctgagagccgagagcgtggccaccaaggccgagctggccagctacaaggagaaggccgagaagctgcaggaggagctgctggtgaaggagaccaacatgaccagcctgcagaaggacctgagccaggtgagagaccacctggccgaggccaaggagaagctgagcatcctggagaaggaggacgagaccgaggtgcaggagagcaagaaggcctgcatgttcgagcccctgcccatcaagctgagcaagagcatcgccagccagaccgacggcaccctgaagatcagcagcagcaaccagaccccccagatcctggtgaagaacgccggcatccagatcaacctgcagagcgagtgcagcagcgaggaggtgaccgagatcatcagccagttcaccgagaagatcgagaagatgcaggagctgcacgccgccgagatcctggacatggagagcagacacatcagcgagaccgagaccctgaagagagagcactacgtggccgtgcagctgctgaaggaggagtgcggcaccctgaaggccgtgatccagtgcctgagaagcaaggagggcagcagcatccccgagctggcccacagcgacgcctaccagaccagagagatctgcagcagcgacagcggcagcgactggggccagggcatctacctgacccacagccagggcttcgacatcgccagcgagggcagaggcgaggagagcgagagcgccaccgacagcttccccaagaagatcaagggcctgctgagagccgtgcacaacgagggcatgcaggtgctgagcctgaccgagagcccctacagcgacggcgaggaccacagcatccagcaggtgagcgagccctggctggaggagagaaaggcctacatcaacaccatcagcagcctgaaggacctgatcaccaagatgcagctgcagagagaggccgaggtgtacgacagcagccagagccacgagagcttcagcgactggagaggcgagctgctgctggccctgcagcaggtgttcctggaggagagaagcgtgctgctggccgccttcagaaccgagctgaccgccctgggcaccaccgacgccgtgggcctgctgaactgcctggagcagagaatccaggagcagggcgtggagtaccaggccgccatggagtgcctgcagaaggccgacagaagaagcctgctgagcgagatccaggccctgcacgcccagatgaacggcagaaagatcaccctgaagagagagcaggagagcgagaagcccagccaggagctgctggagtacaacatccagcagaagcagagccagatgctggagatgcaggtggagctgagcagcatgaaggacagagccaccgagctgcaggagcagctgagcagcgagaagatggtggtggccgagctgaagagcgagctggcccagaccaagctggagctggagaccaccctgaaggcccagcacaagcacctgaaggagctggaggccttcagactggaggtgaaggacaagaccgacgaggtgcacctgctgaacgacaccctggccagcgagcagaagaagagcagagagctgcagtgggccctggagaaggagaaggccaagctgggcagaagcgaggagagagacaaggaggagctggaggacctgaagttcagcctggagagccagaagcagagaaacctgcagctgaacctgctgctggagcagcagaagcagctgctgaacgagagccagcagaagatcgagagccagagaatgctgtacgacgcccagctgagcgaggagcagggcagaaacctggagctgcaggtgctgctggagagcgagaaggtgagaatcagagagatgagcagcaccctggacagagagagagagctgcacgcccagctgcagagcagcgacggcaccggccagagcagaccccccctgcccagcgaggacctgctgaaggagctgcagaagcagctggaggagaagcacagcagaatcgtggagctgctgaacgagaccgagaagtacaagctggacagcctgcagaccagacagcagatggagaaggacagacaggtgcacagaaagaccctgcagaccgagcaggaggccaacaccgagggccagaagaagatgcacgagctgcagagcaaggtggaggacctgcagagacagctggaggagaagagacagcaggtgtacaagctggacctggagggccagagactgcagggcatcatgcaggagttccagaagcaggagctggagagagaggagaagagagagagcagaagaatcctgtaccagaacctgaacgagcccaccacctggagcctgaccagcgacagaaccagaaactgggtgctgcagcagaagatcgagggcgagaccaaggagagcaactacgccaagctgatcgagatgaacggcggcggcaccggctgcaaccacgagctggagatgatcagacagaagctgcagtgcgtggccagcaagctgcaggtgctgccccagaaggccagcgagagactgcagttcgagaccgccgacgacgaggacttcatctgggtgcaggagaacatcgacgagatcatcctgcagctgcagaagctgaccggccagcagggcgaggagcccagcctggtgagccccagcaccagctgcggcagcctgaccgagagactgctgagacagaacgccgagctgaccggccacatcagccagctgaccgaggagaagaacgacctgagaaacatggtgatgaagctggaggagcagatcagatggtacagacagaccggcgccggcagagacaacagcagcagattcagcctgaacggcggcgccaacatcgaggccatcatcgccagcgagaaggaggtgtggaacagagagaagctgaccctgcagaagagcctgaagagagccgaggccgaggtgtacaagctgaaggccgagctgagaaacgacagcctgctgcagaccctgagccccgacagcgagcacgtgaccctgaagagaatctacggcaagtacctgagagccgagagcttcagaaaggccctgatctaccagaagaagtacctgctgctgctgctgggcggcttccaggagtgcgaggacgccaccctggccctgctggccagaatgggcggccagcccgccttcaccgacctggaggtgatcaccaacagacccaagggcttcaccagattcagaagcgccgtgagagtgagcatcgccatcagcagaatgaagttcctggtgagaagatggcacagagtgaccggcagcgtgagcatcaacatcaacagagacggcttcggcctgaaccagggcgccgagaagaccgacagcttctaccacagcagcggcggcctggagctgtacggcgagcccagacacaccacctacagaagcagaagcgacctggactacatcagaagccccctgcccttccagaacagataccccggcacccccgccgacttcaaccccggcagcctggcctgcagccagctgcagaactacgaccccgacagagccctgaccgactacatcaccagactggaggccctgcagagaagactgggcaccatccagagcggcagcaccacccagttccacgccggcatgagaagatag

SEQ ID NO: 71262 - DNA, 11574 bp, synthetic construct
  misc_feature 1..11574: note = Description of Artificial Sequence: Synthetic coding sequence
  source 1..11574: mol_type = other DNA
atggaggacgaggagagacagaagaagctggaggccggcaaggccaagatcgaggagctgagcctggccttcctggtgagacagctggcccagttcagacagagaaaggcccagagcgacggccagagccccagcaagaagcagaagaagaagagaaagaccagcagcagcaagcacgacgtgagcgcccaccacgacctgaacatcgaccagagccagtgcaacgagatgtacatcaacagcagccagagagtggagagcaccgtgatccccgagagcaccatcatgagaaccctgcacagcggcgagatcaccagccacgagcagggcttcagcgtggagctggagagcgagatcagcaccaccgccgacgactgcagcagcgaggtgaacggctgcagcttcgtgatgagaaccggcaagcccaccaacctgctgagagaggaggagttcggcgtggacgacagctacagcgagcagggcgcccaggacagccccacccacctggagatgatggagagcgagctggccggcaagcagcacgagatcgaggagctgaacagagagctggaggagatgagagtgacctacggcaccgagggcctgcagcagctgcaggagttcgaggccgccatcaagcagagagacggcatcatcacccagctgaccgccaacctgcagcaggccagaagagagaaggacgagaccatgagagagttcctggagctgaccgagcagagccagaagctgcagatccagttccagcagctgcaggccagcgagaccctgagaaacagcacccacagcagcaccgccgccgacctgctgcaggccaagcagcagatcctgacccaccagcagcagctggaggagcaggaccacctgctggaggactaccagaagaagaaggaggacttcaccatgcagatcagcttcctgcaggagaagatcaaggtgtacgagatggagcaggacaagaaggtggagaacagcaacaaggaggagatccaggagaaggagaccatcatcgaggagctgaacaccaagatcatcgaggaggagaagaagaccctggagctgaaggacaagctgaccaccgccgacaagctgctgggcgagctgcaggagcagatcgtgcagaagaaccaggagatcaagaacatgaagctggagctgaccaacagcaagcagaaggagagacagagcagcgaggagatcaagcagctgatgggcaccgtggaggagctgcagaagagaaaccacaaggacagccagttcgagaccgacatcgtgcagagaatggagcaggagacccagagaaagctggagcagctgagagccgagctggacgagatgtacggccagcagatcgtgcagatgaagcaggagctgatcagacagcacatggcccagatggaggagatgaagaccagacacaagggcgagatggagaacgccctgagaagctacagcaacatcaccgtgaacgaggaccagatcaagctgatgaacgtggccatcaacgagctgaacatcaagctgcaggacaccaacagccagaaggagaagctgaaggaggagctgggcctgatcctggaggagaagtgcgccctgcagagacagctggaggacctggtggaggagctgagcttcagcagagagcagatccagagagccagacagaccatcgccgagcaggagagcaagctgaacgaggcccacaagagcctgagcaccgtggaggacctgaaggccgagatcgtgagcgccagcgagagcagaaaggagctggagctgaagcacgaggccgaggtgaccaactacaagatcaagctggagatgctggagaaggagaagaacgccgtgctggacagaatggccgagagccaggaggccgagctggagagactgagaacccagctgctgttcagccacgaggaggagctgagcaagctgaaggaggacctggagatcgagcacagaatcaacatcgagaagctgaaggacaacctgggcatccactacaagcagcagatcgacggcctgcagaacgagatgagccagaagatcgagaccatgcagttcgagaaggacaacctgatcaccaagcagaaccagctgatcctggagatcagcaagctgaaggacctgcagcagagcctggtgaacagcaagagcgaggagatgaccctgcagatcaacgagctgcagaaggagatcgagatcctgagacaggaggagaaggagaagggcaccctggagcaggaggtgcaggagctgcagctgaagaccgagctgctggagaagcagatgaaggagaaggagaacgacctgcaggagaagttcgcccagctggaggccgagaacagcatcctgaaggacgagaagaagaccctggaggacatgctgaagatccacacccccgtgagccaggaggagagactgatcttcctggacagcatcaagagcaagagcaaggacagcgtgtgggagaaggagatcgagatcctgatcgaggagaacgaggacctgaagcagcagtgcatccagctgaacgaggagatcgagaagcagagaaacaccttcagcttcgccgagaagaacttcgaggtgaactaccaggagctgcaggaggagtacgcctgcctgctgaaggtgaaggacgacctggaggacagcaagaacaagcaggagctggagtacaagagcaagctgaaggccctgaacgaggagctgcacctgcagagaatcaaccccaccaccgtgaagatgaagagcagcgtgttcgacgaggacaagaccttcgtggccgagaccctggagatgggcgaggtggtggagaaggacaccaccgagctgatggagaagctggaggtgaccaagagagagaagctggagctgagccagagactgagcgacctgagcgagcagctgaagcagaagcacggcgagatcagcttcctgaacgaggaggtgaagagcctgaagcaggagaaggagcaggtgagcctgagatgcagagagctggagatcatcatcaaccacaacagagccgagaacgtgcagagctgcgacacccaggtgagcagcctgctggacggcgtggtgaccatgaccagcagaggcgccgagggcagcgtgagcaaggtgaacaagagcttcggcgaggagagcaagatcatggtggaggacaaggtgagcttcgagaacatgaccgtgggcgaggagagcaagcaggagcagctgatcctggaccacctgcccagcgtgaccaaggagagcagcctgagagccacccagcccagcgagaacgacaagctgcagaaggagctgaacgtgctgaagagcgagcagaacgacctgagactgcagatggaggcccagagaatctgcctgagcctggtgtacagcacccacgtggaccaggtgagagagtacatggagaacgagaaggacaaggccctgtgcagcctgaaggaggagctgatcttcgcccaggaggagaagatcaaggagctgcagaagatccaccagctggagctgcagaccatgaagacccaggagaccggcgacgagggcaagcccctgcacctgctgatcggcaagctgcagaaggccgtgagcgaggagtgcagctacttcctgcagaccctgtgcagcgtgctgggcgagtactacacccccgccctgaagtgcgaggtgaacgccgaggacaaggagaacagcggcgactacatcagcgagaacgaggaccccgagctgcaggactacagatacgaggtgcaggacttccaggagaacatgcacaccctgctgaacaaggtgaccgaggagtacaacaagctgctggtgctgcagaccagactgagcaagatctggggccagcagaccgacggcatgaagctggagttcggcgaggagaacctgcccaaggaggagaccgagttcctgagcatccacagccagatgaccaacctggaggacatcgacgtgaaccacaagagcaagctgagcagcctgcaggacctggagaagaccaagctggaggagcaggtgcaggagctggagagcctgatcagcagcctgcagcagcagctgaaggagaccgagcagaactacgaggccgagatccactgcctgcagaagagactgcaggccgtgagcgagagcaccgtgccccccagcctgcccgtggacagcgtggtgatcaccgagagcgacgcccagagaaccatgtaccccggcagctgcgtgaagaagaacatcgacggcaccatcgagttcagcggcgagttcggcgtgaaggaggagaccaacatcgtgaagctgctggagaagcagtaccaggagcagctggaggaggaggtggccaaggtgatcgtgagcatgagcatcgccttcgcccagcagaccgagctgagcagaatcagcggcggcaaggagaacaccgccagcagcaagcaggcccacgccgtgtgccagcaggagcagcactacttcaacgagatgaagctgagccaggaccagatcggcttccagaccttcgagaccgtggacgtgaagttcaaggaggagttcaagcccctgagcaaggagctgggcgagcacggcaaggagatcctgctgagcaacagcgacccccacgacatccccgagagcaaggactgcgtgctgaccatcagcgaggagatgttcagcaaggacaagaccttcatcgtgagacagagcatccacgacgagatcagcgtgagcagcatggacgccagcagacagctgatgctgaacgaggagcagctggaggacatgagacaggagctggtgagacagtaccaggagcaccagcaggccaccgagctgctgagacaggcccacatgagacagatggagagacagagagaggaccaggagcagctgcaggaggagatcaagagactgaacagacagctggcccagagaagcagcatcgacaacgagaacctggtgagcgagagagagagagtgctgctggaggagctggaggccctgaagcagctgagcctggccggcagagagaagctgtgctgcgagctgagaaacagcagcacccagacccagaacggcaacgagaaccagggcgaggtggaggagcagaccttcaaggagaaggagctggacagaaagcccgaggacgtgccccccgagatcctgagcaacgagagatacgccctgcagaaggccaacaacagactgctgaagatcctgctggaggtggtgaagaccaccgccgccgtggaggagaccatcggcagacacgtgctgggcatcctggacagaagcagcaagagccagagcagcgccagcctgatctggagaagcgaggccgaggccagcgtgaagagctgcgtgcacgaggagcacaccagagtgaccgacgagagcatccccagctacagcggcagcgacatgcccagaaacgacatcaacatgtggagcaaggtgaccgaggagggcaccgagctgagccagagactggtgagaagcggcttcgccggcaccgagatcgaccccgagaacgaggagctgatgctgaacatcagcagcagactgcaggccgccgtggagaagctgctggaggccatcagcgagaccagcagccagctggagcacgccaaggtgacccagaccgagctgatgagagagagcttcagacagaagcaggaggccaccgagagcctgaagtgccaggaggagctgagagagagactgcacgaggagagcagagccagagagcagctggccgtggagctgagcaaggccgagggcgtgatcgacggctacgccgacgagaagaccctgttcgagagacagatccaggagaagaccgacatcatcgacagactggagcaggagctgctgtgcgccagcaacagactgcaggagctggaggccgagcagcagcagatccaggaggagagagagctgctgagcagacagaaggaggccatgaaggccgaggccggccccgtggagcagcagctgctgcaggagaccgagaagctgatgaaggagaagctggaggtgcagtgccaggccgagaaggtgagagacgacctgcagaagcaggtgaaggccctggagatcgacgtggaggagcaggtgagcagattcatcgagctggagcaggagaagaacaccgagctgatggacctgagacagcagaaccaggccctggagaagcagctggagaagatgagaaagttcctggacgagcaggccatcgacagagagcacgagagagacgtgttccagcaggagatccagaagctggagcagcagctgaaggtggtgcccagattccagcccatcagcgagcaccagaccagagaggtggagcagctggccaaccacctgaaggagaagaccgacaagtgcagcgagctgctgctgagcaaggagcagctgcagagagacatccaggagagaaacgaggagatcgagaagctggagttcagagtgagagagctggagcaggccctgctggtgagcgccgacaccttccagaaggtggaggacagaaagcacttcggcgccgtggaggccaagcccgagctgagcctggaggtgcagctgcaggccgagagagacgccatcgacagaaaggagaaggagatcaccaacctggaggagcagctggagcagttcagagaggagctggagaacaagaacgaggaggtgcagcagctgcacatgcagctggagatccagaagaaggagagcaccaccagactgcaggagctggagcaggagaacaagctgttcaaggacgacatggagaagctgggcctggccatcaaggagagcgacgccatgagcacccaggaccagcacgtgctgttcggcaagttcgcccagatcatccaggagaaggaggtggagatcgaccagctgaacgagcaggtgaccaagctgcagcagcagctgaagatcaccaccgacaacaaggtgatcgaggagaagaacgagctgatcagagacctggagacccagatcgagtgcctgatgagcgaccaggagtgcgtgaagagaaacagagaggaggagatcgagcagctgaacgaggtgatcgagaagctgcagcaggagctggccaacatcggccagaagaccagcatgaacgcccacagcctgagcgaggaggccgacagcctgaagcaccagctggacgtggtgatcgccgagaagctggccctggagcagcaggtggagaccgccaacgaggagatgaccttcatgaagaacgtgctgaaggagaccaacttcaagatgaaccagctgacccaggagctgttcagcctgaagagagagagagagagcgtggagaagatccagagcatccccgagaacagcgtgaacgtggccatcgaccacctgagcaaggacaagcccgagctggaggtggtgctgaccgaggacgccctgaagagcctggagaaccagacctacttcaagagcttcgaggagaacggcaagggcagcatcatcaacctggagaccagactgctgcagctggagagcaccgtgagcgccaaggacctggagctgacccagtgctacaagcagatcaaggacatgcaggagcagggccagttcgagaccgagatgctgcagaagaagatcgtgaacctgcagaagatcgtggaggagaaggtggccgccgccctggtgagccagatccagctggaggccgtgcaggagtacgccaagttctgccaggacaaccagaccatcagcagcgagcccgagagaaccaacatccagaacctgaaccagctgagagaggacgagctgggcagcgacatcagcgccctgaccctgagaatcagcgagctggagagccaggtggtggagatgcacaccagcctgatcctggagaaggagcaggtggagatcgccgagaagaacgtgctggagaaggagaagaagctgctggagctgcagaagctgctggagggcaacgagaagaagcagagagagaaggagaagaagagaagcccccaggacgtggaggtgctgaagaccaccaccgagctgttccacagcaacgaggagagcggcttcttcaacgagctggaggccctgagagccgagagcgtggccaccaaggccgagctggccagctacaaggagaaggccgagaagctgcaggaggagctgctggtgaaggagaccaacatgaccagcctgcagaaggacctgagccaggtgagagaccacctggccgaggccaaggagaagctgagcatcctggagaaggaggacgagaccgaggtgcaggagagcaagaaggcctgcatgttcgagcccctgcccatcaagctgagcaagagcatcgccagccagaccgacggcaccctgaagatcagcagcagcaaccagaccccccagatcctggtgaagaacgccggcatccagatcaacctgcagagcgagtgcagcagcgaggaggtgaccgagatcatcagccagttcaccgagaagatcgagaagatgcaggagctgcacgccgccgagatcctggacatggagagcagacacatcagcgagaccgagaccctgaagagagagcactacgtggccgtgcagctgctgaaggaggagtgcggcaccctgaaggccgtgatccagtgcctgagaagcaaggagggcctgctgagagccgtgcacaacgagggcatgcaggtgctgagcctgaccgagagcccctacagcgacggcgaggaccacagcatccagcaggtgagcgagccctggctggaggagagaaaggcctacatcaacaccatcagcagcctgaaggacctgatcaccaagatgcagctgcagagagaggccgaggtgtacgacagcagccagagccacgagagcttcagcgactggagaggcgagctgctgctggccctgcagcaggtgttcctggaggagagaagcgtgctgctggccgccttcagaaccgagctgaccgccctgggcaccaccgacgccgtgggcctgctgaactgcctggagcagagaatccaggagcagggcgtggagtaccaggccgccatggagtgcctgcagaaggccgacagaagaagcctgctgagcgagatccaggccctgcacgcccagatgaacggcagaaagatcaccctgaagagagagcaggagagcgagaagcccagccaggagctgctggagtacaacatccagcagaagcagagccagatgctggagatgcaggtggagctgagcagcatgaaggacagagccaccgagctgcaggagcagctgagcagcgagaagatggtggtggccgagctgaagagcgagctggcccagaccaagctggagctggagaccaccctgaaggcccagcacaagcacctgaaggagctggaggccttcagactggaggtgaaggacaagaccgacgaggtgcacctgctgaacgacaccctggccagcgagcagaagaagagcagagagctgcagtgggccctggagaaggagaaggccaagctgggcagaagcgaggagagagacaaggaggagctggaggacctgaagttcagcctggagagccagaagcagagaaacctgcagctgaacctgctgctggagcagcagaagcagctgctgaacgagagccagcagaagatcgagagccagagaatgctgtacgacgcccagctgagcgaggagcagggcagaaacctggagctgcaggtgctgctggagagcgagaaggtgagaatcagagagatgagcagcaccctggacagagagagagagctgcacgcccagctgcagagcagcgacggcaccggccagagcagaccccccctgcccagcgaggacctgctgaaggagctgcagaagcagctggaggagaagcacagcagaatcgtggagctgctgaacgagaccgagaagtacaagctggacagcctgcagaccagacagcagatggagaaggacagacaggtgcacagaaagaccctgcagaccgagcaggaggccaacaccgagggccagaagaagatgcacgagctgcagagcaaggtggaggacctgcagagacagctggaggagaagagacagcaggtgtacaagctggacctggagggccagagactgcagggcatcatgcaggagttccagaagcaggagctggagagagaggagaagagagagagcagaagaatcctgtaccagaacctgaacgagcccaccacctggagcctgaccagcgacagaaccagaaactgggtgctgcagcagaagatcgagggcgagaccaaggagagcaactacgccaagctgatcgagatgaacggcggcggcaccggctgcaaccacgagctggagatgatcagacagaagctgcagtgcgtggccagcaagctgcaggtgctgccccagaaggccagcgagagactgcagttcgagaccgccgacgacgaggacttcatctgggtgcaggagaacatcgacgagatcatcctgcagctgcagaagctgaccggccagcagggcgaggagcccagcctggtgagccccagcaccagctgcggcagcctgaccgagagactgctgagacagaacgccgagctgaccggccacatcagccagctgaccgaggagaagaacgacctgagaaacatggtgatgaagctggaggagcagatcagatggtacagacagaccggcgccggcagagacaacagcagcagattcagcctgaacggcggcgccaacatcgaggccatcatcgccagcgagaaggaggtgtggaacagagagaagctgaccctgcagaagagcctgaagagagccgaggccgaggtgtacaagctgaaggccgagctgagaaacgacagcctgctgcagaccctgagccccgacagcgagcacgtgaccctgaagagaatctacggcaagtacctgagagccgagagcttcagaaaggccctgatctaccagaagaagtacctgctgctgctgctgggcggcttccaggagtgcgaggacgccaccctggccctgctggccagaatgggcggccagcccgccttcaccgacctggaggtgatcaccaacagacccaagggcttcaccagattcagaagcgccgtgagagtgagcatcgccatcagcagaatgaagttcctggtgagaagatggcacagagtgaccggcagcgtgagcatcaacatcaacagagacggcttcggcctgaaccagggcgccgagaagaccgacagcttctaccacagcagcggcggcctggagctgtacggcgagcccagacacaccacctacagaagcagaagcgacctggactacatcagaagccccctgcccttccagaacagataccccggcacccccgccgacttcaaccccggcagcctggcctgcagccagctgcagaactacgaccccgacagagccctgaccgactacatcaccagactggaggccctgcagagaagactgggcaccatccagagcggcagcaccacccagttccacgccggcatgagaagatag

SEQ ID NO: 71263 - DNA, 11736 bp, synthetic construct
  misc_feature 1..11736: note = Description of Artificial Sequence: Synthetic coding sequence
  source 1..11736: mol_type = other DNA
atggaggacgaggagagacagaagaagctggaggccggcaaggccaagatcgaggagctgagcctggccttcctggtgagacagctggcccagttcagacagagaaaggcccagagcgacggccagagccccagcaagaagcagaagaagaagagaaagaccagcagcagcaagcacgacgtgagcgcccaccacgacctgaacatcgaccagagccagtgcaacgagatgtacatcaacagcagccagagagtggagagcaccgtgatccccgagagcaccatcatgagaaccctgcacagcggcgagatcaccagccacgagcagggcttcagcgtggagctggagagcgagatcagcaccaccgccgacgactgcagcagcgaggtgaacggctgcagcttcgtgatgagaaccggcaagcccaccaacctgctgagagaggaggagttcggcgtggacgacagctacagcgagcagggcgcccaggacagccccacccacctggagatgatggagagcgagctggccggcaagcagcacgagatcgaggagctgaacagagagctggaggagatgagagtgacctacggcaccgagggcctgcagcagctgcaggagttcgaggccgccatcaagcagagagacggcatcatcacccagctgaccgccaacctgcagcaggccagaagagagaaggacgagaccatgagagagttcctggagctgaccgagcagagccagaagctgcagatccagttccagcagctgcaggccagcgagaccctgagaaacagcacccacagcagcaccgccgccgacctgctgcaggccaagcagcagatcctgacccaccagcagcagctggaggagcaggaccacctgctggaggactaccagaagaagaaggaggacttcaccatgcagatcagcttcctgcaggagaagatcaaggtgtacgagatggagcaggacaagaaggtggagaacagcaacaaggaggagatccaggagaaggagaccatcatcgaggagctgaacaccaagatcatcgaggaggagaagaagaccctggagctgaaggacaagctgaccaccgccgacaagctgctgggcgagctgcaggagcagatcgtgcagaagaaccaggagatcaagaacatgaagctggagctgaccaacagcaagcagaaggagagacagagcagcgaggagatcaagcagctgatgggcaccgtggaggagctgcagaagagaaaccacaaggacagccagttcgagaccgacatcgtgcagagaatggagcaggagacccagagaaagctggagcagctgagagccgagctggacgagatgtacggccagcagatcgtgcagatgaagcaggagctgatcagacagcacatggcccagatggaggagatgaagaccagacacaagggcgagatggagaacgccctgagaagctacagcaacatcaccgtgaacgaggaccagatcaagctgatgaacgtggccatcaacgagctgaacatcaagctgcaggacaccaacagccagaaggagaagctgaaggaggagctgggcctgatcctggaggagaagtgcgccctgcagagacagctggaggacctggtggaggagctgagcttcagcagagagcagatccagagagccagacagaccatcgccgagcaggagagcaagctgaacgaggcccacaagagcctgagcaccgtggaggacctgaaggccgagatcgtgagcgccagcgagagcagaaaggagctggagctgaagcacgaggccgaggtgaccaactacaagatcaagctggagatgctggagaaggagaagaacgccgtgctggacagaatggccgagagccaggaggccgagctggagagactgagaacccagctgctgttcagccacgaggaggagctgagcaagctgaaggaggacctggagatcgagcacagaatcaacatcgagaagctgaaggacaacctgggcatccactacaagcagcagatcgacggcctgcagaacgagatgagccagaagatcgagaccatgcagttcgagaaggacaacctgatcaccaagcagaaccagctgatcctggagatcagcaagctgaaggacctgcagcagagcctggtgaacagcaagagcgaggagatgaccctgcagatcaacgagctgcagaaggagatcgagatcctgagacaggaggagaaggagaagggcaccctggagcaggaggtgcaggagctgcagctgaagaccgagctgctggagaagcagatgaaggagaaggagaacgacctgcaggagaagttcgcccagctggaggccgagaacagcatcctgaaggacgagaagaagaccctggaggacatgctgaagatccacacccccgtgagccaggaggagagactgatcttcctggacagcatcaagagcaagagcaaggacagcgtgtgggagaaggagatcgagatcctgatcgaggagaacgaggacctgaagcagcagtgcatccagctgaacgaggagatcgagaagcagagaaacaccttcagcttcgccgagaagaacttcgaggtgaactaccaggagctgcaggaggagtacgcctgcctgctgaaggtgaaggacgacctggaggacagcaagaacaagcaggagctggagtacaagagcaagctgaaggccctgaacgaggagctgcacctgcagagaatcaaccccaccaccgtgaagatgaagagcagcgtgttcgacgaggacaagaccttcgtggccgagaccctggagatgggcgaggtggtggagaaggacaccaccgagctgatggagaagctggaggtgaccaagagagagaagctggagctgagccagagactgagcgacctgagcgagcagctgaagcagaagcacggcgagatcagcttcctgaacgaggaggtgaagagcctgaagcaggagaaggagcaggtgagcctgagatgcagagagctggagatcatcatcaaccacaacagagccgagaacgtgcagagctgcgacacccaggtgagcagcctgctggacggcgtggtgaccatgaccagcagaggcgccgagggcagcgtgagcaaggtgaacaagagcttcggcgaggagagcaagatcatggtggaggacaaggtgagcttcgagaacatgaccgtgggcgaggagagcaagcaggagcagctgatcctggaccacctgcccagcgtgaccaaggagagcagcctgagagccacccagcccagcgagaacgacaagctgcagaaggagctgaacgtgctgaagagcgagcagaacgacctgagactgcagatggaggcccagagaatctgcctgagcctggtgtacagcacccacgtggaccaggtgagagagtacatggagaacgagaaggacaaggccctgtgcagcctgaaggaggagctgatcttcgcccaggaggagaagatcaaggagctgcagaagatccaccagctggagctgcagaccatgaagacccaggagaccggcgacgagggcaagcccctgcacctgctgatcggcaagctgcagaaggccgtgagcgaggagtgcagctacttcctgcagaccctgtgcagcgtgctgggcgagtactacacccccgccctgaagtgcgaggtgaacgccgaggacaaggagaacagcggcgactacatcagcgagaacgaggaccccgagctgcaggactacagatacgaggtgcaggacttccaggagaacatgcacaccctgctgaacaaggtgaccgaggagtacaacaagctgctggtgctgcagaccagactgagcaagatctggggccagcagaccgacggcatgaagctggagttcggcgaggagaacctgcccaaggaggagaccgagttcctgagcatccacagccagatgaccaacctggaggacatcgacgtgaaccacaagagcaagctgagcagcctgcaggacctggagaagaccaagctggaggagcaggtgcaggagctggagagcctgatcagcagcctgcagcagcagctgaaggagaccgagcagaactacgaggccgagatccactgcctgcagaagagactgcaggccgtgagcgagagcaccgtgccccccagcctgcccgtggacagcgtggtgatcaccgagagcgacgcccagagaaccatgtaccccggcagctgcgtgaagaagaacatcgacggcaccatcgagttcagcggcgagttcggcgtgaaggaggagaccaacatcgtgaagctgctggagaagcagtaccaggagcagctggaggaggaggtggccaaggtgatcgtgagcatgagcatcgccttcgcccagcagaccgagctgagcagaatcagcggcggcaaggagaacaccgccagcagcaagcaggcccacgccgtgtgccagcaggagcagcactacttcaacgagatgaagctgagccaggaccagatcggcttccagaccttcgagaccgtggacgtgaagttcaaggaggagttcaagcccctgagcaaggagctgggcgagcacggcaaggagatcctgctgagcaacagcgacccccacgacatccccgagagcaaggactgcgtgctgaccatcagcgaggagatgttcagcaaggacaagaccttcatcgtgagacagagcatccacgacgagatcagcgtgagcagcatggacgccagcagacagctgatgctgaacgaggagcagctggaggacatgagacaggagctggtgagacagtaccaggagcaccagcaggccaccgagctgctgagacaggcccacatgagacagatggagagacagagagaggaccaggagcagctgcaggaggagatcaagagactgaacagacagctggcccagagaagcagcatcgacaacgagaacctggtgagcgagagagagagagtgctgctggaggagctggaggccctgaagcagctgagcctggccggcagagagaagctgtgctgcgagctgagaaacagcagcacccagacccagaacggcaacgagaaccagggcgaggtggaggagcagaccttcaaggagaaggagctggacagaaagcccgaggacgtgccccccgagatcctgagcaacgagagatacgccctgcagaaggccaacaacagactgctgaagatcctgctggaggtggtgaagaccaccgccgccgtggaggagaccatcggcagacacgtgctgggcatcctggacagaagcagcaagagccagagcagcgccagcctgatctggagaagcgaggccgaggccagcgtgaagagctgcgtgcacgaggagcacaccagagtgaccgacgagagcatccccagctacagcggcagcgacatgcccagaaacgacatcaacatgtggagcaaggtgaccgaggagggcaccgagctgagccagagactggtgagaagcggcttcgccggcaccgagatcgaccccgagaacgaggagctgatgctgaacatcagcagcagactgcaggccgccgtggagaagctgctggaggccatcagcgagaccagcagccagctggagcacgccaaggtgacccagaccgagctgatgagagagagcttcagacagaagcaggaggccaccgagagcctgaagtgccaggaggagctgagagagagactgcacgaggagagcagagccagagagcagctggccgtggagctgagcaaggccgagggcgtgatcgacggctacgccgacgagaagaccctgttcgagagacagatccaggagaagaccgacatcatcgacagactggagcaggagctgctgtgcgccagcaacagactgcaggagctggaggccgagcagcagcagatccaggaggagagagagctgctgagcagacagaaggaggccatgaaggccgaggccggccccgtggagcagcagctgctgcaggagaccgagaagctgatgaaggagaagctggaggtgcagtgccaggccgagaaggtgagagacgacctgcagaagcaggtgaaggccctggagatcgacgtggaggagcaggtgagcagattcatcgagctggagcaggagaagaacaccgagctgatggacctgagacagcagaaccaggccctggagaagcagctggagaagatgagaaagttcctggacgagcaggccatcgacagagagcacgagagagacgtgttccagcaggagatccagaagctggagcagcagctgaaggtggtgcccagattccagcccatcagcgagcaccagaccagagaggtggagcagctggccaaccacctgaaggagaagaccgacaagtgcagcgagctgctgctgagcaaggagcagctgcagagagacatccaggagagaaacgaggagatcgagaagctggagttcagagtgagagagctggagcaggccctgctggtgagcgccgacaccttccagaaggtggaggacagaaagcacttcggcgccgtggaggccaagcccgagctgagcctggaggtgcagctgcaggccgagagagacgccatcgacagaaaggagaaggagatcaccaacctggaggagcagctggagcagttcagagaggagctggagaacaagaacgaggaggtgcagcagctgcacatgcagctggagatccagaagaaggagagcaccaccagactgcaggagctggagcaggagaacaagctgttcaaggacgacatggagaagctgggcctggccatcaaggagagcgacgccatgagcacccaggaccagcacgtgctgttcggcaagttcgcccagatcatccaggagaaggaggtggagatcgaccagctgaacgagcaggtgaccaagctgcagcagcagctgaagatcaccaccgacaacaaggtgatcgaggagaagaacgagctgatcagagacctggagacccagatcgagtgcctgatgagcgaccaggagtgcgtgaagagaaacagagaggaggagatcgagcagctgaacgaggtgatcgagaagctgcagcaggagctggccaacatcggccagaagaccagcatgaacgcccacagcctgagcgaggaggccgacagcctgaagcaccagctggacgtggtgatcgccgagaagctggccctggagcagcaggtggagaccgccaacgaggagatgaccttcatgaagaacgtgctgaaggagaccaacttcaagatgaaccagctgacccaggagctgttcagcctgaagagagagagagagagcgtggagaagatccagagcatccccgagaacagcgtgaacgtggccatcgaccacctgagcaaggacaagcccgagctggaggtggtgctgaccgaggacgccctgaagagcctggagaaccagacctacttcaagagcttcgaggagaacggcaagggcagcatcatcaacctggagaccagactgctgcagctggagagcaccgtgagcgccaaggacctggagctgacccagtgctacaagcagatcaaggacatgcaggagcagggccagttcgagaccgagatgctgcagaagaagatcgtgaacctgcagaagatcgtggaggagaaggtggccgccgccctggtgagccagatccagctggaggccgtgcaggagtacgccaagttctgccaggacaaccagaccatcagcagcgagcccgagagaaccaacatccagaacctgaaccagctgagagaggacgagctgggcagcgacatcagcgccctgaccctgagaatcagcgagctggagagccaggtggtggagatgcacaccagcctgatcctggagaaggagcaggtggagatcgccgagaagaacgtgctggagaaggagaagaagctgctggagctgcagaagctgctggagggcaacgagaagaagcagagagagaaggagaagaagagaagcccccaggacgtggaggtgctgaagaccaccaccgagctgttccacagcaacgaggagagcggcttcttcaacgagctggaggccctgagagccgagagcgtggccaccaaggccgagctggccagctacaaggagaaggccgagaagctgcaggaggagctgctggtgaaggagaccaacatgaccagcctgcagaaggacctgagccaggtgagagaccacctggccgaggccaaggagaagctgagcatcctggagaaggaggacgagaccgaggtgcaggagagcaagaaggcctgcatgttcgagcccctgcccatcaagctgagcaagagcatcgccagccagaccgacggcaccctgaagatcagcagcagcaaccagaccccccagatcctggtgaagaacgccggcatccagatcaacctgcagagcgagtgcagcagcgaggaggtgaccgagatcatcagccagttcaccgagaagatcgagaagatgcaggagctgcacgccgccgagatcctggacatggagagcagacacatcagcgagaccgagaccctgaagagagagcactacgtggccgtgcagctgctgaaggaggagtgcggcaccctgaaggccgtgatccagtgcctgagaagcaaggaggtgttcggcttctacaacatgtgcttcagcaccctgtgcgacagcggcagcgactggggccagggcatctacctgacccacagccagggcttcgacatcgccagcgagggcagaggcgaggagagcgagagcgccaccgacagcttccccaagaagatcaagggcctgctgagagccgtgcacaacgagggcatgcaggtgctgagcctgaccgagagcccctacagcgacggcgaggaccacagcatccagcaggtgagcgagccctggctggaggagagaaaggcctacatcaacaccatcagcagcctgaaggacctgatcaccaagatgcagctgcagagagaggccgaggtgtacgacagcagccagagccacgagagcttcagcgactggagaggcgagctgctgctggccctgcagcaggtgttcctggaggagagaagcgtgctgctggccgccttcagaaccgagctgaccgccctgggcaccaccgacgccgtgggcctgctgaactgcctggagcagagaatccaggagcagggcgtggagtaccaggccgccatggagtgcctgcagaaggccgacagaagaagcctgctgagcgagatccaggccctgcacgcccagatgaacggcagaaagatcaccctgaagagagagcaggagagcgagaagcccagccaggagctgctggagtacaacatccagcagaagcagagccagatgctggagatgcaggtggagctgagcagcatgaaggacagagccaccgagctgcaggagcagctgagcagcgagaagatggtggtggccgagctgaagagcgagctggcccagaccaagctggagctggagaccaccctgaaggcccagcacaagcacctgaaggagctggaggccttcagactggaggtgaaggacaagaccgacgaggtgcacctgctgaacgacaccctggccagcgagcagaagaagagcagagagctgcagtgggccctggagaaggagaaggccaagctgggcagaagcgaggagagagacaaggaggagctggaggacctgaagttcagcctggagagccagaagcagagaaacctgcagctgaacctgctgctggagcagcagaagcagctgctgaacgagagccagcagaagatcgagagccagagaatgctgtacgacgcccagctgagcgaggagcagggcagaaacctggagctgcaggtgctgctggagagcgagaaggtgagaatcagagagatgagcagcaccctggacagagagagagagctgcacgcccagctgcagagcagcgacggcaccggccagagcagaccccccctgcccagcgaggacctgctgaaggagctgcagaagcagctggaggagaagcacagcagaatcgtggagctgctgaacgagaccgagaagtacaagctggacagcctgcagaccagacagcagatggagaaggacagacaggtgcacagaaagaccctgcagaccgagcaggaggccaacaccgagggccagaagaagatgcacgagctgcagagcaaggtggaggacctgcagagacagctggaggagaagagacagcaggtgtacaagctggacctggagggccagagactgcagggcatcatgcaggagttccagaagcaggagctggagagagaggagaagagagagagcagaagaatcctgtaccagaacctgaacgagcccaccacctggagcctgaccagcgacagaaccagaaactgggtgctgcagcagaagatcgagggcgagaccaaggagagcaactacgccaagctgatcgagatgaacggcggcggcaccggctgcaaccacgagctggagatgatcagacagaagctgcagtgcgtggccagcaagctgcaggtgctgccccagaaggccagcgagagactgcagttcgagaccgccgacgacgaggacttcatctgggtgcaggagaacatcgacgagatcatcctgcagctgcagaagctgaccggccagcagggcgaggagcccagcctggtgagccccagcaccagctgcggcagcctgaccgagagactgctgagacagaacgccgagctgaccggccacatcagccagctgaccgaggagaagaacgacctgagaaacatggtgatgaagctggaggagcagatcagatggtacagacagaccggcgccggcagagacaacagcagcagattcagcctgaacggcggcgccaacatcgaggccatcatcgccagcgagaaggaggtgtggaacagagagaagctgaccctgcagaagagcctgaagagagccgaggccgaggtgtacaagctgaaggccgagctgagaaacgacagcctgctgcagaccctgagccccgacagcgagcacgtgaccctgaagagaatctacggcaagtacctgagagccgagagcttcagaaaggccctgatctaccagaagaagtacctgctgctgctgctgggcggcttccaggagtgcgaggacgccaccctggccctgctggccagaatgggcggccagcccgccttcaccgacctggaggtgatcaccaacagacccaagggcttcaccagattcagaagcgccgtgagagtgagcatcgccatcagcagaatgaagttcctggtgagaagatggcacagagtgaccggcagcgtgagcatcaacatcaacagagacggcttcggcctgaaccagggcgccgagaagaccgacagcttctaccacagcagcggcggcctggagctgtacggcgagcccagacacaccacctacagaagcagaagcgacctggactacatcagaagccccctgcccttccagaacagataccccggcacccccgccgacttcaaccccggcagcctggcctgcagccagctgcagaactacgaccccgacagagccctgaccgactacatcaccagactggaggccctgcagagaagactgggcaccatccagagcggcagcaccacccagttccacgccggcatgagaagatag

SEQ ID NO: 71264 - DNA, 4932 bp, synthetic construct
  misc_feature 1..4932: note = Description of Artificial Sequence: Synthetic coding sequence
  source 1..4932: mol_type = other DNA
atggaggacgaggagagacagaagaagctggaggccggcaaggccaagatcgaggagctgagcctggccttcctggtgagacagctggcccagttcagacagagaaaggcccagagcgacggccagagccccagcaagaagcagaagaagaagagaaagaccagcagcagcaagcacgacgtgagcgcccaccacgacctgaacatcgaccagagccagtgcaacgagatgtacatcaacagcagccagagagtggagagcaccgtgatccccgagagcaccatcatgagaaccctgcacagcggcgagatcaccagccacgagcagggcttcagcgtggagctggagagcgagatcagcaccaccgccgacgactgcagcagcgaggtgaacggctgcagcttcgtgatgagaaccggcaagcccaccaacctgctgagagaggaggagttcggcgtggacgacagctacagcgagcagggcgcccaggacagccccacccacctggagatgatggagagcgagctggccggcaagcagcacgagatcgaggagctgaacagagagctggaggagatgagagtgacctacggcaccgagggcctgcagcagctgcaggagttcgaggccgccatcaagcagagagacggcatcatcacccagctgaccgccaacctgcagcaggccagaagagagaaggacgagaccatgagagagttcctggagctgaccgagcagagccagaagctgcagatccagttccagcagctgcaggccagcgagaccctgagaaacagcacccacagcagcaccgccgccgacctgctgcaggccaagcagcagatcctgacccaccagcagcagctggaggagcaggaccacctgctggaggactaccagaagaagaaggaggacttcaccatgcagatcagcttcctgcaggagaagatcaaggtgtacgagatggagcaggacaagaaggtggagaacagcaacaaggaggagatccaggagaaggagaccatcatcgaggagctgaacaccaagatcatcgaggaggagaagaagaccctggagctgaaggacaagctgaccaccgccgacaagctgctgggcgagctgcaggagcagatcgtgcagaagaaccaggagatcaagaacatgaagctggagctgaccaacagcaagcagaaggagagacagagcagcgaggagatcaagcagctgatgggcaccgtggaggagctgcagaagagaaaccacaaggacagccagttcgagaccgacatcgtgcagagaatggagcaggagacccagagaaagctggagcagctgagagccgagctggacgagatgtacggccagcagatcgtgcagatgaagcaggagctgatcagacagcacatggcccagatggaggagatgaagaccagacacaagggcgagatggagaacgccctgagaagctacagcaacatcaccgtgaacgaggaccagatcaagctgatgaacgtggccatcaacgagctgaacatcaagctgcaggacaccaacagccagaaggagaagctgaaggaggagctgggcctgatcctggaggagaagtgcgccctgcagagacagctggaggacctggtggaggagctgagcttcagcagagagcagatccagagagccagacagaccatcgccgagcaggagagcaagctgaacgaggcccacaagagcctgagcaccgtggaggacctgaaggccgagatcgtgagcgccagcgagagcagaaaggagctggagctgaagcacgaggccgaggtgaccaactacaagatcaagctggagatgctggagaaggagaagaacgccgtgctggacagaatggccgagagccaggaggccgagctggagagactgagaacccagctgctgttcagccacgaggaggagctgagcaagctgaaggaggacctggagatcgagcacagaatcaacatcgagaagctgaaggacaacctgggcatccactacaagcagcagatcgacggcctgcagaacgagatgagccagaagatcgagaccatgcagttcgagaaggacaacctgatcaccaagcagaaccagctgatcctggagatcagcaagctgaaggacctgcagcagagcctggtgaacagcaagagcgaggagatgaccctgcagatcaacgagctgcagaaggagatcgagatcctgagacaggaggagaaggagaagggcaccctggagcaggaggtgcaggagctgcagctgaagaccgagctgctggagaagcagatgaaggagaaggagaacgacctgcaggagaagttcgcccagctggaggccgagaacagcatcctgaaggacgagaagaagaccctggaggacatgctgaagatccacacccccgtgagccaggaggagagactgatcttcctggacagcatcaagagcaagagcaaggacagcgtgtgggagaaggagatcgagatcctgatcgaggagaacgaggacctgaagcagcagtgcatccagctgaacgaggagatcgagaagcagagaaacaccttcagcttcgccgagaagaacttcgaggtgaactaccaggagctgcaggaggagtacgcctgcctgctgaaggtgaaggacgacctggaggacagcaagaacaagcaggagctggagtacaagagcaagctgaaggccctgaacgaggagctgcacctgcagagaatcaaccccaccaccgtgaagatgaagagcagcgtgttcgacgaggacaagaccttcgtggccgagaccctggagatgggcgaggtggtggagaaggacaccaccgagctgatggagaagctggaggtgaccaagagagagaagctggagctgagccagagactgagcgacctgagcgagcagctgaagcagaagcacggcgagatcagcttcctgaacgaggaggtgaagagcctgaagcaggagaaggagcaggtgagcctgagatgcagagagctggagatcatcatcaaccacaacagagccgagaacgtgcagagctgcgacacccaggtgagcagcctgctggacggcgtggtgaccatgaccagcagaggcgccgagggcagcgtgagcaaggtgaacaagagcttcggcgaggagagcaagatcatggtggaggacaaggtgagcttcgagaacatgaccgtgggcgaggagagcaagcaggagcagctgatcctggaccacctgcccagcgtgaccaaggagagcagcctgagagccacccagcccagcgagaacgacaagctgcagaaggagctgaacgtgctgaagagcgagcagaacgacctgagactgcagatggaggcccagagaatctgcctgagcctggtgtacagcacccacgtggaccaggtgagagagtacatggagaacgagaaggacaaggccctgtgcagcctgaaggaggagctgatcttcgcccaggaggagaagatcaaggagctgcagaagatccaccagctggagctgcagaccatgaagacccaggagaccggcgacgagggcaagcccctgcacctgctgatcggcaagctgcagaaggccgtgagcgaggagtgcagctacttcctgcagaccctgtgcagcgtgctgggcgagtactacacccccgccctgaagtgcgaggtgaacgccgaggacaaggagaacagcggcgactacatcagcgagaacgaggaccccgagctgcaggactacagatacgaggtgcaggacttccaggagaacatgcacaccctgctgaacaaggtgaccgaggagtacaacaagctgctggtgctgcagaccagactgagcaagatctggggccagcagaccgacggcatgaagctggagttcggcgaggagaacctgcccaaggaggagaccgagttcctgagcatccacagccagatgaccaacctggaggacatcgacgtgaaccacaagagcaagctgagcagcctgcaggacctggagaagaccaagctggaggagcaggtgcaggagctggagagcctgatcagcagcctgcagcagcagctgaaggagaccgagcagaactacgaggccgagatccactgcctgcagaagagactgcaggccgtgagcgagagcaccgtgccccccagcctgcccgtggacagcgtggtgatcaccgagagcgacgcccagagaaccatgtaccccggcagctgcgtgaagaagaacatcgacggcaccatcgagttcagcggcgagttcggcgtgaaggaggagaccaacatcgtgaagctgctggagaagcagtaccaggagcagctggaggaggaggtggccaaggtgatcgtgagcatgagcatcgccttcgcccagcagaccgagctgagcagaatcagcggcggcaaggagaacaccgccagcagcaagcaggcccacgccgtgtgccagcaggagcagcactacttcaacgagatgaagctgagccaggaccagatcggcttccagaccttcgagaccgtggacgtgaagttcaaggaggagttcaagcccctgagcaaggagctgggcgagcacggcaaggagatcctgctgagcaacagcgacccccacgacatccccgagagcaaggactgcgtgctgaccatcagcgaggagatgttcagcaaggacaagaccttcatcgtgagacagagcatccacgacgagatcagcgtgagcagcatggacgccagcagacagctgatgctgaacgaggagcagctggaggacatgagacaggagctggtgagacagtaccaggagcaccagcaggccaccgagctgctgagacaggcccacatgagacagatggagagacagagagaggaccaggagcagctgcaggtgagagtgctgtag

SEQ ID NO: 71265 - DNA, 11631 bp, synthetic construct
  misc_feature 1..11631: note = Description of Artificial Sequence: Synthetic coding sequence
  source 1..11631: mol_type = other DNA
atggaggacgaggagagacagaagaagctggaggccggcaaggccaagatcgaggagctgagcctggccttcctggtgagacagctggcccagttcagacagagaaaggcccagagcgacggccagagccccagcaagaagcagaagaagaagagaaagaccagcagcagcaagcacgacgtgagcgcccaccacgacctgaacatcgaccagagccagtgcaacgagatgtacatcaacagcagccagagagtggagagcaccgtgatccccgagagcaccatcatgagaaccctgcacagcggcgagatcaccagccacgagcagggcttcagcgtggagctggagagcgagatcagcaccaccgccgacgactgcagcagcgaggtgaacggctgcagcttcgtgatgagaaccggcaagcccaccaacctgctgagagaggaggagttcggcgtggacgacagctacagcgagcagggcgcccaggacagccccacccacctggagatgatggagagcgagctggccggcaagcagcacgagatcgaggagctgaacagagagctggaggagatgagagtgacctacggcaccgagggcctgcagcagctgcaggagttcgaggccgccatcaagcagagagacggcatcatcacccagctgaccgccaacctgcagcaggccagaagagagaaggacgagaccatgagagagttcctggagctgaccgagcagagccagaagctgcagatccagttccagcagctgcaggccagcgagaccctgagaaacagcacccacagcagcaccgccgccgacctgctgcaggccaagcagcagatcctgacccaccagcagcagctggaggagcaggaccacctgctggaggactaccagaagaagaaggaggacttcaccatgcagatcagcttcctgcaggagaagatcaaggtgtacgagatggagcaggacaagaaggtggagaacagcaacaaggaggagatccaggagaaggagaccatcatcgaggagctgaacaccaagatcatcgaggaggagaagaagaccctggagctgaaggacaagctgaccaccgccgacaagctgctgggcgagctgcaggagcagatcgtgcagaagaaccaggagatcaagaacatgaagctggagctgaccaacagcaagcagaaggagagacagagcagcgaggagatcaagcagctgatgggcaccgtggaggagctgcagaagagaaaccacaaggacagccagttcgagaccgacatcgtgcagagaatggagcaggagacccagagaaagctggagcagctgagagccgagctggacgagatgtacggccagcagatcgtgcagatgaagcaggagctgatcagacagcacatggcccagatggaggagatgaagaccagacacaagggcgagatggagaacgccctgagaagctacagcaacatcaccgtgaacgaggaccagatcaagctgatgaacgtggccatcaacgagctgaacatcaagctgcaggacaccaacagccagaaggagaagctgaaggaggagctgggcctgatcctggaggagaagtgcgccctgcagagacagctggaggacctggtggaggagctgagcttcagcagagagcagatccagagagccagacagaccatcgccgagcaggagagcaagctgaacgaggcccacaagagcctgagcaccgtggaggacctgaaggccgagatcgtgagcgccagcgagagcagaaaggagctggagctgaagcacgaggccgaggtgaccaactacaagatcaagctggagatgctggagaaggagaagaacgccgtgctggacagaatggccgagagccaggaggccgagctggagagactgagaacccagctgctgttcagccacgaggaggagctgagcaagctgaaggaggacctggagatcgagcacagaatcaacatcgagaagctgaaggacaacctgggcatccactacaagcagcagatcgacggcctgcagaacgagatgagccagaagatcgagaccatgcagttcgagaaggacaacctgatcaccaagcagaaccagctgatcctggagatcagcaagctgaaggacctgcagcagagcctggtgaacagcaagagcgaggagatgaccctgcagatcaacgagctgcagaaggagatcgagatcctgagacaggaggagaaggagaagggcaccctggagcaggaggtgcaggagctgcagctgaagaccgagctgctggagaagcagatgaaggagaaggagaacgacctgcaggagaagttcgcccagctggaggccgagaacagcatcctgaaggacgagaagaagaccctggaggacatgctgaagatccacacccccgtgagccaggaggagagactgatcttcctggacagcatcaagagcaagagcaaggacagcgtgtgggagaaggagatcgagatcctgatcgaggagaacgaggacctgaagcagcagtgcatccagctgaacgaggagatcgagaagcagagaaacaccttcagcttcgccgagaagaacttcgaggtgaactaccaggagctgcaggaggagtacgcctgcctgctgaaggtgaaggacgacctggaggacagcaagaacaagcaggagctggagtacaagagcaagctgaaggccctgaacgaggagctgcacctgcagagaatcaaccccaccaccgtgaagatgaagagcagcgtgttcgacgaggacaagaccttcgtggccgagaccctggagatgggcgaggtggtggagaaggacaccaccgagctgatggagaagctggaggtgaccaagagagagaagctggagctgagccagagactgagcgacctgagcgagcagctgaagcagaagcacggcgagatcagcttcctgaacgaggaggtgaagagcctgaagcaggagaaggagcaggtgagcctgagatgcagagagctggagatcatcatcaaccacaacagagccgagaacgtgcagagctgcgacacccaggtgagcagcctgctggacggcgtggtgaccatgaccagcagaggcgccgagggcagcgtgagcaaggtgaacaagagcttcggcgaggagagcaagatcatggtggaggacaaggtgagcttcgagaacatgaccgtgggcgaggagagcaagcaggagcagctgatcctggaccacctgcccagcgtgaccaaggagagcagcctgagagccacccagcccagcgagaacgacaagctgcagaaggagctgaacgtgctgaagagcgagcagaacgacctgagactgcagatggaggcccagagaatctgcctgagcctggtgtacagcacccacgtggaccaggtgagagagtacatggagaacgagaaggacaaggccctgtgcagcctgaaggaggagctgatcttcgcccaggaggagaagatcaaggagctgcagaagatccaccagctggagctgcagaccatgaagacccaggagaccggcgacgagggcaagcccctgcacctgctgatcggcaagctgcagaaggccgtgagcgaggagtgcagctacttcctgcagaccctgtgcagcgtgctgggcgagtactacacccccgccctgaagtgcgaggtgaacgccgaggacaaggagaacagcggcgactacatcagcgagaacgaggaccccgagctgcaggactacagatacgaggtgcaggacttccaggagaacatgcacaccctgctgaacaaggtgaccgaggagtacaacaagctgctggtgctgcagaccagactgagcaagatctggggccagcagaccgacggcatgaagctggagttcggcgaggagaacctgcccaaggaggagaccgagttcctgagcatccacagccagatgaccaacctggaggacatcgacgtgaaccacaagagcaagctgagcagcctgcaggacctggagaagaccaagctggaggagcaggtgcaggagctggagagcctgatcagcagcctgcagcagcagctgaaggagaccgagcagaactacgaggccgagatccactgcctgcagaagagactgcaggccgtgagcgagagcaccgtgccccccagcctgcccgtggacagcgtggtgatcaccgagagcgacgcccagagaaccatgtaccccggcagctgcgtgaagaagaacatcgacggcaccatcgagttcagcggcgagttcggcgtgaaggaggagaccaacatcgtgaagctgctggagaagcagtaccaggagcagctggaggaggaggtggccaaggtgatcgtgagcatgagcatcgccttcgcccagcagaccgagctgagcagaatcagcggcggcaaggagaacaccgccagcagcaagcaggcccacgccgtgtgccagcaggagcagcactacttcaacgagatgaagctgagccaggaccagatcggcttccagaccttcgagaccgtggacgtgaagttcaaggaggagttcaagcccctgagcaaggagctgggcgagcacggcaaggagatcctgctgagcaacagcgacccccacgacatccccgagagcaaggactgcgtgctgaccatcagcgaggagatgttcagcaaggacaagaccttcatcgtgagacagagcatccacgacgagatcagcgtgagcagcatggacgccagcagacagctgatgctgaacgaggagcagctggaggacatgagacaggagctggtgagacagtaccaggagcaccagcaggccaccgagctgctgagacaggcccacatgagacagatggagagacagagagaggaccaggagcagctgcaggaggagatcaagagactgaacagacagctggcccagagaagcagcatcgacaacgagaacctggtgagcgagagagagagagtgctgctggaggagctggaggccctgaagcagctgagcctggccggcagagagaagctgtgctgcgagctgagaaacagcagcacccagacccagaacggcaacgagaaccagggcgaggtggaggagcagaccttcaaggagaaggagctggacagaaagcccgaggacgtgccccccgagatcctgagcaacgagagatacgccctgcagaaggccaacaacagactgctgaagatcctgctggaggtggtgaagaccaccgccgccgtggaggagaccatcggcagacacgtgctgggcatcctggacagaagcagcaagagccagagcagcgccagcctgatctggagaagcgaggccgaggccagcgtgaagagctgcgtgcacgaggagcacaccagagtgaccgacgagagcatccccagctacagcggcagcgacatgcccagaaacgacatcaacatgtggagcaaggtgaccgaggagggcaccgagctgagccagagactggtgagaagcggcttcgccggcaccgagatcgaccccgagaacgaggagctgatgctgaacatcagcagcagactgcaggccgccgtggagaagctgctggaggccatcagcgagaccagcagccagctggagcacgccaaggtgacccagaccgagctgatgagagagagcttcagacagaagcaggaggccaccgagagcctgaagtgccaggaggagctgagagagagactgcacgaggagagcagagccagagagcagctggccgtggagctgagcaaggccgagggcgtgatcgacggctacgccgacgagaagaccctgttcgagagacagatccaggagaagaccgacatcatcgacagactggagcaggagctgctgtgcgccagcaacagactgcaggagctggaggccgagcagcagcagatccaggaggagagagagctgctgagcagacagaaggaggccatgaaggccgaggccggccccgtggagcagcagctgctgcaggagaccgagaagctgatgaaggagaagctggaggtgcagtgccaggccgagaaggtgagagacgacctgcagaagcaggtgaaggccctggagatcgacgtggaggagcaggtgagcagattcatcgagctggagcaggagaagaacaccgagctgatggacctgagacagcagaaccaggccctggagaagcagctggagaagatgagaaagttcctggacgagcaggccatcgacagagagcacgagagagacgtgttccagcaggagatccagaagctggagcagcagctgaaggtggtgcccagattccagcccatcagcgagcaccagaccagagaggtggagcagctggccaaccacctgaaggagaagaccgacaagtgcagcgagctgctgctgagcaaggagcagctgcagagagacatccaggagagaaacgaggagatcgagaagctggagttcagagtgagagagctggagcaggccctgctggtggaggacagaaagcacttcggcgccgtggaggccaagcccgagctgagcctggaggtgcagctgcaggccgagagagacgccatcgacagaaaggagaaggagatcaccaacctggaggagcagctggagcagttcagagaggagctggagaacaagaacgaggaggtgcagcagctgcacatgcagctggagatccagaagaaggagagcaccaccagactgcaggagctggagcaggagaacaagctgttcaaggacgacatggagaagctgggcctggccatcaaggagagcgacgccatgagcacccaggaccagcacgtgctgttcggcaagttcgcccagatcatccaggagaaggaggtggagatcgaccagctgaacgagcaggtgaccaagctgcagcagcagctgaagatcaccaccgacaacaaggtgatcgaggagaagaacgagctgatcagagacctggagacccagatcgagtgcctgatgagcgaccaggagtgcgtgaagagaaacagagaggaggagatcgagcagctgaacgaggtgatcgagaagctgcagcaggagctggccaacatcggccagaagaccagcatgaacgcccacagcctgagcgaggaggccgacagcctgaagcaccagctggacgtggtgatcgccgagaagctggccctggagcagcaggtggagaccgccaacgaggagatgaccttcatgaagaacgtgctgaaggagaccaacttcaagatgaaccagctgacccaggagctgttcagcctgaagagagagagagagagcgtggagaagatccagagcatccccgagaacagcgtgaacgtggccatcgaccacctgagcaaggacaagcccgagctggaggtggtgctgaccgaggacgccctgaagagcctggagaaccagacctacttcaagagcttcgaggagaacggcaagggcagcatcatcaacctggagaccagactgctgcagctggagagcaccgtgagcgccaaggacctggagctgacccagtgctacaagcagatcaaggacatgcaggagcagggccagttcgagaccgagatgctgcagaagaagatcgtgaacctgcagaagatcgtggaggagaaggtggccgccgccctggtgagccagatccagctggaggccgtgcaggagtacgccaagttctgccaggacaaccagaccatcagcagcgagcccgagagaaccaacatccagaacctgaaccagctgagagaggacgagctgggcagcgacatcagcgccctgaccctgagaatcagcgagctggagagccaggtggtggagatgcacaccagcctgatcctggagaaggagcaggtggagatcgccgagaagaacgtgctggagaaggagaagaagctgctggagctgcagaagctgctggagggcaacgagaagaagcagagagagaaggagaagaagagaagcccccaggacgtggaggtgctgaagaccaccaccgagctgttccacagcaacgaggagagcggcttcttcaacgagctggaggccctgagagccgagagcgtggccaccaaggccgagctggccagctacaaggagaaggccgagaagctgcaggaggagctgctggtgaaggagaccaacatgaccagcctgcagaaggacctgagccaggtgagagaccacctggccgaggccaaggagaagctgagcatcctggagaaggaggacgagaccgaggtgcaggagagcaagaaggcctgcatgttcgagcccctgcccatcaagctgagcaagagcatcgccagccagaccgacggcaccctgaagatcagcagcagcaaccagaccccccagatcctggtgaagaacgccggcatccagatcaacctgcagagcgagtgcagcagcgaggaggtgaccgagatcatcagccagttcaccgagaagatcgagaagatgcaggagctgcacgccgccgagatcctggacatggagagcagacacatcagcgagaccgagaccctgaagagagagcactacgtggccgtgcagctgctgaaggaggagtgcggcaccctgaaggccgtgatccagtgcctgagaagcaaggagggcagcagcatccccgagctggcccacagcgacgcctaccagaccagagagatctgcagcagcgacagcggcagcgactggggccagggcatctacctgacccacagccagggcttcgacatcgccagcgagggcagaggcgaggagagcgagagcgccaccgacagcttccccaagaagatcaagggcctgctgagagccgtgcacaacgagggcatgcaggtgctgagcctgaccgagagcccctacagcgacggcgaggaccacagcatccagcaggtgagcgagccctggctggaggagagaaaggcctacatcaacaccatcagcagcctgaaggacctgatcaccaagatgcagctgcagagagaggccgaggtgtacgacagcagccagagccacgagagcttcagcgactggagaggcgagctgctgctggccctgcagcaggtgttcctggaggagagaagcgtgctgctggccgccttcagaaccgagctgaccgccctgggcaccaccgacgccgtgggcctgctgaactgcctggagcagagaatccaggagcagggcgtggagtaccaggccgccatggagtgcctgcagaaggccgacagaagaagcctgctgagcgagatccaggccctgcacgcccagatgaacggcagaaagatcaccctgaagagagagcaggagagcgagaagcccagccaggagctgctggagtacaacatccagcagaagcagagccagatgctggagatgcaggtggagctgagcagcatgaaggacagagccaccgagctgcaggagcagctgagcagcgagaagatggtggtggccgagctgaagagcgagctggcccagaccaagctggagctggagaccaccctgaaggcccagcacaagcacctgaaggagctggaggccttcagactggaggtgaaggacaagaccgacgaggtgcacctgctgaacgacaccctggccagcgagcagaagaagagcagagagctgcagtgggccctggagaaggagaaggccaagctgggcagaagcgaggagagagacaaggaggagctggaggacctgaagttcagcctggagagccagaagcagagaaacctgcagctgaacctgctgctggagcagcagaagcagctgctgaacgagagccagcagaagatcgagagccagagaatgctgtacgacgcccagctgagcgaggagcagggcagaaacctggagctgcaggtgctgctggagagcgagaaggtgagaatcagagagatgagcagcaccctggacagagagagagagctgcacgcccagctgcagagcagcgacggcaccggccagagcagaccccccctgcccagcgaggacctgctgaaggagctgcagaagcagctggaggagaagcacagcagaatcgtggagctgctgaacgagaccgagaagtacaagctggacagcctgcagaccagacagcagatggagaaggacagacaggtgcacagaaagaccctgcagaccgagcaggaggccaacaccgagggccagaagaagatgcacgagctgcagagcaaggtggaggacctgcagagacagctggaggagaagagacagcaggtgtacaagctggacctggagggccagagactgcagggcatcatgcaggagttccagaagcaggagctggagagagaggagaagagagagagcagaagaatcctgtaccagaacctgaacgagcccaccacctggagcctgaccagcgacagaaccagaaactgggtgctgcagcagaagatcgagggcgagaccaaggagagcaactacgccaagctgatcgagatgaacggcggcggcaccggctgcaaccacgagctggagatgatcagacagaagctgcagtgcgtggccagcaagctgcaggtgctgccccagaaggccagcgagagactgcagttcgagaccgccgacgacgaggacttcatctgggtgcaggagaacatcgacgagatcatcctgcagctgcagaagctgaccggccagcagggcgaggagcccagcctggtgagccccagcaccagctgcggcagcctgaccgagagactgctgagacagaacgccgagctgaccggccacatcagccagctgaccgaggagaagaacgacctgagaaacatggtgatgaagctggaggagcagatcagatggtacagacagaccggcgccggcagagacaacagcagcagattcagcctgaacggcggcgccaacatcgaggccatcatcgccagcgagaaggaggtgtggaacagagagaagctgaccctgcagaagagcctgaagagagccgaggccgaggtgtacaagctgaaggccgagctgagaaacgacagcctgctgcagaccctgagccccgacagcgagcacgtgaccctgaagagaatctacggcaagtacctgagagccgagagcttcagaaaggccctgatctaccagaagaagtacctgctgctgctgctgggcggcttccaggagtgcgaggacgccaccctggccctgctggccagaatgggcggccagcccgccttcaccgacctggaggtgatcaccaacagacccaagggcttcaccagattcagaagcgccgtgagagtgagcatcgccatcagcagaatgaagttcctggtgagaagatggcacagagtgaccggcagcgtgagcatcaacatcaacagagacggcttcggcctgaaccagggcgccgagaagaccgacagcttctaccacagcagcggcggcctggagctgtacggcgagcccagacacaccacctacagaagcagaagcgacctggactacatcagaagccccctgcccttccagaacagataccccggcacccccgccgacttcaaccccggcagcctggcctgcagccagctgcagaactacgacccctag

SEQ ID NO: 71266 - DNA, 1782 bp, synthetic construct
  misc_feature 1..1782: note = Description of Artificial Sequence: Synthetic coding sequence
  source 1..1782: mol_type = other DNA
atggccatccagttcagaagcctgttccccctggccctgcccggcatgctggccctgctgggctggtggtggttcttcagcagaaagaagggccacgtgagcagccacgacgagcagcaggtggaggccggcgccgtgcagctgagagccgaccccgccatcaaggagcccctgcccgtggaggacgtgtgccccaaggtggtgagcaccccccccagcgtgaccgagccccccgagaaggagctgagcaccgtgagcaagctgcccgccgagccccccgccctgctgcagacccaccccccctgcagaagaagcgagagcagcggcatcctgcccaacaccaccgacatgagactgagacccggcaccagaagagacgacagcaccaagctggagctggccctgaccggcggcgaggccaagagcatccccctggagtgccccctgagcagccccaagggcgtgctgttcagcagcaagagcgccgaggtgtgcaagcaggacagccccttcagcagagtgcccagaaaggtgcagcccggctaccccgtggtgcccgccgagaagagaagcagcggcgagagagccagagagaccggcggcgccgagggcaccggcgacgccgtgctgggcgagaaggtgctggaggaggccctgctgagcagagagcacgtgctggagctggagaacagcaagggccccagcctggccagcctggagggcgaggaggacaagggcaagagcagcagcagccaggtggtgggccccgtgcaggaggaggagtacgtggccgagaagctgcccagcagattcatcgagagcgcccacaccgagctggccaaggacgacgccgcccccgccccccccgtggccgacgccaaggcccaggacagaggcgtggagggcgagctgggcaacgaggagagcctggacagaaacgaggagggcctggacagaaacgaggagggcctggacagaaacgaggagagcctggacagaaacgaggagggcctggacagaaacgaggagatcaagagagccgccttccagatcatcagccaggtgatcagcgaggccaccgagcaggtgctggccaccaccgtgggcaaggtggccggcagagtgtgccaggccagccagctgcagggccagaaggaggagagctgcgtgcccgtgcaccagaagaccgtgctgggccccgacaccgccgagcccgccaccgccgaggccgccgtggccccccccgacgccggcctgcccctgcccggcctgcccgccgagggcagccccccccccaagacctacgtgagctgcctgaagagcctgctgagcagccccaccaaggacagcaagcccaacatcagcgcccaccacatcagcctggccagctgcctggccctgaccacccccagcgaggagctgcccgacagagccggcatcctggtggaggacgccacctgcgtgacctgcatgagcgacagcagccagagcgtgcccctggtggccagccccggccactgcagcgacagcttcagcaccagcggcctggaggacagctgcaccgagaccagcagcagccccagagacaaggccatcaccccccccctgcccgagagcaccgtgcccttcagcaacggcgtgctgaagggcgagctgagcgacctgggcgccgaggacggctggaccatggacgccgaggccgaccacagcggcgtggccgcccccccccccggcaagagaggcaccctgatcaccagatgccccggcttcttcgagtgctag

SEQ ID NO: 71267 - DNA, 2712 bp, synthetic construct
  misc_feature 1..2712: note = Description of Artificial Sequence: Synthetic coding sequence
  source 1..2712: mol_type = other DNA
atggccatccagttcagaagcctgttccccctggccctgcccggcatgctggccctgctgggctggtggtggttcttcagcagaaagaagggccacgtgagcagccacgacgagcagcaggtggaggccggcgccgtgcagctgagagccgaccccgccatcaaggagcccctgcccgtggaggacgtgtgccccaaggtggtgagcaccccccccagcgtgaccgagccccccgagaaggagctgagcaccgtgagcaagctgcccgccgagccccccgccctgctgcagacccaccccccctgcagaagaagcgagagcagcggcatcctgcccaacaccaccgacatgagactgagacccggcaccagaagagacgacagcaccaagctggagctggccctgaccggcggcgaggccaagagcatccccctggagtgccccctgagcagccccaagggcgtgctgttcagcagcaagagcgccgaggtgtgcaagcaggacagccccttcagcagagtgcccagaaaggtgcagcccggctaccccgtggtgcccgccgagaagagaagcagcggcgagagagccagagagaccggcggcgccgagggcaccggcgacgccgtgctgggcgagaaggtgctggaggaggccctgctgagcagagagcacgtgctggagctggagaacagcaagggccccagcctggccagcctggagggcgaggaggacaagggcaagagcagcagcagccaggtggtgggccccgtgcaggaggaggagtacgtggccgagaagctgcccagcagattcatcgagagcgcccacaccgagctggccaaggacgacgccgcccccgccccccccgtggccgacgccaaggcccaggacagaggcgtggagggcgagctgggcaacgaggagagcctggacagaaacgaggagggcctggacagaaacgaggagggcctggacagaaacgaggagagcctggacagaaacgaggagggcctggacagaaacgaggagatcaagagagccgccttccagatcatcagccaggtgatcagcgaggccaccgagcaggtgctggccaccaccgtgggcaaggtggccggcagagtgtgccaggccagccagctgcagggccagaaggaggagagctgcgtgcccgtgcaccagaagaccgtgctgggccccgacaccgccgagcccgccaccgccgaggccgccgtggccccccccgacgccggcctgcccctgcccggcctgcccgccgagggcagccccccccccaagacctacgtgagctgcctgaagagcctgctgagcagccccaccaaggacagcaagcccaacatcagcgcccaccacatcagcctggccagctgcctggccctgaccacccccagcgaggagctgcccgacagagccggcatcctggtggaggacgccacctgcgtgacctgcatgagcgacagcagccagagcgtgcccctggtggccagccccggccactgcagcgacagcttcagcaccagcggcctggaggacagctgcaccgagaccagcagcagccccagagacaaggccatcaccccccccctgcccgagagcaccgtgcccttcagcaacggcgtgctgaagggcgagctgagcgacctgggcgccgaggacggctggaccatggacgccgaggccgaccacagcggcggcagcgacagaaacagcatggacagcgtggacagctgctgcagcctgaagaagaccgagagcttccagaacgcccaggccggcagcaaccccaagaaggtggacctgatcatctgggagatcgaggtgcccaagcacctggtgggcagactgatcggcaagcagggcagatacgtgagcttcctgaagcagaccagcggcgccaagatctacatcagcaccctgccctacacccagagcgtgcagatctgccacatcgagggcagccagcaccacgtggacaaggccctgaacctgatcggcaagaagttcaaggagctgaacctgaccaacatctacgccccccccctgcccagcctggccctgcccagcctgcccatgaccagctggctgatgctgcccgacggcatcaccgtggaggtgatcgtggtgaaccaggtgaacgccggccacctgttcgtgcagcagcacacccaccccaccttccacgccctgagaagcctggaccagcagatgtacctgtgctacagccagcccggcatccccaccctgcccacccccgtggagatcaccgtgatctgcgccgcccccggcgccgacggcgcctggtggagagcccaggtggtggccagctacgaggagaccaacgaggtggagatcagatacgtggactacggcggctacaagagagtgaaggtggacgtgctgagacagatcagaagcgacttcgtgaccctgcccttccagggcgccgaggtgctgctggacagcgtgatgcccctgagcgacgacgaccagttcagccccgaggccgacgccgccatgagcgagatgaccggcaacaccgccctgctggcccaggtgaccagctacagccccaccggcctgcccctgatccagctgtggagcgtggtgggcgacgaggtggtgctgatcaacagaagcctggtggagagaggcctggcccagtgggtggacagctactacaccagcctgtag

SEQ ID NO: 71268 - DNA, 2838 bp, synthetic construct
  misc_feature 1..2838: note = Description of Artificial Sequence: Synthetic coding sequence
  source 1..2838: mol_type = other DNA
atgggcgccctgggcgtgagcggcagcagcagccccggcggctgccccggctggagaagactgcccgccgccgtgaacaccaaccccgtggacttcgcccccggcgtgatcacccaggccagcagaatggccatccagttcagaagcctgttccccctggccctgcccggcatgctggccctgctgggctggtggtggttcttcagcagaaagaagggccacgtgagcagccacgacgagcagcaggtggaggccggcgccgtgcagctgagagccgaccccgccatcaaggagcccctgcccgtggaggacgtgtgccccaaggtggtgagcaccccccccagcgtgaccgagccccccgagaaggagctgagcaccgtgagcaagctgcccgccgagccccccgccctgctgcagacccaccccccctgcagaagaagcgagagcagcggcatcctgcccaacaccaccgacatgagactgagacccggcaccagaagagacgacagcaccaagctggagctggccctgaccggcggcgaggccaagagcatccccctggagtgccccctgagcagccccaagggcgtgctgttcagcagcaagagcgccgaggtgtgcaagcaggacagccccttcagcagagtgcccagaaaggtgcagcccggctaccccgtggtgcccgccgagaagagaagcagcggcgagagagccagagagaccggcggcgccgagggcaccggcgacgccgtgctgggcgagaaggtgctggaggaggccctgctgagcagagagcacgtgctggagctggagaacagcaagggccccagcctggccagcctggagggcgaggaggacaagggcaagagcagcagcagccaggtggtgggccccgtgcaggaggaggagtacgtggccgagaagctgcccagcagattcatcgagagcgcccacaccgagctggccaaggacgacgccgcccccgccccccccgtggccgacgccaaggcccaggacagaggcgtggagggcgagctgggcaacgaggagagcctggacagaaacgaggagggcctggacagaaacgaggagggcctggacagaaacgaggagagcctggacagaaacgaggagggcctggacagaaacgaggagatcaagagagccgccttccagatcatcagccaggtgatcagcgaggccaccgagcaggtgctggccaccaccgtgggcaaggtggccggcagagtgtgccaggccagccagctgcagggccagaaggaggagagctgcgtgcccgtgcaccagaagaccgtgctgggccccgacaccgccgagcccgccaccgccgaggccgccgtggccccccccgacgccggcctgcccctgcccggcctgcccgccgagggcagccccccccccaagacctacgtgagctgcctgaagagcctgctgagcagccccaccaaggacagcaagcccaacatcagcgcccaccacatcagcctggccagctgcctggccctgaccacccccagcgaggagctgcccgacagagccggcatcctggtggaggacgccacctgcgtgacctgcatgagcgacagcagccagagcgtgcccctggtggccagccccggccactgcagcgacagcttcagcaccagcggcctggaggacagctgcaccgagaccagcagcagccccagagacaaggccatcaccccccccctgcccgagagcaccgtgcccttcagcaacggcgtgctgaagggcgagctgagcgacctgggcgccgaggacggctggaccatggacgccgaggccgaccacagcggcggcagcgacagaaacagcatggacagcgtggacagctgctgcagcctgaagaagaccgagagcttccagaacgcccaggccggcagcaaccccaagaaggtggacctgatcatctgggagatcgaggtgcccaagcacctggtgggcagactgatcggcaagcagggcagatacgtgagcttcctgaagcagaccagcggcgccaagatctacatcagcaccctgccctacacccagagcgtgcagatctgccacatcgagggcagccagcaccacgtggacaaggccctgaacctgatcggcaagaagttcaaggagctgaacctgaccaacatctacgccccccccctgcccagcctggccctgcccagcctgcccatgaccagctggctgatgctgcccgacggcatcaccgtggaggtgatcgtggtgaaccaggtgaacgccggccacctgttcgtgcagcagcacacccaccccaccttccacgccctgagaagcctggaccagcagatgtacctgtgctacagccagcccggcatccccaccctgcccacccccgtggagatcaccgtgatctgcgccgcccccggcgccgacggcgcctggtggagagcccaggtggtggccagctacgaggagaccaacgaggtggagatcagatacgtggactacggcggctacaagagagtgaaggtggacgtgctgagacagatcagaagcgacttcgtgaccctgcccttccagggcgccgaggtgctgctggacagcgtgatgcccctgagcgacgacgaccagttcagccccgaggccgacgccgccatgagcgagatgaccggcaacaccgccctgctggcccaggtgaccagctacagccccaccggcctgcccctgatccagctgtggagcgtggtgggcgacgaggtggtgctgatcaacagaagcctggtggagagaggcctggcccagtgggtggacagctactacaccagcctgtag

SEQ ID NO: 71269 - DNA, 2712 bp, synthetic construct; identical to SEQ ID NO: 71267
  misc_feature 1..2712: note = Description of Artificial Sequence: Synthetic coding sequence
  source 1..2712: mol_type = other DNA

SEQ ID NO: 71270 - DNA, 1095 bp, synthetic construct
  misc_feature 1..1095: note = Description of Artificial Sequence: Synthetic coding sequence
  source 1..1095: mol_type = other DNA
atgggcatcctggagaagatcagcgagatcgagaaggagatcgccagaacccagaagaacaaggccaccgagtaccacctgggcctgctgaaggccaagctggccaagtacagagcccagctgctggagcccagcaagagcgccagcagcaagggcgagggcttcgacgtgatgaagagcggcgacgccagagtggccctgatcggcttccccagcgtgggcaagagcaccttcctgagcctgatgaccagcaccgccagcgaggccgccagctacgagttcaccaccctgacctgcatccccggcgtgatcgagtacaagggcgccaacatccagctgctggacctgcccggcatcatcgagggcgccgcccagggcaagggcagaggcagacaggtgatcgccgtggccagaaccgccgacgtgatcatcatgatgctggacgccaccaagggcgaggtgcagagaagcctgctggagaaggagctggagagcgtgggcatcagactgaacaagcacaagcccaacatctacttcaagcccaagaagggcggcggcatcagcttcaacagcaccgtgaccctgacccagtgcagcgagaagctggtgcagctgatcctgcacgagtacaagatcttcaacgccgaggtgctgttcagagaggactgcagccccgacgagttcatcgacgtgatcgtgggcaacagagtgtacatgccctgcctgtacgtgtacaacaagatcgaccagatcagcatggaggaggtggacagactggccagaaagcccaacagcgtggtgatcagctgcggcatgaagctgaacctggactacctgctggagatgctgtgggagtacctggccctgacctgcatctacaccaagaagagaggccagagacccgacttcaccgacgccatcatcctgagaaagggcgccagcgtggagcacgtgtgccacagaatccacagaagcctggccagccagttcaagtacgccctggtgtggggcaccagcaccaagtacagcccccagagagtgggcctgacccacaccatggagcacgaggacgtgatccagatcgtgaagaagtag

SEQ ID NO: 71271 - DNA, 1815 bp, synthetic construct
  misc_feature 1..1815: note = Description of Artificial Sequence: Synthetic coding sequence
  source 1..1815: mol_type = other DNA
atgagaggcgccggccccagccccagacagagccccagaaccctgagacccgaccccggccccgccatgagcttcttcagaagaaaggtgaagggcaaggagcaggagaagaccagcgacgtgaagagcatcaaggccagcatcagcgtgcacagcccccagaagagcaccaagaaccacgccctgctggaggccgccggccccagccacgtggccatcaacgccatcagcgccaacatggacagcttcagcagcagcagaaccgccaccctgaagaagcagcccagccacatggaggccgcccacttcggcgacctgggcagaagctgcctggactaccagacccaggagaccaagagcagcctgagcaagaccctggagcaggtgctgcacgacaccatcgtgctgccctacttcatccagttcatggagctgagaagaatggagcacctggtgaagttctggctggaggccgagagcttccacagcaccacctggagcagaatcagagcccacagcctgaacaccgtgaagcagagcagcctggccgagcccgtgagccccagcaagaagcacgagaccaccgccagcttcctgaccgacagcctggacaagagactggaggacagcggcagcgcccagctgttcatgacccacagcgagggcatcgacctgaacaacagaaccaacagcacccagaaccacctgctgctgagccaggagtgcgacagcgcccacagcctgagactggagatggccagagccggcacccaccaggtgagcatggagacccaggagagcagcagcaccctgaccgtggccagcagaaacagccccgccagccccctgaaggagctgagcggcaagctgatgaagagcatcgagcaggacgccgtgaacaccttcaccaagtacatcagccccgacgccgccaagcccatccccatcaccgaggccatgagaaacgacatcatcgccagaatctgcggcgaggacggccaggtggaccccaactgcttcgtgctggcccagagcatcgtgttcagcgccatggagcaggagcacttcagcgagttcctgagaagccaccacttctgcaagtaccagatcgaggtgctgaccagcggcaccgtgtacctggccgacatcctgttctgcgagagcgccctgttctacttcagcgagtacatggagaaggaggacgccgtgaacatcctgcagttctggctggccgccgacaacttccagagccagctggccgccaagaagggccagtacgacggccaggaggcccagaacgacgccatgatcctgtacgacaagtacttcagcctgcaggccacccaccccctgggcttcgacgacgtggtgagactggagatcgagagcaacatctgcagagagggcggccccctgcccaactgcttcaccacccccctgagacaggcctggaccaccatggagaagagcagcgtgaagaaggccagcatcaagatcctgaagaacttcgacgaggccatcatcgtggacgccgccagcctggaccccgagagcctgtaccagagaacctacgccggcaagatgaccttcggcagagtgagcgacctgggccagttcatcagagagagcgagcccgagcccgacgtgagaaagagcaagggcagcatgttcagccaggccatgaagaagtgggtgcagggcaacaccgacgaggcccaggaggagctggcctggaagatcgccaagatgatcgtgagcgacatcatgcagcaggcccagtacgaccagcccctggagaagagcaccaaggtgtag

SEQ ID NO: 71272 - DNA, 8454 bp, synthetic construct
  misc_feature 1..8454: note = Description of Artificial Sequence: Synthetic coding sequence
  source 1..8454: mol_type = other DNA
atgaagctgaacccccagcaggcccccctgtacggcgactgcgtggtgaccgtgctgctggccgaggaggacaaggccgaggacgacgtggtgttctacctggtgttcctgggcagcaccctgagacactgcaccagcaccagaaaggtgagcagcgacaccctggagaccatcgcccccggccacgactgctgcgagaccgtgaaggtgcagctgtgcgccagcaaggagggcctgcccgtgttcgtggtggccgaggaggacttccacttcgtgcaggacgaggcctacgacgccgcccagttcctggccaccagcgccggcaaccagcaggccctgaacttcaccagattcctggaccagagcggcccccccagcggcgacgtgaacagcctggacaagaagctggtgctggccttcagacacctgaagctgcccaccgagtggaacgtgctgggcaccgaccagagcctgcacgacgccggccccagagagaccctgatgcacttcgccgtgagactgggcctgctgagactgacctggttcctgctgcagaagcccggcggcagaggcgccctgagcatccacaaccaggagggcgccacccccgtgagcctggccctggagagaggctaccacaagctgcaccagctgctgaccgaggagaacgccggcgagcccgacagctggagcagcctgagctacgagatcccctacggcgactgcagcgtgagacaccacagagagctggacatctacaccctgaccagcgagagcgacagccaccacgagcaccccttccccggcgacggctgcaccggccccatcttcaagctgatgaacatccagcagcagctgatgaagaccaacctgaagcagatggacagcctgatgcccctgatgatgaccgcccaggaccccagcagcgcccccgagaccgacggccagttcctgccctgcgcccccgagcccaccgacccccagagactgagcagcagcgaggagaccgagagcacccagtgctgccccggcagccccgtggcccagaccgagagcccctgcgacctgagcagcatcgtggaggaggagaacaccgacagaagctgcagaaagaagaacaagggcgtggagagaaagggcgaggaggtggagcccgcccccatcgtggacagcggcaccgtgagcgaccaggacagctgcctgcagagcctgcccgactgcggcgtgaagggcaccgagggcctgagcagctgcggcaacagaaacgaggagaccggcaccaagagcagcggcatgcccaccgaccaggagagcctgagcagcggcgacgccgtgctgcagagagacctggtgatggagcccggcaccgcccagtacagcagcggcggcgagctgggcggcatcagcaccaccaacgtgagcacccccgacaccgccggcgagatggagcacggcctgatgaaccccgacgccaccgtgtggaagaacgtgctgcagggcggcgagagcaccaaggagagattcgagaacagcaacatcggcaccgccggcgccagcgacgtgcacgtgaccagcaagcccgtggacaagatcagcgtgcccaactgcgcccccgccgccagcagcctggacggcaacaagcccgccgagagcagcctggccttcagcaacgaggagaccagcaccgagaagaccgccgagaccgagaccagcagaagcagagaggagagcgccgacgcccccgtggaccagaacagcgtggtgatccccgccgccgccaaggacaagatcagcgacggcctggagccctacaccctgctggccgccggcatcggcgaggccatgagccccagcgacctggccctgctgggcctggaggaggacgtgatgccccaccagaacagcgagaccaacagcagccacgcccagagccagaagggcaagagcagccccatctgcagcaccaccggcgacgacaagctgtgcgccgacagcgcctgccagcagaacaccgtgaccagcagcggcgacctggtggccaagctgtgcgacaacatcgtgagcgagagcgagagcaccaccgccagacagcccagcagccaggacccccccgacgccagccactgcgaggacccccaggcccacaccgtgaccagcgaccccgtgagagacacccaggagagagccgacttctgccccttcaaggtggtggacaacaagggccagagaaaggacgtgaagctggacaagcccctgaccaacatgctggaggtggtgagccacccccaccccgtggtgcccaagatggagaaggagctggtgcccgaccaggccgtgatcagcgacagcaccttcagcctggccaacagccccggcagcgagagcgtgaccaaggacgacgccctgagcttcgtgcccagccagaaggagaagggcaccgccacccccgagctgcacaccgccaccgactacagagacggccccgacggcaacagcaacgagcccgacaccagacccctggaggacagagccgtgggcctgagcaccagcagcaccgccgccgagctgcagcacggcatgggcaacaccagcctgaccggcctgggcggcgagcacgagggccccgccccccccgccatccccgaggccctgaacatcaagggcaacaccgacagcagcctgcagagcgtgggcaaggccaccctggccctggacagcgtgctgaccgaggagggcaagctgctggtggtgagcgagagcagcgccgcccaggagcaggacaaggacaaggccgtgacctgcagcagcatcaaggagaacgccctgagcagcggcaccctgcaggaggagcagagaacccccccccccggccaggacacccagcagttccacgagaagagcatcagcgccgactgcgccaaggacaaggccctgcagctgagcaacagccccggcgccagcagcgccttcctgaaggccgagaccgagcacaacaaggaggtggccccccaggtgagcctgctgacccagggcggcgccgcccagagcctggtgccccccggcgccagcctggccaccgagagcagacaggaggccctgggcgccgagcacaacagcagcgccctgctgccctgcctgctgcccgacggcagcgacggcagcgacgccctgaactgcagccagcccagccccctggacgtgggcgtgaagaacacccagagccagggcaagaccagcgcctgcgaggtgagcggcgacgtgaccgtggacgtgaccggcgtgaacgccctgcagggcatggccgagcccagaagagagaacatcagccacaacacccaggacatcctgatccccaacgtgctgctgagccaggagaagaacgccgtgctgggcctgcccgtggccctgcaggacaaggccgtgaccgacccccagggcgtgggcacccccgagatgatccccctggactgggagaagggcaagctggagggcgccgaccacagctgcaccatgggcgacgccgaggaggcccagatcgacgacgaggcccaccccgtgctgctgcagcccgtggccaaggagctgcccaccgacatggagctgagcgcccacgacgacggcgcccccgccggcgtgagagaggtgatgagagccccccccagcggcagagagagaagcacccccagcctgccctgcatggtgagcgcccaggacgcccccctgcccaagggcgccgacctgatcgaggaggccgccagcagaatcgtggacgccgtgatcgagcaggtgaaggccgccggcgccctgctgaccgagggcgaggcctgccacatgagcctgagcagccccgagctgggccccctgaccaagggcctggagagcgccttcaccgagaaggtgagcaccttcccccccggcgagagcctgcccatgggcagcacccccgaggaggccaccggcagcctggccggctgcttcgccggcagagaggagcccgagaagatcatcctgcccgtgcagggccccgagcccgccgccgagatgcccgacgtgaaggccgaggacgaggtggacttcagagccagcagcatcagcgaggaggtggccgtgggcagcatcgccgccaccctgaagatgaagcagggccccatgacccaggccatcaacagagagaactggtgcaccatcgagccctgccccgacgccgccagcctgctggccagcaagcagagccccgagtgcgagaacttcctggacgtgggcctgggcagagagtgcaccagcaagcagggcgtgctgaagagagagagcggcagcgacagcgacctgttccacagccccagcgacgacatggacagcatcatcttccccaagcccgaggaggagcacctggcctgcgacatcaccggcagcagcagcagcaccgacgacaccgccagcctggacagacacagcagccacggcagcgacgtgagcctgagccagatcctgaagcccaacagaagcagagacagacagagcctggacggcttctacagccacggcatgggcgccgagggcagagagagcgagagcgagcccgccgaccccggcgacgtggaggaggaggagatggacagcatcaccgaggtgcccgccaactgcagcgtgctgagaagcagcatgagaagcctgagccccttcagaagacacagctggggccccggcaagaacgccgccagcgacgccgagatgaaccacagaagcatgagctggtgccccagcggcgtgcagtacagcgccggcctgagcgccgacttcaactacagaagcttcagcctggagggcctgaccggcggcgccggcgtgggcaacaagcccagcagcagcctggaggtgagcagcgccaacgccgaggagctgagacaccccttcagcggcgaggagagagtggacagcctggtgagcctgagcgaggaggacctggagagcgaccagagagagcacagaatgttcgaccagcagatctgccacagaagcaagcagcagggcttcaactactgcaccagcgccatcagcagccccctgaccaagagcatcagcctgatgaccatcagccaccccggcctggacaacagcagacccttccacagcaccttccacaacaccagcgccaacctgaccgagagcatcaccgaggagaactacaacttcctgccccacagccccagcaagaaggacagcgagtggaagagcggcaccaaggtgagcagaaccttcagctacatcaagaacaagatgagcagcagcaagaagagcaaggagaaggagaaggagaaggacaagatcaaggagaaggagaaggacagcaaggacaaggagaaggacaagaagaccgtgaacggccacaccttcagcagcatccccgtggtgggccccatcagctgcagccagtgcatgaagcccttcaccaacaaggacgcctacacctgcgccaactgcagcgccttcgtgcacaagggctgcagagagagcctggccagctgcgccaaggtgaagatgaagcagcccaagggcagcctgcaggcccacgacaccagcagcctgcccaccgtgatcatgagaaacaagcccagccagcccaaggagagacccagaagcgccgtgctgctggtggacgagaccgccaccacccccatcttcgccaacagaagaagccagcagagcgtgagcctgagcaagagcgtgagcatccagaacatcaccggcgtgggcaacgacgagaacatgagcaacacctggaagttcctgagccacagcaccgacagcctgaacaagatcagcaaggtgaacgagagcaccgagagcctgaccgacgagggcgtgggcaccgacatgaacgagggccagctgctgggcgacttcgagatcgagagcaagcagctggaggccgagagctggagcagaatcatcgacagcaagttcctgaagcagcagaagaaggacgtggtgaagagacaggaggtgatctacgagctgatgcagaccgagttccaccacgtgagaaccctgaagatcatgagcggcgtgtacagccagggcatgatggccgacctgctgttcgagcagcagatggtggagaagctgttcccctgcctggacgagctgatcagcatccacagccagttcttccagagaatcctggagagaaagaaggagagcctggtggacaagagcgagaagaacttcctgatcaagagaatcggcgacgtgctggtgaaccagttcagcggcgagaacgccgagagactgaagaagacctacggcaagttctgcggccagcacaaccagagcgtgaactacttcaaggacctgtacgccaaggacaagagattccaggccttcgtgaagaagaagatgagcagcagcgtggtgagaagactgggcatccccgagtgcatcctgctggtgacccagagaatcaccaagtaccccgtgctgttccagagaatcctgcagtgcaccaaggacaacgaggtggagcaggaggacctggcccagagcctgagcctggtgaaggacgtgatcggcgccgtggacagcaaggtggccagctacgagaagaaggtgagactgaacgagatctacaccaagaccgacagcaagagcatcatgagaatgaagagcggccagatgttcgccaaggaggacctgaagagaaagaagctggtgagagacggcagcgtgttcctgaagaacgccgccggcagactgaaggaggtgcaggccgtgctgctgaccgacatcctggtgttcctgcaggagaaggaccagaagtacatcttcgccagcctggaccagaagagcaccgtgatcagcctgaagaagctgatcgtgagagaggtggcccacgaggagaagggcctgttcctgatcagcatgggcatgaccgaccccgagatggtggaggtgcacgccagcagcaaggaggagagaaacagctggatccagatcatccaggacaccatcaacaccctgaacagagacgaggacgagggcatccccagcgagaacgaggaggagaagaagatgctggacaccagagccagagagctgaaggagcagctgcaccagaaggaccagaagatcctgctgctgctggaggagaaggagatgatcttcagagacatggccgagtgcagcacccccctgcccgaggactgcagccccacccacagccccagagtgctgttcagaagcaacaccgaggaggccctgaagggcggccccctgatgaagagcgccatcaacgaggtggagatcctgcagggcctggtgagcggcaacctgggcggcaccctgggccccaccgtgagcagccccatcgagcaggacgtggtgggccccgtgagcctgcccagaagagccgagaccttcggcggcttcgacagccaccagatgaacgccagcaagggcggcgagaaggaggagggcgacgacggccaggacctgagaagaaccgagagcgacagcggcctgaagaagggcggcaacgccaacctggtgttcatgctgaagagaaacagcgagcaggtggtgcagagcgtggtgcacctgtacgagctgctgagcgccctgcagggcgtggtgctgcagcaggacagctacatcgaggaccagaagctggtgctgagcgagagagccctgaccagaagcctgagcagacccagcagcctgatcgagcaggagaagcagagaagcctggagaagcagagacaggacctggccaacctgcagaagcagcaggcccagtacctggaggagaagagaagaagagagagagagtgggaggccagagagagagagctgagagagagagaggccctgctggcccagagagaggaggaggtgcagcagggccagcaggacctggagaaggagagagaggagctgcagcagaagaagggcacctaccagtacgacctggagagactgagagccgcccagaagcagctggagagagagcaggagcagctgagaagagaggccgagagactgagccagagacagaccgagagagacctgtgccaggtgagccacccccacaccaagctgatgagaatccccagcttcttccccagccccgaggagccccccagccccagcgcccccagcatcgccaagagcggcagcctggacagcgagctgagcgtgagccccaagagaaacagcatcagcagaacccacaaggacaagggccccttccacatcctgagcagcaccagccagaccaacaagggccccgagggccagagccaggcccccgccagcaccagcgccagcaccagactgttcggcctgaccaagcccaaggagaagaaggagaagaagaagaagaacaagaccagcagaagccagcccggcgacggccccgccagcgaggtgagcgccgagggcgaggagatcttctgctag

SEQ ID NO: 71273 - DNA, 3177 bp, synthetic construct
  misc_feature 1..3177: note = Description of Artificial Sequence: Synthetic coding sequence
  source 1..3177: mol_type = other DNA
atgagcagcagcaagaagagcaaggagaaggagaaggagaaggacaagatcaaggagaaggagaaggacagcaaggacaaggagaaggacaagaagaccgtgaacggccacaccttcagcagcatccccgtggtgggccccatcagctgcagccagtgcatgaagcccttcaccaacaaggacgcctacacctgcgccaactgcagcgccttcgtgcacaagggctgcagagagagcctggccagctgcgccaaggtgaagatgaagcagcccaagggcagcctgcaggcccacgacaccagcagcctgcccaccgtgatcatgagaaacaagcccagccagcccaaggagagacccagaagcgccgtgctgctggtggacgagaccgccaccacccccatcttcgccaacagaagaagccagcagagcgtgagcctgagcaagagcgtgagcatccagaacatcaccggcgtgggcaacgacgagaacatgagcaacacctggaagttcctgagccacagcaccgacagcctgaacaagatcagcaaggtgaacgagagcaccgagagcctgaccgacgagggcgtgggcaccgacatgaacgagggccagctgctgggcgacttcgagatcgagagcaagcagctggaggccgagagctggagcagaatcatcgacagcaagttcctgaagcagcagaagaaggacgtggtgaagagacaggaggtgatctacgagctgatgcagaccgagttccaccacgtgagaaccctgaagatcatgagcggcgtgtacagccagggcatgatggccgacctgctgttcgagcagcagatggtggagaagctgttcccctgcctggacgagctgatcagcatccacagccagttcttccagagaatcctggagagaaagaaggagagcctggtggacaagagcgagaagaacttcctgatcaagagaatcggcgacgtgctggtgaaccagttcagcggcgagaacgccgagagactgaagaagacctacggcaagttctgcggccagcacaaccagagcgtgaactacttcaaggacctgtacgccaaggacaagagattccaggccttcgtgaagaagaagatgagcagcagcgtggtgagaagactgggcatccccgagtgcatcctgctggtgacccagagaatcaccaagtaccccgtgctgttccagagaatcctgcagtgcaccaaggacaacgaggtggagcaggaggacctggcccagagcctgagcctggtgaaggacgtgatcggcgccgtggacagcaaggtggccagctacgagaagaaggtgagactgaacgagatctacaccaagaccgacagcaagagcatcatgagaatgaagagcggccagatgttcgccaaggaggacctgaagagaaagaagctggtgagagacggcagcgtgttcctgaagaacgccgccggcagactgaaggaggtgcaggccgtgctgctgaccgacatcctggtgttcctgcaggagaaggaccagaagtacatcttcgccagcctggaccagaagagcaccgtgatcagcctgaagaagctgatcgtgagagaggtggcccacgaggagaagggcctgttcctgatcagcatgggcatgaccgaccccgagatggtggaggtgcacgccagcagcaaggaggagagaaacagctggatccagatcatccaggacaccatcaacaccctgaacagagacgaggacgagggcatccccagcgagaacgaggaggagaagaagatgctggacaccagagccagagagctgaaggagcagctgcaccagaaggaccagaagatcctgctgctgctggaggagaaggagatgatcttcagagacatggccgagtgcagcacccccctgcccgaggactgcagccccacccacagccccagagtgctgttcagaagcaacaccgaggaggccctgaagggcggccccctgatgaagagcgccatcaacgaggtggagatcctgcagggcctggtgagcggcaacctgggcggcaccctgggccccaccgtgagcagccccatcgagcaggacgtggtgggccccgtgagcctgcccagaagagccgagaccttcggcggcttcgacagccaccagatgaacgccagcaagggcggcgagaaggaggagggcgacgacggccaggacctgagaagaaccgagagcgacagcggcctgaagaagggcggcaacgccaacctggtgttcatgctgaagagaaacagcgagcaggtggtgcagagcgtggtgcacctgtacgagctgctgagcgccctgcagggcgtggtgctgcagcaggacagctacatcgaggaccagaagctggtgctgagcgagagagccctgaccagaagcctgagcagacccagcagcctgatcgagcaggagaagcagagaagcctggagaagcagagacaggacctggccaacctgcagaagcagcaggcccagtacctggaggagaagagaagaagagagagagagtgggaggccagagagagagagctgagagagagagaggccctgctggcccagagagaggaggaggtgcagcagggccagcaggacctggagaaggagagagaggagctgcagcagaagaagggcacctaccagtacgacctggagagactgagagccgcccagaagcagctggagagagagcaggagcagctgagaagagaggccgagagactgagccagagacagaccgagagagacctgtgccaggtgagccacccccacaccaagctgatgagaatccccagcttcttccccagccccgaggagccccccagccccagcgcccccagcatcgccaagagcggcagcctggacagcgagctgagcgtgagccccaagagaaacagcatcagcagaacccacaaggacaagggccccttccacatcctgagcagcaccagccagaccaacaagggccccgagggccagagccaggcccccgccagcaccagcgccagcaccagactgttcggcctgaccaagcccaaggagaagaaggagaagaagaagaagaacaagaccagcagaagccagcccggcgacggccccgccagcgaggtgagcgccgagggcgaggagatcttctgctag

SEQ ID NO: 71274 - DNA, 8451 bp, synthetic construct
  misc_feature 1..8451: note = Description of Artificial Sequence: Synthetic coding sequence
  source 1..8451: mol_type = other DNA
aagctgctggagaagcagccccccatcgagggcgactgcgtggtgaccgtgctgctggccgaggaggacaaggccgaggacgacgtggtgttctacctggtgttcctgggcagcaccctgagacactgcaccagcaccagaaaggtgagcagcgacaccctggagaccatcgcccccggccacgactgctgcgagaccgtgaaggtgcagctgtgcgccagcaaggagggcctgcccgtgttcgtggtggccgaggaggacttccacttcgtgcaggacgaggcctacgacgccgcccagttcctggccaccagcgccggcaaccagcaggccctgaacttcaccagattcctggaccagagcggcccccccagcggcgacgtgaacagcctggacaagaagctggtgctggccttcagacacctgaagctgcccaccgagtggaacgtgctgggcaccgaccagagcctgcacgacgccggccccagagagaccctgatgcacttcgccgtgagactgggcctgctgagactgacctggttcctgctgcagaagcccggcggcagaggcgccctgagcatccacaaccaggagggcgccacccccgtgagcctggccctggagagaggctaccacaagctgcaccagctgctgaccgaggagaacgccggcgagcccgacagctggagcagcctgagctacgagatcccctacggcgactgcagcgtgagacaccacagagagctggacatctacaccctgaccagcgagagcgacagccaccacgagcaccccttccccggcgacggctgcaccggccccatcttcaagctgatgaacatccagcagcagctgatgaagaccaacctgaagcagatggacagcctgatgcccctgatgatgaccgcccaggaccccagcagcgcccccgagaccgacggccagttcctgccctgcgcccccgagcccaccgacccccagagactgagcagcagcgaggagaccgagagcacccagtgctgccccggcagccccgtggcccagaccgagagcccctgcgacctgagcagcatcgtggaggaggagaacaccgacagaagctgcagaaagaagaacaagggcgtggagagaaagggcgaggaggtggagcccgcccccatcgtggacagcggcaccgtgagcgaccaggacagctgcctgcagagcctgcccgactgcggcgtgaagggcaccgagggcctgagcagctgcggcaacagaaacgaggagaccggcaccaagagcagcggcatgcccaccgaccaggagagcctgagcagcggcgacgccgtgctgcagagagacctggtgatggagcccggcaccgcccagtacagcagcggcggcgagctgggcggcatcagcaccaccaacgtgagcacccccgacaccgccggcgagatggagcacggcctgatgaaccccgacgccaccgtgtggaagaacgtgctgcagggcggcgagagcaccaaggagagattcgagaacagcaacatcggcaccgccggcgccagcgacgtgcacgtgaccagcaagcccgtggacaagatcagcgtgcccaactgcgcccccgccgccagcagcctggacggcaacaagcccgccgagagcagcctggccttcagcaacgaggagaccagcaccgagaagaccgccgagaccgagaccagcagaagcagagaggagagcgccgacgcccccgtggaccagaacagcgtggtgatccccgccgccgccaaggacaagatcagcgacggcctggagccctacaccctgctggccgccggcatcggcgaggccatgagccccagcgacctggccctgctgggcctggaggaggacgtgatgccccaccagaacagcgagaccaacagcagccacgcccagagccagaagggcaagagcagccccatctgcagcaccaccggcgacgacaagctgtgcgccgacagcgcctgccagcagaacaccgtgaccagcagcggcgacctggtggccaagctgtgcgacaacatcgtgagcgagagcgagagcaccaccgccagacagcccagcagccaggacccccccgacgccagccactgcgaggacccccaggcccacaccgtgaccagcgaccccgtgagagacacccaggagagagccgacttctgccccttcaaggtggtggacaacaagggccagagaaaggacgtgaagctggacaagcccctgaccaacatgctggaggtggtgagccacccccaccccgtggtgcccaagatggagaaggagctggtgcccgaccaggccgtgatcagcgacagcaccttcagcctggccaacagccccggcagcgagagcgtgaccaaggacgacgccctgagcttcgtgcccagccagaaggagaagggcaccgccacccccgagctgcacaccgccaccgactacagagacggccccgacggcaacagcaacgagcccgacaccagacccctggaggacagagccgtgggcctgagcaccagcagcaccgccgccgagctgcagcacggcatgggcaacaccagcctgaccggcctgggcggcgagcacgagggccccgccccccccgccatccccgaggccctgaacatcaagggcaacaccgacagcagcctgcagagcgtgggcaaggccaccctggccctggacagcgtgctgaccgaggagggcaagctgctggtggtgagcgagagcagcgccgcccaggagcaggacaaggacaaggccgtgacctgcagcagcatcaaggagaacgccctgagcagcggcaccctgcaggaggagcagagaacccccccccccggccaggacacccagcagttccacgagaagagcatcagcgccgactgcgccaaggacaaggccctgcagctgagcaacagccccggcgccagcagcgccttcctgaaggccgagaccgagcacaacaaggaggtggccccccaggtgagcctgctgacccagggcggcgccgcccagagcctggtgccccccggcgccagcctggccaccgagagcagacaggaggccctgggcgccgagcacaacagcagcgccctgctgccctgcctgctgcccgacggcagcgacggcagcgacgccctgaactgcagccagcccagccccctggacgtgggcgtgaagaacacccagagccagggcaagaccagcgcctgcgaggtgagcggcgacgtgaccgtggacgtgaccggcgtgaacgccctgcagggcatggccgagcccagaagagagaacatcagccacaacacccaggacatcctgatccccaacgtgctgctgagccaggagaagaacgccgtgctgggcctgcccgtggccctgcaggacaaggccgtgaccgacccccagggcgtgggcacccccgagatgatccccctggactgggagaagggcaagctggagggcgccgaccacagctgcaccatgggcgacgccgaggaggcccagatcgacgacgaggcccaccccgtgctgctgcagcccgtggccaaggagctgcccaccgacatggagctgagcgcccacgacgacggcgcccccgccggcgtgagagaggtgatgagagccccccccagcggcagagagagaagcacccccagcctgccctgcatggtgagcgcccaggacgcccccctgcccaagggcgccgacctgatcgaggaggccgccagcagaatcgtggacgccgtgatcgagcaggtgaaggccgccggcgccctgctgaccgagggcgaggcctgccacatgagcctgagcagccccgagctgggccccctgaccaagggcctggagagcgccttcaccgagaaggtgagcaccttcccccccggcgagagcctgcccatgggcagcacccccgaggaggccaccggcagcctggccggctgcttcgccggcagagaggagcccgagaagatcatcctgcccgtgcagggccccgagcccgccgccgagatgcccgacgtgaaggccgaggacgaggtggacttcagagccagcagcatcagcgaggaggtggccgtgggcagcatcgccgccaccctgaagatgaagcagggccccatgacccaggccatcaacagagagaactggtgcaccatcgagccctgccccgacgccgccagcctgctggccagcaagcagagccccgagtgcgagaacttcctggacgtgggcctgggcagagagtgcaccagcaagcagggcgtgctgaagagagagagcggcagcgacagcgacctgttccacagccccagcgacgacatggacagcatcatcttccccaagcccgaggaggagcacctggcctgcgacatcaccggcagcagcagcagcaccgacgacaccgccagcctggacagacacagcagccacggcagcgacgtgagcctgagccagatcctgaagcccaacagaagcagagacagacagagcctggacggcttctacagccacggcatgggcgccgagggcagagagagcgagagcgagcccgccgaccccggcgacgtggaggaggaggagatggacagcatcaccgaggtgcccgccaactgcagcgtgctgagaagcagcatgagaagcctgagccccttcagaagacacagctggggccccggcaagaacgccgccagcgacgccgagatgaaccacagaagcatgagctggtgccccagcggcgtgcagtacagcgccggcctgagcgccgacttcaactacagaagcttcagcctggagggcctgaccggcggcgccggcgtgggcaacaagcccagcagcagcctggaggtgagcagcgccaacgccgaggagctgagacaccccttcagcggcgaggagagagtggacagcctggtgagcctgagcgaggaggacctggagagcgaccagagagagcacagaatgttcgaccagcagatctgccacagaagcaagcagcagggcttcaactactgcaccagcgccatcagcagccccctgaccaagagcatcagcctgatgaccatcagccaccccggcctggacaacagcagacccttccacagcaccttccacaacaccagcgccaacctgaccgagagcatcaccgaggagaactacaacttcctgccccacagccccagcaagaaggacagcgagtggaagagcggcaccaaggtgagcagaaccttcagctacatcaagaacaagatgagcagcagcaagaagagcaaggagaaggagaaggagaaggacaagatcaaggagaaggagaaggacagcaaggacaaggagaaggacaagaagaccgtgaacggccacaccttcagcagcatccccgtggtgggccccatcagctgcagccagtgcatgaagcccttcaccaacaaggacgcctacacctgcgccaactgcagcgccttcgtgcacaagggctgcagagagagcctggccagctgcgccaaggtgaagatgaagcagcccaagggcagcctgcaggcccacgacaccagcagcctgcccaccgtgatcatgagaaacaagcccagccagcccaaggagagacccagaagcgccgtgctgctggtggacgagaccgccaccacccccatcttcgccaacagaagaagccagcagagcgtgagcctgagcaagagcgtgagcatccagaacatcaccggcgtgggcaacgacgagaacatgagcaacacctggaagttcctgagccacagcaccgacagcctgaacaagatcagcaaggtgaacgagagcaccgagagcctgaccgacgagggcgtgggcaccgacatgaacgagggccagctgctgggcgacttcgagatcgagagcaagcagctggaggccgagagctggagcagaatcatcgacagcaagttcctgaagcagcagaagaaggacgtggtgaagagacaggaggtgatctacgagctgatgcagaccgagttccaccacgtgagaaccctgaagatcatgagcggcgtgtacagccagggcatgatggccgacctgctgttcgagcagcagatggtggagaagctgttcccctgcctggacgagctgatcagcatccacagccagttcttccagagaatcctggagagaaagaaggagagcctggtggacaagagcgagaagaacttcctgatcaagagaatcggcgacgtgctggtgaaccagttcagcggcgagaacgccgagagactgaagaagacctacggcaagttctgcggccagcacaaccagagcgtgaactacttcaaggacctgtacgccaaggacaagagattccaggccttcgtgaagaagaagatgagcagcagcgtggtgagaagactgggcatccccgagtgcatcctgctggtgacccagagaatcaccaagtaccccgtgctgttccagagaatcctgcagtgcaccaaggacaacgaggtggagcaggaggacctggcccagagcctgagcctggtgaaggacgtgatcggcgccgtggacagcaaggtggccagctacgagaagaaggtgagactgaacgagatctacaccaagaccgacagcaagagcatcatgagaatgaagagcggccagatgttcgccaaggaggacctgaagagaaagaagctggtgagagacggcagcgtgttcctgaagaacgccgccggcagactgaaggaggtgcaggccgtgctgctgaccgacatcctggtgttcctgcaggagaaggaccagaagtacatcttcgccagcctggaccagaagagcaccgtgatcagcctgaagaagctgatcgtgagagaggtggcccacgaggagaagggcctgttcctgatcagcatgggcatgaccgaccccgagatggtggaggtgcacgccagcagcaaggaggagagaaacagctggatccagatcatccaggacaccatcaacaccctgaacagagacgaggacgagggcatccccagcgagaacgaggaggagaagaagatgctggacaccagagccagagagctgaaggagcagctgcaccagaaggaccagaagatcctgctgctgctggaggagaaggagatgatcttcagagacatggccgagtgcagcacccccctgcccgaggactgcagccccacccacagccccagagtgctgttcagaagcaacaccgaggaggccctgaagggcggccccctgatgaagagcgccatcaacgaggtggagatcctgcagggcctggtgagcggcaacctgggcggcaccctgggccccaccgtgagcagccccatcgagcaggacgtggtgggccccgtgagcctgcccagaagagccgagaccttcggcggcttcgacagccaccagatgaacgccagcaagggcggcgagaaggaggagggcgacgacggccaggacctgagaagaaccgagagcgacagcggcctgaagaagggcggcaacgccaacctggtgttcatgctgaagagaaacagcgagcaggtggtgcagagcgtggtgcacctgtacgagctgctgagcgccctgcagggcgtggtgctgcagcaggacagctacatcgaggaccagaagctggtgctgagcgagagagccctgaccagaagcctgagcagacccagcagcctgatcgagcaggagaagcagagaagcctggagaagcagagacaggacctggccaacctgcagaagcagcaggcccagtacctggaggagaagagaagaagagagagagagtgggaggccagagagagagagctgagagagagagaggccctgctggcccagagagaggaggaggtgcagcagggccagcaggacctggagaaggagagagaggagctgcagcagaagaagggcacctaccagtacgacctggagagactgagagccgcccagaagcagctggagagagagcaggagcagctgagaagagaggccgagagactgagccagagacagaccgagagagacctgtgccaggtgagccacccccacaccaagctgatgagaatccccagcttcttccccagccccgaggagccccccagccccagcgcccccagcatcgccaagagcggcagcctggacagcgagctgagcgtgagccccaagagaaacagcatcagcagaacccacaaggacaagggccccttccacatcctgagcagcaccagccagaccaacaagggccccgagggccagagccaggcccccgccagcaccagcgccagcaccagactgttcggcctgaccaagcccaaggagaagaaggagaagaagaagaagaacaagaccagcagaagccagcccggcgacggccccgccagcgaggtgagcgccgagggcgaggagatcttctgctag

SEQ ID NO: 71275 - DNA, 8442 bp, synthetic construct
  misc_feature 1..8442: note = Description of Artificial Sequence: Synthetic coding sequence
  source 1..8442: mol_type = other DNA
atgaagctgaacccccagcaggcccccctgtacggcgactgcgtggtgaccgtgctgctggccgaggaggacaaggccgaggacgacgtggtgttctacctggtgttcctgggcagcaccctgagacactgcaccagcaccagaaaggtgagcagcgacaccctggagaccatcgcccccggccacgactgctgcgagaccgtgaaggtgcagctgtgcgccagcaaggagggcctgcccgtgttcgtggtggccgaggaggacttccacttcgtgcaggacgaggcctacgacgccgcccagttcctggccaccagcgccggcaaccagcaggccctgaacttcaccagattcctggaccagagcggcccccccagcggcgacgtgaacagcctggacaagaagctggtgctggccttcagacacctgaagctgcccaccgagtggaacgtgctgggcaccgaccagagcctgcacgacgccggccccagagagaccctgatgcacttcgccgtgagactgggcctgctgagactgacctggttcctgctgcagaagcccggcggcagaggcgccctgagcatccacaaccaggagggcgccacccccgtgagcctggccctggagagaggctaccacaagctgcaccagctgctgaccgaggagaacgccggcgagcccgacagctggagcagcctgagctacgagatcccctacggcgactgcagcgtgagacaccacagagagctggacatctacaccctgaccagcgagagcgacagccaccacgagcaccccttccccggcgacggctgcaccggccccatcttcaagctgatgaacatccagcagcagctgatgaagaccaacctgaagcagatggacagcctgatgcccctgatgatgaccgcccaggaccccagcagcgcccccgagaccgacggccagttcctgccctgcgcccccgagcccaccgacccccagagactgagcagcagcgaggagaccgagagcacccagtgctgccccggcagccccgtggcccagaccgagagcccctgcgacctgagcagcatcgtggaggaggagaacaccgacagaagctgcagaaagaagaacaagggcgtggagagaaagggcgaggaggtggagcccgcccccatcgtggacagcggcaccgtgagcgaccaggacagctgcctgcagagcctgcccgactgcggcgtgaagggcaccgagggcctgagcagctgcggcaacagaaacgaggagaccggcaccaagagcagcggcatgcccaccgaccaggagagcctgagcagcggcgacgccgtgctgcagagagacctggtgatggagcccggcaccgcccagtacagcagcggcggcgagctgggcggcatcagcaccaccaacgtgagcacccccgacaccgccggcgagatggagcacggcctgatgaaccccgacgccaccgtgtggaagaacgtgctgcagggcggcgagagcaccaaggagagattcgagaacagcaacatcggcaccgccggcgccagcgacgtgcacgtgaccagcaagcccgtggacaagatcagcgtgcccaactgcgcccccgccgccagcagcctggacggcaacaagcccgccgagagcagcctggccttcagcaacgaggagaccagcaccgagaagaccgccgagaccgagaccagcagaagcagagaggagagcgccgacgcccccgtggaccagaacagcgtggtgatccccgccgccgccaaggacaagatcagcgacggcctggagccctacaccctgctggccgccggcatcggcgaggccatgagccccagcgacctggccctgctgggcctggaggaggacgtgatgccccaccagaacagcgagaccaacagcagccacgcccagagccagaagggcaagagcagccccatctgcagcaccaccggcgacgacaagctgtgcgccgacagcgcctgccagcagaacaccgtgaccagcagcggcgacctggtggccaagctgtgcgacaacatcgtgagcgagagcgagagcaccaccgccagacagcccagcagccaggacccccccgacgccagccactgcgaggacccccaggcccacaccgtgaccagcgaccccgtgagagacacccaggagagagccgacttctgccccttcaaggtggtggacaacaagggccagagaaaggacgtgaagctggacaagcccctgaccaacatgctggaggtggtgagccacccccaccccgtggtgcccaagatggagaaggagctggtgcccgaccaggccgtgatcagcgacagcaccttcagcctggccaacagccccggcagcgagagcgtgaccaaggacgacgccctgagcttcgtgcccagccagaaggagaagggcaccgccacccccgagctgcacaccgccaccgactacagagacggccccgacggcaacagcaacgagcccgacaccagacccctggaggacagagccgtgggcctgagcaccagcagcaccgccgccgagctgcagcacggcatgggcaacaccagcctgaccggcctgggcggcgagcacgagggccccgccccccccgccatccccgaggccctgaacatcaagggcaacaccgacagcagcctgcagagcgtgggcaaggccaccctggccctggacagcgtgctgaccgaggagggcaagctgctggtggtgagcgagagcagcgccgcccaggagcaggacaaggacaaggccgtgacctgcagcagcatcaaggagaacgccctgagcagcggcaccctgcaggaggagcagagaacccccccccccggccaggacacccagcagttccacgagaagagcatcagcgccgactgcgccaaggacaaggccctgcagctgagcaacagccccggcgccagcagcgccttcctgaaggccgagaccgagcacaacaaggaggtggccccccaggtgagcctgctgacccagggcggcgccgcccagagcctggtgccccccggcgccagcctggccaccgagagcagacaggaggccctgggcgccgagcacaacagcagcgccctgctgccctgcctgctgcccgacggcagcgacggcagcgacgccctgaactgcagccagcccagccccctggacgtgggcgtgaagaacacccagagccagggcaagaccagcgcctgcgaggtgagcggcgacgtgaccgtggacgtgaccggcgtgaacgccctgcagggcatggccgagcccagaagagagaacatcagccacaacacccaggacatcctgatccccaacgtgctgctgagccaggagaagaacgccgtgctgggcctgcccgtggccctgcaggacaaggccgtgaccgacccccagggcgtgggcacccccgagatgatccccctggactgggagaagggcaagctggagggcgccgaccacagctgcaccatgggcgacgccgaggaggcccagatcgacgacgaggcccaccccgtgctgctgcagcccgtggccaaggagctgcccaccgacatggagctgagcgcccacgacgacggcgcccccgccggcgtgagagaggtgatgagagccccccccagcggcagagagagaagcacccccagcctgccctgcatggtgagcgcccaggacgcccccctgcccaagggcgccgacctgatcgaggaggccgccagcagaatcgtggacgccgtgatcgagcaggtgaaggccgccggcgccctgctgaccgagggcgaggcctgccacatgagcctgagcagccccgagctgggccccctgaccaagggcctggagagcgccttcaccgagaaggtgagcaccttcccccccggcgagagcctgcccatgggcagcacccccgaggaggccaccggcagcctggccggctgcttcgccggcagagaggagcccgagaagatcatcctgcccgtgcagggccccgagcccgccgccgagatgcccgacgtgaaggccgaggacgaggtggacttcagagccagcagcatcagcgaggaggtggccgtgggcagcatcgccgccaccctgaagatgaagcagggccccatgacccaggccatcaacagagagaactggtgcaccatcgagccctgccccgacgccgccagcctgctggccagcaagcagagccccgagtgcgagaacttcctggacgtgggcctgggcagagagtgcaccagcaagcagggcgtgctgaagagagagagcggcagcgacagcgacctgttccacagccccagcgacgacatggacagcatcatcttccccaagcccgaggaggagcacctggcctgcgacatcaccggcagcagcagcagcaccgacgacaccgccagcctggacagacacagcagccacggcagcgacgtgagcctgagccagatcctgaagcccaacagaagcagagacagacagagcctggacggcttctacagccacggcatgggcgccgagggcagagagagcgagagcgagcccgccgaccccggcgacgtggaggaggaggagatggacagcatcaccgaggtgcccgccaactgcagcgtgctgagaagcagcatgagaagcctgagccccttcagaagacacagctggggccccggcaagaacgccgccagcgacgccgagatgaaccacagaagcagcatgagagtgctgggcgacgtggtgagaagaccccccatccacagaagaagcttcagcctggagggcctgaccggcggcgccggcgtgggcaacaagcccagcagcagcctggaggtgagcagcgccaacgccgaggagctgagacaccccttcagcggcgaggagagagtggacagcctggtgagcctgagcgaggaggacctggagagcgaccagagagagcacagaatgttcgaccagcagatctgccacagaagcaagcagcagggcttcaactactgcaccagcgccatcagcagccccctgaccaagagcatcagcctgatgaccatcagccaccccggcctggacaacagcagacccttccacagcaccttccacaacaccagcgccaacctgaccgagagcatcaccgaggagaactacaacttcctgccccacagccccagcaagaaggacagcgagtggaagagcggcaccaaggtgagcagaaccttcagctacatcaagaacaagatgagcagcagcaagaagagcaaggagaaggagaaggagaaggacaagatcaaggagaaggagaaggacagcaaggacaaggagaaggacaagaagaccgtgaacggccacaccttcagcagcatccccgtggtgggccccatcagctgcagccagtgcatgaagcccttcaccaacaaggacgcctacacctgcgccaactgcagcgccttcgtgcacaagggctgcagagagagcctggccagctgcgccaaggtgaagatgaagcagcccaagggcagcctgcaggcccacgacaccagcagcctgcccaccgtgatcatgagaaacaagcccagccagcccaaggagagacccagaagcgccgtgctgctggtggacgagaccgccaccacccccatcttcgccaacagaagaagccagcagagcgtgagcctgagcaagagcgtgagcatccagaacatcaccggcgtgggcaacgacgagaacatgagcaacacctggaagttcctgagccacagcaccgacagcctgaacaagatcagcaaggtgaacgagagcaccgagagcctgaccgacgagggcgtgggcaccgacatgaacgagggccagctgctgggcgacttcgagatcgagagcaagcagctggaggccgagagctggagcagaatcatcgacagcaagttcctgaagcagcagaagaaggacgtggtgaagagacaggaggtgatctacgagctgatgcagaccgagttccaccacgtgagaaccctgaagatcatgagcggcgtgtacagccagggcatgatggccgacctgctgttcgagcagcagatggtggagaagctgttcccctgcctggacgagctgatcagcatccacagccagttcttccagagaatcctggagagaaagaaggagagcctggtggacaagagcgagaagaacttcctgatcaagagaatcggcgacgtgctggtgaaccagttcagcggcgagaacgccgagagactgaagaagacctacggcaagttctgcggccagcacaaccagagcgtgaactacttcaaggacctgtacgccaaggacaagagattccaggccttcgtgaagaagaagatgagcagcagcgtggtgagaagactgggcatccccgagtgcatcctgctggtgacccagagaatcaccaagtaccccgtgctgttccagagaatcctgcagtgcaccaaggacaacgaggtggagcaggaggacctggcccagagcctgagcctggtgaaggacgtgatcggcgccgtggacagcaaggtggccagctacgagaagaaggtgagactgaacgagatctacaccaagaccgacagcaagagcatcatgagaatgaagagcggccagatgttcgccaaggaggacctgaagagaaagaagctggtgagagacggcagcgtgttcctgaagaacgccgccggcagactgaaggaggtgcaggccgtgctgctgaccgacatcctggtgttcctgcaggagaaggaccagaagtacatcttcgccagcctggaccagaagagcaccgtgatcagcctgaagaagctgatcgtgagagaggtggcccacgaggagaagggcctgttcctgatcagcatgggcatgaccgaccccgagatggtggaggtgcacgccagcagcaaggaggagagaaacagctggatccagatcatccaggacaccatcaacaccctgaacagagacgaggacgagggcatccccagcgagaacgaggaggagaagaagatgctggacaccagagccagagagctgaaggagcagctgcaccagaaggaccagaagatcctgctgctgctggaggagaaggagatgatcttcagagacatggccgagtgcagcacccccctgcccgaggactgcagccccacccacagccccagagtgctgttcagaagcaacaccgaggaggccctgaagggcggccccctgatgaagagcgccatcaacgaggtggagatcctgcagggcctggtgagcggcaacctgggcggcaccctgggccccaccgtgagcagccccatcgagcaggacgtggtgggccccgtgagcctgcccagaagagccgagaccttcggcggcttcgacagccaccagatgaacgccagcaagggcggcgagaaggaggagggcgacgacggccaggacctgagaagaaccgagagcgacagcggcctgaagaagggcggcaacgccaacctggtgttcatgctgaagagaaacagcgagcaggtggtgcagagcgtggtgcacctgtacgagctgctgagcgccctgcagggcgtggtgctgcagcaggacagctacatcgaggaccagaagctggtgctgagcgagagagccctgaccagaagcctgagcagacccagcagcctgatcgagcaggagaagcagagaagcctggagaagcagagacaggacctggccaacctgcagaagcagcaggcccagtacctggaggagaagagaagaagagagagagagtgggaggccagagagagagagctgagagagagagaggccctgctggcccagagagaggaggaggtgcagcagggccagcaggacctggagaaggagagagaggagctgcagcagaagaagggcacctaccagtacgacctggagagactgagagccgcccagaagcagctggagagagagcaggagcagctgagaagagaggccgagagactgagccagagacagaccgagagagacctgtgccaggtgagccacccccacaccaagctgatgagaatccccagcttcttccccagccccgaggagccccccagccccagcgcccccagcatcgccaagagcggcagcctggacagcgagctgagcgtgagccccaagagaaacagcatcagcagaacccacaaggacaagggccccttccacatcctgagcagcaccagccagaccaacaagggccccgagggccagagccaggcccccgccagcaccagcgccagcaccagactgttcggcctgaccaagcccaaggagaagaaggagaagaagaagaagaacaagaccagcagaagccagcccggcgacggccccgccagcgaggtgagcgccgagggcgaggagatcttctgctag

SEQ ID NO: 71276 - DNA, 1245 bp, synthetic construct
  misc_feature 1..1245: note = Description of Artificial Sequence: Synthetic coding sequence
  source 1..1245: mol_type = other DNA
atgagcaacacctggaagttcctgagccacagcaccgacagcctgaacaagatcagcaaggtgaacgagagcaccgagagcctgaccgacgagggcaccgacatgaacgagggccagctgctgggcgacttcgagatcgagagcaagcagctggaggccgagagctggagcagaatcatcgacagcaagttcctgaagcagcagaagaaggacgtggtgaagagacaggaggtgatctacgagctgatgcagaccgagttccaccacgtgagaaccctgaagatcatgagcggcgtgtacagccagggcatgatggccgacctgctgttcgagcagcagatggtggagaagctgttcccctgcctggacgagctgatcagcatccacagccagttcttccagagaatcctggagagaaagaaggagagcctggtggacaagagcgagaagaacttcctgatcaagagaatcggcgacgtgctggtgaaccagttcagcggcgagaacgccgagagactgaagaagacctacggcaagttctgcggccagcacaaccagagcgtgaactacttcaaggacctgtacgccaaggacaagagattccaggccttcgtgaagaagaagatgagcagcagcgtggtgagaagactgggcatccccgagtgcatcctgctggtgacccagagaatcaccaagtaccccgtgctgttccagagaatcctgcagtgcaccaaggacaacgaggtggagcaggaggacctggcccagagcctgagcctggtgaaggacgtgatcggcgccgtggacagcaaggtggccagctacgagaagaaggtgagactgaacgagatctacaccaagaccgacagcaagagcatcatgagaatgaagagcggccagatgttcgccaaggaggacctgaagagaaagaagctggtgagagacggcagcgtgttcctgaagaacgccgccggcagactgaaggaggtgcaggccgtgctgctgaccgacatcctggtgttcctgcaggagaaggaccagaagtacatcttcgccagcctggaccagaagagcaccgtgatcagcctgaagaagctgatcgtgagagaggtggcccacgaggagaagggcctgttcctgatcagcatgggcatgaccgaccccgagatggtggaggtgcacgccagcagcaaggaggagagaaacagctggatccagatcatccaggacaccatcaacacctag

SEQ ID NO: 71277 - DNA, 1158 bp, synthetic construct
  misc_feature 1..1158: note = Description of Artificial Sequence: Synthetic coding sequence
  source 1..1158: mol_type = other DNA
atgtacgagagacacaagagaagatacagcctgtgcgacatcagcaaggtggacagaaccgtggacgtggtgctgctgaagatcaacagagagaactggtgcaccatcgagccctgccccgacgccgccagcctgctggccagcaagcagagccccgagtgcgagaacttcctggacgtgggcctgggcagagagtgcaccagcaagcagggcgtgctgaagagagagagcggcagcgacagcgacctgttccacagccccagcgacgacatggacagcatcatcttccccaagcccgaggaggagcacctggcctgcgacatcaccggcagcagcagcagcaccgacgacaccgccagcctggacagacacagcagccacggcagcgacgtgagcctgagccagatcctgaagcccaacagaagcagagacagacagagcctggacggcttctacagccacggcatgggcgccgagggcagagagagcgagagcgagcccgccgaccccggcgacgtggaggaggaggagatggacagcatcaccgaggtgcccgccaactgcagcgtgctgagaagcagcatgagaagcctgagccccttcagaagacacagctggggccccggcaagaacgccgccagcgacgccgagatgaaccacagaagcttcagcctggagggcctgaccggcggcgccggcgtgggcaacaagcccagcagcagcctggaggtgagcagcgccaacgccgaggagctgagacaccccttcagcggcgaggagagagtggacagcctggtgagcctgagcgaggaggacctggagagcgaccagagagagcacagaatgttcgaccagcagatctgccacagaagcaagcagcagggcttcaactactgcaccagcgccatcagcagccccctgaccaagagcatcagcctgatgaccatcagccaccccggcctggacaacagcagacccttccacagcaccttccacaacaccagcgccaacctgaccgagagcatcaccgaggagaactacaacttcctgccccacagccccagcaagaaggacagcgagtggaagagcggcaccaaggtgagcagaaccttcagctacatcaagaacaagatgagcagcagcaagaagagcaagtag

SEQ ID NO: 71278 - DNA, 8379 bp, synthetic construct
  misc_feature 1..8379: note = Description of Artificial Sequence: Synthetic coding sequence
  source 1..8379: mol_type = other DNA
aagctgctggagaagcagccccccatcgagggcgactgcgtggtgaccgtgctgctggccgaggaggacaaggccgaggacgacgtggtgttctacctggtgttcctgggcagcaccctgagacactgcaccagcaccagaaaggtgagcagcgacaccctggagaccatcgcccccggccacgactgctgcgagaccgtgaaggtgcagctgtgcgccagcaaggagggcctgcccgtgttcgtggtggccgaggaggacttccacttcgtgcaggacgaggcctacgacgccgcccagttcctggccaccagcgccggcaaccagcaggccctgaacttcaccagattcctggaccagagcggcccccccagcggcgacgtgaacagcctggacaagaagctggtgctggccttcagacacctgaagctgcccaccgagtggaacgtgctgggcaccgaccagagcctgcacgacgccggccccagagagaccctgatgcacttcgccgtgagactgggcctgctgagactgacctggttcctgctgcagaagcccggcggcagaggcgccctgagcatccacaaccaggagggcgccacccccgtgagcctggccctggagagaggctaccacaagctgcaccagctgctgaccgaggagaacgccggcgagcccgacagctggagcagcctgagctacgagatcccctacggcgactgcagcgtgagacaccacagagagctggacatctacaccctgaccagcgagagcgacagccaccacgagcaccccttccccggcgacggctgcaccggccccatcttcaagctgatgaacatccagcagcagctgatgaagaccaacctgaagcagatggacagcctgatgcccctgatgatgaccgcccaggaccccagcagcgcccccgagaccgacggccagttcctgccctgcgcccccgagcccaccgacccccagagactgagcagcagcgaggagaccgagagcacccagtgctgccccggcagccccgtggcccagaccgagagcccctgcgacctgagcagcatcgtggaggaggagaacaccgacagaagctgcagaaagaagaacaagggcgtggagagaaagggcgaggaggtggagcccgcccccatcgtggacagcggcaccgtgagcgaccaggacagctgcctgcagagcctgcccgactgcggcgtgaagggcaccgagggcctgagcagctgcggcaacagaaacgaggagaccggcaccaagagcagcggcatgcccaccgaccaggagagcctgagcagcggcgacgccgtgctgcagagagacctggtgatggagcccggcaccgcccagtacagcagcggcggcgagctgggcggcatcagcaccaccaacgtgagcacccccgacaccgccggcgagatggagcacggcctgatgaaccccgacgccaccgtgtggaagaacgtgctgcagggcggcgagagcaccaaggagagattcgagaacagcaacatcggcaccgccggcgccagcgacgtgcacgtgaccagcaagcccgtggacaagatcagcgtgcccaactgcgcccccgccgccagcagcctggacggcaacaagcccgccgagagcagcctggccttcagcaacgaggagaccagcaccgagaagaccgccgagaccgagaccagcagaagcagagaggagagcgccgacgcccccgtggaccagaacagcgtggtgatccccgccgccgccaaggacaagatcagcgacggcctggagccctacaccctgctggccgccggcatcggcgaggccatgagccccagcgacctggccctgctgggcctggaggaggacgtgatgccccaccagaacagcgagaccaacagcagccacgcccagagccagaagggcaagagcagccccatctgcagcaccaccggcgacgacaagctgtgcgccgacagcgcctgccagcagaacaccgtgaccagcagcggcgacctggtggccaagctgtgcgacaacatcgtgagcgagagcgagagcaccaccgccagacagcccagcagccaggacccccccgacgccagccactgcgaggacccccaggcccacaccgtgaccagcgaccccgtgagagacacccaggagagagccgacttctgccccttcaaggtggtggacaacaagggccagagaaaggacgtgaagctggacaagcccctgaccaacatgctggaggtggtgagccacccccaccccgtggtgcccaagatggagaaggagctggtgcccgaccaggccgtgatcagcgacagcaccttcagcctggccaacagccccggcagcgagagcgtgaccaaggacgacgccctgagcttcgtgcccagccagaaggagaagggcaccgccacccccgagctgcacaccgccaccgactacagagacggccccgacggcaacagcaacgagcccgacaccagacccctggaggacagagccgtgggcctgagcaccagcagcaccgccgccgagctgcagcacggcatgggcaacaccagcctgaccggcctgggcggcgagcacgagggccccgccccccccgccatccccgaggccctgaacatcaagggcaacaccgacagcagcctgcagagcgtgggcaaggccaccctggccctggacagcgtgctgaccgaggagggcaagctgctggtggtgagcgagagcagcgccgcccaggagcaggacaaggacaaggccgtgacctgcagcagcatcaaggagaacgccctgagcagcggcaccctgcaggaggagcagagaacccccccccccggccaggacacccagcagttccacgagaagagcatcagcgccgactgcgccaaggacaaggccctgcagctgagcaacagccccggcgccagcagcgccttcctgaaggccgagaccgagcacaacaaggaggtggccccccaggtgagcctgctgacccagggcggcgccgcccagagcctggtgccccccggcgccagcctggccaccgagagcagacaggaggccctgggcgccgagcacaacagcagcgccctgctgccctgcctgctgcccgacggcagcgacggcagcgacgccctgaactgcagccagcccagccccctggacgtgggcgtgaagaacacccagagccagggcaagaccagcgcctgcgaggtgagcggcgacgtgaccgtggacgtgaccggcgtgaacgccctgcagggcatggccgagcccagaagagagaacatcagccacaacacccaggacatcctgatccccaacgtgctgctgagccaggagaagaacgccgtgctgggcctgcccgtggccctgcaggacaaggccgtgaccgacccccagggcgtgggcacccccgagatgatccccctggactgggagaagggcaagctggagggcgccgaccacagctgcaccatgggcgacgccgaggaggcccagatcgacgacgaggcccaccccgtgctgctgcagcccgtggccaaggagctgcccaccgacatggagctgagcgcccacgacgacggcgcccccgccggcgtgagagaggtgatgagagccccccccagcggcagagagagaagcacccccagcctgccctgcatggtgagcgcccaggacgcccccctgcccaagggcgccgacctgatcgaggaggccgccagcagaatcgtggacgccgtgatcgagcaggtgaaggccgccggcgccctgctgaccgagggcgaggcctgccacatgagcctgagcagccccgagctgggccccctgaccaagggcctggagagcgccttcaccgagaaggtgagcaccttcccccccggcgagagcctgcccatgggcagcacccccgaggaggccaccggcagcctggccggctgcttcgccggcagagaggagcccgagaagatcatcctgcccgtgcagggccccgagcccgccgccgagatgcccgacgtgaaggccgaggacgaggtggacttcagagccagcagcatcagcgaggaggtggccgtgggcagcatcgccgccaccctgaagatgaagcagggccccatgacccaggccatcaacagagagaactggtgcaccatcgagccctgccccgacgccgccagcctgctggccagcaagcagagccccgagtgcgagaacttcctggacgtgggcctgggcagagagtgcaccagcaagcagggcgtgctgaagagagagagcggcagcgacagcgacctgttccacagccccagcgacgacatggacagcatcatcttccccaagcccgaggaggagcacctggcctgcgacatcaccggcagcagcagcagcaccgacgacaccgccagcctggacagacacagcagccacggcagcgacgtgagcctgagccagatcctgaagcccaacagaagcagagacagacagagcctggacggcttctacagccacggcatgggcgccgagggcagagagagcgagagcgagcccgccgaccccggcgacgtggaggaggaggagatggacagcatcaccgaggtgcccgccaactgcagcgtgctgagaagcagcatgagaagcctgagccccttcagaagacacagctggggccccggcaagaacgccgccagcgacgccgagatgaaccacagaagcttcagcctggagggcctgaccggcggcgccggcgtgggcaacaagcccagcagcagcctggaggtgagcagcgccaacgccgaggagctgagacaccccttcagcggcgaggagagagtggacagcctggtgagcctgagcgaggaggacctggagagcgaccagagagagcacagaatgttcgaccagcagatctgccacagaagcaagcagcagggcttcaactactgcaccagcgccatcagcagccccctgaccaagagcatcagcctgatgaccatcagccaccccggcctggacaacagcagacccttccacagcaccttccacaacaccagcgccaacctgaccgagagcatcaccgaggagaactacaacttcctgccccacagccccagcaagaaggacagcgagtggaagagcggcaccaaggtgagcagaaccttcagctacatcaagaacaagatgagcagcagcaagaagagcaaggagaaggagaaggagaaggacaagatcaaggagaaggagaaggacagcaaggacaaggagaaggacaagaagaccgtgaacggccacaccttcagcagcatccccgtggtgggccccatcagctgcagccagtgcatgaagcccttcaccaacaaggacgcctacacctgcgccaactgcagcgccttcgtgcacaagggctgcagagagagcctggccagctgcgccaaggtgaagatgaagcagcccaagggcagcctgcaggcccacgacaccagcagcctgcccaccgtgatcatgagaaacaagcccagccagcccaaggagagacccagaagcgccgtgctgctggtggacgagaccgccaccacccccatcttcgccaacagaagaagccagcagagcgtgagcctgagcaagagcgtgagcatccagaacatcaccggcgtgggcaacgacgagaacatgagcaacacctggaagttcctgagccacagcaccgacagcctgaacaagatcagcaaggtgaacgagagcaccgagagcctgaccgacgagggcaccgacatgaacgagggccagctgctgggcgacttcgagatcgagagcaagcagctggaggccgagagctggagcagaatcatcgacagcaagttcctgaagcagcagaagaaggacgtggtgaagagacaggaggtgatctacgagctgatgcagaccgagttccaccacgtgagaaccctgaagatcatgagcggcgtgtacagccagggcatgatggccgacctgctgttcgagcagcagatggtggagaagctgttcccctgcctggacgagctgatcagcatccacagccagttcttccagagaatcctggagagaaagaaggagagcctggtggacaagagcgagaagaacttcctgatcaagagaatcggcgacgtgctggtgaaccagttcagcggcgagaacgccgagagactgaagaagacctacggcaagttctgcggccagcacaaccagagcgtgaactacttcaaggacctgtacgccaaggacaagagattccaggccttcgtgaagaagaagatgagcagcagcgtggtgagaagactgggcatccccgagtgcatcctgctggtgacccagagaatcaccaagtaccccgtgctgttccagagaatcctgcagtgcaccaaggacaacgaggtggagcaggaggacctggcccagagcctgagcctggtgaaggacgtgatcggcgccgtggacagcaaggtggccagctacgagaagaaggtgagactgaacgagatctacaccaagaccgacagcaagagcatcatgagaatgaagagcggccagatgttcgccaaggaggacctgaagagaaagaagctggtgagagacggcagcgtgttcctgaagaacgccgccggcagactgaaggaggtgcaggccgtgctgctgaccgacatcctggtgttcctgcaggagaaggaccagaagtacatcttcgccagcctggaccagaagagcaccgtgatcagcctgaagaagctgatcgtgagagaggtggcccacgaggagaagggcctgttcctgatcagcatgggcatgaccgaccccgagatggtggaggtgcacgccagcagcaaggaggagagaaacagctggatccagatcatccaggacaccatcaacaccctgaacagagacgaggacgagggcatccccagcgagaacgaggaggagaagaagatgctggacaccagagccagagagctgaaggagcagctgcaccagaaggaccagaagatcctgctgctgctggaggagaaggagatgatcttcagagacatggccgagtgcagcacccccctgcccgaggactgcagccccacccacagccccagagtgctgttcagaagcaacaccgaggaggccctgaagggcggccccctgatgaagagcgccatcaacgaggtggagatcctgcagggcctggtgagcggcaacctgggcggcaccctgggccccaccgtgagcagccccatcgagcaggacgtggtgggccccgtgagcctgcccagaagagccgagaccttcggcggcttcgacagccaccagatgaacgccagcaagggcggcgagaaggaggagggcgacgacggccaggacctgagaagaaccgagagcgacagcggcctgaagaagggcggcaacgccaacctggtgttcatgctgaagagaaacagcgagcaggtggtgcagagcgtggtgcacctgtacgagctgctgagcgccctgcagggcgtggtgctgcagcaggacagctacatcgaggaccagaagctggtgctgagcgagagagccctgaccagaagcctgagcagacccagcagcctgatcgagcaggagaagcagagaagcctggagaagcagagacaggacctggccaacctgcagaagcagcaggcccagtacctggaggagaagagaagaagagagagagagtgggaggccagagagagagagctgagagagagagaggccctgctggcccagagagaggaggaggtgcagcagggccagcaggacctggagaaggagagagaggagctgcagcagaagaagggcacctaccagtacgacctggagagactgagagccgcccagaagcagctggagagagagcaggagcagctgagaagagaggccgagagactgagccagagacagaccgagagagacctgtgccaggtgagccacccccacaccaagctgatgagaatccccagcttcttccccagccccgaggagccccccagccccagcgcccccagcatcgccaagagcggcagcctggacagcgagctgagcgtgagccccaagagaaacagcatcagcagaacccacaaggacaagggccccttccacatcctgagcagcaccagccagaccaacaagggccccgagggccagagccaggcccccgccagcaccagcgccagcaccagactgttcggcctgaccaagcccaaggagaagaaggagaagaagaagaagaacaagaccagcagaagccagcccggcgacggccccgccagcgaggtgagcgccgagggcgaggagatcttctgctag

SEQ ID NO: 71279 - DNA, 5238 bp, synthetic construct
  misc_feature 1..5238: note = Description of Artificial Sequence: Synthetic coding sequence
  source 1..5238: mol_type = other DNA
atgaagctgaacccccagcaggcccccctgtacggcgactgcgtggtgaccgtgctgctggccgaggaggacaaggccgaggacgacgtggtgttctacctggtgttcctgggcagcaccctgagacactgcaccagcaccagaaaggtgagcagcgacaccctggagaccatcgcccccggccacgactgctgcgagaccgtgaaggtgcagctgtgcgccagcaaggagggcctgcccgtgttcgtggtggccgaggaggacttccacttcgtgcaggacgaggcctacgacgccgcccagttcctggccaccagcgccggcaaccagcaggccctgaacttcaccagattcctggaccagagcggcccccccagcggcgacgtgaacagcctggacaagaagctggtgctggccttcagacacctgaagctgcccaccgagtggaacgtgctgggcaccgaccagagcctgcacgacgccggccccagagagaccctgatgcacttcgccgtgagactgggcctgctgagactgacctggttcctgctgcagaagcccggcggcagaggcgccctgagcatccacaaccaggagggcgccacccccgtgagcctggccctggagagaggctaccacaagctgcaccagctgctgaccgaggagaacgccggcgagcccgacagctggagcagcctgagctacgagatcccctacggcgactgcagcgtgagacaccacagagagctggacatctacaccctgaccagcgagagcgacagccaccacgagcaccccttccccggcgacggctgcaccggccccatcttcaagctgatgaacatccagcagcagctgatgaagaccaacctgaagcagatggacagcctgatgcccctgatgatgaccgcccaggaccccagcagcgcccccgagaccgacggccagttcctgccctgcgcccccgagcccaccgacccccagagactgagcagcagcgaggagaccgagagcacccagtgctgccccggcagccccgtggcccagaccgagagcccctgcgacctgagcagcatcgtggaggaggagaacaccgacagaagctgcagaaagaagaacaagggcgtggagagaaagggcgaggaggtggagcccgcccccatcgtggacagcggcaccgtgagcgaccaggacagctgcctgcagagcctgcccgactgcggcgtgaagggcaccgagggcctgagcagctgcggcaacagaaacgaggagaccggcaccaagagcagcggcatgcccaccgaccaggagagcctgagcagcggcgacgccgtgctgcagagagacctggtgatggagcccggcaccgcccagtacagcagcggcggcgagctgggcggcatcagcaccaccaacgtgagcacccccgacaccgccggcgagatggagcacggcctgatgaaccccgacgccaccgtgtggaagaacgtgctgcagggcggcgagagcaccaaggagagattcgagaacagcaacatcggcaccgccggcgccagcgacgtgcacgtgaccagcaagcccgtggacaagatcagcgtgcccaactgcgcccccgccgccagcagcctggacggcaacaagcccgccgagagcagcctggccttcagcaacgaggagaccagcaccgagaagaccgccgagaccgagaccagcagaagcagagaggagagcgccgacgcccccgtggaccagaacagcgtggtgatccccgccgccgccaaggacaagatcagcgacggcctggagccctacaccctgctggccgccggcatcggcgaggccatgagccccagcgacctggccctgctgggcctggaggaggacgtgatgccccaccagaacagcgagaccaacagcagccacgcccagagccagaagggcaagagcagccccatctgcagcaccaccggcgacgacaagctgtgcgccgacagcgcctgccagcagaacaccgtgaccagcagcggcgacctggtggccaagctgtgcgacaacatcgtgagcgagagcgagagcaccaccgccagacagcccagcagccaggacccccccgacgccagccactgcgaggacccccaggcccacaccgtgaccagcgaccccgtgagagacacccaggagagagccgacttctgccccttcaaggtggtggacaacaagggccagagaaaggacgtgaagctggacaagcccctgaccaacatgctggaggtggtgagccacccccaccccgtggtgcccaagatggagaaggagctggtgcccgaccaggccgtgatcagcgacagcaccttcagcctggccaacagccccggcagcgagagcgtgaccaaggacgacgccctgagcttcgtgcccagccagaaggagaagggcaccgccacccccgagctgcacaccgccaccgactacagagacggccccgacggcaacagcaacgagcccgacaccagacccctggaggacagagccgtgggcctgagcaccagcagcaccgccgccgagctgcagcacggcatgggcaacaccagcctgaccggcctgggcggcgagcacgagggccccgccccccccgccatccccgaggccctgaacatcaagggcaacaccgacagcagcctgcagagcgtgggcaaggccaccctggccctggacagcgtgctgaccgaggagggcaagctgctggtggtgagcgagagcagcgccgcccaggagcaggacaaggacaaggccgtgacctgcagcagcatcaaggagaacgccctgagcagcggcaccctgcaggaggagcagagaacccccccccccggccaggacacccagcagttccacgagaagagcatcagcgccgactgcgccaaggacaaggccctgcagctgagcaacagccccggcgccagcagcgccttcctgaaggccgagaccgagcacaacaaggaggtggccccccaggtgagcctgctgacccagggcggcgccgcccagagcctggtgccccccggcgccagcctggccaccgagagcagacaggaggccctgggcgccgagcacaacagcagcgccctgctgccctgcctgctgcccgacggcagcgacggcagcgacgccctgaactgcagccagcccagccccctggacgtgggcgtgaagaacacccagagccagggcaagaccagcgcctgcgaggtgagcggcgacgtgaccgtggacgtgaccggcgtgaacgccctgcagggcatggccgagcccagaagagagaacatcagccacaacacccaggacatcctgatccccaacgtgctgctgagccaggagaagaacgccgtgctgggcctgcccgtggccctgcaggacaaggccgtgaccgacccccagggcgtgggcacccccgagatgatccccctggactgggagaagggcaagctggagggcgccgaccacagctgcaccatgggcgacgccgaggaggcccagatcgacgacgaggcccaccccgtgctgctgcagcccgtggccaaggagctgcccaccgacatggagctgagcgcccacgacgacggcgcccccgccggcgtgagagaggtgatgagagccccccccagcggcagagagagaagcacccccagcctgccctgcatggtgagcgcccaggacgcccccctgcccaagggcgccgacctgatcgaggaggccgccagcagaatcgtggacgccgtgatcgagcaggtgaaggccgccggcgccctgctgaccgagggcgaggcctgccacatgagcctgagcagccccgagctgggccccctgaccaagggcctggagagcgccttcaccgagaaggtgagcaccttcccccccggcgagagcctgcccatgggcagcacccccgaggaggccaccggcagcctggccggctgcttcgccggcagagaggagcccgagaagatcatcctgcccgtgcagggccccgagcccgccgccgagatgcccgacgtgaaggccgaggacgaggtggacttcagagccagcagcatcagcgaggaggtggccgtgggcagcatcgccgccaccctgaagatgaagcagggccccatgacccaggccatcaacagagagaactggtgcaccatcgagccctgccccgacgccgccagcctgctggccagcaagcagagccccgagtgcgagaacttcctggacgtgggcctgggcagagagtgcaccagcaagcagggcgtgctgaagagagagagcggcagcgacagcgacctgttccacagccccagcgacgacatggacagcatcatcttccccaagcccgaggaggagcacctggcctgcgacatcaccggcagcagcagcagcaccgacgacaccgccagcctggacagacacagcagccacggcagcgacgtgagcctgagccagatcctgaagcccaacagaagcagagacagacagagcctggacggcttctacagccacggcatgggcgccgagggcagagagagcgagagcgagcccgccgaccccggcgacgtggaggaggaggagatggacagcatcaccgaggtgcccgccaactgcagcgtgctgagaagcagcatgagaagcctgagccccttcagaagacacagctggggccccggcaagaacgccgccagcgacgccgagatgaaccacagaagcttcagcctggagggcctgaccggcggcgccggcgtgggcaacaagcccagcagcagcctggaggtgagcagcgccaacgccgaggagctgagacaccccttcagcggcgaggagagagtggacagcctggtgagcctgagcgaggaggacctggagagcgaccagagagagcacagaatgttcgaccagcagatctgccacagaagcaagcagcagggcttcaactactgcaccagcgccatcagcagccccctgaccaagagcatcagcctgatgaccatcagccaccccggcctggacaacagcagacccttccacagcaccttccacaacaccagcgccaacctgaccgagagcatcaccgaggagaactacaacttcctgccccacagccccagcaagaaggacagcgagtggaagagcggcaccaaggtgagcagaaccttcagctacatcaagaacaagatgagcagcagcaagaagagcaagtag

SEQ ID NO: 71280 - DNA, 828 bp, synthetic construct
  misc_feature 1..828: note = Description of Artificial Sequence: Synthetic coding sequence
  source 1..828: mol_type = other DNA
cccagcgacgacatggacagcatcatcttccccaagcccgaggaggagcacctggcctgcgacatcaccggcagcagcagcagcaccgacgacaccgccagcctggacagacacagcagccacggcagcgacgtgagcctgagccagatcctgaagcccaacagaagcagagacagacagagcctggacggcttctacagccacggcatgggcgccgagggcagagagagcgagagcgagcccgccgaccccggcgacgtggaggaggaggagatggacagcatcaccgaggtgcccgccaactgcagcgtgctgagaagcagcatgagaagcctgagccccttcagaagacacagctggggccccggcaagaacgccgccagcgacgccgagatgaaccacagaagcagcatgagagtgctgggcgacgtggtgagaagaccccccatccacagaagaagcatgagctggtgccccagcggcgtgcagtacagcgccggcctgagcgccgacttcaactacagaagcttcagcctggagggcctgaccggcggcgccggcgtgggcaacaagcccagcagcagcctggaggtgagcagcgccaacgccgaggagctgagacaccccttcagcggcgaggagagagtggacagcctggtgagcctgagcgaggaggacctggagagcgaccagagagagcacagaatgttcgaccagcagatctgccacagaagcaagcagcagggcttcaactactgcaccagcgccatcagcagccccctgaccaagagcatcagcctgatgaccatcagccaccccggcctgtag

SEQ ID NO: 71281 - DNA, 117 bp, synthetic construct
  misc_feature 1..117: note = Description of Artificial Sequence: Synthetic coding sequence
  source 1..117: mol_type = other DNA
atgaagctgaacccccagcaggcccccctgtacggcgactgcgtggtgaccgtgctgctggccgaggaggacaaggccgaggacgacgtggtgttctacctggtgttcctgggctag

SEQ ID NO: 71282 - DNA, 540 bp, synthetic construct
  misc_feature 1..540: note = Description of Artificial Sequence: Synthetic coding sequence
  source 1..540: mol_type = other DNA
atgaagctgaacccccagcaggcccccctgtacggcgactgcgtggtgaccgtgctgctggccgaggaggacaaggccgaggacgacgtggtgttctacctggtgttcctgggcagcaccctgagacactgcaccagcaccagaaaggtgagcagcgacaccctggagaccatcgcccccggccacgactgctgcgagaccgtgaaggtgcagctgtgcgccagcaaggagggcctgcccgtgttcgtggtggccgaggaggacttccacttcgtgcaggacgaggcctacgacgccgcccagttcctggccaccagcgccggcaaccagcaggccctgaacttcaccagattcctggaccagagcggcccccccagcggcgacgtgaacagcctggacaagaagctggtgctggccttcagacacctgaagctgcccaccgagtggaacgtgctgggcaccgaccagagcctgcacggcgagaacctgtacgacctgcagacccacttcaagttcgtgatcttcctgctgttcttctag

SEQ ID NO: 71283 - DNA, 414 bp, synthetic construct
  misc_feature 1..414: note = Description of Artificial Sequence: Synthetic coding sequence
  source 1..414: mol_type = other DNA
atgagcgagacccagaacagcaccagccagaaggccatggacgaggacaacaaggccgccagccagaccatgcccaacacccaggacaagaactacgaggacgagctgacccaggtggccctggccctggtggaggacgtgatcaactacgccgtgaagatcgtggaggaggagagaaaccccctgaagaacatcaagtggatgacccacggcgagttcaccgtggagaagggcctgaagcagatcgacgagtacttcagcgacgcccccatcgtggtgagctacgtgggcgaccaccaggccctggtgcacagacccggcatggtgagattcagagagaactggcagaagaacctgaccgacgccaagtacagcttcatggagagcttccccttcctgttcaacagagtgtag

SEQ ID NO: 71284 - DNA, 270 bp, synthetic construct
  misc_feature 1..270: note = Description of Artificial Sequence: Synthetic coding sequence
  source 1..270: mol_type = other DNA
atgagcgagacccagaacagcaccagccagaaggccatggacgaggacaacaaggccgccagccagaccatgcccaacacccaggacaagaactacgaggacgagctgacccaggtggccctggccctggtggaggacgtgatcaactacgccgtgaagatcgtggaggaggagagaaaccccctgaagaacatcaagtggatgacccacggcgagttcaccgtggagaagggcctgaagcagatcgacgagtacttcagcgtgagctag

SEQ ID NO: 71285 - DNA, 417 bp, synthetic construct
  misc_feature 1..417: note = Description of Artificial Sequence: Synthetic coding sequence
  source 1..417: mol_type = other DNA
atgagcgagacccagaacagcaccagccagaaggccatggacgaggacaacaaggccgccagccagaccatgcccaacacccaggacaagaactacgaggacgagctgacccaggtggccctggccctggtggaggacgtgatcaactacgccgtgaagatcgtggaggaggagagaaaccccctgaagaacatcaagtggatgacccacggcgagttcaccgtggagaagggcctgaagcagatcgacgagtacttcagccccgacgcccccatcgtggtgagctacgtgggcgaccaccaggccctggtgcacagacccggcatggtgagattcagagagaactggcagaagaacctgaccgacgccaagtacagcttcatggagagcttccccttcctgttcaacagagtgtag

SEQ ID NO: 71286 - DNA, 414 bp, synthetic construct; identical to SEQ ID NO: 71283
  misc_feature 1..414: note = Description of Artificial Sequence: Synthetic coding sequence
  source 1..414: mol_type = other DNA

SEQ ID NO: 71287 - DNA, 594 bp, synthetic construct
  misc_feature 1..594: note = Description of Artificial Sequence: Synthetic coding sequence
  source 1..594: mol_type = other DNA
atgagcgagacccagaacagcaccagccagaaggccatggacgaggacaacaaggccgccagccagaccatgcccaacacccaggacaagaactacgaggacgagctgacccaggtggccctggccctggtggaggacgtgatcaactacgccgtgaagatcgtggaggaggagagaaaccccctgaagaacatcaagtggatgacccacggcgagttcaccgtggagaagggcctgaagcagatcgacgagtacttcagcaagtgcgtgagcaagaagtgctgggcccacggcgtggagttcgtggagagaaaggacctgatccacagcttcctgtacatctactacgtgcactggagcatcagcaccgccgacctgcccgtggccagaatcagcgccggcacctacttcaccatgaaggtgagcaagaccaagccccccgacgcccccatcgtggtgagctacgtgggcgaccaccaggccctggtgcacagacccggcatggtgagattcagagagaactggcagaagaacctgaccgacgccaagtacagcttcatggagagcttccccttcctgttcaacagagtgtag

SEQ ID NO: 71288 - DNA, 270 bp, synthetic construct; identical to SEQ ID NO: 71284
  misc_feature 1..270: note = Description of Artificial Sequence: Synthetic coding sequence
  source 1..270: mol_type = other DNA

SEQ ID NO: 71289 - DNA, 2088 bp, synthetic construct
  misc_feature 1..2088: note = Description of Artificial Sequence: Synthetic coding sequence
  source 1..2088: mol_type = other DNA
atggccgccgccaccatcgtgcacgacaccagcgaggccgtggagctgtgccccgcctacggcctgtacctgaagcccatcaccaagatgaccatcagcgtggccctgccccagctgaagcagcccggcaagagcatcagcaactgggaggtgatggagagactgaagggcatggtgcagaaccaccagttcagcaccctgagaatcagcaagagcaccatggacttcatcagattcgagggcgaggtggagaacaagagcctggtgaagagcttcctggcctgcctggacggcaagaccatcaagctgagcggcttcagcgacatcctgaaggtgagagccgccgagttcaagatcgacttccccaccagacacgactgggacagcttcttcagagacgccaaggacatgaacgagaccctgcccggcgagagacccgacaccatccacctggagggcctgccctgcaagtggttcgccctgaaggagagcggcagcgagaagcccagcgaggacgtgctggtgaaggtgttcgagaagttcggcgagatcagaaacgtggacatccccatgctggacccctacagagaggagatgaccggcagaaacttccacaccttcagcttcggcggccacctgaacttcgaggcctacgtgcagtacagagagtacatgggcttcatccaggccatgagcgccctgagaggcatgaagctgatgtacaagggcgaggacggcaaggccgtggcctgcaacatcaaggtgagcttcgacagcaccaagcacctgagcgacgccagcatcaagaagagacagctggagagacagaagctgcaggagctggagcagcagagagaggagcagaagagaagagagaaggaggccgaggagagacagagagccgaggagagaaagcagaaggagctggaggagctggagagagagagaaagagagaggagaagctgagaaagagagagcagaagcagagagacagagagctgagaagaaaccagaagaagctggagaagctgcaggccgaggagcagaagcagctgcaggagaagatcaagctggaggagagaaagctgctgctggcccagagaaacctgcagagcatcagactgatcgccgagctgctgagcagagccaaggccgtgaagctgagagagcaggagcagaaggaggagaagctgagactgcagcagcaggaggagagaagaagactgcaggaggccgagctgagaagagtggaggaggagaaggagagagccctgggcctgcagagaaaggagagagagctgagagagagactgctgagcatcctgctgagcaagaagcccgacgacagccacacccacgacgagctgggcgtggcccacgccgacctgctgcagcccgtgctggacatcctgcagaccgtgagcagcggctgcgtgagcgccaccaccctgcaccccctgggcggccagccccccgccggcgcccccaaggagagccccgcccaccccgaggccgacggcgcccccaagagcgtgaacggcagcgtggccgaggaggccccctgcaaggaggtgcagagcagctgcagagtggtgcccgaggacggcagccccgagaagagatgccccggcggcgtgctgagctgcatccccgacaacaaccagcagcccaagggcatccccgcctgcgagcagaacgtgagcagaaaggacaccagaagcgagcaggacaagtgcaacagagagcccagcaagggcagaggcagagccaccggcgacggcctggccgacagacacaagagagagagaagcagagccagaagagccagcagcagagaggacggcagacccagaaaggagagaagaccccacaagaagcacgcctacaaggacgacagccccagaagaagaagcaccagccccgaccacaccagaagcagaagaagccacagcaaggacagacacagaagagagagaagcagagagagaagaggcagcgccagcagaaagcacagcagacacagaagaagaagcgagagaagcagaagcagaagccccagcagacacagaagcacctggaacagatag

SEQ ID NO: 71290 - DNA, 1341 bp, synthetic construct
  misc_feature 1..1341: note = Description of Artificial Sequence: Synthetic coding sequence
  source 1..1341: mol_type = other DNA
atggccgccgccaccatcgtgcacgacaccagcgaggccgtggagctgtgccccgcctacggcctgtacctgaagcccatcaccaagatgaccatcagcgtggccctgccccagctgaagcagcccggcaagagcatcagcaactgggaggtgatggagagactgaagggcatggtgcagaaccaccagttcagcaccctgagaatcagcaagagcaccatggacttcatcagattcgagggcgaggtggagaacaagagcctggtgaagagcttcctggcctgcctggacggcaagaccatcaagctgagcggcttcagcgacatcctgaaggtgagagccgccgagttcaagatcgacttccccaccagacacgactgggacagcttcttcagagacgccaaggacatgaacgagaccctgcccggcgagagacccgacaccatccacctggagggcctgccctgcaagtggttcgccctgaaggagagcggcagcgagaagcccagcgaggacgtgctggtgaaggtgttcgagaagttcggcgagatcagaaacgtggacatccccatgctggacccctacagagaggagatgaccggcagaaacttccacaccttcagcttcggcggccacctgaacttcgaggcctacgtgcagtacagagagtacatgggcttcatccaggccatgagcgccctgagaggcatgaagctgatgtacaagggcgaggacggcaaggccgtggcctgcaacatcaaggtgagcttcgacagcaccaagcacctgagcgacgccagcatcaagaagagacagctggagagacagaagctgcaggagctggagcagcagagagaggagcagaagagaagagagaaggaggccgaggagagacagagagccgaggagagaaagcagaaggagctggaggagctggagagagagagaaagagagaggagaagctgagaaagagagagcagaagcagagagacagagagctgagaagaaaccagaagaagctggagaagctgcaggccgaggagcagaagcagctgcaggagaagatcaagctggaggagagaaagctgctgctggcccagagaaacctgcagagcatcagactgatcgccgagctgctgagcagagccaaggtgcccggcggcagcctgtgcagcagacagcccagacccggctgcccccagtgcccccccctgaagtgcggcagaagacacggcgccgtgagcccccccgccgccgccgtggccaccaagcccgccctgatgcccagaatgaccgcccccagcagagagggcgtggccctggtgtgcagaagcagatag

SEQ ID NO: 71291 - DNA, 2580 bp, synthetic construct
  misc_feature 1..2580: note = Description of Artificial Sequence: Synthetic coding sequence
  source 1..2580: mol_type = other DNA
atggagatcgaggtgagcgtggccgagtgcaagagcgtgcccggcatcaccagcaccccccaccccatggaccaccccagcgccttctacagccccccccacaacggcctgctgaccgaccaccacgagagcctggacaacgacgtggccagagagatcagatacctggacgaggtgctggaggccaactgctgcgacagcgccgtggacggcacctacaacggcaccagcagccccgagcccggcgccgtggtgctggtgggcggcctgagcccccccgtgcacgaggccacccagcccgagcccaccgagagaaccgccagcagacaggcccccccccacatcgagctgagcaacagcagccccgaccccatggccgaggccgagagaaccaacggccacagccccagccagcccagagacgccctgggcgacagcctgcaggtgcccgtgagccccagcagcaccaccagcagcagatgcagcagcagagacggcgagttcaccctgaccaccctgaagaaggaggccaagttcgagctgagagccttccacgaggacaagaagcccagcaagctgttcgaggacgacgagcacgagaaggagcagtactgcatcagaaaggtgagacccagcgaggagatgctggagctggagaaggagagaagagagctgatcagaagccaggccgtgaagaagaaccccggcatcgccgccaagtggtggaaccccccccaggagaagaccatcgaggagcagctggacgaggagcacctggagagccacaagaagtacaaggagagaaaggagagaagagcccagcaggagcagctgctgctgcagaagcagctgcagcagcagcagcagcagccccccagccagctgtgcaccgcccccgccagcagccacgagagagccagcatgatcgacaaggccaaggaggacatcgtgaccgagcagatcgacttcagcgccgccagaaagcagttccagctgatggagaacagcagacaggccgtggccaagggccagagcacccccagactgttcagcatcaagcccttctacagacccctgggcagcgtgaacagcgacaagcccctgaccaaccccagaccccccagcgtgggcggcccccccgaggacagcggcgccagcgccgccaagggccagaagagccccggcgccctggagacccccagcgccgccggcagccagggcaacaccgccagccagggcaaggagggcccctacagcgagcccagcaagagaggccccctgagcaagctgtgggccgaggacggcgagttcaccagcgccagagccgtgctgaccgtggtgaaggacgacgaccacggcatcctggaccagttcagcagaagcgtgaacgtgagcctgacccaggaggagctggacagcggcctggacgagctgagcgtgagaagccaggacaccaccgtgctggagaccctgagcaacgacttcagcatggacaacatcagcgacagcggcgccagcaacgagaccaccaacgccctgcaggagaacagcctggccgacttcagcctgccccagaccccccagaccgacaaccccagcgagggcagaggcgagggcgtgagcaagagcttcagcgaccacggcttctacagccccagcagcaccctgggcgacagccccctggtggacgaccccctggagtaccaggccggcctgctggtgcagaacgccatccagcaggccatcgccgagcaggtggacaaggccgtgagcaagaccagcagagacggcgccgagcagcagggccccgaggccaccgtggaggaggccgaggccgccgccttcggcagcgagaagccccagagcatgttcgagcccccccaggtgagcagccccgtgcaggagaagagagacgtgctgcccaagatcctgcccgccgaggacagagccctgagagagagaggccccccccagcccctgcccgccgtgcagcccagcggccccatcaacatggaggagaccagacccgagggcagctacttcagcaagtacagcgaggccgccgagctgagaagcaccgccagcctgctggccacccaggagagcgacgtgatggtgggccccttcaagctgagaagcagaaagcagagaaccctgagcatgatcgaggaggagatcagagccgcccaggagagagaggaggagctgaagagacagagacaggtgctgcagagcacccagagccccagaaccaagaacgcccccagcctgcccagcagaacctgctacaagaccgcccccggcaagatcgagaaggtgaagcccccccccagccccaccaccgagggccccagcctgcagcccgacctggcccccgaggaggccgccggcacccagagacccaagaacctgatgcagaccctgatggaggactacgagacccacaagagcaagagaagagagagaatggacgacagcagcgtgctggaggccaccagagtgaacagaagaaagagcgccctggccctgagatgggaggccggcatctacgccaaccaggaggaggaggacaacgagtag

SEQ ID NO: 71292 - DNA, 2847 bp, synthetic construct
  misc_feature 1..2847: note = Description of Artificial Sequence: Synthetic coding sequence
  source 1..2847: mol_type = other DNA
atgagatggccccagcccggcgccgccgccagactgccccccgagagccccggcccccccgagagccccggcccccccgagagagaggccgccgccgccagaagatggaccggcgccgagccccaggactgcgcccccggcagcggcagacccgagaagcccccccagctgagcgaggacgacatctggctgaagagcgagggcgacaactacagcgccaccctgctggagcccgccgccagcagcctgagccccgaccacaagaacatggagatcgaggtgagcgtggccgagtgcaagagcgtgcccggcatcaccagcaccccccaccccatggaccaccccagcgccttctacagccccccccacaacggcctgctgaccgaccaccacgagagcctggacaacgacgtggccagagagatcagatacctggacgaggtgctggaggccaactgctgcgacagcgccgtggacggcacctacaacggcaccagcagccccgagcccggcgccgtggtgctggtgggcggcctgagcccccccgtgcacgaggccacccagcccgagcccaccgagagaaccgccagcagacaggcccccccccacatcgagctgagcaacagcagccccgaccccatggccgaggccgagagaaccaacggccacagccccagccagcccagagacgccctgggcgacagcctgcaggtgcccgtgagccccagcagcaccaccagcagcagatgcagcagcagagacggcgagttcaccctgaccaccctgaagaaggaggccaagttcgagctgagagccttccacgaggacaagaagcccagcaagctgttcgaggacgacgagcacgagaaggagcagtactgcatcagaaaggtgagacccagcgaggagatgctggagctggagaaggagagaagagagctgatcagaagccaggccgtgaagaagaaccccggcatcgccgccaagtggtggaaccccccccaggagaagaccatcgaggagcagctggacgaggagcacctggagagccacaagaagtacaaggagagaaaggagagaagagcccagcaggagcagctgctgctgcagaagcagctgcagcagcagcagcagcagccccccagccagctgtgcaccgcccccgccagcagccacgagagagccagcatgatcgacaaggccaaggaggacatcgtgaccgagcagatcgacttcagcgccgccagaaagcagttccagctgatggagaacagcagacaggccgtggccaagggccagagcacccccagactgttcagcatcaagcccttctacagacccctgggcagcgtgaacagcgacaagcccctgaccaaccccagaccccccagcgtgggcggcccccccgaggacagcggcgccagcgccgccaagggccagaagagccccggcgccctggagacccccagcgccgccggcagccagggcaacaccgccagccagggcaaggagggcccctacagcgagcccagcaagagaggccccctgagcaagctgtgggccgaggacggcgagttcaccagcgccagagccgtgctgaccgtggtgaaggacgacgaccacggcatcctggaccagttcagcagaagcgtgaacgtgagcctgacccaggaggagctggacagcggcctggacgagctgagcgtgagaagccaggacaccaccgtgctggagaccctgagcaacgacttcagcatggacaacatcagcgacagcggcgccagcaacgagaccaccaacgccctgcaggagaacagcctggccgacttcagcctgccccagaccccccagaccgacaaccccagcgagggcagaggcgagggcgtgagcaagagcttcagcgaccacggcttctacagccccagcagcaccctgggcgacagccccctggtggacgaccccctggagtaccaggccggcctgctggtgcagaacgccatccagcaggccatcgccgagcaggtggacaaggccgtgagcaagaccagcagagacggcgccgagcagcagggccccgaggccaccgtggaggaggccgaggccgccgccttcggcagcgagaagccccagagcatgttcgagcccccccaggtgagcagccccgtgcaggagaagagagacgtgctgcccaagatcctgcccgccgaggacagagccctgagagagagaggccccccccagcccctgcccgccgtgcagcccagcggccccatcaacatggaggagaccagacccgagggcagctacttcagcaagtacagcgaggccgccgagctgagaagcaccgccagcctgctggccacccaggagagcgacgtgatggtgggccccttcaagctgagaagcagaaagcagagaaccctgagcatgatcgaggaggagatcagagccgcccaggagagagaggaggagctgaagagacagagacaggtgctgcagagcacccagagccccagaaccaagaacgcccccagcctgcccagcagaacctgctacaagaccgcccccggcaagatcgagaaggtgaagcccccccccagccccaccaccgagggccccagcctgcagcccgacctggcccccgaggaggccgccggcacccagagacccaagaacctgatgcagaccctgatggaggactacgagacccacaagagcaagagaagagagagaatggacgacagcagcgtgctggaggccaccagagtgaacagaagaaagagcgccctggccctgagatgggaggccggcatctacgccaaccaggaggaggaggacaacgagtag

SEQ ID NO: 71293 - DNA, 3273 bp, synthetic construct
  misc_feature 1..3273: note = Description of Artificial Sequence: Synthetic coding sequence
  source 1..3273: mol_type = other DNA
atggccgaggccgagctgcacaaggagagactgcaggccatcgccgagaagagaaagagacagaccgagatcgagggcaagagacagcagctggacgagcagatcctgctgctgcagcacagcaagagcaaggtgctgagagagaagtggctgctgcagggcatccccgccggcaccgccgaggaggaggaggccagaagaagacagagcgaggaggacgagttcagagtgaagcagctggaggacaacatccagagactggagcaggagatccagaccctggagagcgaggagagccagatcagcgccaaggagcagatcatcctggagaagctgaaggagaccgagaagagcttcaaggacttccagaagggcttcagcagcaccgacggcgacgccgtgaactacatcagcagccagctgcccgacctgcccatcctgtgcagcagaaccgccgagcccagccccggccaggacggcaccagcagagccgccggcgtgggctgggagaacgtgctgctgaaggagggcgagagcgccagcaacgccaccgagaccagcggccccgacatgaccatcaagaagcccccccagctgagcgaggacgacatctggctgaagagcgagggcgacaactacagcgccaccctgctggagcccgccgccagcagcctgagccccgaccacaagaacatggagatcgaggtgagcgtggccgagtgcaagagcgtgcccggcatcaccagcaccccccaccccatggaccaccccagcgccttctacagccccccccacaacggcctgctgaccgaccaccacgagagcctggacaacgacgtggccagagagatcagatacctggacgaggtgctggaggccaactgctgcgacagcgccgtggacggcacctacaacggcaccagcagccccgagcccggcgccgtggtgctggtgggcggcctgagcccccccgtgcacgaggccacccagcccgagcccaccgagagaaccgccagcagacaggcccccccccacatcgagctgagcaacagcagccccgaccccatggccgaggccgagagaaccaacggccacagccccagccagcccagagacgccctgggcgacagcctgcaggtgcccgtgagccccagcagcaccaccagcagcagatgcagcagcagagacggcgagttcaccctgaccaccctgaagaaggaggccaagttcgagctgagagccttccacgaggacaagaagcccagcaagctgttcgaggacgacgagcacgagaaggagcagtactgcatcagaaaggtgagacccagcgaggagatgctggagctggagaaggagagaagagagctgatcagaagccaggccgtgaagaagaaccccggcatcgccgccaagtggtggaaccccccccaggagaagaccatcgaggagcagctggacgaggagcacctggagagccacaagaagtacaaggagagaaaggagagaagagcccagcaggagcagctgctgctgcagaagcagctgcagcagcagcagcagcagccccccagccagctgtgcaccgcccccgccagcagccacgagagagccagcatgatcgacaaggccaaggaggacatcgtgaccgagcagatcgacttcagcgccgccagaaagcagttccagctgatggagaacagcagacaggccgtggccaagggccagagcacccccagactgttcagcatcaagcccttctacagacccctgggcagcgtgaacagcgacaagcccctgaccaaccccagaccccccagcgtgggcggcccccccgaggacagcggcgccagcgccgccaagggccagaagagccccggcgccctggagacccccagcgccgccggcagccagggcaacaccgccagccagggcaaggagggcccctacagcgagcccagcaagagaggccccctgagcaagctgtgggccgaggacggcgagttcaccagcgccagagccgtgctgaccgtggtgaaggacgacgaccacggcatcctggaccagttcagcagaagcgtgaacgtgagcctgacccaggaggagctggacagcggcctggacgagctgagcgtgagaagccaggacaccaccgtgctggagaccctgagcaacgacttcagcatggacaacatcagcgacagcggcgccagcaacgagaccaccaacgccctgcaggagaacagcctggccgacttcagcctgccccagaccccccagaccgacaaccccagcgagggcagaggcgagggcgtgagcaagagcttcagcgaccacggcttctacagccccagcagcaccctgggcgacagccccctggtggacgaccccctggagtaccaggccggcctgctggtgcagaacgccatccagcaggccatcgccgagcaggtggacaaggccgtgagcaagaccagcagagacggcgccgagcagcagggccccgaggccaccgtggaggaggccgaggccgccgccttcggcagcgagaagccccagagcatgttcgagcccccccaggtgagcagccccgtgcaggagaagagagacgtgctgcccaagatcctgcccgccgaggacagagccctgagagagagaggccccccccagcccctgcccgccgtgcagcccagcggccccatcaacatggaggagaccagacccgagggcagctacttcagcaagtacagcgaggccgccgagctgagaagcaccgccagcctgctggccacccaggagagcgacgtgatggtgggccccttcaagctgagaagcagaaagcagagaaccctgagcatgatcgaggaggagatcagagccgcccaggagagagaggaggagctgaagagacagagacaggtgctgcagagcacccagagccccagaaccaagaacgcccccagcctgcccagcagaacctgctacaagaccgcccccggcaagatcgagaaggtgaagcccccccccagccccaccaccgagggccccagcctgcagcccgacctggcccccgaggaggccgccggcacccagagacccaagaacctgatgcagaccctgatggaggactacgagacccacaagagcaagagaagagagagaatggacgacagcagcgtgctggaggccaccagagtgaacagaagaaagagcgccctggccctgagatgggaggccggcatctacgccaaccaggaggaggaggacaacgagtag

SEQ ID NO: 71294 - DNA, 3312 bp, synthetic construct
  misc_feature 1..3312: note = Description of Artificial Sequence: Synthetic coding sequence
  source 1..3312: mol_type = other DNA
atggccgaggccgagctgcacaaggagagactgcaggccatcgccgagaagagaaagagacagaccgagatcgagggcaagagacagcagctggacgagcagatcctgctgctgcagcacagcaagagcaaggtgctgagagagaagtggctgctgcagggcatccccgccggcaccgccgaggaggaggaggccagaagaagacagagcgaggaggacgagttcagagtgaagcagctggaggacaacatccagagactggagcaggagatccagaccctggagagcgaggagagccagatcagcgccaaggagcagatcatcctggagaagctgaaggagaccgagaagagcttcaaggacttccagaagggcttcagcagcaccgacggcgacgccgtgaactacatcagcagccagctgcccgacctgcccatcctgtgcagcagaaccgccgagcccagccccggccaggacggcaccagcagagccgccggcgtgggctgggagaacgtgctgctgaaggagggcgagagcgccagcaacgccaccgagaccagcggccccgacatgaccatcaagaagcccccccagctgagcgaggacgacatctggctgaagagcgagggcgacaactacagcgccaccctgctggagcccgccgccagcagcctgagccccgaccacaagaacatggagatcgaggtgagcgtggccgagtgcaagagcgtgcccggcatcaccagcaccccccaccccatggaccaccccagcgccttctacagccccccccacaacggcctgctgaccgaccaccacgagagcctggacaacgacgtggccagagagatcagatacctggacgaggtgctggaggccaactgctgcgacagcgccgtggacggcacctacaacggcaccagcagccccgagcccggcgccgtggtgctggtgggcggcctgagcccccccgtgcacgaggccacccagcccgagcccaccgagagaaccgccagcagacaggcccccccccacatcgagctgagcaacagcagccccgaccccatggccgaggccgagagaaccaacggccacagccccagccagcccagagacgccctgggcgacagcctgcaggtgcccgtgagccccagcagcaccaccagcagcagatgcagcagcagagacggcgagttcaccctgaccaccctgaagaaggaggccaagttcgagctgagagccttccacgaggacaagaagcccagcaagctgttcgaggacgacgagcacgagaaggagcagtactgcatcagaaaggtgagacccagcgaggagatgctggagctggagaaggagagaagagagctgatcagaagccaggccgtgaagaagaaccccggcatcgccgccaagtggtggaaccccccccaggagaagaccatcgaggagcagctggacgaggagcacctggagagccacaagaagtacaaggagagaaaggagagaagagcccagcaggagcagctgctgctgcagaagcagctgcagcagcagcagcagcagccccccagccagctgtgcaccgcccccgccagcagccacgagagagccagcatgatcgacaaggccaaggaggacatcgtgaccgagcagatcgacttcagcgccgccagaaagcagttccagctgatggagaacagcagacaggccgtggccaagggccagagcacccccagactgttcagcatcaagcccttctacagacccctgggcagcgtgaacagcgacaagcccctgaccaaccccagaccccccagcgtgggcggcccccccgaggacagcggcgccagcgccgccaagggccagaagagccccggcgccctggagacccccagcgccgccggcagccagggcaacaccgccagccagggcaaggagggcccctacagcgagcccagcaagagaggccccctgagcaagctgtgggccgaggacggcgagttcaccagcgccagagccgtgctgaccgtggtgaaggacgacgaccacggcatcctggaccagttcagcagaagcgtgaacgtgagcctgacccaggaggagctggacagcggcctggacgagctgagcgtgagaagccaggacaccaccgtgctggagaccctgagcaacgacttcagcatggacaacatcagcgacagcggcgccagcaacgagaccaccaacgccctgcaggagaacagcctggccgacttcagcctgccccagaccccccagaccgacaaccccagcgagggcagaggcgagggcgtgagcaagagcttcagcgaccacggcttctacagccccagcagcaccctgggcgacagccccctggtggacgaccccctggagtaccaggccggcctgctggtgcagaacgccatccagcaggccatcgccgagcaggtggacaaggccgtgagcaagaccagcagagacggcgccgagcagcagggccccgaggccaccgtggaggaggccgaggccgccgccttcggcagcgagaagccccagagcatgttcgagcccccccaggtgagcagccccgtgcaggagaagagagacgtgctgcccaagatcctgcccgccgaggacagagccctgagagagagaggccccccccagcccctgcccgccgtgcagcccagcggccccatcaacatggaggagaccagacccgagggcagctacttcagcaagtacagcgaggccgccgagctgagaagcaccgccagcctgctggccacccaggagagcgacgtgatggtgggccccttcaagctgagaagcagaaagcagagaaccctgagcatgatcgaggaggagatcagagccgcccaggagagagaggaggagctgaagagacagagacaggtgctgcagagcacccagagccccagaaccaagaacgcccccagcctgcccagcagaacctgctacaagaccgcccccggcaagatcgagaaggtgaagcccccccccagccccaccaccgagggccccagcctgcagcccgacctggcccccgaggaggccgccggcacccagagacccaagaacctgatgcagaccctgatggaggactacgagacccacaagagcaagagaagagagagaatggacgacagcagctacaccagcaagctgctgagctgcaaggtgaccagcgaggtgctggaggccaccagagtgaacagaagaaagagcgccctggccctgagatgggaggccggcatctacgccaaccaggaggaggaggacaacgagtag

SEQ ID NO: 71295 - DNA, 2886 bp, synthetic construct
  misc_feature 1..2886: note = Description of Artificial Sequence: Synthetic coding sequence
  source 1..2886: mol_type = other DNA
atgagatggccccagcccggcgccgccgccagactgccccccgagagccccggcccccccgagagccccggcccccccgagagagaggccgccgccgccagaagatggaccggcgccgagccccaggactgcgcccccggcagcggcagacccgagaagcccccccagctgagcgaggacgacatctggctgaagagcgagggcgacaactacagcgccaccctgctggagcccgccgccagcagcctgagccccgaccacaagaacatggagatcgaggtgagcgtggccgagtgcaagagcgtgcccggcatcaccagcaccccccaccccatggaccaccccagcgccttctacagccccccccacaacggcctgctgaccgaccaccacgagagcctggacaacgacgtggccagagagatcagatacctggacgaggtgctggaggccaactgctgcgacagcgccgtggacggcacctacaacggcaccagcagccccgagcccggcgccgtggtgctggtgggcggcctgagcccccccgtgcacgaggccacccagcccgagcccaccgagagaaccgccagcagacaggcccccccccacatcgagctgagcaacagcagccccgaccccatggccgaggccgagagaaccaacggccacagccccagccagcccagagacgccctgggcgacagcctgcaggtgcccgtgagccccagcagcaccaccagcagcagatgcagcagcagagacggcgagttcaccctgaccaccctgaagaaggaggccaagttcgagctgagagccttccacgaggacaagaagcccagcaagctgttcgaggacgacgagcacgagaaggagcagtactgcatcagaaaggtgagacccagcgaggagatgctggagctggagaaggagagaagagagctgatcagaagccaggccgtgaagaagaaccccggcatcgccgccaagtggtggaaccccccccaggagaagaccatcgaggagcagctggacgaggagcacctggagagccacaagaagtacaaggagagaaaggagagaagagcccagcaggagcagctgctgctgcagaagcagctgcagcagcagcagcagcagccccccagccagctgtgcaccgcccccgccagcagccacgagagagccagcatgatcgacaaggccaaggaggacatcgtgaccgagcagatcgacttcagcgccgccagaaagcagttccagctgatggagaacagcagacaggccgtggccaagggccagagcacccccagactgttcagcatcaagcccttctacagacccctgggcagcgtgaacagcgacaagcccctgaccaaccccagaccccccagcgtgggcggcccccccgaggacagcggcgccagcgccgccaagggccagaagagccccggcgccctggagacccccagcgccgccggcagccagggcaacaccgccagccagggcaaggagggcccctacagcgagcccagcaagagaggccccctgagcaagctgtgggccgaggacggcgagttcaccagcgccagagccgtgctgaccgtggtgaaggacgacgaccacggcatcctggaccagttcagcagaagcgtgaacgtgagcctgacccaggaggagctggacagcggcctggacgagctgagcgtgagaagccaggacaccaccgtgctggagaccctgagcaacgacttcagcatggacaacatcagcgacagcggcgccagcaacgagaccaccaacgccctgcaggagaacagcctggccgacttcagcctgccccagaccccccagaccgacaaccccagcgagggcagaggcgagggcgtgagcaagagcttcagcgaccacggcttctacagccccagcagcaccctgggcgacagccccctggtggacgaccccctggagtaccaggccggcctgctggtgcagaacgccatccagcaggccatcgccgagcaggtggacaaggccgtgagcaagaccagcagagacggcgccgagcagcagggccccgaggccaccgtggaggaggccgaggccgccgccttcggcagcgagaagccccagagcatgttcgagcccccccaggtgagcagccccgtgcaggagaagagagacgtgctgcccaagatcctgcccgccgaggacagagccctgagagagagaggccccccccagcccctgcccgccgtgcagcccagcggccccatcaacatggaggagaccagacccgagggcagctacttcagcaagtacagcgaggccgccgagctgagaagcaccgccagcctgctggccacccaggagagcgacgtgatggtgggccccttcaagctgagaagcagaaagcagagaaccctgagcatgatcgaggaggagatcagagccgcccaggagagagaggaggagctgaagagacagagacaggtgctgcagagcacccagagccccagaaccaagaacgcccccagcctgcccagcagaacctgctacaagaccgcccccggcaagatcgagaaggtgaagcccccccccagccccaccaccgagggccccagcctgcagcccgacctggcccccgaggaggccgccggcacccagagacccaagaacctgatgcagaccctgatggaggactacgagacccacaagagcaagagaagagagagaatggacgacagcagctacaccagcaagctgctgagctgcaaggtgaccagcgaggtgctggaggccaccagagtgaacagaagaaagagcgccctggccctgagatgggaggccggcatctacgccaaccaggaggaggaggacaacgagtag

SEQ ID NO: 71296 - DNA, 2565 bp, synthetic construct
  misc_feature 1..2565: note = Description of Artificial Sequence: Synthetic coding sequence
  source 1..2565: mol_type = other DNA
atgatggcctacagcgacaccaccatgatgagcgacgacatcgactggctgagaagccacagaggcgtgtgcaaggtggacctgtacaaccccgagggccagcaggaccaggacagaaaggtgatctgcttcgtggacgtgagcaccctgaacgtggaggacaaggactacaaggacgccgccagcagcagcagcgagggcaacctgaacctgggcagcctggaggagaaggagatcatcgtgatcaaggacaccgagaagaaggaccagagcaagaccgagggcagcgtgtgcctgttcaagcaggcccccagcgaccccgtgagcgtgctgaactggctgctgagcgacctgcagaagtacgccctgggcttccagcacgccctgagccccagcaccagcacctgcaagcacaaggtgggcgacaccgagggcgagtaccacagagccagcagcgagaactgctacagcgtgtacgccgaccaggtgaacatcgactacctgatgaacagaccccagaacctgagactggagatgaccgccgccaagaacaccaacaacaaccagagccccagcgccccccccgccaagccccccagcacccagagagccgtgatcagccccgacggcgagtgcagcatcgacgacctgagcttctacgtgaacagactgagcagcctggtgatccagatggcccacaaggagatcaaggagaagctggagggcaagagcaagtgcctgcaccacagcatctgccccagccccggcaacaaggagagaatcagccccagaacccccgccagcaagatcgccagcgagatggcctacgaggccgtggagctgaccgccgccgagatgagaggcaccggcgaggagagcagagagggcggccagaagagcttcctgtacagcgagctgagcaacaagagcaagagcggcgacaagcagatgagccagagagagagcaaggagttcgccgacagcatcagcaagggcctgatggtgtacgccaaccaggtggccagcgacatgatggtgagcctgatgaagaccctgaaggtgcacagcagcggcaagcccatccccgccagcgtggtgctgaagagagtgctgctgagacacaccaaggagatcgtgagcgacctgatcgacagctgcatgaagaacctgcacaacatcaccggcgtgctgatgaccgacagcgacttcgtgagcgccgtgaagagaaacctgttcaaccagtggaagcagaacgccaccgacatcatggaggccatgctgaagagactggtgagcgccctgatcggcgaggagaaggagaccaagagccagagcctgagctacgccagcctgaaggccggcagccacgaccccaagtgcagaaaccagagcctggagttcagcaccatgaaggccgagatgaaggagagagacaagggcaagatgaagagcgacccctgcaagagcctgaccagcgccgagaaggtgggcgagcacatcctgaaggagggcctgaccatctggaaccagaagcagggcaacagctgcaaggtggccaccaaggcctgcagcaacaaggacgagaagggcgagaagatcaacgccagcaccgacagcctggccaaggacctgatcgtgagcgccctgaagctgatccagtaccacctgacccagcagaccaagggcaaggacacctgcgaggaggactgccccggcagcaccatgggctacatggcccagagcacccagtacgagaagtgcggcggcggccagagcgccaaggccctgagcgtgaagcagctggagagccacagagcccccggccccagcacctgccagaaggagaaccagcacctggacagccagaagatggacatgagcaacatcgtgctgatgctgatccagaagctgctgaacgagaaccccttcaagtgcgaggacccctgcgagggcgagaacaagtgcagcgagcccagagccagcaaggccgccagcatgagcaacagaagcgacaaggccgaggagcagtgccaggagcaccaggagctggactgcaccagcggcatgaagcaggccaacggccagttcatcgacaagctggtggagagcgtgatgaagctgtgcctgatcatggccaagtacagcaacgacggcgccgccctggccgagctggaggagcaggccgccagcgccaacaagcccaacttcagaggcaccagatgcatccacagcggcgccatgccccagaactaccaggacagcctgggccacgaggtgatcgtgaacaaccagtgcagcaccaacagcctgcagaagcagctgcaggccgtgctgcagtggatcgccgccagccagttcaacgtgcccatgctgtacttcatgggcgacaaggacggccagctggagaagctgccccaggtgagcgccaaggccgccgagaagggctacagcgtgggcggcctgctgcaggaggtgatgaagttcgccaaggagagacagcccgacgaggccgtgggcaaggtggccagaaagcagctgctggactggctgctggccaacctgtag

SEQ ID NO: 71297 - DNA, 2538 bp, synthetic construct
  misc_feature 1..2538: note = Description of Artificial Sequence: Synthetic coding sequence
  source 1..2538: mol_type = other DNA
atgagcgacgacatcgactggctgagaagccacagaggcgtgtgcaaggtggacctgtacaaccccgagggccagcaggaccaggacagaaaggtgatctgcttcgtggacgtgagcaccctgaacgtggaggacaaggactacaaggacgccgccagcagcagcagcgagggcaacctgaacctgggcagcctggaggagaaggagatcatcgtgatcaaggacaccgagaagaaggaccagagcaagaccgagggcagcgtgtgcctgttcaagcaggcccccagcgaccccgtgagcgtgctgaactggctgctgagcgacctgcagaagtacgccctgggcttccagcacgccctgagccccagcaccagcacctgcaagcacaaggtgggcgacaccgagggcgagtaccacagagccagcagcgagaactgctacagcgtgtacgccgaccaggtgaacatcgactacctgatgaacagaccccagaacctgagactggagatgaccgccgccaagaacaccaacaacaaccagagccccagcgccccccccgccaagccccccagcacccagagagccgtgatcagccccgacggcgagtgcagcatcgacgacctgagcttctacgtgaacagactgagcagcctggtgatccagatggcccacaaggagatcaaggagaagctggagggcaagagcaagtgcctgcaccacagcatctgccccagccccggcaacaaggagagaatcagccccagaacccccgccagcaagatcgccagcgagatggcctacgaggccgtggagctgaccgccgccgagatgagaggcaccggcgaggagagcagagagggcggccagaagagcttcctgtacagcgagctgagcaacaagagcaagagcggcgacaagcagatgagccagagagagagcaaggagttcgccgacagcatcagcaagggcctgatggtgtacgccaaccaggtggccagcgacatgatggtgagcctgatgaagaccctgaaggtgcacagcagcggcaagcccatccccgccagcgtggtgctgaagagagtgctgctgagacacaccaaggagatcgtgagcgacctgatcgacagctgcatgaagaacctgcacaacatcaccggcgtgctgatgaccgacagcgacttcgtgagcgccgtgaagagaaacctgttcaaccagtggaagcagaacgccaccgacatcatggaggccatgctgaagagactggtgagcgccctgatcggcgaggagaaggagaccaagagccagagcctgagctacgccagcctgaaggccggcagccacgaccccaagtgcagaaaccagagcctggagttcagcaccatgaaggccgagatgaaggagagagacaagggcaagatgaagagcgacccctgcaagagcctgaccagcgccgagaaggtgggcgagcacatcctgaaggagggcctgaccatctggaaccagaagcagggcaacagctgcaaggtggccaccaaggcctgcagcaacaaggacgagaagggcgagaagatcaacgccagcaccgacagcctggccaaggacctgatcgtgagcgccctgaagctgatccagtaccacctgacccagcagaccaagggcaaggacacctgcgaggaggactgccccggcagcaccatgggctacatggcccagagcacccagtacgagaagtgcggcggcggccagagcgccaaggccctgagcgtgaagcagctggagagccacagagcccccggccccagcacctgccagaaggagaaccagcacctggacagccagaagatggacatgagcaacatcgtgctgatgctgatccagaagctgctgaacgagaaccccttcaagtgcgaggacccctgcgagggcgagaacaagtgcagcgagcccagagccagcaaggccgccagcatgagcaacagaagcgacaaggccgaggagcagtgccaggagcaccaggagctggactgcaccagcggcatgaagcaggccaacggccagttcatcgacaagctggtggagagcgtgatgaagctgtgcctgatcatggccaagtacagcaacgacggcgccgccctggccgagctggaggagcaggccgccagcgccaacaagcccaacttcagaggcaccagatgcatccacagcggcgccatgccccagaactaccaggacagcctgggccacgaggtgatcgtgaacaaccagtgcagcaccaacagcctgcagaagcagctgcaggccgtgctgcagtggatcgccgccagccagttcaacgtgcccatgctgtacttcatgggcgacaaggacggccagctggagaagctgccccaggtgagcgccaaggccgccgagaagggctacagcgtgggcggcctgctgcaggaggtgatgaagttcgccaaggagagacagcccgacgaggccgtgggcaaggtggccagaaagcagctgctggactggctgctggccaacctgtag

SEQ ID NO: 71298 - DNA, 1416 bp, synthetic construct
  misc_feature 1..1416: note = Description of Artificial Sequence: Synthetic coding sequence
  source 1..1416: mol_type = other DNA
atgagcgacgacatcgactggctgagaagccacagaggcgtgtgcaaggtggacctgtacaaccccgagggccagcaggaccaggacagaaaggtgatctgcttcgtggacgtgagcaccctgaacgtggaggacaaggactacaaggacgccgccagcagcagcagcgagggcaacctgaacctgggcagcctggaggagaaggagatcatcgtgatcaaggacaccgagaagaaggaccagagcaagaccgagggcagcgtgtgcctgttcaagcaggcccccagcgaccccgtgagcgtgctgaactggctgctgagcgacctgcagaagtacgccctgggcttccagcacgccctgagccccagcaccagcacctgcaagcacaaggtgggcgacaccgagggcgagtaccacagagccagcagcgagaactgctacagcgtgtacgccgaccaggtgaacatcgactacctgatgaacagaccccagaacctgagactggagatgaccgccgccaagaacaccaacaacaaccagaacacctgcgaggaggactgccccggcagcaccatgggctacatggcccagagcacccagtacgagaagtgcggcggcggccagagcgccaaggccctgagcgtgaagcagctggagagccacagagcccccggccccagcacctgccagaaggagaaccagcacctggacagccagaagatggacatgagcaacatcgtgctgatgctgatccagaagctgctgaacgagaaccccttcaagtgcgaggacccctgcgagggcgagaacaagtgcagcgagcccagagccagcaaggccgccagcatgagcaacagaagcgacaaggccgaggagcagtgccaggagcaccaggagctggactgcaccagcggcatgaagcaggccaacggccagttcatcgacaagctggtggagagcgtgatgaagctgtgcctgatcatggccaagtacagcaacgacggcgccgccctggccgagctggaggagcaggccgccagcgccaacaagcccaacttcagaggcaccagatgcatccacagcggcgccatgccccagaactaccaggacagcctgggccacgaggtgatcgtgaacaaccagtgcagcaccaacagcctgcagaagcagctgcaggccgtgctgcagtggatcgccgccagccagttcaacgtgcccatgctgtacttcatgggcgacaaggacggccagctggagaagctgccccaggtgagcgccaaggccgccgagaagggctacagcgtgggcggcctgctgcaggaggtgatgaagttcgccaaggagagacagcccgacgaggccgtgggcaaggtggccagaaagcagctgctggactggctgctggccaacctgtag

SEQ ID NO: 71299 - DNA, 2538 bp, synthetic construct; identical to SEQ ID NO: 71297
  misc_feature 1..2538: note = Description of Artificial Sequence: Synthetic coding sequence
  source 1..2538: mol_type = other DNA

SEQ ID NO: 71300 - DNA, 765 bp, synthetic construct
  misc_feature 1..765: note = Description of Artificial Sequence: Synthetic coding sequence
  source 1..765: mol_type = other DNA
atgagcgacgacatcgactggctgagaagccacagaggcgtgtgcaaggtggacctgtacaaccccgagggccagcaggaccaggacagaaaggtgatctgcttcgtggacgtgagcaccctgaacgtggaggacaaggactacaaggacgccgccagcagcagcagcgagggcaacctgaacctgggcagcctggaggagaaggagatcatcgtgatcaaggacaccgagaagaaggaccagagcaagaccgagggcagcgtgtgcctgttcaagcaggcccccagcgaccccgtgagcgtgctgaactggctgctgagcgacctgcagaagtacgccctgggcttccagcacgccctgagccccagcaccagcacctgcaagcacaaggtgggcgacaccgagggcgagtaccacagagccagcagcgagaactgctacagcgtgtacgccgaccaggtgaacatcgactacctgatgaacagaccccagaacctgagactggagatgaccgccgccaagaacaccaacaacaaccagagccccagcgccccccccgccaagccccccagcacccagagagccgtgatcagccccgacggcgagtgcagcatcgacgacctgagcttctacgtgaacagactgagcagcctggtgatccagatggcccacaaggagatcaaggagaagctggagggcaagagcaagtgcctgcaccacagcatctgccccagccccggcaacaaggagagaatcagcccctag

SEQ ID NO: 71301 - DNA, 642 bp, synthetic construct
  misc_feature 1..642: note = Description of Artificial Sequence: Synthetic coding sequence
  source 1..642: mol_type = other DNA
atgagcgacgacatcgactggctgagaagccacagaggcgtgtgcaaggtggacctgtacaaccccgagggccagcaggaccaggacagaaaggtgatctgcttcgtggacgtgagcaccctgaacgtggaggacaaggactacaaggacgccgccagcagcagcagcgagggcaacctgaacctgggcagcctggaggagaaggagatcatcgtgatcaaggacaccgagaagaaggaccagagcaagaccgagggcagcgtgtgcctgttcaagcaggcccccagcgaccccgtgagcgtgctgaactggctgctgagcgacctgcagaagtacgccctgggcttccagcacgccctgagccccagcaccagcacctgcaagcacaaggtgggcgacaccgagggcgagtaccacagagccagcagcgagaactgctacagcgtgtacgccgaccaggtgaacatcgactacctgatgaacagaccccagaacctgagactggagatgaccgccgccaagaacaccaacaacaaccagaacacctgcgaggaggactgccccggcagcaccatgggctacatggcccagagcacccagtacgagaagtgcggcggcggccagagcgccaaggccctgtag

SEQ ID NO: 71302 - DNA, 552 bp, synthetic construct
  misc_feature 1..552: note = Description of Artificial Sequence: Synthetic coding sequence
  source 1..552: mol_type = other DNA
atggacaactgcctggccgccgccgccctgaacggcgtggacagaagaagcctgcagagaagcgccagactggccctggaggtgctggagagagccaagagaagagccgtggactggcacgccctggagagacccaagggctgcatgggcgtgctggccagagaggccccccacctggagaagcagcccgccgccggcccccagagagtgctgcccggcgagaagtactacagcagcgtgcccgaggagggcggcgccacccacgtgtacagataccacagaggcgagagcaagctgcacatgtgcctggacatcggcaacggccagagaaaggacagaaagaagaccagcctgggccccggcggcagctaccagatcagcgagcacgcccccgaggccagccagcccgccgagaacatcagcaaggacctgtacatcgaggtgtaccccggcacctacagcgtgaccgtgggcagcaacgacctgaccaagaagacccacgtggtggccgtggacagcggccagagcgtggacctggtgttccccgtgtag

SEQ ID NO: 71303 - DNA, 552 bp, synthetic construct
  misc_feature 1..552: note = Description of Artificial Sequence: Synthetic coding sequence
  source 1..552: mol_type = other DNA
atggacaactgcctggccgccgccgccctgaacggcgtggacagaagaagcctgcagagaagcgccagactggccctggaggtgctggagagagccaagagaagagccgtggactggcacgccctggagagacccaagggctgcatgggcgtgctggccagagaggccccccacctggagaagcagcccgccgccggcccccagagagtgctgcccggcgagagagaggagagaccccccaccctgagcgccagcttcagaaccatggccgagttcatggactacaccagcagccagtgcggcaagtactacagcagcgtgcccgaggagggcggcgccacccacgtgtacagataccacagaggcgagagcaagctgcacatgtgcctggacatcggcaacggccaggccgagaacatcagcaaggacctgtacatcgaggtgtaccccggcacctacagcgtgaccgtgggcagcaacgacctgaccaagaagacccacgtggtggccgtggacagcggccagagcgtggacctggtgttccccgtgtag

SEQ ID NO: 71304 - DNA, 633 bp, synthetic construct
  misc_feature 1..633: note = Description of Artificial Sequence: Synthetic coding sequence
  source 1..633: mol_type = other DNA
atggacaactgcctggccgccgccgccctgaacggcgtggacagaagaagcctgcagagaagcgccagactggccctggaggtgctggagagagccaagagaagagccgtggactggcacgccctggagagacccaagggctgcatgggcgtgctggccagagaggccccccacctggagaagcagcccgccgccggcccccagagagtgctgcccggcgagagagaggagagaccccccaccctgagcgccagcttcagaaccatggccgagttcatggactacaccagcagccagtgcggcaagtactacagcagcgtgcccgaggagggcggcgccacccacgtgtacagataccacagaggcgagagcaagctgcacatgtgcctggacatcggcaacggccagagaaaggacagaaagaagaccagcctgggccccggcggcagctaccagatcagcgagcacgcccccgaggccagccagcccgccgagaacatcagcaaggacctgtacatcgaggtgtaccccggcacctacagcgtgaccgtgggcagcaacgacctgaccaagaagacccacgtggtggccgtggacagcggccagagcgtggacctggtgttccccgtgtag

SEQ ID NO: 71305 - DNA, 552 bp, synthetic construct; identical to SEQ ID NO: 71302
  misc_feature 1..552: note = Description of Artificial Sequence: Synthetic coding sequence
  source 1..552: mol_type = other DNA

SEQ ID NO: 71306 - DNA, 633 bp, synthetic construct; identical to SEQ ID NO: 71304
  misc_feature 1..633: note = Description of Artificial Sequence: Synthetic coding sequence
  source 1..633: mol_type = other DNA

SEQ ID NO: 71307 - DNA, 1479 bp, synthetic construct
  misc_feature 1..1479: note = Description of Artificial Sequence: Synthetic coding sequence
  source 1..1479: mol_type = other DNA
atgggcttccagagaagattcttccaccaggaccagagccccgtgggcggcctgaccgccgaggacatcgagaaggccagacaggccaaggccagacccgagaacaagcagcacaagcagaccctgagcgagcacgccagagagagaaaggtgcccgtgaccagaatcggcagactggccaacttcggcggcctggccgtgggcctgggcttcggcgccctggccgaggtggccaagaagagcctgagaagcgaggaccccagcggcaagaaggccgtgctgggcagcagccccttcctgagcgaggccaacgccgagagaatcgtgagaaccctgtgcaaggtgagaggcgccgccctgaagctgggccagatgctgagcatccaggacgacgccttcatcaacccccacctggccaagatcttcgagagagtgagacagagcgccgacttcatgcccctgaagcagatgatgaagaccctgaacaacgacctgggccccaactggagagacaagctggagtacttcgaggagagacccttcgccgccgccagcatcggccaggtgcacctggccagaatgaagggcggcagagaggtggccatgaagatccagtaccccggcgtggcccagagcatcaacagcgacgtgaacaacctgatggccgtgctgaacatgagcaacatgctgcccgagggcctgttccccgagcacctgatcgacgtgctgagaagagagctggccctggagtgcgactaccagagagaggccgcctgcgccagaaagttcagagacctgctgaagggccaccccttcttctacgtgcccgagatcgtggacgagctgtgcagcccccacgtgctgaccaccgagctggtgagcggcttccccctggaccaggccgagggcctgagccaggagatcagaaacgagatctgctacaacatcctggtgctgtgcctgagagagctgttcgagttccacttcatgcagaccgaccccaactggagcaacttcttctacgacccccagcagcacaaggtggccctgctggacttcggcgccaccagagagtacgacagaagcttcaccgacctgtacatccagatcatcagagccgccgccgacagagacagagagaccgtgagagccaagagcatcgagatgaagttcctgaccggctacgaggtgaaggtgatggaggacgcccacctggacgccatcctgatcctgggcgaggccttcgccagcgacgagcccttcgacttcggcacccagagcaccaccgagaagatccacaacctgatccccgtgatgctgagacacagactggtgcccccccccgaggagacctacagcctgcacagaaagatgggcggcagcttcctgatctgcagcaagctgaaggccagattcccctgcaaggccatgttcgaggaggcctacagcaactactgcaagagacaggcccagcagtag

SEQ ID NO: 71308 - DNA, 1719 bp, synthetic construct
  misc_feature 1..1719: note = Description of Artificial Sequence: Synthetic coding sequence
  source 1..1719: mol_type = other DNA
atggccgccatcctgggcgacaccatcatggtggccaagggcctggtgaagctgacccaggccgccgtggagacccacctgcagcacctgggcatcggcggcgagctgatcatgggccccgcccccgcctacgtggccagcggccccttcagagaggccggcttccccggccaggccagcagccccctgggcagagccaacggcagactgttcgccaaccccagagacagcttcagcgccatgggcttccagagaagattcttccaccaggaccagagccccgtgggcggcctgaccgccgaggacatcgagaaggccagacaggccaaggccagacccgagaacaagcagcacaagcagaccctgagcgagcacgccagagagagaaaggtgcccgtgaccagaatcggcagactggccaacttcggcggcctggccgtgggcctgggcttcggcgccctggccgaggtggccaagaagagcctgagaagcgaggaccccagcggcaagaaggccgtgctgggcagcagccccttcctgagcgaggccaacgccgagagaatcgtgagaaccctgtgcaaggtgagaggcgccgccctgaagctgggccagatgctgagcatccaggacgacgccttcatcaacccccacctggccaagatcttcgagagagtgagacagagcgccgacttcatgcccctgaagcagatgatgaagaccctgaacaacgacctgggccccaactggagagacaagctggagtacttcgaggagagacccttcgccgccgccagcatcggccaggtgcacctggccagaatgaagggcggcagagaggtggccatgaagatccagtaccccggcgtggcccagagcatcaacagcgacgtgaacaacctgatggccgtgctgaacatgagcaacatgctgcccgagggcctgttccccgagcacctgatcgacgtgctgagaagagagctggccctggagtgcgactaccagagagaggccgcctgcgccagaaagttcagagacctgctgaagggccaccccttcttctacgtgcccgagatcgtggacgagctgtgcagcccccacgtgctgaccaccgagctggtgagcggcttccccctggaccaggccgagggcctgagccaggagatcagaaacgagatctgctacaacatcctggtgctgtgcctgagagagctgttcgagttccacttcatgcagaccgaccccaactggagcaacttcttctacgacccccagcagcacaaggtggccctgctggacttcggcgccaccagagagtacgacagaagcttcaccgacctgtacatccagatcatcagagccgccgccgacagagacagagagaccgtgagagccaagagcatcgagatgaagttcctgaccggctacgaggtgaaggtgatggaggacgcccacctggacgccatcctgatcctgggcgaggccttcgccagcgacgagcccttcgacttcggcacccagagcaccaccgagaagatccacaacctgatccccgtgatgctgagacacagactggtgcccccccccgaggagacctacagcctgcacagaaagatgggcggcagcttcctgatctgcagcaagctgaaggccagattcccctgcaaggccatgttcgaggaggcctacagcaactactgcaagagacaggcccagcagtag

SEQ ID NO: 71309 - DNA, 1944 bp, synthetic construct
  misc_feature 1..1944: note = Description of Artificial Sequence: Synthetic coding sequence
  source 1..1944: mol_type = other DNA
atggccgccatcctgggcgacaccatcatggtggccaagggcctggtgaagctgacccaggccgccgtggagacccacctgcagcacctgggcatcggcggcgagctgatcatggccgccagagccctgcagagcaccgccgtggagcagatcggcatgttcctgggcaaggtgcagggccaggacaagcacgaggagtacttcgccgagaacttcggcggccccgagggcgagttccacttcagcgtgccccacgccgccggcgccagcaccgacttcagcagcgccagcgcccccgaccagagcgccccccccagcctgggccacgcccacagcgagggccccgcccccgcctacgtggccagcggccccttcagagaggccggcttccccggccaggccagcagccccctgggcagagccaacggcagactgttcgccaaccccagagacagcttcagcgccatgggcttccagagaagattcttccaccaggaccagagccccgtgggcggcctgaccgccgaggacatcgagaaggccagacaggccaaggccagacccgagaacaagcagcacaagcagaccctgagcgagcacgccagagagagaaaggtgcccgtgaccagaatcggcagactggccaacttcggcggcctggccgtgggcctgggcttcggcgccctggccgaggtggccaagaagagcctgagaagcgaggaccccagcggcaagaaggccgtgctgggcagcagccccttcctgagcgaggccaacgccgagagaatcgtgagaaccctgtgcaaggtgagaggcgccgccctgaagctgggccagatgctgagcatccaggacgacgccttcatcaacccccacctggccaagatcttcgagagagtgagacagagcgccgacttcatgcccctgaagcagatgatgaagaccctgaacaacgacctgggccccaactggagagacaagctggagtacttcgaggagagacccttcgccgccgccagcatcggccaggtgcacctggccagaatgaagggcggcagagaggtggccatgaagatccagtaccccggcgtggcccagagcatcaacagcgacgtgaacaacctgatggccgtgctgaacatgagcaacatgctgcccgagggcctgttccccgagcacctgatcgacgtgctgagaagagagctggccctggagtgcgactaccagagagaggccgcctgcgccagaaagttcagagacctgctgaagggccaccccttcttctacgtgcccgagatcgtggacgagctgtgcagcccccacgtgctgaccaccgagctggtgagcggcttccccctggaccaggccgagggcctgagccaggagatcagaaacgagatctgctacaacatcctggtgctgtgcctgagagagctgttcgagttccacttcatgcagaccgaccccaactggagcaacttcttctacgacccccagcagcacaaggtggccctgctggacttcggcgccaccagagagtacgacagaagcttcaccgacctgtacatccagatcatcagagccgccgccgacagagacagagagaccgtgagagccaagagcatcgagatgaagttcctgaccggctacgaggtgaaggtgatggaggacgcccacctggacgccatcctgatcctgggcgaggccttcgccagcgacgagcccttcgacttcggcacccagagcaccaccgagaagatccacaacctgatccccgtgatgctgagacacagactggtgcccccccccgaggagacctacagcctgcacagaaagatgggcggcagcttcctgatctgcagcaagctgaaggccagattcccctgcaaggccatgttcgaggaggcctacagcaactactgcaagagacaggcccagcagtag

SEQ ID NO: 71310 - DNA, 1788 bp, synthetic construct
  misc_feature 1..1788: note = Description of Artificial Sequence: Synthetic coding sequence
  source 1..1788: mol_type = other DNA
atgttcctgggcaaggtgcagggccaggacaagcacgaggagtacttcgccgagaacttcggcggccccgagggcgagttccacttcagcgtgccccacgccgccggcgccagcaccgacttcagcagcgccagcgcccccgaccagagcgccccccccagcctgggccacgcccacagcgagggccccgcccccgcctacgtggccagcggccccttcagagaggccggcttccccggccaggccagcagccccctgggcagagccaacggcagactgttcgccaaccccagagacagcttcagcgccatgggcttccagagaagattcttccaccaggaccagagccccgtgggcggcctgaccgccgaggacatcgagaaggccagacaggccaaggccagacccgagaacaagcagcacaagcagaccctgagcgagcacgccagagagagaaaggtgcccgtgaccagaatcggcagactggccaacttcggcggcctggccgtgggcctgggcttcggcgccctggccgaggtggccaagaagagcctgagaagcgaggaccccagcggcaagaaggccgtgctgggcagcagccccttcctgagcgaggccaacgccgagagaatcgtgagaaccctgtgcaaggtgagaggcgccgccctgaagctgggccagatgctgagcatccaggacgacgccttcatcaacccccacctggccaagatcttcgagagagtgagacagagcgccgacttcatgcccctgaagcagatgatgaagaccctgaacaacgacctgggccccaactggagagacaagctggagtacttcgaggagagacccttcgccgccgccagcatcggccaggtgcacctggccagaatgaagggcggcagagaggtggccatgaagatccagtaccccggcgtggcccagagcatcaacagcgacgtgaacaacctgatggccgtgctgaacatgagcaacatgctgcccgagggcctgttccccgagcacctgatcgacgtgctgagaagagagctggccctggagtgcgactaccagagagaggccgcctgcgccagaaagttcagagacctgctgaagggccaccccttcttctacgtgcccgagatcgtggacgagctgtgcagcccccacgtgctgaccaccgagctggtgagcggcttccccctggaccaggccgagggcctgagccaggagatcagaaacgagatctgctacaacatcctggtgctgtgcctgagagagctgttcgagttccacttcatgcagaccgaccccaactggagcaacttcttctacgacccccagcagcacaaggtggccctgctggacttcggcgccaccagagagtacgacagaagcttcaccgacctgtacatccagatcatcagagccgccgccgacagagacagagagaccgtgagagccaagagcatcgagatgaagttcctgaccggctacgaggtgaaggtgatggaggacgcccacctggacgccatcctgatcctgggcgaggccttcgccagcgacgagcccttcgacttcggcacccagagcaccaccgagaagatccacaacctgatccccgtgatgctgagacacagactggtgcccccccccgaggagacctacagcctgcacagaaagatgggcggcagcttcctgatctgcagcaagctgaaggccagattcccctgcaaggccatgttcgaggaggcctacagcaactactgcaagagacaggcccagcagtag

SEQ ID NO: 71311 - DNA, 1944 bp, synthetic construct; identical to SEQ ID NO: 71309
  misc_feature 1..1944: note = Description of Artificial Sequence: Synthetic coding sequence
  source 1..1944: mol_type = other DNA

SEQ ID NO: 71312 - DNA, 1797 bp, synthetic construct
  misc_feature 1..1797: note = Description of Artificial Sequence: Synthetic coding sequence
  source 1..1797: mol_type = other DNA
atggccgccagagccctgcagagcaccgccgtggagcagatcggcatgttcctgggcaaggtgcagggccaggacaagcacgaggagtacttcgccgagaacttcggcggccccgagggcgagttccacttcagcagcgccagcgcccccgaccagagcgccccccccagcctgggccacgcccacagcgagggccccgcccccgcctacgtggccagcggccccttcagagaggccggcttccccggccaggccagcagccccctgggcagagccaacggcagactgttcgccaaccccagagacagcttcagcgccatgggcttccagagaagattcttccaccaggaccagagccccgtgggcggcctgaccgccgaggacatcgagaaggccagacaggccaaggccagacccgagaacaagcagcacaagcagaccctgagcgagcacgccagagagagaaaggtgcccgtgaccagaatcggcagactggccaacttcggcggcctggccgtgggcctgggcttcggcgccctggccgaggtggccaagaagagcctgagaagcgaggaccccagcggcaagaaggccgtgctgggcagcagccccttcctgagcgaggccaacgccgagagaatcgtgagaaccctgtgcaaggtgagaggcgccgccctgaagctgggccagatgctgagcatccaggacgacgccttcatcaacccccacctggccaagatcttcgagagagtgagacagagcgccgacttcatgcccctgaagcagatgatgaagaccctgaacaacgacctgggccccaactggagagacaagctggagtacttcgaggagagacccttcgccgccgccagcatcggccaggtgcacctggccagaatgaagggcggcagagaggtggccatgaagatccagtaccccggcgtggcccagagcatcaacagcgacgtgaacaacctgatggccgtgctgaacatgagcaacatgctgcccgagggcctgttccccgagcacctgatcgacgtgctgagaagagagctggccctggagtgcgactaccagagagaggccgcctgcgccagaaagttcagagacctgctgaagggccaccccttcttctacgtgcccgagatcgtggacgagctgtgcagcccccacgtgctgaccaccgagctggtgagcggcttccccctggaccaggccgagggcctgagccaggagatcagaaacgagatctgctacaacatcctggtgctgtgcctgagagagctgttcgagttccacttcatgcagaccgaccccaactggagcaacttcttctacgacccccagcagcacaaggtggccctgctggacttcggcgccaccagagagtacgacagaagcttcaccgacctgtacatccagatcatcagagccgccgccgacagagacagagagaccgtgagagccaagagcatcgagatgaagttcctgaccggctacgaggtgaaggtgatggaggacgcccacctggacgccatcctgatcctgggcgaggccttcgccagcgacgagcccttcgacttcggcacccagagcaccaccgagaagatccacaacctgatccccgtgatgctgagacacagactggtgcccccccccgaggagacctacagcctgcacagaaagatgggcggcagcttcctgatctgcagcaagctgaaggccagattcccctgcaaggccatgttcgaggaggcctacagcaactactgcaagagacaggcccagcagtag

SEQ ID NO: 71313 - DNA, 966 bp, synthetic construct
  misc_feature 1..966: note = Description of Artificial Sequence: Synthetic coding sequence
  source 1..966: mol_type = other DNA
atgctgagcatccaggacgacgccttcatcaacccccacctggccaagatcttcgagagagtgagacagagcgccgacttcatgcccctgaagcagatgatgtaccccggcgtggcccagagcatcaacagcgacgtgaacaacctgatggccgtgctgaacatgagcaacatgctgcccgagggcctgttccccgagcacctgatcgacgtgctgagaagagagctggccctggagtgcgactaccagagagaggccgcctgcgccagaaagttcagagacctgctgaagggccaccccttcttctacgtgcccgagatcgtggacgagctgtgcagcccccacgtgctgaccaccgagctggtgagcggcttccccctggaccaggccgagggcctgagccaggagatcagaaacgagatctgctacaacatcctggtgctgtgcctgagagagctgttcgagttccacttcatgcagaccgaccccaactggagcaacttcttctacgacccccagcagcacaaggtggccctgctggacttcggcgccaccagagagtacgacagaagcttcaccgacctgtacatccagatcatcagagccgccgccgacagagacagagagaccgtgagagccaagagcatcgagatgaagttcctgaccggctacgaggtgaaggtgatggaggacgcccacctggacgccatcctgatcctgggcgaggccttcgccagcgacgagcccttcgacttcggcacccagagcaccaccgagaagatccacaacctgatccccgtgatgctgagacacagactggtgcccccccccgaggagacctacagcctgcacagaaagatgggcggcagcttcctgatctgcagcaagctgaaggccagattcccctgcaaggccatgttcgaggaggcctacagcaactactgcaagagacaggcccagcagtag

SEQ ID NO: 71314 - DNA, 1107 bp, synthetic construct
  misc_feature 1..1107: note = Description of Artificial Sequence: Synthetic coding sequence
  source 1..1107: mol_type = other DNA
atgctgagcatccaggacgacgccttcatcaacccccacctggccaagatcttcgagagagtgagacagagcgccgacttcatgcccctgaagcagatgatgaagaccctgaacaacgacctgggccccaactggagagacaagctggagtacttcgaggagagacccttcgccgccgccagcatcggccaggtgcacctggccagaatgaagggcggcagagaggtggccatgaagatccagtaccccggcgtggcccagagcatcaacagcgacgtgaacaacctgatggccgtgctgaacatgagcaacatgctgcccgagggcctgttccccgagcacctgatcgacgtgctgagaagagagctggccctggagtgcgactaccagagagaggccgcctgcgccagaaagttcagagacctgctgaagggccaccccttcttctacgtgcccgagatcgtggacgagctgtgcagcccccacgtgctgaccaccgagctggtgagcggcttccccctggaccaggccgagggcctgagccaggagatcagaaacgagatctgctacaacatcctggtgctgtgcctgagagagctgttcgagttccacttcatgcagaccgaccccaactggagcaacttcttctacgacccccagcagcacaaggtggccctgctggacttcggcgccaccagagagtacgacagaagcttcaccgacctgtacatccagatcatcagagccgccgccgacagagacagagagaccgtgagagccaagagcatcgagatgaagttcctgaccggctacgaggtgaaggtgatggaggacgcccacctggacgccatcctgatcctgggcgaggccttcgccagcgacgagcccttcgacttcggcacccagagcaccaccgagaagatccacaacctgatccccgtgatgctgagacacagactggtgcccccccccgaggagacctacagcctgcacagaaagatgggcggcagcttcctgatctgcagcaagctgaaggccagattcccctgcaaggccatgttcgaggaggcctacagcaactactgcaagagacaggcccagcagtag

SEQ ID NO: 71315 - DNA, 3591 bp, synthetic construct
  misc_feature 1..3591: note = Description of Artificial Sequence: Synthetic coding sequence
  source 1..3591: mol_type = other DNA
atgcccaccgccgagagcgaggccaaggtgaagaccaaggtgagattcgaggagctgctgaagacccacagcgacctgatgagagagaagaagaagctgaagaagaagctggtgagaagcgaggagaacatcagccccgacaccatcagaagcaacctgcactacatgaaggagaccaccagcgacgaccccgacaccatcagaagcaacctgccccacatcaaggagaccaccagcgacgacgtgagcgccgccaacaccaacaacctgaagaagagcaccagagtgaccaagaacaagctgagaaacacccagctggccaccgagaaccccaacggcgacgccagcgtggaggaggacaagcagggcaagcccaacaagaaggtgatcaagaccgtgccccagctgaccacccaggacctgaagcccgagacccccgagaacaaggtggacagcacccaccagaagacccacaccaagccccagcccggcgtggaccaccagaagagcgagaaggccaacgagggcagagaggagaccgacctggaggaggacgaggagctgatgcaggcctaccagtgccacgtgaccgaggagatggccaaggagatcaagagaaagatcagaaagaagctgaaggagcagctgacctacttccccagcgacaccctgttccacgacgacaagctgagcagcgagaagagaaagaagaagaaggaggtgcccgtgttcagcaaggccgagaccagcaccctgaccatcagcggcgacaccgtggagggcgagcagaagaaggagagcagcgtgagaagcgtgagcagcgacagccaccaggacgacgagatcagcagcatggagcagagcaccgaggacagcatgcaggacgacaccaagcccaagcccaagaagaccaagaagaagaccaaggccgtggccgacaacaacgaggacgtggacggcgacggcgtgcacgagatcaccagcagagacagccccgtgtaccccaagtgcctgctggacgacgacctggtgctgggcgtgtacatccacagaaccgacagactgaagagcgacttcatgatcagccaccccatggtgaagatccacgtggtggacgagcacaccggccagtacgtgaagaaggacgacagcggcagacccgtgagcagctactacgagaaggagaacgtggactacatcctgcccatcatgacccagccctacgacttcaagcagctgaagagcagactgcccgagtgggaggagcagatcgtgttcaacgagaacttcccctacctgctgagaggcagcgacgagagccccaaggtgatcctgttcttcgagatcctggacttcctgagcgtggacgagatcaagaacaacagcgaggtgcagaaccaggagtgcggcttcagaaagatcgcctgggccttcctgaagctgctgggcgccaacggcaacgccaacatcaacagcaagctgagactgcagctgtactacccccccaccaagcccagaagccccctgagcgtggtggaggccttcgagtggtggagcaagtgccccagaaaccactaccccagcaccctgtacgtgaccgtgagaggcctgaaggtgcccgactgcatcaagcccagctacagaagcatgatggccctgcaggaggagaagggcaagcccgtgcactgcgagagacaccacgagagcagcagcgtggacaccgagcccggcctggaggagagcaaggaggtgatcaagtggaagagactgcccggccaggcctgcagaatccccaacaagcacctgttcagcctgaacgccggcgagagaggctgcttctgcctggacttcagccacaacggcagaatcctggccgccgcctgcgccagcagagacggctaccccatcatcctgtacgagatccccagcggcagattcatgagagagctgtgcggccacctgaacatcatctacgacctgagctggagcaaggacgaccactacatcctgaccagcagcagcgacggcaccgccagaatctggaagaacgagatcaacaacaccaacaccttcagagtgctgccccaccccagcttcgtgtacaccgccaagttccaccccgccgtgagagagctggtggtgaccggctgctacgacagcatgatcagaatctggaaggtggagatgagagaggacagcgccatcctggtgagacagttcgacgtgcacaagagcttcatcaacagcctgtgcttcgacaccgagggccaccacatgtacagcggcgactgcaccggcgtgatcgtggtgtggaacacctacgtgaagatcaacgacctggagcacagcgtgcaccactggaccatcaacaaggagatcaaggagaccgagttcaagggcatccccatcagctacctggagatccaccccaacggcaagagactgctgatccacaccaaggacagcaccctgagaatcatggacctgagaatcctggtggccagaaagttcgtgggcgccgccaactacagagagaagatccacagcaccctgaccccctgcggcaccttcctgttcgccggcagcgaggacggcatcgtgtacgtgtggaaccccgagaccggcgagcaggtggccatgtacagcgacctgcccttcaagagccccatcagagacatcagctaccaccccttcgagaacatggtggccttctgcgccttcggccagaacgagcccatcctgctgtacatctacgacttccacgtggcccagcaggaggccgagatgttcaagagatacaacggcaccttccccctgcccggcatccaccagagccaggacgccctgtgcacctgccccaagctgccccaccagggcagcttccagatcgacgagttcgtgcacaccgagagcagcagcaccaagatgcagctggtgaagcagagactggagaccgtgaccgaggtgatcagaagctgcgccgccaaggtgaacaagaacctgagcttcaccagcccccccgccgtgagcagccagcagagcaagctgaagcagagcaacatgctgaccgcccaggagatcctgcaccagttcggcttcacccagaccggcatcatcagcatcgagagaaagccctgcaaccaccaggtggacaccgcccccaccgtggtggccctgtacgactacaccgccaacagaagcgacgagctgaccatccacagaggcgacatcatcagagtgttcttcaaggacaacgaggactggtggtacggcagcatcggcaagggccaggagggctacttccccgccaaccacgtggccagcgagaccctgtaccaggagctgccccccgagatcaaggagagaagcccccccctgagccccgaggagaagaccaagatcgagaagagccccgccccccagaagcagagcatcaacaagaacaagagccaggacttcagactgggcagcgagagcatgacccacagcgagatgagaaaggagcagagccacgaggaccagggccacatcatggacaccagaatgagaaagaacaagcaggccggcagaaaggtgaccctgatcgagtag

SEQ ID NO: 71316 - DNA, 3162 bp, synthetic construct
  misc_feature 1..3162: note = Description of Artificial Sequence: Synthetic coding sequence
  source 1..3162: mol_type = other DNA
atgcccaccgccgagagcgaggccaaggtgaagaccaaggtgagattcgaggagctgctgaagacccacagcgacctgatgagagagaagaagaagctgaagaagaagctggtgagaagcgaggagaacatcagccccgacaccatcagaagcaacctgcactacatgaaggagaccaccagcgacgaccccgacaccatcagaagcaacctgccccacatcaaggagaccaccagcgacgacgtgagcgccgccaacaccaacaacctgaagaagagcaccagagtgaccaagaacaagctgagaaacacccagctggccaccgagaaccccaacggcgacgccagcgtggaggaggacaagcagggcaagcccaacaagaaggtgatcaagaccgtgccccagctgaccacccaggacctgaagcccgagacccccgagaacaaggtggacagcacccaccagaagacccacaccaagccccagcccggcgtggaccaccagaagagcgagaaggccaacgagggcagagaggagaccgacctggaggaggacgaggagctgatgcaggcctaccagtgccacgtgaccgaggagatggccaaggagatcaagagaaagatcagaaagaagctgaaggagcagctgacctacttccccagcgacaccctgttccacgacgacaagctgagcagcgagaagagaaagaagaagaaggaggtgcccgtgttcagcaaggccgagaccagcaccctgaccatcagcggcgacaccgtggagggcgagcagaagaaggagagcagcgtgagaagcgtgagcagcgacagccaccaggacgacgagatcagcagcatggagcagagcaccgaggacagcatgcaggacgacaccaagcccaagcccaagaagaccaagaagaagaccaaggccgtggccgacaacaacgaggacgtggacggcgacggcgtgcacgagatcaccagcagagacagccccgtgtaccccaagtgcctgctggacgacgacctggtgctgggcgtgtacatccacagaaccgacagactgaagagcgacttcatgatcagccaccccatggtgaagatccacgtggtggacgagcacaccggccagtacgtgaagaaggacgacagcggcagacccgtgagcagctactacgagaaggagaacgtggactacatcctgcccatcatgacccagccctacgacttcaagcagctgaagagcagactgcccgagtgggaggagcagatcgtgttcaacgagaacttcccctacctgctgagaggcagcgacgagagccccaaggtgatcctgttcttcgagatcctggacttcctgagcgtggacgagatcaagaacaacagcgaggtgcagaaccaggagtgcggcttcagaaagatcgcctgggccttcctgaagctgctgggcgccaacggcaacgccaacatcaacagcaagctgagactgcagctgtactacccccccaccaagcccagaagccccctgagcgtggtggaggccttcgagtggtggagcaagtgccccagaaaccactaccccagcaccctgtacgtgaccgtgagaggcctgaaggtgcccgactgcatcaagcccagctacagaagcatgatggccctgcaggaggagaagggcaagcccgtgcactgcgagagacaccacgagagcagcagcgtggacaccgagcccggcctggaggagagcaaggaggtgatcaagtggaagagactgcccggccaggcctgcagaatccccaacaagcacctgttcagcctgaacgccggcgagagaggctgcttctgcctggacttcagccacaacggcagaatcctggccgccgcctgcgccagcagagacggctaccccatcatcctgtacgagatccccagcggcagattcatgagagagctgtgcggccacctgaacatcatctacgacctgagctggagcaaggacgaccactacatcctgaccagcagcagcgacggcaccgccagaatctggaagaacgagatcaacaacaccaacaccttcagagtgctgccccaccccagcttcgtgtacaccgccaagttccaccccgccgtgagagagctggtggtgaccggctgctacgacagcatgatcagaatctggaaggtggagatgagagaggacagcgccatcctggtgagacagttcgacgtgcacaagagcttcatcaacagcctgtgcttcgacaccgagggccaccacatgtacagcggcgactgcaccggcgtgatcgtggtgtggaacacctacgtgaagatcaacgacctggagcacagcgtgcaccactggaccatcaacaaggagatcaaggagaccgagttcaagggcatccccatcagctacctggagatccaccccaacggcaagagactgctgatccacaccaaggacagcaccctgagaatcatggacctgagaatcctggtggccagaaagttcgtgggcgccgccaactacagagagaagatccacagcaccctgaccccctgcggcaccttcctgttcgccggcagcgaggacggcatcgtgtacgtgtggaaccccgagaccggcgagcaggtggccatgtacagcgacctgcccttcaagagccccatcagagacatcagctaccaccccttcgagaacatggtggccttctgcgccttcggccagaacgagcccatcctgctgtacatctacgacttccacgtggcccagcaggaggccgagatgttcaagagatacaacggcaccttccccctgcccggcatccaccagagccaggacgccctgtgcacctgccccaagctgccccaccagggcagcttccagatcgacgagttcgtgcacaccgagagcagcagcaccaagatgcagctggtgaagcagagactggagaccgtgaccgaggtgatcagaagctgcgccgccaaggtgaacaagaacctgagcttcaccagcccccccgccgtgagcagccagcagagcaagctgaagcagagcaacatgctgaccgcccaggagatcctgcaccagttcggcttcacccagaccgacagccacttcgccgagttcaacacctgcatcctgtggtggaagaagcactag

SEQ ID NO: 71317 - DNA, 165 bp, synthetic construct
  misc_feature 1..165: note = Description of Artificial Sequence: Synthetic coding sequence
  source 1..165: mol_type = other DNA
atgcccaccgccgagagcgaggccaaggtgaagaccaaggtgagattcgaggagctgctgaagacccacagcgacctgatgagagagaagaagaagctgaagaagaagctggtgagaagcgaggagaacatcagcaaccaggagaagagcatggccgtgtggtag

SEQ ID NO: 71318 - DNA, 3591 bp, synthetic construct; identical to SEQ ID NO: 71315
  misc_feature 1..3591: note = Description of Artificial Sequence: Synthetic coding sequence
  source 1..3591: mol_type = other DNA

SEQ ID NO: 71319 - DNA, 3162 bp, synthetic construct
  misc_feature 1..3162: note = Description of Artificial Sequence: Synthetic coding sequence
  source 1..3162: mol_type = other DNA
atgcccaccaccgagagcgaggccaaggtgaagaccaaggtgagattcgaggagctgctgaagacccacagcgacctgatgagagagaagaagaagctgaagaagaagctggtgagaagcgaggagaacatcagccccgacaccatcagaagcaacctgcactacatgaaggagaccaccagcgacgaccccgacaccatcagaagcaacctgccccacatcaaggagaccaccagcgacgacgtgagcgccgccaacaccaacaacctgaagaagagcaccagagtgaccaagaacaagctgagaaacacccagctggccaccgagaaccccaacggcgacgccagcgtggaggaggacaagcagggcaagcccaacaagaaggtgatcaagaccgtgccccagctgaccacccaggacctgaagcccgagacccccgagaacaaggtggacagcacccaccagaagacccacaccaagccccagcccggcgtggaccaccagaagagcgagaaggccaacgagggcagagaggagaccgacctggaggaggacgaggagctgatgcaggcctaccagtgccacgtgaccgaggagatggccaaggagatcaagagaaagatcagaaagaagctgaaggagcagctgacctacttccccagcgacaccctgttccacgacgacaagctgagcagcgagaagagaaagaagaagaaggaggtgcccgtgttcagcaaggccgagaccagcaccctgaccatcagcggcgacaccgtggagggcgagcagaagaaggagagcagcgtgagaagcgtgagcagcgacagccaccaggacgacgagatcagcagcatggagcagagcaccgaggacagcatgcaggacgacaccaagcccaagcccaagaagaccaagaagaagaccaaggccgtggccgacaacaacgaggacgtggacggcgacggcgtgcacgagatcaccagcagagacagccccgtgtaccccaagtgcctgctggacgacgacctggtgctgggcgtgtacatccacagaaccgacagactgaagagcgacttcatgatcagccaccccatggtgaagatccacgtggtggacgagcacaccggccagtacgtgaagaaggacgacagcggcagacccgtgagcagctactacgagaaggagaacgtggactacatcctgcccatcatgacccagccctacgacttcaagcagctgaagagcagactgcccgagtgggaggagcagatcgtgttcaacgagaacttcccctacctgctgagaggcagcgacgagagccccaaggtgatcctgttcttcgagatcctggacttcctgagcgtggacgagatcaagaacaacagcgaggtgcagaaccaggagtgcggcttcagaaagatcgcctgggccttcctgaagctgctgggcgccaacggcaacgccaacatcaacagcaagctgagactgcagctgtactacccccccaccaagcccagaagccccctgagcgtggtggaggccttcgagtggtggagcaagtgccccagaaaccactaccccagcaccctgtacgtgaccgtgagaggcctgaaggtgcccgactgcatcaagcccagctacagaagcatgatggccctgcaggaggagaagggcaagcccgtgcactgcgagagacaccacgagagcagcagcgtggacaccgagcccggcctggaggagagcaaggaggtgatcaagtggaagagactgcccggccaggcctgcagaatccccaacaagcacctgttcagcctgaacgccggcgagagaggctgcttctgcctggacttcagccacaacggcagaatcctggccgccgcctgcgccagcagagacggctaccccatcatcctgtacgagatccccagcggcagattcatgagagagctgtgcggccacctgaacatcatctacgacctgagctggagcaaggacgaccactacatcctgaccagcagcagcgacggcaccgccagaatctggaagaacgagatcaacaacaccaacaccttcagagtgctgccccaccccagcttcgtgtacaccgccaagttccaccccgccgtgagagagctggtggtgaccggctgctacgacagcatgatcagaatctggaaggtggagatgagagaggacagcgccatcctggtgagacagttcgacgtgcacaagagcttcatcaacagcctgtgcttcgacaccgagggccaccacatgtacagcggcgactgcaccggcgtgatcgtggtgtggaacacctacgtgaagatcaacgacctggagcacagcgtgcaccactggaccatcaacaaggagatcaaggagaccgagttcaagggcatccccatcagctacctggagatccaccccaacggcaagagactgctgatccacaccaaggacagcaccctgagaatcatggacctgagaatcctggtggccagaaagttcgtgggcgccgccaactacagagagaagatccacagcaccctgaccccctgcggcaccttcctgttcgccggcagcgaggacggcatcgtgtacgtgtggaaccccgagaccggcgagcaggtggccatgtacagcgacctgcccttcaagagccccatcagagacatcagctaccaccccttcgagaacatggtggccttctgcgccttcggccagaacgagcccatcctgctgtacatctacgacttccacgtggcccagcaggaggccgagatgttcaagagatacaacggcaccttccccctgcccggcatccaccagagccaggacgccctgtgcacctgccccaagctgccccaccagggcagcttccagatcgacgagttcgtgcacaccgagagcagcagcaccaagatgcagctggtgaagcagagactggagaccgtgaccgaggtgatcagaagctgcgccgccaaggtgaacaagaacctgagcttcaccagcccccccgccgtgagcagccagcagagcaagctgaagcagagcaacatgctgaccgcccaggagatcctgcaccagttcggcttcacccagaccgacagccacttcgccgagttcaacacctgcatcctgtggtggaagaagcactag

SEQ ID NO: 71320 - DNA, 1497 bp, synthetic construct
  misc_feature 1..1497: note = Description of Artificial Sequence: Synthetic coding sequence
  source 1..1497: mol_type = other DNA
atgagagagctgtgcggccacctgaacatcatctacgacctgagctggagcaaggacgaccactacatcctgaccagcagcagcgacggcaccgccagaatctggaagaacgagatcaacaacaccaacaccttcagagtgctgccccaccccagcttcgtgtacaccgccaagttccaccccgccgtgagagagctggtggtgaccggctgctacgacagcatgatcagaatctggaaggtggagatgagagaggacagcgccatcctggtgagacagttcgacgtgcacaagagcttcatcaacagcctgtgcttcgacaccgagggccaccacatgtacagcggcgactgcaccggcgtgatcgtggtgtggaacacctacgtgaagatcaacgacctggagcacagcgtgcaccactggaccatcaacaaggagatcaaggagaccgagttcaagggcatccccatcagctacctggagatccaccccaacggcaagagactgctgatccacaccaaggacagcaccctgagaatcatggacctgagaatcctggtggccagaaagttcgtgggcgccgccaactacagagagaagatccacagcaccctgaccccctgcggcaccttcctgttcgccggcagcgaggacggcatcgtgtacgtgtggaaccccgagaccggcgagcaggtggccatgtacagcgacctgcccttcaagagccccatcagagacatcagctaccaccccttcgagaacatggtggccttctgcgccttcggccagaacgagcccatcctgctgtacatctacgacttccacgtggcccagcaggaggccgagatgttcaagagatacaacggcaccttccccctgcccggcatccaccagagccaggacgccctgtgcacctgccccaagctgccccaccagggcagcttccagatcgacgagttcgtgcacaccgagagcagcagcaccaagatgcagctggtgaagcagagactggagaccgtgaccgaggtgatcagaagctgcgccgccaaggtgaacaagaacctgagcttcaccagcccccccgccgtgagcagccagcagagcaagctgaagcagagcaacatgctgaccgcccaggagatcctgcaccagttcggcttcacccagaccggcatcatcagcatcgagagaaagccctgcaaccaccaggtggacaccgcccccaccgtggtggccctgtacgactacaccgccaacagaagcgacgagctgaccatccacagaggcgacatcatcagagtgttcttcaaggacaacgaggactggtggtacggcagcatcggcaagggccaggagggctacttccccgccaaccacgtggccagcgagaccctgtaccaggagctgccccccgagatcaaggagagaagcccccccctgagccccgaggagaagaccaagatcgagaagagccccgccccccagaaggtgaagtag

SEQ ID NO: 71321 - DNA, 3591 bp, synthetic construct; identical to SEQ ID NO: 71315
  misc_feature 1..3591: note = Description of Artificial Sequence: Synthetic coding sequence
  source 1..3591: mol_type = other DNA

SEQ ID NO: 71322 - DNA, 1218 bp, synthetic construct
  misc_feature 1..1218: note = Description of Artificial Sequence: Synthetic coding sequence
  source 1..1218: mol_type = other DNA
atgctgagcagcttcctgagcccccagaacggcacctgggccgacaccttcagcctgctgctggccctggccgtggccctgtacctgggctactactgggcctgcgtgctgcagagacccagactggtggccggcccccagttcctggccttcctggagccccactgcagcatcaccaccgagaccttctaccccaccctgtggtgcttcgagggcagactgcagagcatcttccaggtgctgctgcagagccagcccctggtgctgtaccagagcgacatcctgcagacccccgacggcggccagctgctgctggactgggccaagcagcccgacagcagccaggaccccgaccccaccacccagcccatcgtgctgctgctgcccggcatcaccggcagcagccaggacacctacgtgctgcacctggtgaaccaggccctgagagacggctaccaggccgtggtgttcaacaacagaggctgcagaggcgaggagctgagaacccacagagccttctgcgccagcaacaccgaggacctggagaccgtggtgaaccacatcaagcacagatacccccaggcccccctgctggccgtgggcatcagcttcggcggcatcctggtgctgaaccacctggcccaggccagacaggccgccggcctggtggccgccctgaccctgagcgcctgctgggacagcttcgagaccaccagaagcctggagacccccctgaacagcctgctgttcaaccagcccctgaccgccggcctgtgccagctggtggagagaaacagaaaggtgatcgagaaggtggtggacatcgacttcgtgctgcaggccagaaccatcagacagttcgacgagagatacaccagcgtggccttcggctaccaggactgcgtgacctactacaaggccgccagccccagaaccaagatcgacgccatcagaatccccgtgctgtacctgagcgccgccgacgaccccttcagccccgtgtgcgccctgcccatccaggccgcccagcacagcccctacgtggccctgctgatcaccgccagaggcggccacatcggcttcctggagggcctgctgccctggcagcactggtacatgagcagactgctgcaccagtacgccaaggccatcttccaggaccccgagggcctgcccgacctgagagccctgctgcccagcgaggacagaaacagctag

SEQ ID NO: 71323 - DNA, 1197 bp, synthetic construct
  misc_feature 1..1197: note = Description of Artificial Sequence: Synthetic coding sequence
  source 1..1197: mol_type = other DNA
atgagaaagagaaccgagcccgtggccctggagcacgagagatgcgccgccgccggcagcagcagcagcggcagcgccgccgccgccctggacgccgactgcagactgaagcagaacctgagactgaccggccccgccgccgccgagcccagatgcgccgccgacgccggcatgaagagagccctgggcagaagaaagggcgtgtggctgagactgagaaagatcctgttctgcgtgctgggcctgtacatcgccatccccttcctgatcaagctgtgccccggcatccaggccaagctgatcttcctgaacttcgtgagagtgccctacttcatcgacctgaagaagccccaggaccagggcctgaaccacacctgcaactactacctgcagcccgaggaggacgtgaccatcggcgtgtggcacaccgtgcccgccgtgtggtggaagaacgcccagggcaaggaccagatgtggtacgaggacgccctggccagcagccaccccatcatcctgtacctgcacggcaacgccggcaccagaggcggcgaccacagagtggagctgtacaaggtgctgagcagcctgggctaccacgtggtgaccttcgactacagaggctggggcgacagcgtgggcacccccagcgagagaggcatgacctacgacgccctgcacgtgttcgactggatcaaggccagaagcggcgacaaccccgtgtacatctggggccacagcctgggcaccggcgtggccaccaacctggtgagaagactgtgcgagagagagaccccccccgacgccctgatcctggagagccccttcaccaacatcagagaggaggccaagagccaccccttcagcgtgatctacagatacttccccggcttcgactggttcttcctggaccccatcaccagcagcggcatcaagttcgccaacgacgagaacgtgaagcacatcagctgccccctgctgatcctgcacgccgaggacgaccccgtggtgcccttccagctgggcagaaagctgtacagcatcgccgcccccgccagaagcttcagagacttcaaggtgcagttcgtgcccttccacagcgacctgggctacagacacaagtacatctacaagagccccgagctgcccagaatcctgagagagttcctgggcaagagcgagcccgagcaccagcactag

SEQ ID NO: 71324 - DNA, 1215 bp, synthetic construct
  misc_feature 1..1215: note = Description of Artificial Sequence: Synthetic coding sequence
  source 1..1215: mol_type = other DNA
atgagaaagagaaccgagcccgtggccctggagcacgagagatgcgccgccgccggcagcagcagcagcggcagcgccgccgccgccctggacgccgactgcagactgaagcagaacctgagactgaccggccccgccgccgccgagcccagatgcgccgccgacgccggcatgaagagagccctgggcagaagaaagggcgtgtggctgagactgagaaagatcctgttctgcgtgctgggcctgtacatcgccatccccttcctgatcaagctgtgccccggcatccaggccaagctgatcttcctgaacttcgtgagagtgccctacttcatcgacctgaagaagccccaggaccagggcctgaaccacacctgcaactactacctgcagcccgaggaggacgtgaccatcggcgtgtggcacaccgtgcccgccgtgtggtggaagaacgcccagggcaaggaccagatgtggtacgaggacgccctggccagcagccaccccatcatcctgtacctgcacggcaacgccggcaccagaggcggcgaccacagagtggagctgtacaaggtgctgagcagcctgggctaccacgtggtgaccttcgactacagaggctggggcgacagcgtgggcacccccagcgagagaggcatgacctacgacgccctgcacgtgttcgactggatcaaggccagaagcggcgacaaccccgtgtacatctggggccacagcctgggcaccggcgtggccaccaacctggtgagaagactgtgcgagagagagaccccccccgacgccctgatcctggagagccccttcaccaacatcagagaggaggccaagagccaccccttcagcgtgatctacagatacttccccggcttcgactggttcttcctggaccccatcaccagcagcggcatcaagttcgccaacgacgagaacgtgaagcacatcagctgccccctgctgatcctgcacgccgaggacgaccccgtggtgcccttccagctgggcagaaagctgtacagcatcgccgcccccgccagaagcttcagagacttcaaggtgcagttcgtgcccttccacagcgacctgggctacagacacaagtacatctacaagagccccgagctgcccagaatcctgagaccccagcagggccccggcagcagccccgaccccagcatgtggagcgagctggtgtag

SEQ ID NO: 71325 - DNA, 564 bp, synthetic construct
  misc_feature 1..564: note = Description of Artificial Sequence: Synthetic coding sequence
  source 1..564: mol_type = other DNA
atgagcggcggcggccacggcggcgtgtgcttcctgtgctgcatcctgctgcagggcagaaagggcgtgtggctgagactgagaaagatcctgttctgcgtgctgggcctgtacatcgccatccccttcctgatcaagctgtgccccggcatccaggccaagctgatcttcctgaacttcgtgagagtgccctacttcatcgacctgaagaagccccaggaccagggcctgaaccacacctgcaactactacctgcagcccgaggaggacgtgaccatcggcgtgtggcacaccgtgcccgccgtgtggtggaagaacgcccagggcaaggaccagatgtggtacgaggacgccctggccagcagccaccccatcatcctgtacctgcacggcaacgccggcaccagaggcggcgaccacagagtggagctgtacaaggtgctgagcagcctgggctaccacgtggtgaccttcgactacagaggctggggcgacagcgtgggcacccccagcgagagaggcatgacctacgacgccctgcacgtgttcgactggatcaagtag

SEQ ID NO: 71326 - DNA, 1083 bp, synthetic construct
  misc_feature 1..1083: note = Description of Artificial Sequence: Synthetic coding sequence
  source 1..1083: mol_type = other DNA
atgagaaagagaaccgagcccgtggccctggagcccagatgcgccgccgacgccggcatgaagagagccctgggcagaagaaagggcgtgtggctgagactgagaaagatcctgttctgcgtgctgggcctgtacatcgccatccccttcctgatcaagctgtgccccggcatccaggccaagctgatcttcctgaacttcgtgagagtgccctacttcatcgacctgaagaagccccaggaccagggcctgaaccacacctgcaactactacctgcagcccgaggaggacgtgaccatcggcgtgtggcacaccgtgcccgccgtgtggtggaagaacgcccagggcaaggaccagatgtggtacgaggacgccctggccagcagccaccccatcatcctgtacctgcacggcaacgccggcaccagaggcggcgaccacagagtggagctgtacaaggtgctgagcagcctgggctaccacgtggtgaccttcgactacagaggctggggcgacagcgtgggcacccccagcgagagaggcatgacctacgacgccctgcacgtgttcgactggatcaaggccagaagcggcgacaaccccgtgtacatctggggccacagcctgggcaccggcgtggccaccaacctggtgagaagactgtgcgagagagagaccccccccgacgccctgatcctggagagccccttcaccaacatcagagaggaggccaagagccaccccttcagcgtgatctacagatacttccccggcttcgactggttcttcctggaccccatcaccagcagcggcatcaagttcgccaacgacgagaacgtgaagcacatcagctgccccctgctgatcctgcacgccgaggacgaccccgtggtgcccttccagctgggcagaaagctgtacagcatcgccgcccccgccagaagcttcagagacttcaaggtgcagttcgtgcccttccacagcgacctgggctacagacacaagtacatctacaagagccccgagctgcccagaatcctgagagagttcctgggcaagagcgagcccgagcaccagcactag

SEQ ID NO: 71327 - DNA, 1020 bp, synthetic construct
  misc_feature 1..1020: note = Description of Artificial Sequence: Synthetic coding sequence
  source 1..1020: mol_type = other DNA
atgctgtaccccggcagcgtgtacctgctgcagaaggccctgatgcccgtgctgctgcagggccaggccagactggtggaggagtgcaacggcagaagagccaagctgctggcctgcgacggcaacgagatcgacaccatgttcgtggacagaagaggcaccgccgagccccagggccagaagctggtgatctgctgcgagggcaacgccggcttctacgaggtgggctgcgtgagcacccccctggaggccggctacagcgtgctgggctggaaccaccccggcttcgccggcagcaccggcgtgcccttcccccagaacgaggccaacgccatggacgtggtggtgcagttcgccatccacagactgggcttccagccccaggacatcatcatctacgcctggagcatcggcggcttcaccgccacctgggccgccatgagctaccccgacgtgagcgccatgatcctggacgccagcttcgacgacctggtgcccctggccctgaaggtgatgcccgacagctggagaggcctggtgaccagaaccgtgagacagcacctgaacctgaacaacgccgagcagctgtgcagataccagggccccgtgctgctgatcagaagaaccaaggacgagatcatcaccaccaccgtgcccgaggacatcatgagcaacagaggcaacgacctgctgctgaagctgctgcagcacagataccccagagtgatggccgaggagggcctgagagtggtgagacagtggctggaggccagcagccagctggaggaggccagcatctacagcagatgggaggtggaggaggactggtgcctgagcgtgctgagaagctaccaggccgagcacggccccgacttcccctggagcgtgggcgaggacatgagcgccgacggcagaagacagctggccctgttcctggccagaaagcacctgcacaacttcgaggccacccactgcacccccctgcccgcccagaacttccagatgccctggcacctgtag

SEQ ID NO: 71328 - DNA, 1677 bp, synthetic construct
  misc_feature 1..1677: note = Description of Artificial Sequence: Synthetic coding sequence
  source 1..1677: mol_type = other DNA
atggccaagctgctgagctgcgtgctgggccccagactgtacaagatctacagagagagagacagcgagagagcccccgccagcgtgcccgagacccccaccgccgtgaccgccccccacagcagcagctgggacacctactaccagcccagagccctggagaagcacgccgacagcatcctggccctggccagcgtgttctggagcatcagctactacagcagccccttcgccttcttctacctgtacagaaagggctacctgagcctgagcaaggtggtgcccttcagccactacgccggcaccctgctgctgctgctggccggcgtggcctgcctgagaggcatcggcagatggaccaacccccagtacagacagttcatcaccatcctggaggccacccacagaaaccagagcagcgagaacaagagacagctggccaactacaacttcgacttcagaagctggcccgtggacttccactgggaggagcccagcagcagaaaggagagcagaggcggccccagcagaagaggcgtggccctgctgagacccgagcccctgcacagaggcaccgccgacaccctgctgaacagagtgaagaagctgccctgccagatcaccagctacctggtggcccacaccctgggcagaagaatgctgtaccccggcagcgtgtacctgctgcagaaggccctgatgcccgtgctgctgcagggccaggccagactggtggaggagtgcaacggcagaagagccaagctgctggcctgcgacggcaacgagatcgacaccatgttcgtggacagaagaggcaccgccgagccccagggccagaagctggtgatctgctgcgagggcaacgccggcttctacgaggtgggctgcgtgagcacccccctggaggccggctacagcgtgctgggctggaaccaccccggcttcgccggcagcaccggcgtgcccttcccccagaacgaggccaacgccatggacgtggtggtgcagttcgccatccacagactgggcttccagccccaggacatcatcatctacgcctggagcatcggcggcttcaccgccacctgggccgccatgagctaccccgacgtgagcgccatgatcctggacgccagcttcgacgacctggtgcccctggccctgaaggtgatgcccgacagctggagaggcctggtgaccagaaccgtgagacagcacctgaacctgaacaacgccgagcagctgtgcagataccagggccccgtgctgctgatcagaagaaccaaggacgagatcatcaccaccaccgtgcccgaggacatcatgagcaacagaggcaacgacctgctgctgaagctgctgcagcacagataccccagagtgatggccgaggagggcctgagagtggtgagacagtggctggaggccagcagccagctggaggaggccagcatctacagcagatgggaggtggaggaggactggtgcctgagcgtgctgagaagctaccaggccgagcacggccccgacttcccctggagcgtgggcgaggacatgagcgccgacggcagaagacagctggccctgttcctggccagaaagcacctgcacaacttcgaggccacccactgcacccccctgcccgcccagaacttccagatgccctggcacctgtag

SEQ ID NO: 71329 - DNA, 1806 bp, synthetic construct
  misc_feature 1..1806: note = Description of Artificial Sequence: Synthetic coding sequence
  source 1..1806: mol_type = other DNA
atgagccagctggccagaagaagaagcagatacggcctgaccagcagagcccacaacaccagcgaggccggcagagccggccccgccggcggccccgccgccggcagagccgccgccagagccggcgccatggccaagctgctgagctgcgtgctgggccccagactgtacaagatctacagagagagagacagcgagagagcccccgccagcgtgcccgagacccccaccgccgtgaccgccccccacagcagcagctgggacacctactaccagcccagagccctggagaagcacgccgacagcatcctggccctggccagcgtgttctggagcatcagctactacagcagccccttcgccttcttctacctgtacagaaagggctacctgagcctgagcaaggtggtgcccttcagccactacgccggcaccctgctgctgctgctggccggcgtggcctgcctgagaggcatcggcagatggaccaacccccagtacagacagttcatcaccatcctggaggccacccacagaaaccagagcagcgagaacaagagacagctggccaactacaacttcgacttcagaagctggcccgtggacttccactgggaggagcccagcagcagaaaggagagcagaggcggccccagcagaagaggcgtggccctgctgagacccgagcccctgcacagaggcaccgccgacaccctgctgaacagagtgaagaagctgccctgccagatcaccagctacctggtggcccacaccctgggcagaagaatgctgtaccccggcagcgtgtacctgctgcagaaggccctgatgcccgtgctgctgcagggccaggccagactggtggaggagtgcaacggcagaagagccaagctgctggcctgcgacggcaacgagatcgacaccatgttcgtggacagaagaggcaccgccgagccccagggccagaagctggtgatctgctgcgagggcaacgccggcttctacgaggtgggctgcgtgagcacccccctggaggccggctacagcgtgctgggctggaaccaccccggcttcgccggcagcaccggcgtgcccttcccccagaacgaggccaacgccatggacgtggtggtgcagttcgccatccacagactgggcttccagccccaggacatcatcatctacgcctggagcatcggcggcttcaccgccacctgggccgccatgagctaccccgacgtgagcgccatgatcctggacgccagcttcgacgacctggtgcccctggccctgaaggtgatgcccgacagctggagaggcctggtgaccagaaccgtgagacagcacctgaacctgaacaacgccgagcagctgtgcagataccagggccccgtgctgctgatcagaagaaccaaggacgagatcatcaccaccaccgtgcccgaggacatcatgagcaacagaggcaacgacctgctgctgaagctgctgcagcacagataccccagagtgatggccgaggagggcctgagagtggtgagacagtggctggaggccagcagccagctggaggaggccagcatctacagcagatgggaggtggaggaggactggtgcctgagcgtgctgagaagctaccaggccgagcacggccccgacttcccctggagcgtgggcgaggacatgagcgccgacggcagaagacagctggccctgttcctggccagaaagcacctgcacaacttcgaggccacccactgcacccccctgcccgcccagaacttccagatgccctggcacctgtag

SEQ ID NO: 71330 - DNA, 795 bp, synthetic construct
  misc_feature 1..795: note = Description of Artificial Sequence: Synthetic coding sequence
  source 1..795: mol_type = other DNA
atgcccccccccgccctgttcctgagcagcctgtaccccagactggagttccagaacgacttctacagaagctgcatcagaagaagcagcccccagcccccccccaacctggcctggagacccgagagcctgtacagcggcgagctggccggcggcggctacctgagcctgagcaaggtggtgcccttcagccactacgccggcaccctgctgctgctgctggccggcgtggcctgcctgagaggcatcggcagatggaccaacccccagtacagacagttcatcaccatcctggaggccacccacagaaaccagagcagcgagaacaagagacagctggccaactacaacttcgacttcagaagctggcccgtggacttccactgggaggagcccagcagcagaaaggagagcagaggcggccccagcagaagaggcgtggccctgctgagacccgagcccctgcacagaggcaccgccgacaccctgctgaacagagtgaagaagctgccctgccagatcaccagctacctggtggcccacaccctgggcagaagaatgctgtaccccggcagcgtgtacctgctgcagaaggccctgatgcccgtgctgctgcagggccaggccagactggtggaggagtgcaacggcagaagagccaagctgctggcctgcgacggcaacgagatcgacaccatgttcgtggacagaagaggcaccgccgagccccagggccagaagctggtgatctgctgcgagggcaacgccggcttctacgaggtgggctgcgtgtag

SEQ ID NO: 71331 - DNA, 795 bp, synthetic construct; identical to SEQ ID NO: 71330
  misc_feature 1..795: note = Description of Artificial Sequence: Synthetic coding sequence
  source 1..795: mol_type = other DNA

SEQ ID NO: 71332 - DNA, 795 bp, synthetic construct; identical to SEQ ID NO: 71330
  misc_feature 1..795: note = Description of Artificial Sequence: Synthetic coding sequence
  source 1..795: mol_type = other DNA

SEQ ID NO: 71333 - DNA, 1806 bp, synthetic construct; identical to SEQ ID NO: 71329
  misc_feature 1..1806: note = Description of Artificial Sequence: Synthetic coding sequence
  source 1..1806: mol_type = other DNA

SEQ ID NO: 71334 - DNA, 795 bp, synthetic construct; identical to SEQ ID NO: 71330
  misc_feature 1..795: note = Description of Artificial Sequence: Synthetic coding sequence
  source 1..795: mol_type = other DNA

SEQ ID NO: 71335 - DNA, 1806 bp, synthetic construct; identical to SEQ ID NO: 71329
  misc_feature 1..1806: note = Description of Artificial Sequence: Synthetic coding sequence
  source 1..1806: mol_type = other DNA

SEQ ID NO: 71336 - DNA, 795 bp, synthetic construct; identical to SEQ ID NO: 71330
  misc_feature 1..795: note = Description of Artificial Sequence: Synthetic coding sequence
  source 1..795: mol_type = other DNA

SEQ ID NO: 71337 - DNA, 1806 bp, synthetic construct; identical to SEQ ID NO: 71329
  misc_feature 1..1806: note = Description of Artificial Sequence: Synthetic coding sequence
  source 1..1806: mol_type = other DNA

SEQ ID NO: 71338 - DNA, 795 bp, synthetic construct; identical to SEQ ID NO: 71330
  misc_feature 1..795: note = Description of Artificial Sequence: Synthetic coding sequence
  source 1..795: mol_type = other DNA

SEQ ID NO: 71339 - DNA, 1677 bp, synthetic construct; identical to SEQ ID NO: 71328
  misc_feature 1..1677: note = Description of Artificial Sequence: Synthetic coding sequence
  source 1..1677: mol_type = other DNA

SEQ ID NO: 71340 - DNA, 1806 bp, synthetic construct; identical to SEQ ID NO: 71329
  misc_feature 1..1806: note = Description of Artificial Sequence: Synthetic coding sequence
  source 1..1806: mol_type = other DNA

SEQ ID NO: 71341 - DNA, 438 bp, synthetic construct
  misc_feature 1..438: note = Description of Artificial Sequence: Synthetic coding sequence
  source 1..438: mol_type = other DNA
atgctgggccactgctgctacttctggcaggtgtggcccgccagcgaggccctggccgccggccccacccccagcaccggcagcagcagccccagctggaagcagcacatcggcaccagcctgcagaagaccagaggcagcctgcccaccaccaccctgaccagcggcgccggccagagcaccagcaccggcaagaaccccgccgccggcagaagcctggagggcgccctgcccgccggcgtgtggccctgcttcgcccagagcccctgcaccggcggccagcagacccccagcagcaccggcctgagaagctgcctggtgagaagccccggcggcaagcagcagagaggcgaggcccactggggcggcggcgccatcagcggcgtgctgtgggagtgggccctgcactgcaagatcgccgtgacccactgggcctag

SEQ ID NO: 71342 - DNA, 1677 bp, synthetic construct; identical to SEQ ID NO: 71328
  misc_feature 1..1677: note = Description of Artificial Sequence: Synthetic coding sequence
  source 1..1677: mol_type = other DNA

SEQ ID NO: 71343 - DNA, 1677 bp, synthetic construct; identical to SEQ ID NO: 71328
  misc_feature 1..1677: note = Description of Artificial Sequence: Synthetic coding sequence
  source 1..1677: mol_type = other DNA

SEQ ID NO: 71344 - DNA, 1677 bp, synthetic construct; identical to SEQ ID NO: 71328
  misc_feature 1..1677: note = Description of Artificial Sequence: Synthetic coding sequence
  source 1..1677: mol_type = other DNA

SEQ ID NO: 71345 - DNA, 438 bp, synthetic construct; identical to SEQ ID NO: 71341
  misc_feature 1..438: note = Description of Artificial Sequence: Synthetic coding sequence
  source 1..438: mol_type = other DNA

SEQ ID NO: 71346 - DNA, 438 bp, synthetic construct; identical to SEQ ID NO: 71341
  misc_feature 1..438: note = Description of Artificial Sequence: Synthetic coding sequence
  source 1..438: mol_type = other DNA

SEQ ID NO: 71347 - DNA, 438 bp, synthetic construct; identical to SEQ ID NO: 71341
  misc_feature 1..438: note = Description of Artificial Sequence: Synthetic coding sequence
  source 1..438: mol_type = other DNA

SEQ ID NO: 71348 - DNA, 1578 bp, synthetic construct
  misc_feature 1..1578: note = Description of Artificial Sequence: Synthetic coding sequence
  source 1..1578: mol_type = other DNA
atgcccccccccgccctgttcctgagcagcctgtaccccagactggagttccagaacgacttctacagaagctgcatcagaagaagcagcccccagcccccccccaacctggcctggagacccgagagcctgtacagcggcgagctggccggcggcggctacctgagcctgagcaaggtggtgcccttcagccactacgccggcaccctgctgctgctgctggccggcgtggcctgcctgagaggcatcggcagatggaccaacccccagtacagacagttcatcaccatcctggaggccacccacagaaaccagagcagcgagaacaagagacagctggccaactacaacttcgacttcagaagctggcccgtggacttccactgggaggagcccagcagcagaaaggagagcagaggcggccccagcagaagaggcgtggccctgctgagacccgagcccctgcacagaggcaccgccgacaccctgctgaacagagtgaagaagctgccctgccagatcaccagctacctggtggcccacaccctgggcagaagaatgctgtaccccggcagcgtgtacctgctgcagaaggccctgatgcccgtgctgctgcagggccaggccagactggtggaggagtgcaacggcagaagagccaagctgctggcctgcgacggcaacgagatcgacaccatgttcgtggacagaagaggcaccgccgagccccagggccagaagctggtgatctgctgcgagggcaacgccggcttctacgaggtgggctgcgtgagcacccccctggaggccggctacagcgtgctgggctggaaccaccccggcttcgccggcagcaccggcgtgcccttcccccagaacgaggccaacgccatggacgtggtggtgcagttcgccatccacagactgggcttccagccccaggacatcatcatctacgcctggagcatcggcggcttcaccgccacctgggccgccatgagctaccccgacgtgagcgccatgatcctggacgccagcttcgacgacctggtgcccctggccctgaaggtgatgcccgacagctggagaggcctggtgaccagaaccgtgagacagcacctgaacctgaacaacgccgagcagctgtgcagataccagggccccgtgctgctgatcagaagaaccaaggacgagatcatcaccaccaccgtgcccgaggacatcatgagcaacagaggcaacgacctgctgctgaagctgctgcagcacagataccccagagtgatggccgaggagggcctgagagtggtgagacagtggctggaggccagcagccagctggaggaggccagcatctacagcagatgggaggtggaggaggactggtgcctgagcgtgctgagaagctaccaggccgagcacggccccgacttcccctggagcgtgggcgaggacatgagcgccgacggcagaagacagctggccctgttcctggccagaaagcacctgcacaacttcgaggccacccactgcacccccctgcccgcccagaacttccagatgccctggcacctgtag

SEQ ID NO: 71349 - DNA, 1677 bp, synthetic construct; identical to SEQ ID NO: 71328
  misc_feature 1..1677: note = Description of Artificial Sequence: Synthetic coding sequence
  source 1..1677: mol_type = other DNA

SEQ ID NO: 71350 - DNA, 1578 bp, synthetic construct; identical to SEQ ID NO: 71348
  misc_feature 1..1578: note = Description of Artificial Sequence: Synthetic coding sequence
  source 1..1578: mol_type = other DNA

SEQ ID NO: 71351 - DNA, 1578 bp, synthetic construct; identical to SEQ ID NO: 71348
  misc_feature 1..1578: note = Description of Artificial Sequence: Synthetic coding sequence
  source 1..1578: mol_type = other DNA

SEQ ID NO: 71352 - DNA, 438 bp, synthetic construct; identical to SEQ ID NO: 71341
  misc_feature 1..438: note = Description of Artificial Sequence: Synthetic coding sequence
  source 1..438: mol_type = other DNA

SEQ ID NO: 71353 - DNA, 1578 bp, synthetic construct; identical to SEQ ID NO: 71348
  misc_feature 1..1578: note = Description of Artificial Sequence: Synthetic coding sequence
  source 1..1578: mol_type = other DNA

SEQ ID NO: 71354 - DNA, 1677 bp, synthetic construct; identical to SEQ ID NO: 71328
  misc_feature 1..1677: note = Description of Artificial Sequence: Synthetic coding sequence
  source 1..1677: mol_type = other DNA

SEQ ID NO: 71355 - DNA, 1578 bp, synthetic construct; identical to SEQ ID NO: 71348
  misc_feature 1..1578: note = Description of Artificial Sequence: Synthetic coding sequence
  source 1..1578: mol_type = other DNA

SEQ ID NO: 71356 - DNA, 438 bp, synthetic construct; identical to SEQ ID NO: 71341
  misc_feature 1..438: note = Description of Artificial Sequence: Synthetic coding sequence
  source 1..438: mol_type = other DNA

SEQ ID NO: 71357 - DNA, 1578 bp, synthetic construct; identical to SEQ ID NO: 71348
  misc_feature 1..1578: note = Description of Artificial Sequence: Synthetic coding sequence
  source 1..1578: mol_type = other DNA

SEQ ID NO: 71358 - DNA, 438 bp, synthetic construct; identical to SEQ ID NO: 71341
  misc_feature 1..438: note = Description of Artificial Sequence: Synthetic coding sequence
  source 1..438: mol_type = other DNA

SEQ ID NO: 71359 - DNA, 1578 bp, synthetic construct; identical to SEQ ID NO: 71348
  misc_feature 1..1578: note = Description of Artificial Sequence: Synthetic coding sequence
  source 1..1578: mol_type = other DNA

SEQ ID NO: 71360 - DNA, 1278 bp, synthetic construct
  misc_feature 1..1278: note = Description of Artificial Sequence: Synthetic coding sequence
  source 1..1278: mol_type = other DNA
atgaacgccatgctggagacccccgagctgcccgccgtgttcgacggcgtgaagctggccgccgtggccgccgtgctgtacgtgatcgtgagatgcctgaacctgaagagccccaccgccccccccgacctgtacttccaggacagcggcctgagcagattcctgctgaagagctgccccctgctgaccaaggagtacatcccccccctgatctggggcaagagcggccacatccagaccgccctgtacggcaagatgggcagagtgagaagcccccacccctacggccacagaaagttcatcaccatgagcgacggcgccaccagcaccttcgacctgttcgagcccctggccgagcactgcgtgggcgacgacatcaccatggtgatctgccccggcatcgccaaccacagcgagaagcagtacatcagaaccttcgtggactacgcccagaagaacggctacagatgcgccgtgctgaaccacctgggcgccctgcccaacatcgagctgaccagccccagaatgttcacctacggctgcacctgggagttcggcgccatggtgaactacatcaagaagacctaccccctgacccagctggtggtggtgggcttcagcctgggcggcaacatcgtgtgcaagtacctgggcgagacccaggccaaccaggagaaggtgctgtgctgcgtgagcgtgtgccagggctacagcgccctgagagcccaggagaccttcatgcagtgggaccagtgcagaagattctacaacttcctgatggccgacaacatgaagaagatcatcctgagccacagacaggccctgttcggcgaccacgtgaagaagccccagagcctggaggacaccgacctgagcagactgtacaccgccaccagcctgatgcagatcgacgacaacgtgatgagaaagttccacggctacaacagcctgaaggagtactacgaggaggagagctgcatgagatacctgcacagaatctacgtgcccctgatgctggtgaacgccgccgacgaccccctggtgcacgagagcctgctgaccatccccaagagcctgagcgagaagagagagaacgtgatgttcgtgctgcccctgcacggcggccacctgggcttcttcgagggcagcgtgctgttccccgagcccctgacctggatggacaagctggtggtggagtacgccaacgccatctgccagtgggagagaaacaagctgcagtgcagcgacaccgagcaggtggaggccgacctggagtag

SEQ ID NO: 71361 - DNA, 1278 bp, synthetic construct; identical to SEQ ID NO: 71360
  misc_feature 1..1278: note = Description of Artificial Sequence: Synthetic coding sequence
  source 1..1278: mol_type = other DNA

SEQ ID NO: 71362 - DNA, 1230 bp, synthetic construct
  misc_feature 1..1230: note = Description of Artificial Sequence: Synthetic coding sequence
  source 1..1230: mol_type = other DNA
atgcagagactggccatggacctgagaatgctgagcagagagctgagcctgtacctggagcaccaggtgagagtgggcttcttcggcagcggcgtgggcctgagcctgatcctgggcttcagcgtggcctacgccttctactacctgagcagcatcgccaagaagccccagctggtgaccggcggcgagagcttcagcagattcctgcaggaccactgccccgtggtgaccgagacctactaccccaccgtgtggtgctgggagggcagaggccagaccctgctgagacccttcatcaccagcaagccccccgtgcagtacagaaacgagctgatcaagaccgccgacggcggccagatcagcctggactggttcgacaacgacaacagcacctgctacatggacgccagcaccagacccaccatcctgctgctgcccggcctgaccggcaccagcaaggagagctacatcctgcacatgatccacctgagcgaggagctgggctacagatgcgtggtgttcaacaacagaggcgtggccggcgagaacctgctgacccccagaacctactgctgcgccaacaccgaggacctggagaccgtgatccaccacgtgcacagcctgtaccccagcgcccccttcctggccgccggcgtgagcatgggcggcatgctgctgctgaactacctgggcaagatcggcagcaagacccccctgatggccgccgccaccttcagcgtgggctggaacaccttcgcctgcagcgagagcctggagaagcccctgaactggctgctgttcaactactacctgaccacctgcctgcagagcagcgtgaacaagcacagacacatgttcgtgaagcaggtggacatggaccacgtgatgaaggccaagagcatcagagagttcgacaagagattcaccagcgtgatgttcggctaccagaccatcgacgactactacaccgacgccagccccagccccagactgaagagcgtgggcatccccgtgctgtgcctgaacagcgtggacgacgtgttcagccccagccacgccatccccatcgagaccgccaagcagaaccccaacgtggccctggtgctgaccagctacggcggccacatcggcttcctggagggcatctggcccagacagagcacctacatggacagagtgttcaagcagttcgtgcaggccatggtggagcacggccacgagctgagctag

SEQ ID NO: 71363 - DNA, 1050 bp, synthetic construct
  misc_feature 1..1050: note = Description of Artificial Sequence: Synthetic coding sequence
  source 1..1050: mol_type = other DNA
atggccgccgaggaggaggaggtggacagcgccgacaccggcgagagaagcggctggctgaccggctggctgcccacctggtgccccaccagcatcagccacctgaaggaggccgaggagaagatgctgaagtgcgtgccctgcacctacaagaaggagcccgtgagaatcagcaacggcaacaagatctggaccctgaagttcagccacaacatcagcaacaagacccccctggtgctgctgcacggcttcggcggcggcctgggcctgtgggccctgaacttcggcgacctgtgcaccaacagacccgtgtacgccttcgacctgctgggcttcggcagaagcagcagacccagattcgacagcgacgccgaggaggtggagaaccagttcgtggagagcatcgaggagtggagatgcgccctgggcctggacaagatgatcctgctgggccacaacctgggcggcttcctggccgccgcctacagcctgaagtaccccagcagagtgaaccacctgatcctggtggagccctggggcttccccgagagacccgacctggccgaccaggacagacccatccccgtgtggatcagagccctgggcgccgccctgacccccttcaaccccctggccggcctgagaatcgccggccccttcggcctgagcctggtgcagagactgagacccgacttcaagagaaagtacagcagcatgttcgaggacgacaccgtgaccgagtacatctaccactgcaacgtgcagacccccagcggcgagaccgccttcaagaacatgaccatcccctacggctgggccaagagacccatgctgcagagaatcggcaagatgcaccccgacatccccgtgagcgtgatcttcggcgccagaagctgcatcgacggcaacagcggcaccagcatccagagcctgagaccccacagctacgtgaagaccatcgccatcctgggcgccggccactacgtgtacgccgaccagcccgaggagttcaaccagaaggtgaaggagatctgcgacaccgtggactag

SEQ ID NO: 71364 - DNA, 1491 bp, synthetic construct
  misc_feature 1..1491: note = Description of Artificial Sequence: Synthetic coding sequence
  source 1..1491: mol_type = other DNA
atggccgagctgcagatgctgctggaggaggagatccccagcggcaagagagccctgatcgagagctaccagaacctgaccagagtggccgactactgcgagaacaactacatccagagacacggcttcgccgtgctgctgtgcctgctgagcaacagctggccccaggccaccgacaagagaaaggccctggaggagaccaaggcctacaccacccagagcctggccagcgtggcctaccagatcaacgccctggccaacaacgtgctgcagctgctggacatccaggccagccagctgagaagaatggagagcagcatcaaccacatcagccagaccgtggacatccacaaggagaaggtggccagaagagagatcggcatcctgaccaccaacaagaacaccagcagaacccacaagatcatcgcccccgccaacatggagagacccgtgagatacatcagaaagcccatcgactacaccgtgctggacgacgtgggccacggcgtgaagtggctgaaggccaagcacggcaacaaccagcccgccagaaccggcaccctgagcagaaccaacccccccacccagaagccccccagcccccccatgagcggcagaggcaccctgggcagaaacaccccctacaagaccctggagcccgtgaagccccccaccgtgcccaacgactacatgaccagccccgccagactgggcagccagcacagccccggcagaaccgccagcctgaaccagagacccagaacccacagcggcagcagcggcggcagcggcagcagagagaacagcggcagcagcagcatcggcatccccatcgccgtgcccacccccagcccccccaccatcggccccgagaacatcagcgtgcccccccccagcggcgccccccccgccccccccctggcccccctgctgcccgtgagcaccgtgatcgccgcccccggcagcgcccccggcagccagtacggcaccatgaccagacagatcagcagacacaacagcaccaccagcagcaccagcagcggcggctacagaagaacccccagcgtgaccgcccagttcagcgcccagccccacgtgaacggcggccccctgtacagccagaacagcatcgccgacagccccacccccccccccccccccccccccgacgacatccccatgttcgacgacagcccccccccccccccccccccccccgtggactacgaggacgaggaggccgccgtggtgcagtacaacgacccctacgccgacggcgaccccgcctgggcccccaagaactacatcgagaaggtggtggccatctacgactacaccaaggacaaggacgacgagctgagcttcatggagggcgccatcatctacgtgatcaagaagaacgacgacggctggtacgagggcgtgtgcaacagagtgaccggcctgttccccggcaactacgtggagagcatcatgcactacaccgactag

SEQ ID NO: 71365 - DNA, 1530 bp, synthetic construct
  misc_feature 1..1530: note = Description of Artificial Sequence: Synthetic coding sequence
  source 1..1530: mol_type = other DNA
atggccgagctgcagatgctgctggaggaggagatccccagcggcaagagagccctgatcgagagctaccagaacctgaccagagtggccgactactgcgagaacaactacatccaggccaccgacaagagaaaggccctggaggagaccaaggcctacaccacccagagcctggccagcgtggcctaccagatcaacgccctggccaacaacgtgctgcagctgctggacatccaggccagccagctgagaagaatggagagcagcatcaaccacatcagccagaccgtggacatccacaaggagaaggtggccagaagagagatcggcatcctgaccaccaacaagaacaccagcagaacccacaagatcatcgcccccgccaacatggagagacccgtgagatacatcagaaagcccatcgactacaccgtgctggacgacgtgggccacggcgtgaagaagtggcacaagatcatccacggcaacaaccagcccgccagaaccggcaccctgagcagaaccaacccccccacccagaagccccccagcccccccatgagcggcagaggcaccctgggcagaaacaccccctacaagaccctggagcccgtgaagccccccaccgtgcccaacgactacatgaccagccccgccagactgggcagccagcacagccccggcagaaccgccagcctgaaccagagacccagaacccacagcggcagcagcggcggcagcggcagcagagagaacagcggcagcagcagcatcggcatccccatcgccgtgcccacccccagcccccccaccatcggccccgagaacatcagcgtgcccccccccagcggcgccccccccgccccccccctggcccccctgctgcccgtgagcaccgtgatcgccgcccccggcagcgcccccggcagccagtacggcaccatgaccagacagatcagcagacacaacagcaccaccagcagcaccagcagcggcggctacagaagaacccccagcgtgaccgcccagttcagcgcccagccccacgtgaacggcggccccctgtacagccagaacagcatcagcatcgcccccccccccccccccatgccccagctgaccccccagatccccctgaccggcttcgtggccagagtgcaggagaacatcgccgacagccccacccccccccccccccccccccccgacgacatccccatgttcgacgacagcccccccccccccccccccccccccgtggactacgaggacgaggaggccgccgtggtgcagtacaacgacccctacgccgacggcgaccccgcctgggcccccaagaactacatcgagaaggtggtggccatctacgactacaccaaggacaaggacgacgagctgagcttcatggagggcgccatcatctacgtgatcaagaagaacgacgacggctggtacgagggcgtgtgcaacagagtgaccggcctgttccccggcaactacgtggagagcatcatgcactacaccgactag

SEQ ID NO: 71366 - DNA, 1443 bp, synthetic construct
  misc_feature 1..1443: note = Description of Artificial Sequence: Synthetic coding sequence
  source 1..1443: mol_type = other DNA
atggccgagctgcagatgctgctggaggaggagatccccagcggcaagagagccctgatcgagagctaccagaacctgaccagagtggccgactactgcgagaacaactacatccaggccaccgacaagagaaaggccctggaggagaccaaggcctacaccacccagagcctggccagcgtggcctaccagatcaacgccctggccaacaacgtgctgcagctgctggacatccaggccagccagctgagaagaatggagagcagcatcaaccacatcagccagaccgtggacatccacaaggagaaggtggccagaagagagatcggcatcctgaccaccaacaagaacaccagcagaacccacaagatcatcgcccccgccaacatggagagacccgtgagatacatcagaaagcccatcgactacaccgtgctggacgacgtgggccacggcgtgaagtggctgaaggccaagcacggcaacaaccagcccgccagaaccggcaccctgagcagaaccaacccccccacccagaagccccccagcccccccatgagcggcagaggcaccctgggcagaaacaccccctacaagaccctggagcccgtgaagccccccaccgtgcccaacgactacatgaccagccccgccagactgggcagccagcacagccccggcagaaccgccagcctgaaccagagacccagaacccacagcggcagcagcggcggcagcggcagcagagagaacagcggcagcagcagcatcggcatccccatcgccgtgcccacccccagcccccccaccatcggccccgcccccggcagcgcccccggcagccagtacggcaccatgaccagacagatcagcagacacaacagcaccaccagcagcaccagcagcggcggctacagaagaacccccagcgtgaccgcccagttcagcgcccagccccacgtgaacggcggccccctgtacagccagaacagcatcagcatcgcccccccccccccccccatgccccagctgaccccccagatccccctgaccggcttcgtggccagagtgcaggagaacatcgccgacagccccacccccccccccccccccccccccgacgacatccccatgttcgacgacagcccccccccccccccccccccccccgtggactacgaggacgaggaggccgccgtggtgcagtacaacgacccctacgccgacggcgaccccgcctgggcccccaagaactacatcgagaaggtggtggccatctacgactacaccaaggacaaggacgacgagctgagcttcatggagggcgccatcatctacgtgatcaagaagaacgacgacggctggtacgagggcgtgtgcaacagagtgaccggcctgttccccggcaactacgtggagagcatcatgcactacaccgactag

SEQ ID NO: 71367 - DNA, 1449 bp, synthetic construct
  misc_feature 1..1449: note = Description of Artificial Sequence: Synthetic coding sequence
  source 1..1449: mol_type = other DNA
atggccgagctgcagatgctgctggaggaggagatccccagcggcaagagagccctgatcgagagctaccagaacctgaccagagtggccgactactgcgagaacaactacatccaggccaccgacaagagaaaggccctggaggagaccaaggcctacaccacccagagcctggccagcgtggcctaccagatcaacgccctggccaacaacgtgctgcagctgctggacatccaggccagccagctgagaagaatggagagcagcatcaaccacatcagccagaccgtggacatccacaaggagaaggtggccagaagagagatcggcatcctgaccaccaacaagaacaccagcagaacccacaagatcatcgcccccgccaacatggagagacccgtgagatacatcagaaagcccatcgactacaccgtgctggacgacgtgggccacggcgtgaagaagtggcacaagatcatccacggcaacaaccagcccgccagaaccggcaccctgagcagaaccaacccccccacccagaagccccccagcccccccatgagcggcagaggcaccctgggcagaaacaccccctacaagaccctggagcccgtgaagccccccaccgtgcccaacgactacatgaccagccccgccagactgggcagccagcacagccccggcagaaccgccagcctgaaccagagacccagaacccacagcggcagcagcggcggcagcggcagcagagagaacagcggcagcagcagcatcggcatccccatcgccgtgcccacccccagcccccccaccatcggccccgccgcccccggcagcgcccccggcagccagtacggcaccatgaccagacagatcagcagacacaacagcaccaccagcagcaccagcagcggcggctacagaagaacccccagcgtgaccgcccagttcagcgcccagccccacgtgaacggcggccccctgtacagccagaacagcatcagcatcgcccccccccccccccccatgccccagctgaccccccagatccccctgaccggcttcgtggccagagtgcaggagaacatcgccgacagccccacccccccccccccccccccccccgacgacatccccatgttcgacgacagcccccccccccccccccccccccccgtggactacgaggacgaggaggccgccgtggtgcagtacaacgacccctacgccgacggcgaccccgcctgggcccccaagaactacatcgagaaggtggtggccatctacgactacaccaaggacaaggacgacgagctgagcttcatggagggcgccatcatctacgtgatcaagaagaacgacgacggctggtacgagggcgtgtgcaacagagtgaccggcctgttccccggcaactacgtggagagcatcatgcactacaccgactag

SEQ ID NO: 71368 - DNA, 1272 bp, synthetic construct
  misc_feature 1..1272: note = Description of Artificial Sequence: Synthetic coding sequence
  source 1..1272: mol_type = other DNA
atggccgagctgcagatgctgctggaggaggagatccccagcggcaagagagccctgatcgagagctaccagaacctgaccagagtggccgactactgcgagaacaactacatccaggccaccgacaagagaaaggccctggaggagaccaaggcctacaccacccagagcctggccagcgtggcctaccagatcaacgccctggccaacaacgtgctgcagctgctggacatccaggccagccagctgagaagaatggagagcagcatcaaccacatcagccagaccgtggacatccacaaggagaaggtggccagaagagagatcggcatcctgaccaccaacaagaacaccagcagaacccacaagatcatcgcccccgccaacatggagagacccgtgagatacatcagaaagcccatcgactacaccgtgctggacgacgtgggccacggcgtgaagaagtggcacaagatcatccacggcaacaaccagcccgccagaaccggcaccctgagcagaaccaacccccccacccagaagccccccagcccccccatgagcggcagaggcaccctgggcagaaacaccccctacaagaccctggagcccgtgaagccccccaccgtgcccaacgactacatgaccagccccgccagactgggcagccagcacagccccggcagaaccgccagcctgaaccagagacccagaacccacagcggcagcagcggcggcagcggcagcagagagaacagcggcagcagcagcatcggcatccccatcgccgtgcccacccccagcccccccaccatcggccccgtgagcatcgcccccccccccccccccatgccccagctgaccccccagatccccctgaccggcttcgtggccagagtgcaggagaacatcgccgacagccccacccccccccccccccccccccccgacgacatccccatgttcgacgacagcccccccccccccccccccccccccgtggactacgaggacgaggaggccgccgtggtgcagtacaacgacccctacgccgacggcgaccccgcctgggcccccaagaactacatcgagaaggtggtggccatctacgactacaccaaggacaaggacgacgagctgagcttcatggagggcgccatcatctacgtgatcaagaagaacgacgacggctggtacgagggcgtgtgcaacagagtgaccggcctgttccccggcaactacgtggagagcatcatgcactacaccgactag

SEQ ID NO: 71369 - DNA, 1359 bp, synthetic construct
  misc_feature 1..1359: note = Description of Artificial Sequence: Synthetic coding sequence
  source 1..1359: mol_type = other DNA
atggccgagctgcagatgctgctggaggaggagatccccagcggcaagagagccctgatcgagagctaccagaacctgaccagagtggccgactactgcgagaacaactacatccaggccaccgacaagagaaaggccctggaggagaccaaggcctacaccacccagagcctggccagcgtggcctaccagatcaacgccctggccaacaacgtgctgcagctgctggacatccaggccagccagctgagaagaatggagagcagcatcaaccacatcagccagaccgtggacatccacaaggagaaggtggccagaagagagatcggcatcctgaccaccaacaagaacaccagcagaacccacaagatcatcgcccccgccaacatggagagacccgtgagatacatcagaaagcccatcgactacaccgtgctggacgacgtgggccacggcgtgaagtggctgaaggccaagcacggcaacaaccagcccgccagaaccggcaccctgagcagaaccaacccccccacccagaagccccccagcccccccatgagcggcagaggcaccctgggcagaaacaccccctacaagaccctggagcccgtgaagccccccaccgtgcccaacgactacatgaccagccccgccagactgggcagccagcacagccccggcagaaccgccagcctgaaccagagacccagaacccacagcggcagcagcggcggcagcggcagcagagagaacagcggcagcagcagcatcggcatccccatcgccgtgcccacccccagcccccccaccatcggccccgccgcccccggcagcgcccccggcagccagtacggcaccatgaccagacagatcagcagacacaacagcaccaccagcagcaccagcagcggcggctacagaagaacccccagcgtgaccgcccagttcagcgcccagccccacgtgaacggcggccccctgtacagccagaacagcatcgccgacagccccacccccccccccccccccccccccgacgacatccccatgttcgacgacagcccccccccccccccccccccccccgtggactacgaggacgaggaggccgccgtggtgcagtacaacgacccctacgccgacggcgaccccgcctgggcccccaagaactacatcgagaaggtggtggccatctacgactacaccaaggacaaggacgacgagctgagcttcatggagggcgccatcatctacgtgatcaagaagaacgacgacggctggtacgagggcgtgtgcaacagagtgaccggcctgttccccggcaactacgtggagagcatcatgcactacaccgactag

SEQ ID NO: 71370 - DNA, 1431 bp, synthetic construct
  misc_feature 1..1431: note = Description of Artificial Sequence: Synthetic coding sequence
  source 1..1431: mol_type = other DNA
atggccgagctgcagatgctgctggaggaggagatccccagcggcaagagagccctgatcgagagctaccagaacctgaccagagtggccgactactgcgagaacaactacatccaggccaccgacaagagaaaggccctggaggagaccaaggcctacaccacccagagcctggccagcgtggcctaccagatcaacgccctggccaacaacgtgctgcagctgctggacatccaggccagccagctgagaagaatggagagcagcatcaaccacatcagccagaccgtggacatccacaaggagaaggtggccagaagagagatcggcatcctgaccaccaacaagaacaccagcagaacccacaagatcatcgcccccgccaacatggagagacccgtgagatacatcagaaagcccatcgactacaccgtgctggacgacgtgggccacggcgtgaagcacggcaacaaccagcccgccagaaccggcaccctgagcagaaccaacccccccacccagaagccccccagcccccccatgagcggcagaggcaccctgggcagaaacaccccctacaagaccctggagcccgtgaagccccccaccgtgcccaacgactacatgaccagccccgccagactgggcagccagcacagccccggcagaaccgccagcctgaaccagagacccagaacccacagcggcagcagcggcggcagcggcagcagagagaacagcggcagcagcagcatcggcatccccatcgccgtgcccacccccagcccccccaccatcggccccgccgcccccggcagcgcccccggcagccagtacggcaccatgaccagacagatcagcagacacaacagcaccaccagcagcaccagcagcggcggctacagaagaacccccagcgtgaccgcccagttcagcgcccagccccacgtgaacggcggccccctgtacagccagaacagcatcagcatcgcccccccccccccccccatgccccagctgaccccccagatccccctgaccggcttcgtggccagagtgcaggagaacatcgccgacagccccacccccccccccccccccccccccgacgacatccccatgttcgacgacagcccccccccccccccccccccccccgtggactacgaggacgaggaggccgccgtggtgcagtacaacgacccctacgccgacggcgaccccgcctgggcccccaagaactacatcgagaaggtggtggccatctacgactacaccaaggacaaggacgacgagctgagcttcatggagggcgccatcatctacgtgatcaagaagaacgacgacggctggtacgagggcgtgtgcaacagagtgaccggcctgttccccggcaactacgtggagagcatcatgcactacaccgactag

SEQ ID NO: 71371 - DNA, 1446 bp, synthetic construct
  misc_feature 1..1446: note = Description of Artificial Sequence: Synthetic coding sequence
  source 1..1446: mol_type = other DNA
atggccgagctgcagatgctgctggaggaggagatccccagcggcaagagagccctgatcgagagctaccagaacctgaccagagtggccgactactgcgagaacaactacatccaggccaccgacaagagaaaggccctggaggagaccaaggcctacaccacccagagcctggccagcgtggcctaccagatcaacgccctggccaacaacgtgctgcagctgctggacatccaggccagccagctgagaagaatggagagcagcatcaaccacatcagccagaccgtggacatccacaaggagaaggtggccagaagagagatcggcatcctgaccaccaacaagaacaccagcagaacccacaagatcatcgcccccgccaacatggagagacccgtgagatacatcagaaagcccatcgactacaccgtgctggacgacgtgggccacggcgtgaagtggctgaaggccaagcacggcaacaaccagcccgccagaaccggcaccctgagcagaaccaacccccccacccagaagccccccagcccccccatgagcggcagaggcaccctgggcagaaacaccccctacaagaccctggagcccgtgaagccccccaccgtgcccaacgactacatgaccagccccgccagactgggcagccagcacagccccggcagaaccgccagcctgaaccagagacccagaacccacagcggcagcagcggcggcagcggcagcagagagaacagcggcagcagcagcatcggcatccccatcgccgtgcccacccccagcccccccaccatcggccccgccgcccccggcagcgcccccggcagccagtacggcaccatgaccagacagatcagcagacacaacagcaccaccagcagcaccagcagcggcggctacagaagaacccccagcgtgaccgcccagttcagcgcccagccccacgtgaacggcggccccctgtacagccagaacagcatcagcatcgcccccccccccccccccatgccccagctgaccccccagatccccctgaccggcttcgtggccagagtgcaggagaacatcgccgacagccccacccccccccccccccccccccccgacgacatccccatgttcgacgacagcccccccccccccccccccccccccgtggactacgaggacgaggaggccgccgtggtgcagtacaacgacccctacgccgacggcgaccccgcctgggcccccaagaactacatcgagaaggtggtggccatctacgactacaccaaggacaaggacgacgagctgagcttcatggagggcgccatcatctacgtgatcaagaagaacgacgacggctggtacgagggcgtgtgcaacagagtgaccggcctgttccccggcaactacgtggagagcatcatgcactacaccgactag

SEQ ID NO: 71372 - DNA, 1527 bp, synthetic construct
  misc_feature 1..1527: note = Description of Artificial Sequence: Synthetic coding sequence
  source 1..1527: mol_type = other DNA
atggccgagctgcagatgctgctggaggaggagatccccagcggcaagagagccctgatcgagagctaccagaacctgaccagagtggccgactactgcgagaacaactacatccaggccaccgacaagagaaaggccctggaggagaccaaggcctacaccacccagagcctggccagcgtggcctaccagatcaacgccctggccaacaacgtgctgcagctgctggacatccaggccagccagctgagaagaatggagagcagcatcaaccacatcagccagaccgtggacatccacaaggagaaggtggccagaagagagatcggcatcctgaccaccaacaagaacaccagcagaacccacaagatcatcgcccccgccaacatggagagacccgtgagatacatcagaaagcccatcgactacaccgtgctggacgacgtgggccacggcgtgaagtggctgaaggccaagcacggcaacaaccagcccgccagaaccggcaccctgagcagaaccaacccccccacccagaagccccccagcccccccatgagcggcagaggcaccctgggcagaaacaccccctacaagaccctggagcccgtgaagccccccaccgtgcccaacgactacatgaccagccccgccagactgggcagccagcacagccccggcagaaccgccagcctgaaccagagacccagaacccacagcggcagcagcggcggcagcggcagcagagagaacagcggcagcagcagcatcggcatccccatcgccgtgcccacccccagcccccccaccatcggccccgagaacatcagcgtgcccccccccagcggcgccccccccgccccccccctggcccccctgctgcccgtgagcaccgtgatcgccgcccccggcagcgcccccggcagccagtacggcaccatgaccagacagatcagcagacacaacagcaccaccagcagcaccagcagcggcggctacagaagaacccccagcgtgaccgcccagttcagcgcccagccccacgtgaacggcggccccctgtacagccagaacagcatcagcatcgcccccccccccccccccatgccccagctgaccccccagatccccctgaccggcttcgtggccagagtgcaggagaacatcgccgacagccccacccccccccccccccccccccccgacgacatccccatgttcgacgacagcccccccccccccccccccccccccgtggactacgaggacgaggaggccgccgtggtgcagtacaacgacccctacgccgacggcgaccccgcctgggcccccaagaactacatcgagaaggtggtggccatctacgactacaccaaggacaaggacgacgagctgagcttcatggagggcgccatcatctacgtgatcaagaagaacgacgacggctggtacgagggcgtgtgcaacagagtgaccggcctgttccccggcaactacgtggagagcatcatgcactacaccgactag

SEQ ID NO: 71373 - DNA, 1428 bp, synthetic construct
  misc_feature 1..1428: note = Description of Artificial Sequence: Synthetic coding sequence
  source 1..1428: mol_type = other DNA
atggccgagctgcagatgctgctggaggaggagatccccagcggcaagagagccctgatcgagagctaccagaacctgaccagagtggccgactactgcgagaacaactacatccaggccaccgacaagagaaaggccctggaggagaccaaggcctacaccacccagagcctggccagcgtggcctaccagatcaacgccctggccaacaacgtgctgcagctgctggacatccaggccagccagctgagaagaatggagagcagcatcaaccacatcagccagaccgtggacatccacaaggagaaggtggccagaagagagatcggcatcctgaccaccaacaagaacaccagcagaacccacaagatcatcgcccccgccaacatggagagacccgtgagatacatcagaaagcccatcgactacaccgtgctggacgacgtgggccacggcgtgaagcacggcaacaaccagcccgccagaaccggcaccctgagcagaaccaacccccccacccagaagccccccagcccccccatgagcggcagaggcaccctgggcagaaacaccccctacaagaccctggagcccgtgaagccccccaccgtgcccaacgactacatgaccagccccgccagactgggcagccagcacagccccggcagaaccgccagcctgaaccagagacccagaacccacagcggcagcagcggcggcagcggcagcagagagaacagcggcagcagcagcatcggcatccccatcgccgtgcccacccccagcccccccaccatcggccccgcccccggcagcgcccccggcagccagtacggcaccatgaccagacagatcagcagacacaacagcaccaccagcagcaccagcagcggcggctacagaagaacccccagcgtgaccgcccagttcagcgcccagccccacgtgaacggcggccccctgtacagccagaacagcatcagcatcgcccccccccccccccccatgccccagctgaccccccagatccccctgaccggcttcgtggccagagtgcaggagaacatcgccgacagccccacccccccccccccccccccccccgacgacatccccatgttcgacgacagcccccccccccccccccccccccccgtggactacgaggacgaggaggccgccgtggtgcagtacaacgacccctacgccgacggcgaccccgcctgggcccccaagaactacatcgagaaggtggtggccatctacgactacaccaaggacaaggacgacgagctgagcttcatggagggcgccatcatctacgtgatcaagaagaacgacgacggctggtacgagggcgtgtgcaacagagtgaccggcctgttccccggcaactacgtggagagcatcatgcactacaccgactag

SEQ ID NO: 71374 - DNA, 1341 bp, synthetic construct
  misc_feature 1..1341: note = Description of Artificial Sequence: Synthetic coding sequence
  source 1..1341: mol_type = other DNA
atggccgagctgcagatgctgctggaggaggagatccccagcggcaagagagccctgatcgagagctaccagaacctgaccagagtggccgactactgcgagaacaactacatccaggccaccgacaagagaaaggccctggaggagaccaaggcctacaccacccagagcctggccagcgtggcctaccagatcaacgccctggccaacaacgtgctgcagctgctggacatccaggccagccagctgagaagaatggagagcagcatcaaccacatcagccagaccgtggacatccacaaggagaaggtggccagaagagagatcggcatcctgaccaccaacaagaacaccagcagaacccacaagatcatcgcccccgccaacatggagagacccgtgagatacatcagaaagcccatcgactacaccgtgctggacgacgtgggccacggcgtgaagcacggcaacaaccagcccgccagaaccggcaccctgagcagaaccaacccccccacccagaagccccccagcccccccatgagcggcagaggcaccctgggcagaaacaccccctacaagaccctggagcccgtgaagccccccaccgtgcccaacgactacatgaccagccccgccagactgggcagccagcacagccccggcagaaccgccagcctgaaccagagacccagaacccacagcggcagcagcggcggcagcggcagcagagagaacagcggcagcagcagcatcggcatccccatcgccgtgcccacccccagcccccccaccatcggccccgcccccggcagcgcccccggcagccagtacggcaccatgaccagacagatcagcagacacaacagcaccaccagcagcaccagcagcggcggctacagaagaacccccagcgtgaccgcccagttcagcgcccagccccacgtgaacggcggccccctgtacagccagaacagcatcgccgacagccccacccccccccccccccccccccccgacgacatccccatgttcgacgacagcccccccccccccccccccccccccgtggactacgaggacgaggaggccgccgtggtgcagtacaacgacccctacgccgacggcgaccccgcctgggcccccaagaactacatcgagaaggtggtggccatctacgactacaccaaggacaaggacgacgagctgagcttcatggagggcgccatcatctacgtgatcaagaagaacgacgacggctggtacgagggcgtgtgcaacagagtgaccggcctgttccccggcaactacgtggagagcatcatgcactacaccgactag

SEQ ID NO: 71375 - DNA, 1356 bp, synthetic construct
  misc_feature 1..1356: note = Description of Artificial Sequence: Synthetic coding sequence
  source 1..1356: mol_type = other DNA
atggccgagctgcagatgctgctggaggaggagatccccagcggcaagagagccctgatcgagagctaccagaacctgaccagagtggccgactactgcgagaacaactacatccaggccaccgacaagagaaaggccctggaggagaccaaggcctacaccacccagagcctggccagcgtggcctaccagatcaacgccctggccaacaacgtgctgcagctgctggacatccaggccagccagctgagaagaatggagagcagcatcaaccacatcagccagaccgtggacatccacaaggagaaggtggccagaagagagatcggcatcctgaccaccaacaagaacaccagcagaacccacaagatcatcgcccccgccaacatggagagacccgtgagatacatcagaaagcccatcgactacaccgtgctggacgacgtgggccacggcgtgaagtggctgaaggccaagcacggcaacaaccagcccgccagaaccggcaccctgagcagaaccaacccccccacccagaagccccccagcccccccatgagcggcagaggcaccctgggcagaaacaccccctacaagaccctggagcccgtgaagccccccaccgtgcccaacgactacatgaccagccccgccagactgggcagccagcacagccccggcagaaccgccagcctgaaccagagacccagaacccacagcggcagcagcggcggcagcggcagcagagagaacagcggcagcagcagcatcggcatccccatcgccgtgcccacccccagcccccccaccatcggccccgcccccggcagcgcccccggcagccagtacggcaccatgaccagacagatcagcagacacaacagcaccaccagcagcaccagcagcggcggctacagaagaacccccagcgtgaccgcccagttcagcgcccagccccacgtgaacggcggccccctgtacagccagaacagcatcgccgacagccccacccccccccccccccccccccccgacgacatccccatgttcgacgacagcccccccccccccccccccccccccgtggactacgaggacgaggaggccgccgtggtgcagtacaacgacccctacgccgacggcgaccccgcctgggcccccaagaactacatcgagaaggtggtggccatctacgactacaccaaggacaaggacgacgagctgagcttcatggagggcgccatcatctacgtgatcaagaagaacgacgacggctggtacgagggcgtgtgcaacagagtgaccggcctgttccccggcaactacgtggagagcatcatgcactacaccgactag

SEQ ID NO: 71376 - DNA, 990 bp, synthetic construct
  misc_feature 1..990: note = Description of Artificial Sequence: Synthetic coding sequence
  source 1..990: mol_type = other DNA
atggccgagctgcagatgctgctggaggaggagatccccagcggcaagagagccctgatcgagagctaccagaacctgaccagagtggccgactactgcgagaacaactacatccaggccaccgacaagagaaaggccctggaggagaccaaggcctacaccacccagagcctggccagcgtggcctaccagatcaacgccctggccaacaacgtgctgcagctgctggacatccaggccagccagctgagaagaatggagagcagcatcaaccacatcagccagcacggcaacaaccagcccgccagaaccggcaccctgagcagaaccaacccccccacccagaagccccccagcccccccatgagcggcagaggcaccctgggcagaaacaccccctacaagaccctggagcccgtgaagccccccaccgtgcccaacgactacatgaccagccccgccagactgggcagccagcacagccccggcagaaccgccagcctgaaccagagacccagaacccacagcggcagcagcggcggcagcggcagcagagagaacagcggcagcagcagcatcggcatccccatcgccgtgcccacccccagcccccccaccatcggccccgtggccgacagccccacccccccccccccccccccccccgacgacatccccatgttcgacgacagcccccccccccccccccccccccccgtggactacgaggacgaggaggccgccgtggtgcagtacaacgacccctacgccgacggcgaccccgcctgggcccccaagaactacatcgagaaggtggtggccatctacgactacaccaaggacaaggacgacgagctgagcttcatggagggcgccatcatctacgtgatcaagaagaacgacgacggctggtacgagggcgtgtgcaacagagtgaccggcctgttccccggcaactacgtggagagcatcatgcactacaccgactag

SEQ ID NO: 71377 - DNA, 1185 bp, synthetic construct
  misc_feature 1..1185: note = Description of Artificial Sequence: Synthetic coding sequence
  source 1..1185: mol_type = other DNA
atggccgagctgcagatgctgctggaggaggagatccccagcggcaagagagccctgatcgagagctaccagaacctgaccagagtggccgactactgcgagaacaactacatccaggccaccgacaagagaaaggccctggaggagaccaaggcctacaccacccagagcctggccagcgtggcctaccagatcaacgccctggccaacaacgtgctgcagctgctggacatccaggccagccagctgagaagaatggagagcagcatcaaccacatcagccagaccgtggacatccacaaggagaaggtggccagaagagagatcggcatcctgaccaccaacaagaacaccagcagaacccacaagatcatcgcccccgccaacatggagagacccgtgagatacatcagaaagcccatcgactacaccgtgctggacgacgtgggccacggcgtgaagaagtggcacaagatcatccacggcaacaaccagcccgccagaaccggcaccctgagcagaaccaacccccccacccagaagccccccagcccccccatgagcggcagaggcaccctgggcagaaacaccccctacaagaccctggagcccgtgaagccccccaccgtgcccaacgactacatgaccagccccgccagactgggcagccagcacagccccggcagaaccgccagcctgaaccagagacccagaacccacagcggcagcagcggcggcagcggcagcagagagaacagcggcagcagcagcatcggcatccccatcgccgtgcccacccccagcccccccaccatcggccccgtggccgacagccccacccccccccccccccccccccccgacgacatccccatgttcgacgacagcccccccccccccccccccccccccgtggactacgaggacgaggaggccgccgtggtgcagtacaacgacccctacgccgacggcgaccccgcctgggcccccaagaactacatcgagaaggtggtggccatctacgactacaccaaggacaaggacgacgagctgagcttcatggagggcgccatcatctacgtgatcaagaagaacgacgacggctggtacgagggcgtgtgcaacagagtgaccggcctgttccccggcaactacgtggagagcatcatgcactacaccgactag

SEQ ID NO: 71378 - DNA, 3993 bp, synthetic construct
  misc_feature 1..3993: note = Description of Artificial Sequence: Synthetic coding sequence
  source 1..3993: mol_type = other DNA
atgcccctgagcccccccgcccagggcgaccccggcgagcccagcccctgcagaccccccaagaagcacaccaccttccacctgtggagaagcaagaagaagcagcagcccgccccccccgactgcggcgtgttcgtgccccaccccctgcccgcccccgccggcgaggccagagccctggacgtggtggacggcaagtacgtggtgagagacagccaggagttccccctgcactgcggcgagagccagttcttccacaccaccagcgaggccctgggcagcctgctgctggagagcggcatcttcaagaagagcagagcccagccccccgaggacaacagaagaaagcccgtgctgggcaagctgggcaccctgttcaccgccggcagaagaagaaacagcagaaacggcctggagagccccaccagaagcaacgccaagcccctgagccccaaggacgtggtggccagccccaagctgcccgagagagagagcgagagaagcagaagccagagcagccagctgaagcagaccgacaccagcgaggagggcagccccagagagaaccccagagaggccgagggcgagctgcccgagagcggcggccccgccgccccccccgacgccgagctgagccccagatggagcagcagcgccgccgccgtggccgtgcagcagtgccacgagaacgacagcccccagctggagcccctggaggccgagggcgagcccttccccgacgccaccaccaccgccaagcagctgcacagcagccccggcaacagcagcagacaggagaacgccgagacccccgccagaagccccggcgaggacgccagccccggcgccggccacgagcaggaggccttcctgggcgtgagaggcgcccccggcagccccacccaggagagacccgccggcggcctgggcgaggcccccaacggcgcccccagcgtgtgcgccgaggagggcagcctgggccccagaaacgccagaagccagccccccaagggcgccagcgacctgcccggcgagccccccgccgagggcgccgcccacaccgccagcagcgcccaggccgactgcaccgccagacccaagggccacgcccaccccgccaaggtgctgaccctggacatctacctgagcaagaccgagggcgcccaggtggacgagcccgtggtgatcacccccagagccgaggactgcggcgactgggacgacatggagaagagaagcagcggcagaagaagcggcagaagaagaggcagccagaagagcaccgacagccccggcgccgacgccgagctgcccgagagcgccgccagagacgacgccgtgttcgacgacgaggtggcccccaacgccgccagcgacaacgccagcgccgagaagaaggtgaagagccccagagccgccctggacggcggcgtggccagcgccgccagccccgagagcaagcccagccccggcaccaagggccagctgagaggcgagagcgacagaagcaagcagcccccccccgccagcagccccaccaagagaaagggcagaagcagagccctggaggccgtgcccgccccccccgccagcggccccagagcccccgccaaggagagcccccccaagagagtgcccgaccccagccccgtgaccaagggcaccgccgccgagagcggcgaggaggccgccagagccatccccagagagctgcccgtgaagagcagcagcctgctgcccgagatcaagcccgagcacaagagaggccccctgcccaaccacttcaacggcagagccgagggcggcagaagcagagagctgggcagagccgccggcgcccccggcgccagcgacgccgacggcctgaagcccagaaaccacttcggcgtgggcagaagcaccgtgaccaccaaggtgaccctgcccgccaagcccaagcacgtggagctgaacctgaagacccccaagaacctggacagcctgggcaacgagcacaaccccttcagccagcccgtgcacaagggcaacaccgccaccaagatcagcctgttcgagaacaagagaaccaacagcagccccagacacaccgacatcagaggccagagaaacacccccgccagcagcaagaccttcgtgggcagagccaagctgaacctggccaagaaggccaaggagatggagcagcccgagaagaaggtgatgcccaacagcccccagaacggcgtgctggtgaaggagaccgccatcgagaccaaggtgaccgtgagcgaggaggagatcctgcccgccaccagaggcatgaacggcgacagcagcgagaaccaggccctgggcccccagcccaaccaggacgacaaggccgacgtgcagaccgacgccggctgcctgagcgagcccgtggccagcgccctgatccccgtgaaggaccacaagctgctggagaaggaggacagcgaggccgccgacagcaagagcctggtgctggagaacgtgaccgacaccgcccaggacatccccaccaccgtggacaccaaggacctgccccccaccgccatgcccaagccccagcacaccttcagcgacagccagagccccgccgagagcagccccggccccagcctgagcctgagcgcccccgcccccggcgacgtgcccaaggacacctgcgtgcagagccccatcagcagcttcccctgcaccgacctgaaggtgagcgagaaccacaagggctgcgtgctgcccgtgagcagacagaacaacgagaagatgcccctgctggagctgggcggcgagaccaccccccccctgagcaccgagagaagccccgaggccgtgggcagcgagtgccccagcagagtgctggtgcaggtgagaagcttcgtgctgcccgtggagagcacccaggacgtgagcagccaggtgatccccgagagcagcgaggtgagagaggtgcagctgcccacctgccacagcaacgagcccgaggtggtgagcgtggccagctgcgcccccccccaggaggaggtgctgggcaacgagcacagccactgcaccgccgagctggccgccaagagcggcccccaggtgatcccccccgccagcgagaagaccctgcccatccaggcccagagccagggcagcagaacccccctgatggccgagagcagccccaccaacagccccagcagcggcaaccacctggccaccccccagagacccgaccagaccgtgaccaacggccaggacagccccgccagcctgctgaacatcagcgccggcagcgacgacagcgtgttcgacagcagcagcgacatggagaagttcaccgagatcatcaagcagatggacagcgccgtgtgcatgcccatgaagagaaagaaggccagaatgcccaacagccccgccccccacttcgccatgccccccatccacgaggaccacctggagaaggtgttcgaccccaaggtgttcaccttcggcctgggcaagaagaaggagagccagcccgagatgagccccgccctgcacctgatgcagaacctggacaccaagagcaagctgagacccaagagagccagcgccgagcagagcgtgctgttcaagagcctgcacaccaacaccaacggcaacagcgagcccctggtgatgcccgagatcaacgacaaggagaacagagacgtgaccaacggcggcatcaagagaagcagactggagaagagcgccctgttcagcagcctgctgagcagcctgccccaggacaagatcttcagccccagcgtgaccagcgtgaacaccatgaccaccgccttcagcaccagccagaacggcagcctgagccagagcagcgtgagccagcccaccaccgagggcgcccccccctgcggcctgaacaaggagcagagcaacctgctgcccgacaacagcctgaaggtgttcaacttcaacagcagcagcaccagccacagcagcctgaagagccccagccacatgtag

SEQ ID NO: 71379 - DNA, 5172 bp, synthetic construct
  misc_feature 1..5172: note = Description of Artificial Sequence: Synthetic coding sequence
  source 1..5172: mol_type = other DNA
atggagaagagaagcagcggcagaagaagcggcagaagaagaggcagccagaagagcaccgacagccccggcgccgacgccgagctgcccgagagcgccgccagagacgacgccgtgttcgacgacgaggtggcccccaacgccgccagcgacaacgccagcgccgagaagaaggtgaagagccccagagccgccctggacggcggcgtggccagcgccgccagccccgagagcaagcccagccccggcaccaagggccagctgagaggcgagagcgacagaagcaagcagcccccccccgccagcagccccaccaagagaaagggcagaagcagagccctggaggccgtgcccgccccccccgccagcggccccagagcccccgccaaggagagcccccccaagagagtgcccgaccccagccccgtgaccaagggcaccgccgccgagagcggcgaggaggccgccagagccatccccagagagctgcccgtgaagagcagcagcctgctgcccgagatcaagcccgagcacaagagaggccccctgcccaaccacttcaacggcagagccgagggcggcagaagcagagagctgggcagagccgccggcgcccccggcgccagcgacgccgacggcctgaagcccagaaaccacttcggcgtgggcagaagcaccgtgaccaccaaggtgaccctgcccgccaagcccaagcacgtggagctgaacctgaagacccccaagaacctggacagcctgggcaacgagcacaaccccttcagccagcccgtgcacaagggcaacaccgccaccaagatcagcctgttcgagaacaagagaaccaacagcagccccagacacaccgacatcagaggccagagaaacacccccgccagcagcaagaccttcgtgggcagagccaagctgaacctggccaagaaggccaaggagatggagcagcccgagaagaaggtgatgcccaacagcccccagaacggcgtgctggtgaaggagaccgccatcgagaccaaggtgaccgtgagcgaggaggagatcctgcccgccaccagaggcatgaacggcgacagcagcgagaaccaggccctgggcccccagcccaaccaggacgacaaggccgacgtgcagaccgacgccggctgcctgagcgagcccgtggccagcgccctgatccccgtgaaggaccacaagctgctggagaaggaggacagcgaggccgccgacagcaagagcctggtgctggagaacgtgaccgacaccgcccaggacatccccaccaccgtggacaccaaggacctgccccccaccgccatgcccaagccccagcacaccttcagcgacagccagagccccgccgagagcagccccggccccagcctgagcctgagcgcccccgcccccggcgacgtgcccaaggacacctgcgtgcagagccccatcagcagcttcccctgcaccgacctgaaggtgagcgagaaccacaagggctgcgtgctgcccgtgagcagacagaacaacgagaagatgcccctgctggagctgggcggcgagaccaccccccccctgagcaccgagagaagccccgaggccgtgggcagcgagtgccccagcagagtgctggtgcaggtgagaagcttcgtgctgcccgtggagagcacccaggacgtgagcagccaggtgatccccgagagcagcgaggtgagagaggtgcagctgcccacctgccacagcaacgagcccgaggtggtgagcgtggccagctgcgcccccccccaggaggaggtgctgggcaacgagcacagccactgcaccgccgagctggccgccaagagcggcccccaggtgatcccccccgccagcgagaagaccctgcccatccaggcccagagccagggcagcagaacccccctgatggccgagagcagccccaccaacagccccagcagcggcaaccacctggccaccccccagagacccgaccagaccgtgaccaacggccaggacagccccgccagcctgctgaacatcagcgccggcagcgacgacagcgtgttcgacagcagcagcgacatggagaagttcaccgagatcatcaagcagatggacagcgccgtgtgcatgcccatgaagagaaagaaggccagaatgcccaacagccccgccccccacttcgccatgccccccatccacgaggaccacctggagaaggtgttcgaccccaaggtgttcaccttcggcctgggcaagaagaaggagagccagcccgagatgagccccgccctgcacctgatgcagaacctggacaccaagagcaagctgagacccaagagagccagcgccgagcagagcgtgctgttcaagagcctgcacaccaacaccaacggcaacagcgagcccctggtgatgcccgagatcaacgacaaggagaacagagacgtgaccaacggcggcatcaagagaagcagactggagaagagcgccctgttcagcagcctgctgagcagcctgccccaggacaagatcttcagccccagcgtgaccagcgtgaacaccatgaccaccgccttcagcaccagccagaacggcagcctgagccagagcagcgtgagccagcccaccaccgagggcgcccccccctgcggcctgaacaaggagcagagcaacctgctgcccgacaacagcctgaaggtgttcaacttcaacagcagcagcaccagccacagcagcctgaagagccccagccacatggagaagtacccccagaaggagaagaccaaggaggacctggacagcagaagcaacctgcacctgcccgagaccaagttcagcgagctgagcaagctgaagaacgacgacatggagaaggccaaccacatcgagagcgtgatcaagagcaacctgcccaactgcgccaacagcgacaccgacttcatgggcctgttcaagagcagcagatacgaccccagcatcagcttcagcggcatgagcctgagcgacaccatgaccctgagaggcagcgtgcagaacaagctgaaccccagacccggcaaggtggtgatctacagcgagcccgacgtgagcgagaagtgcatcgaggtgttcagcgacatccaggactgcagcagctggagcctgagccccgtgatcctgatcaaggtggtgagaggctgctggatcctgtacgagcagcccaacttcgagggccacagcatccccctggaggagggcgagctggagctgagcggcctgtggggcatcgaggacatcctggagagacacgaggaggccgagagcgacaagcccgtggtgatcggcagcatcagacacgtggtgcaggactacagagtgagccacatcgacctgttcaccgagcccgagggcctgggcatcctgagcagctacttcgacgacaccgaggagatgcagggcttcggcgtgatgcagaagacctgcagcatgaaggtgcactggggcacctggctgatctacgaggagcccggcttccagggcgtgcccttcatcctggagcccggcgagtaccccgacctgagcttctgggacaccgaggaggcctacatcggcagcatgagacccctgaagatgggcggcagaaaggtggagttccccaccgaccccaaggtggtggtgtacgagaagcccttcttcgagggcaagtgcgtggagctggagaccggcatgtgcagcttcgtgatggagggcggcgagaccgaggaggccaccggcgacgaccacctgcccttcaccagcgtgggcagcatgaaggtgctgagaggcatctgggtggcctacgagaagcccggcttcaccggccaccagtacctgctggaggagggcgagtacagagactggaaggcctggggcggctacaacggcgagctgcagagcctgagacccatcctgggcgacttcagcaacgcccacatgatcatgtacagcgagaagaacttcggcagcaagggcagcagcatcgacgtgctgggcatcgtggccaacctgaaggagaccggctacggcgtgaagacccagagcatcaacgtgctgagcggcgtgtgggtggcctacgagaaccccgacttcaccggcgagcagtacatcctggacaagggcttctacaccagcttcgaggactggggcggcaagaactgcaagatcagcagcgtgcagcccatctgcctggacagcttcaccggccccagaagaagaaaccagatccacctgttcagcgagccccagttccagggccacagccagagcttcgaggagaccaccagccagatcgacgacagcttcagcaccaagagctgcagagtgagcggcggcagctgggtggtgtacgacggcgagaacttcaccggcaaccagtacgtgctggaggagggccactacccctgcctgagcgccatgggctgcccccccggcgccaccttcaagagcctgagattcatcgacgtggagttcagcgagcccaccatcatcctgttcgagagagaggacttcaagggcaagaagatcgagctgaacgccgagaccgtgaacctgagaagcctgggcttcaacacccagatcagaagcgtgcaggtgatcggcggcatctgggtgacctacgagtacggcagctacagaggcagacagttcctgctgagccccgccgaggtgcccaactggtacgagttcagcggctgcagacagatcggcagcctgagacccttcgtgcagaagagaatctacttcagactgagaaacaaggccaccggcctgttcatgagcaccaacggcaacctggaggacctgaagctgctgagaatccaggtgatggaggacgtgggcgccgacgaccagatctggatctaccaggagggctgcatcaagtgcagaatcgccgaggactgctgcctgaccatcgtgggcagcctggtgaccagcggcagcaagctgggcctggccctggaccagaacgccgacagccagttctggagcctgaagagcgacggcagaatctacagcaagctgaagcccaacctggtgctggacatcaagggcggcacccagtacgaccagaaccacatcatcctgaacaccgtgagcaaggagaagttcacccaggtgtgggaggccatggtgctgtacacctag

SEQ ID NO: 71380 - DNA, 951 bp, synthetic construct
  misc_feature 1..951: note = Description of Artificial Sequence: Synthetic coding sequence
  source 1..951: mol_type = other DNA
atgcagaagcccaagaccgtggcctgggagaacctgggccccgagatgagcgccctgggcaccgccttcagcagagagggcggcagaaaggtggagttccccaccgaccccaaggtggtggtgtacgagaagcccttcttcgagggcaagtgcgtggagctggagaccggcatgtgcagcttcgtgatggagggcggcgagaccgaggaggccaccggcgacgaccacctgcccttcaccagcgtgggcagcatgaaggtgctgagaggcatctgggtggcctacgagaagcccggcttcaccggccaccagtacctgctggaggagggcgagtacagagactggaaggcctggggcggctacaacggcgagctgcagagcctgagacccatcctgggcgacttcagcaacgcccacatgatcatgtacagcgagaagaacttcggcagcaagggcagcagcatcgacgtgctgggcatcgtggccaacctgaaggagaccggctacggcgtgaagacccagagcatcaacgtgctgagcggcgtgtgggtggcctacgagaaccccgacttcaccggcgagcagtacatcctggacaagggcttctacaccagcttcgaggactggggcggcaagaactgcaagatcagcagcgtgcagcccatctgcctggacagcttcaccggccccagaagaagaaaccagatccacctgttcagcgagccccagttccagggccacagccagagcttcgaggagaccaccagccagatcgacgacagcttcagcaccaagagctgcagagtgagcggcggcagctgggtggtgtacgacggcgagaacttcaccggcaaccagtacgtgctggaggagggccactacccctgcctgagcgccatgggctgcccccccggcgccaccttcaagagcctgagattcatcgacgtgtag

SEQ ID NO: 71381 - DNA, 1629 bp, synthetic construct
  misc_feature 1..1629: note = Description of Artificial Sequence: Synthetic coding sequence
  source 1..1629: mol_type = other DNA
atgcagaagcccaagaccgtggcctgggagaacctgggccccgagatgagcgccctgggcaccgccttcagcagagagggcggcagaaaggtggagttccccaccgaccccaaggtggtggtgtacgagaagcccttcttcgagggcaagtgcgtggagctggagaccggcatgtgcagcttcgtgatggagggcggcgagaccgaggaggccaccggcgacgaccacctgcccttcaccagcgtgggcagcatgaaggtgctgagaggcatctgggtggcctacgagaagcccggcttcaccggccaccagtacctgctggaggagggcgagtacagagactggaaggcctggggcggctacaacggcgagctgcagagcctgagacccatcctgggcgacttcagcaacgcccacatgatcatgtacagcgagaagaacttcggcagcaagggcagcagcatcgacgtgctgggcatcgtggccaacctgaaggagaccggctacggcgtgaagacccagagcatcaacgtgctgagcggcgtgtgggtggcctacgagaaccccgacttcaccggcgagcagtacatcctggacaagggcttctacaccagcttcgaggactggggcggcaagaactgcaagatcagcagcgtgcagcccatctgcctggacagcttcaccggccccagaagaagaaaccagatccacctgttcagcgagccccagttccagggccacagccagagcttcgaggagaccaccagccagatcgacgacagcttcagcaccaagagctgcagagtgagcggcggcagctgggtggtgtacgacggcgagaacttcaccggcaaccagtacgtgctggaggagggccactacccctgcctgagcgccatgggctgcccccccggcgccaccttcaagagcctgagattcatcgacgtggagttcagcgagcccaccatcatcctgttcgagagagaggacttcaagggcaagaagatcgagctgaacgccgagaccgtgaacctgagaagcctgggcttcaacacccagatcagaagcgtgcaggtgatcggcggcatctgggtgacctacgagtacggcagctacagaggcagacagttcctgctgagccccgccgaggtgcccaactggtacgagttcagcggctgcagacagatcggcagcctgagacccttcgtgcagaagagaatctacttcagactgagaaacaaggccaccggcctgttcatgagcaccaacggcaacctggaggacctgaagctgctgagaatccaggtgatggaggacgtgggcgccgacgaccagatctggatctaccaggagggctgcatcaagtgcagaatcgccgaggactgctgcctgaccatcgtgggcagcctggtgaccagcggcagcaagctgggcctggccctggaccagaacgccgacagccagttctggagcctgaagagcgacggcagaatctacagcaagctgaagcccaacctggtgctggacatcaagggcggcacccagtacgaccagaaccacatcatcctgaacaccgtgagcaaggagaagttcacccaggtgtgggaggccatggtgctgtacacctag

SEQ ID NO: 71382 - DNA, 504 bp, synthetic construct
  misc_feature 1..504: note = Description of Artificial Sequence: Synthetic coding sequence
  source 1..504: mol_type = other DNA
atggtggcccagcaggagagcatcagagagggcttccagaagagatgcctgcccgtgatggtgctgaaggccaagaagcccttcaccttcgagacccaggagggcaagcaggagatgttccacgccaccgtggccaccgagaaggagttcttcttcgtgaaggtgttcaacaccctgctgaaggacaagttcatccccaagagaatcatcatcatcgccagatactacagacacagcggcttcctggaggtgaacagcgccagcagagtgctggacgccgagagcgaccagaaggtgaacgtgcccctgaacatcatcagaaaggccggcgagacccccaagatcaacaccctgcagacccagcccctgggcaccatcgtgaacggcctgttcgtggtgcagaaggtgaccgagaagaagaagaacatcctgttcgacctgagcgacaacaccggcaagatggaggtgctgggcgtgagaaacgaggacaccatgaagtgctag

SEQ ID NO: 71383 - DNA, 1032 bp, synthetic construct
  misc_feature 1..1032: note = Description of Artificial Sequence: Synthetic coding sequence
  source 1..1032: mol_type = other DNA
atggagagcaagtacaaggagatcctgctgctgaccggcctggacaacatcaccgacgaggagctggacagattcaagttcttcctgagcgacgagttcaacatcgccaccggcaagctgcacaccgccaacagaatccaggtggccaccctgatgatccagaacgccggcgccgtgagcgccgtgatgaagaccatcagaatcttccagaagctgaactacatgctgctggccaagagactgcaggaggagaaggagaaggtggacaagcagtacaagagcgtgaccaagcccaagcccctgagccaggccgagatgagccccgccgccagcgccgccatcagaaacgacgtggccaagcagagagccgcccccaaggtgagcccccacgtgaagcccgagcagaagcagatggtggcccagcaggagagcatcagagagggcttccagaagagatgcctgcccgtgatggtgctgaaggccaagaagcccttcaccttcgagacccaggagggcaagcaggagatgttccacgccaccgtggccaccgagaaggagttcttcttcgtgaaggtgttcaacaccctgctgaaggacaagttcatccccaagagaatcatcatcatcgccagatactacagacacagcggcttcctggaggtgaacagcgccagcagagtgctggacgccgagagcgaccagaaggtgaacgtgcccctgaacatcatcagaaaggccggcgagacccccaagatcaacaccctgcagacccagcccctgggcaccatcgtgaacggcctgttcgtggtgcagaaggtgaccgagaagaagaagaacatcctgttcgacctgagcgacaacaccggcaagatggaggtgctgggcgtgagaaacgaggacaccatgaagtgcaaggagggcgacaaggtgagactgaccttcttcaccctgagcaagaacggcgagaagctgcagctgaccagcggcgtgcacagcaccatcaaggtgatcaaggccaagaagaagacctag

SEQ ID NO: 71384 - DNA, 411 bp, synthetic construct
  misc_feature 1..411: note = Description of Artificial Sequence: Synthetic coding sequence
  source 1..411: mol_type = other DNA
atggagagcaagtacaaggagatcctgctgctgaccggcctggacaacatcaccgacgaggagctggacagattcaagttcttcctgagcgacgagttcaacatcgccaccggcaagctgcacaccgccaacagaatccaggtggccaccctgatgatccagaacgccggcgccgtgagcgccgtgatgaagaccatcagaatcttccagaagctgaactacatgctgctggccaagagactgcaggaggagaaggagaaggtggacaagcagtacaagagcgtgaccaagcccaagcccctgagccaggccgagatgagccccgccgccagcgccgccatcagaaacgacgtggccaagcagagagccgcccccaaggtgagcccccacgtgaagcccgagcagaagtag

SEQ ID NO: 71385 - DNA, 1800 bp, synthetic construct
  misc_feature 1..1800: note = Description of Artificial Sequence: Synthetic coding sequence
  source 1..1800: mol_type = other DNA
atgagcaaggaggagagacccggcagagaggagatcctggagtgccaggtgatgtgggagcccgacagcaagaagaacacccagatggacagattcagagccgccgtgggcgccgcctgcggcctggccctggagagctacgacgacctgtaccactggagcgtggagagctacagcgacttctgggccgagttctggaagttcagcggcatcgtgttcagcagagtgtacgacgaggtggtggacaccagcaagggcatcgccgacgtgcccgagtggttcaagggcagcagactgaactacgccgagaacctgctgagacacaaggagaacgacagagtggccctgtacatcgccagagagggcaaggaggagatcgtgaaggtgaccttcgaggagctgagacaggaggtggccctgttcgccgccgccatgagaaagatgggcgtgaagaagggcgacagagtggtgggctacctgcccaacagcgagcacgccgtggaggccatgctggccgccgccagcatcggcgccatctggagcagcaccagccccgacttcggcgtgaacggcgtgctggacagattcagccagatccagcccaagctgatcttcagcgtggaggccgtggtgtacaacggcaaggagcacaaccacatggagaagctgcagcaggtggtgaagggcctgcccgacctgaagaaggtggtggtgatcccctacgtgagcagcagagagaacatcgacctgagcaagatccccaacagcgtgttcctggacgacttcctggccaccggcaccagcgagcaggccccccagctggagttcgagcagctgcccttcagccaccccctgttcatcatgttcagcagcggcaccaccggcgcccccaagtgcatggtgcacagcgccggcggcaccctgatccagcacctgaaggagcacctgctgcacggcaacatgaccagcagcgacatcctgctgtgctacaccaccgtgggctggatgatgtggaactggatggtgagcctgctggccaccggcgccgccatggtgctgtacgacggcagccccctggtgcccacccccaacgtgctgtgggacctggtggacagaatcggcatcaccgtgctggtgaccggcgccaagtggctgagcgtgctggaggagaaggccatgaagcccgtggagacccacagcctgcagatgctgcacaccatcctgagcaccggcagccccctgaaggcccagagctacgagtacgtgtacagatgcatcaagagcagcatcctgctgggcagcatcagcggcggcaccgacatcatcagctgcttcatgggccacaacttcagcctgcccgtgtacaagggcgagatccaggccagaaacctgggcatggccgtggaggcctggaacgaggagggcaaggccgtgtggggcgagagcggcgagctggtgtgcaccaagcccatcccctgccagcccacccacttctggaacgacgagaacggcaacaagtacagaaaggcctacttcagcaagttccccggcatctgggcccacggcgactactgcagaatcaaccccaagaccggcggcatcgtgatgctgggcagaagcgacggcaccctgaaccccaacggcgtgagattcggcagcagcgagatctacaacatcgtgtacgcccagagacaggagagcggcagctgcagacagaccgaccacagatggaagagcagaggcgccagaagatgcttcctggagcccagagaccccggcagcgtgcccggccacccctag

SEQ ID NO: 71386 - DNA, 2019 bp, synthetic construct
  misc_feature 1..2019: note = Description of Artificial Sequence: Synthetic coding sequence
  source 1..2019: mol_type = other DNA
atgagcaaggaggagagacccggcagagaggagatcctggagtgccaggtgatgtgggagcccgacagcaagaagaacacccagatggacagattcagagccgccgtgggcgccgcctgcggcctggccctggagagctacgacgacctgtaccactggagcgtggagagctacagcgacttctgggccgagttctggaagttcagcggcatcgtgttcagcagagtgtacgacgaggtggtggacaccagcaagggcatcgccgacgtgcccgagtggttcaagggcagcagactgaactacgccgagaacctgctgagacacaaggagaacgacagagtggccctgtacatcgccagagagggcaaggaggagatcgtgaaggtgaccttcgaggagctgagacaggaggtggccctgttcgccgccgccatgagaaagatgggcgtgaagaagggcgacagagtggtgggctacctgcccaacagcgagcacgccgtggaggccatgctggccgccgccagcatcggcgccatctggagcagcaccagccccgacttcggcgtgaacggcgtgctggacagattcagccagatccagcccaagctgatcttcagcgtggaggccgtggtgtacaacggcaaggagcacaaccacatggagaagctgcagcaggtggtgaagggcctgcccgacctgaagaaggtggtggtgatcccctacgtgagcagcagagagaacatcgacctgagcaagatccccaacagcgtgttcctggacgacttcctggccaccggcaccagcgagcaggccccccagctggagttcgagcagctgcccttcagccaccccctgttcatcatgttcagcagcggcaccaccggcgcccccaagtgcatggtgcacagcgccggcggcaccctgatccagcacctgaaggagcacctgctgcacggcaacatgaccagcagcgacatcctgctgtgctacaccaccgtgggctggatgatgtggaactggatggtgagcctgctggccaccggcgccgccatggtgctgtacgacggcagccccctggtgcccacccccaacgtgctgtgggacctggtggacagaatcggcatcaccgtgctggtgaccggcgccaagtggctgagcgtgctggaggagaaggccatgaagcccgtggagacccacagcctgcagatgctgcacaccatcctgagcaccggcagccccctgaaggcccagagctacgagtacgtgtacagatgcatcaagagcagcatcctgctgggcagcatcagcggcggcaccgacatcatcagctgcttcatgggccacaacttcagcctgcccgtgtacaagggcgagatccaggccagaaacctgggcatggccgtggaggcctggaacgaggagggcaaggccgtgtggggcgagagcggcgagctggtgtgcaccaagcccatcccctgccagcccacccacttctggaacgacgagaacggcaacaagtacagaaaggcctacttcagcaagttccccggcatctgggcccacggcgactactgcagaatcaaccccaagaccggcggcatcgtgatgctgggcagaagcgacggcaccctgaaccccaacggcgtgagattcggcagcagcgagatctacaacatcgtggagagcttcgaggaggtggaggacagcctgtgcgtgccccagtacaacaagtacagagaggagagagtgatcctgttcctgaagatggccagcggccacgccttccagcccgacctggtgaagagaatcagagacgccatcagaatgggcctgagcgccagacacgtgcccagcctgatcctggagaccaagggcatcccctacaccctgaacggcaagaaggtggaggtggccgtgaagcagatcatcgccggcaaggccgtggagcagggcggcgccttcagcaaccccgagaccctggacctgtacagagacatccccgagctgcagggcttctag

SEQ ID NO: 71387 - DNA, 762 bp, synthetic construct
  misc_feature 1..762: note = Description of Artificial Sequence: Synthetic coding sequence
  source 1..762: mol_type = other DNA
atgagaaagatgggcgtgaagaagggcgacagagtggtgggctacctgcccaacagcgagcacgccgtggaggccatgctggccgccgccagcatcggcgccatctggagcagcaccagccccgacttcggcgtgaacggcgtgctggacagattcagccagatccagcccaagctgatcttcagcgtggaggccgtggtgtacaacggcaaggagcacaaccacatggagaagctgcagcaggtggtgaagggcctgcccgacctgaagaaggtggtggtgatcccctacgtgagcagcagagagaacatcgacctgagcaagatccccaacagcgtgttcctggacgacttcctggccaccggcaccagcgagcaggccccccagctggagttcgagcagctgcccttcagccaccccctgttcatcatgttcagcagcggcaccaccggcgcccccaagtgcatggtgcacagcgccggcggcaccctgatccagcacctgaaggagcacctgctgcacggcaacatgaccagcagcgacatcctgctgtgctacaccaccgtgggctggatgatgtggaactggatggtgagcctgctggccaccggcgccgccatggtgctgtacgacggcagccccctggtgcccacccccaacgtgctgtgggacctggtggacagaatcggctacctgggcagctggagactgctgcagaaccagccccaggacagaggccacagacacgcctggcccgagtag

SEQ ID NO: 71388 - DNA, 1845 bp, synthetic construct
  misc_feature 1..1845: note = Description of Artificial Sequence: Synthetic coding sequence
  source 1..1845: mol_type = other DNA
atgagacccccccagtgcctgctgcacacccccagcctggccagccccctgctgctgctgctgctgtggctgctgggcggcggcgtgggcgccgagggcagagaggacgccgagctgctggtgaccgtgagaggcggcagactgagaggcatcagactgaagacccccggcggccccgtgagcgccttcctgggcatccccttcgccgagccccccatgggccccagaagattcctgccccccgagcccaagcagccctggagcggcgtggtggacgccaccaccttccagagcgtgtgctaccagtacgtggacaccctgtaccccggcttcgagggcaccgagatgtggaaccccaacagagagctgagcgaggactgcctgtacctgaacgtgtggaccccctaccccagacccaccagccccacccccgtgctggtgtggatctacggcggcggcttctacagcggcgccagcagcctggacgtgtacgacggcagattcctggtgcaggccgagagaaccgtgctggtgagcatgaactacagagtgggcgccttcggcttcctggccctgcccggcagcagagaggcccccggcaacgtgggcctgctggaccagagactggccctgcagtgggtgcaggagaacgtggccgccttcggcggcgaccccaccagcgtgaccctgttcggcgagagcgccggcgccgccagcgtgggcatgcacctgctgagcccccccagcagaggcctgttccacagagccgtgctgcagagcggcgcccccaacggcccctgggccaccgtgggcatgggcgaggccagaagaagagccacccagctggcccacctggtgggctgcccccccggcggcaccggcggcaacgacaccgagctggtggcctgcctgagaaccagacccgcccaggtgctggtgaaccacgagtggcacgtgctgccccaggagagcgtgttcagattcagcttcgtgcccgtggtggacggcgacttcctgagcgacacccccgaggccctgatcaacgccggcgacttccacggcctgcaggtgctggtgggcgtggtgaaggacgagggcagctacttcctggtgtacggcgcccccggcttcagcaaggacaacgagagcctgatcagcagagccgagttcctggccggcgtgagagtgggcgtgccccaggtgagcgacctggccgccgaggccgtggtgctgcactacaccgactggctgcaccccgaggaccccgccagactgagagaggccctgagcgacgtggtgggcgaccacaacgtggtgtgccccgtggcccagctggccggcagactggccgcccagggcgccagagtgtacgcctacgtgttcgagcacagagccagcaccctgagctggcccctgtggatgggcgtgccccacggctacgagatcgagttcatcttcggcatccccctggaccccagcagaaactacaccgccgaggagaagatcttcgcccagagactgatgagatactgggccaacttcgccagaaccggcgaccccaacgagcccagagaccccaaggccccccagtggcccccctacaccgccggcgcccagcagtacgtgagcctggacctgagacccctggaggtgagaagaggcctgagagcccaggcctgcgccttctggaacagattcctgcccaagctgctgagcgccaccgacaccctggacgaggccgagagacagtggaaggccgagttccacagatggagcagctacatggtgcactggaagaaccagttcgaccactacagcaagcaggacagatgcagcgacctgtag

SEQ ID NO: 71389 - DNA, 1854 bp, synthetic construct
  misc_feature 1..1854: note = Description of Artificial Sequence: Synthetic coding sequence
  source 1..1854: mol_type = other DNA
atgagacccccccagtgcctgctgcacacccccagcctggccagccccctgctgctgctgctgctgtggctgctgggcggcggcgtgggcgccgagggcagagaggacgccgagctgctggtgaccgtgagaggcggcagactgagaggcatcagactgaagacccccggcggccccgtgagcgccttcctgggcatccccttcgccgagccccccatgggccccagaagattcctgccccccgagcccaagcagccctggagcggcgtggtggacgccaccaccttccagagcgtgtgctaccagtacgtggacaccctgtaccccggcttcgagggcaccgagatgtggaaccccaacagagagctgagcgaggactgcctgtacctgaacgtgtggaccccctaccccagacccaccagccccacccccgtgctggtgtggatctacggcggcggcttctacagcggcgccagcagcctggacgtgtacgacggcagattcctggtgcaggccgagagaaccgtgctggtgagcatgaactacagagtgggcgccttcggcttcctggccctgcccggcagcagagaggcccccggcaacgtgggcctgctggaccagagactggccctgcagtgggtgcaggagaacgtggccgccttcggcggcgaccccaccagcgtgaccctgttcggcgagagcgccggcgccgccagcgtgggcatgcacctgctgagcccccccagcagaggcctgttccacagagccgtgctgcagagcggcgcccccaacggcccctgggccaccgtgggcatgggcgaggccagaagaagagccacccagctggcccacctggtgggctgcccccccggcggcaccggcggcaacgacaccgagctggtggcctgcctgagaaccagacccgcccaggtgctggtgaaccacgagtggcacgtgctgccccaggagagcgtgttcagattcagcttcgtgcccgtggtggacggcgacttcctgagcgacacccccgaggccctgatcaacgccggcgacttccacggcctgcaggtgctggtgggcgtggtgaaggacgagggcagctacttcctggtgtacggcgcccccggcttcagcaaggacaacgagagcctgatcagcagagccgagttcctggccggcgtgagagtgggcgtgccccaggtgagcgacctggccgccgaggccgtggtgctgcactacaccgactggctgcaccccgaggaccccgccagactgagagaggccctgagcgacgtggtgggcgaccacaacgtggtgtgccccgtggcccagctggccggcagactggccgcccagggcgccagagtgtacgcctacgtgttcgagcacagagccagcaccctgagctggcccctgtggatgggcgtgccccacggctacgagatcgagttcatcttcggcatccccctggaccccagcagaaactacaccgccgaggagaagatcttcgcccagagactgatgagatactgggccaacttcgccagaaccggcgaccccaacgagcccagagaccccaaggccccccagtggcccccctacaccgccggcgcccagcagtacgtgagcctggacctgagacccctggaggtgagaagaggcctgagagcccaggcctgcgccttctggaacagattcctgcccaagctgctgagcgccaccgccagcgaggcccccagcacctgccccggcttcacccacggcgaggccgcccccagacccggcctgcccctgcccctgctgctgctgcaccagctgctgctgctgttcctgagccacctgagaagactgtag

SEQ ID NO: 71390 - DNA, 1854 bp, synthetic construct; identical to SEQ ID NO: 71389
  misc_feature 1..1854: note = Description of Artificial Sequence: Synthetic coding sequence
  source 1..1854: mol_type = other DNA

SEQ ID NO: 71391 - DNA, 1845 bp, synthetic construct; identical to SEQ ID NO: 71388
  misc_feature 1..1845: note = Description of Artificial Sequence: Synthetic coding sequence
  source 1..1845: mol_type = other DNA

SEQ ID NO: 71392 - DNA, 1581 bp, synthetic construct
  misc_feature 1..1581: note = Description of Artificial Sequence: Synthetic coding sequence
  source 1..1581: mol_type = other DNA
atgagacccccccagtgcctgctgcacacccccagcctggccagccccctgctgctgctgctgctgtggctgctgggcggcggcgtgggcgccgagggcagagaggacgccgagctgctggtgaccgtgagaggcggcagactgagaggcatcagactgaagacccccggcggccccgtgagcgccttcctgggcatccccttcgccgagccccccatgggccccagaagattcctgccccccgagcccaagcagccctggagcggcgtggtggacgccaccaccttccagagcgtgtgctaccagtacgtggacaccctgtaccccggcttcgagggcaccgagatgtggaaccccaacagagagctgagcgaggactgcctgtacctgaacgtgtggaccccctaccccagacccaccagccccacccccgtgctggtgtggatctacggcggcggcttctacagcggcgccagcagcctggacgtgtacgacggcagattcctggtgcaggccgagagaaccgtgctggtgagcatgaactacagagtgggcgccttcggcttcctggccctgcccggcagcagagaggcccccggcaacgtgggcctgctggaccagagactggccctgcagtgggtgcaggagaacgtggccgccttcggcggcgaccccaccagcgtgaccctgttcggcgagagcgccggcgccgccagcgtgggcatgcacctgctgagcccccccagcagaggcctgttccacagagccgtgctgcagagcggcgcccccaacggcccctgggccaccgtgggcatgggcgaggccagaagaagagccacccagctggcccacctggtgggctgcccccccggcggcaccggcggcaacgacaccgagctggtggcctgcctgagaaccagacccgcccaggtgctggtgaaccacgagtggcacgtgctgccccaggagagcgtgttcagattcagcttcgtgcccgtggtggacggcgacttcctgagcgacacccccgaggccctgatcaacgccggcgacttccacggcctgcagctggccggcagactggccgcccagggcgccagagtgtacgcctacgtgttcgagcacagagccagcaccctgagctggcccctgtggatgggcgtgccccacggctacgagatcgagttcatcttcggcatccccctggaccccagcagaaactacaccgccgaggagaagatcttcgcccagagactgatgagatactgggccaacttcgccagaaccggcgaccccaacgagcccagagaccccaaggccccccagtggcccccctacaccgccggcgcccagcagtacgtgagcctggacctgagacccctggaggtgagaagaggcctgagagcccaggcctgcgccttctggaacagattcctgcccaagctgctgagcgccaccgacaccctggacgaggccgagagacagtggaaggccgagttccacagatggagcagctacatggtgcactggaagaaccagttcgaccactacagcaagcaggacagatgcagcgacctgtag

SEQ ID NO: 71393 - DNA, 1806 bp, synthetic construct
  misc_feature 1..1806: note = Description of Artificial Sequence: Synthetic coding sequence
  source 1..1806: mol_type = other DNA
atgagacccccccagtgcctgctgcacacccccagcctggccagccccctgctgctgctgctgctgtggctgctgggcggcggcgtgggcgccgagggcagagaggacgccgagctgctggtgaccgtgagaggcggcagactgagaggcatcagactgaagacccccggcggccccgtgagcgccttcctgggcatccccttcgccgagccccccatgggccccagaagattcctgccccccgagcccaagcagccctggagcggcgtggtggacgccaccaccttccagagcgtgtgctaccagtacgtggacaccctgtaccccggcttcgagggcaccgagatgtggaaccccaacagagagctgagcgaggactgcctgtacctgaacgtgtggaccccctaccccagacccaccagccccacccccgtgctggtgtggatctacggcggcggcttctacagcggcgccagcagcctggacgtgtacgacggcagattcctggtgcaggccgagagaaccgtgctggtgagcatgaactacagagtgggcgccttcggcttcctggccctgcccggcagcagagaggcccccggcaacgtgggcctgctggaccagagactggccctgcagtgggtgcaggagaacgtggccgccttcggcggcgaccccaccagcgtgaccctgttcggcgagagcgccggcgccgccagcgtgggcatgcacctgctgagcccccccagcagaggcctgttccacagagccgtgctgcagagcggcgcccccaacggcccctgggccaccgtgggcatgggcgaggccagaagaagagccacccagctggcccacctggtgggctgcccccccggcggcaccggcggcaacgacaccgagctggtggcctgcctgagaaccagacccgcccaggtgctggtgaaccacgagtggcacgtgctgccccaggagagcgtgttcagattcagcttcgtgcccgtggtggacggcgacttcctgagcgacacccccgaggccctgatcaacgccggcgacttccacggcctgcaggtgctggtgggcgtggtgaaggacgagggcagctacttcctggtgtacggcgcccccggcttcagcaaggacaacgagagcctgatcagcagagccgagttcctggccggcgtgagagtgggcgtgccccaggtgagcgacctggccgccgaggccgtggtgctgcactacaccgactggctgcaccccgaggaccccgccagactgagagaggccctgagcgacgtggtgggcgaccacaacgtggtgtgccccgtggcccagctggccggcagactggccgcccagggcgccagagtgtacgcctacgtgttcgagcacagagccagcaccctgagctggcccctgtggatgggcgtgccccacggctacgagatcgagttcatcttcggcatccccctggaccccagcagaaactacaccgccgaggagaagatcttcgcccagagactgatgagatactgggccaacttcgccagaaccggcgaccccaacgagcccagagaccccaaggccccccagtggcccccctacaccgccggcgcccagcagtacgtgagcctggacctgagacccctggaggtgagaagaggcctgagagcccaggcctgcgccttctggaacagattcctgcccaagctgctgagcgccaccggcatgcagggccccgccggcagcggcagaagaggcgtgggcgccagatgcaaccccagcctgctgcccctggccagcgagtag

SEQ ID NO: 71394 - DNA, 1845 bp, synthetic construct; identical to SEQ ID NO: 71388
  misc_feature 1..1845: note = Description of Artificial Sequence: Synthetic coding sequence
  source 1..1845: mol_type = other DNA

SEQ ID NO: 71395 - DNA, 480 bp, synthetic construct
  misc_feature 1..480: note = Description of Artificial Sequence: Synthetic coding sequence
  source 1..480: mol_type = other DNA
atgagacccccccagtgcctgctgcacacccccagcctggccagccccctgctgctgctgctgctgtggctgctgggcggcggcgtgggcgccgagggcagagaggacgccgagctgctggtgaccgtgagaggcggcagactgagaggcatcagactgaagacccccggcggccccgtgagcgccttcctgggcatccccttcgccgagccccccatgggccccagaagattcctgccccccgagcccaagcagccctggagcggcgtggtggacgccaccaccttccagagcgtgtgctaccagtacgtggacaccctgtaccccggcttcgagggcaccgagatgtggaaccccaacagagagctgagcgaggactgcctgtacctgaacgtgtggaccccctaccccagacccaccagccccacccccgtgctggtgtggatctacggcggcggcttctacagcggcgccagctag

SEQ ID NO: 71396 - DNA, 87 bp, synthetic construct
  misc_feature 1..87: note = Description of Artificial Sequence: Synthetic coding sequence
  source 1..87: mol_type = other DNA
atgagacccccccagtgcctgctgcacacccccagcctggccagccccctgctgctgctgctgctgtggctgctgggcggcggctag

SEQ ID NO: 71397 - DNA, 282 bp, synthetic construct
  misc_feature 1..282: note = Description of Artificial Sequence: Synthetic coding sequence
  source 1..282: mol_type = other DNA
atgctgggcctggtgatgagctgccccgacagaaccctggtgaccaaggtgagaagccaccccagcggcaaccagcacagacccaccagaggcggcagcagaagcttccactgcagaagaggcgtgcccagacccgccgccctgagagtgctgcccagatgccccgccttcagcgacgccgcctgccccgccgccatgagacccccccagtgcctgctgcacacccccagcctggccagccccctgctgctgctgctgctgtggctgctgggcggcggctag

SEQ ID NO: 71398 - DNA, 1284 bp, synthetic construct
  misc_feature 1..1284: note = Description of Artificial Sequence: Synthetic coding sequence
  source 1..1284: mol_type = other DNA
atggccgtgctggccgccctgctgagaagcggcgccagaagcagaagccccctgctgagaagactggtgcaggagatcagatacgtggagagaagctacgtgagcaagcccaccctgaaggaggtggtgatcgtgagcgccaccagaacccccatcggcagcttcctgggcagcctgagcctgctgcccgccaccaagctgggcagcatcgccatccagggcgccatcgagaaggccggcatccccaaggaggaggtgaaggaggcctacatgggcaacgtgctgcagggcggcgagggccaggcccccaccagacaggccgtgctgggcgccggcctgcccatcagcaccccctgcaccaccatcaacaaggtgtgcgccagcggcatgaaggccatcatgatggccagccagagcctgatgtgcggccaccaggacgtgatggtggccggcggcatggagagcatgagcaacgtgccctacgtgatgaacagaggcagcaccccctacggcggcgtgaagctggaggacctgatcgtgaaggacggcctgaccgacgtgtacaacaagatccacatgggcagctgcgccgagaacaccgccaagaagctgaacatcgccagaaacgagcaggacgcctacgccatcaacagctacaccagaagcaaggccgcctgggaggccggcaagttcggcaacgaggtgatccccgtgaccgtgaccgtgaagggccagcccgacgtggtggtgaaggaggacgaggagtacaagagagtggacttcagcaaggtgcccaagctgaagaccgtgttccagaaggagaacggcaccgtgaccgccgccaacgccagcaccctgaacgacggcgccgccgccctggtgctgatgaccgccgacgccgccaagagactgaacgtgacccccctggccagaatcgtggccttcgccgacgccgccgtggagcccatcgacttccccatcgcccccgtgtacgccgccagcatggtgctgaaggacgtgggcctgaagaaggaggacatcgccatgtgggaggtgaacgaggccttcagcctggtggtgctggccaacatcaagatgctggagatcgacccccagaaggtgaacatcaacggcggcgccgtgagcctgggccaccccatcggcatgagcggcgccagaatcgtgggccacctgacccacgccctgaagcagggcgagtacggcctggccagcatctgcaacggcggcggcggcgccagcgccatgctgatccagaagctgtag

SEQ ID NO: 71399 - DNA, 1194 bp, synthetic construct
  misc_feature 1..1194: note = Description of Artificial Sequence: Synthetic coding sequence
  source 1..1194: mol_type = other DNA
atgaacgccggcagcgaccccgtggtgatcgtgagcgccgccagaaccatcatcggcagcttcaacggcgccctggccgccgtgcccgtgcaggacctgggcagcaccgtgatcaaggaggtgctgaagagagccaccgtggcccccgaggacgtgagcgaggtgatcttcggccacgtgctggccgccggctgcggccagaaccccgtgagacaggccagcgtgggcgccggcatcccctacagcgtgcccgcctggagctgccagatgatctgcggcagcggcctgaaggccgtgtgcctggccgtgcagagcatcggcatcggcgacagcagcatcgtggtggccggcggcatggagaacatgagcaaggccccccacctggcctacctgagaaccggcgtgaagatcggcgagatgcccctgaccgacagcatcctgtgcgacggcctgaccgacgccttccacaactgccacatgggcatcaccgccgagaacgtggccaagaagtggcaggtgagcagagaggaccaggacaaggtggccgtgctgagccagaacagaaccgagaacgcccagaaggccggccacttcgacaaggagatcgtgcccgtgctggtgagcaccagaaagggcctgatcgaggtgaagaccgacgagttccccagacacggcagcaacatcgaggccatgagcaagctgaagccctacttcctgaccgacggcaccggcaccgtgacccccgccaacgccagcggcatcaacgacggcgccgccgccgtggtgctgatgaagaagagcgaggccgacaagagaggcctgacccccctggccagaatcgtgagctggagccaggtgggcgtggagcccagcatcatgggcatcggccccatccccgccatcaagcaggccgtgaccaaggccggctggagcctggaggacgtggacatcttcgagatcaacgaggccttcgccgccgtgagcgccgccatcgtgaaggagctgggcctgaaccccgagaaggtgaacatcgagggcggcgccatcgccctgggccaccccctgggcgccagcggctgcagaatcctggtgaccctgctgcacaccctggagagaatgggcagaagcagaggcgtggccgccctgtgcatcggcggcggcatgggcatcgccatgtgcgtgcagagagagtag

SEQ ID NO: 71400 - DNA, 1281 bp, synthetic construct
  misc_feature 1..1281: note = Description of Artificial Sequence: Synthetic coding sequence
  source 1..1281: mol_type = other DNA
atgggcagccaccccgtgctgagaatctggggcaacagaagagccaccgccgccagcctgggcagaagcggcggcagactgagcagccccagactgctgagagtggtggcccccaccctgaccttcgcccagaccagcagatgcagcttcaacggcgccctggccgccgtgcccgtgcaggacctgggcagcaccgtgatcaaggaggtgctgaagagagccaccgtggcccccgaggacgtgagcgaggtgatcttcggccacgtgctggccgccggctgcggccagaaccccgtgagacaggccagcgtgggcgccggcatcccctacagcgtgcccgcctggagctgccagatgatctgcggcagcggcctgaaggccgtgtgcctggccgtgcagagcatcggcatcggcgacagcagcatcgtggtggccggcggcatggagaacatgagcaaggccccccacctggcctacctgagaaccggcgtgaagatcggcgagatgcccctgaccgacagcatcctgtgcgacggcctgaccgacgccttccacaactgccacatgggcatcaccgccgagaacgtggccaagaagtggcaggtgagcagagaggaccaggacaaggtggccgtgctgagccagaacagaaccgagaacgcccagaaggccggccacttcgacaaggagatcgtgcccgtgctggtgagcaccagaaagggcctgatcgaggtgaagaccgacgagttccccagacacggcagcaacatcgaggccatgagcaagctgaagccctacttcctgaccgacggcaccggcaccgtgacccccgccaacgccagcggcatcaacgacggcgccgccgccgtggtgctgatgaagaagagcgaggccgacaagagaggcctgacccccctggccagaatcgtgagctggagccaggtgggcgtggagcccagcatcatgggcatcggccccatccccgccatcaagcaggccgtgaccaaggccggctggagcctggaggacgtggacatcttcgagatcaacgaggccttcgccgccgtgagcgccgccatcgtgaaggagctgggcctgaaccccgagaaggtgaacatcgagggcggcgccatcgccctgggccaccccctgggcgccagcggctgcagaatcctggtgaccctgctgcacaccctggagagaatgggcagaagcagaggcgtggccgccctgtgcatcggcggcggcatgggcatcgccatgtgcgtgcagagagagtag

SEQ ID NO: 71401 - DNA, 1275 bp, synthetic construct
  misc_feature 1..1275: note = Description of Artificial Sequence: Synthetic coding sequence
  source 1..1275: mol_type = other DNA
atgcagagactgcaggtggtgctgggccacctgagaggccccgccgacagcggctggatgccccaggccgccccctgcctgagcggcgccccccaggccagcgccgccgacgtggtggtggtgcacggcagaagaaccgccatctgcagagccggcagaggcggcttcaaggacaccacccccgacgagctgctgagcgccgtgatgaccgccgtgctgaaggacgtgaacctgagacccgagcagctgggcgacatctgcgtgggcaacgtgctgcagcccggcgccggcgccatcatggccagaatcgcccagttcctgagcgacatccccgagaccgtgcccctgagcaccgtgaacagacagtgcagcagcggcctgcaggccgtggccagcatcgccggcggcatcagaaacggcagctacgacatcggcatggcctgcggcgtggagagcatgagcctggccgacagaggcaaccccggcaacatcaccagcagactgatggagaaggagaaggccagagactgcctgatccccatgggcatcaccagcgagaacgtggccgagagattcggcatcagcagagagaagcaggacaccttcgccctggccagccagcagaaggccgccagagcccagagcaagggctgcttccaggccgagatcgtgcccgtgaccaccaccgtgcacgacgacaagggcaccaagagaagcatcaccgtgacccaggacgagggcatcagacccagcaccaccatggagggcctggccaagctgaagcccgccttcaagaaggacggcagcaccaccgccggcaacagcagccaggtgagcgacggcgccgccgccatcctgctggccagaagaagcaaggccgaggagctgggcctgcccatcctgggcgtgctgagaagctacgccgtggtgggcgtgccccccgacatcatgggcatcggccccgcctacgccatccccgtggccctgcagaaggccggcctgaccgtgagcgacgtggacatcttcgagatcaacgaggccttcgccagccaggccgcctactgcgtggagaagctgagactgccccccgagaaggtgaaccccctgggcggcgccgtggccctgggccaccccctgggctgcaccggcgccagacaggtgatcaccctgctgaacgagctgaagagaagaggcaagagagcctacggcgtggtgagcatgtgcatcggcaccggcatgggcgccgccgccgtgttcgagtaccccggcaactag

SEQ ID NO: 71402 - DNA, 1071 bp, synthetic construct
  misc_feature 1..1071: note = Description of Artificial Sequence: Synthetic coding sequence
  source 1..1071: mol_type = other DNA
atgaccgccgtgctgaaggacgtgaacctgagacccgagcagctgggcgacatctgcgtgggcaacgtgctgcagcccggcgccggcgccatcatggccagaatcgcccagttcctgagcgacatccccgagaccgtgcccctgagcaccgtgaacagacagtgcagcagcggcctgcaggccgtggccagcatcgccggcggcatcagaaacggcagctacgacatcggcatggcctgcggcgtggagagcatgagcctggccgacagaggcaaccccggcaacatcaccagcagactgatggagaaggagaaggccagagactgcctgatccccatgggcatcaccagcgagaacgtggccgagagattcggcatcagcagagagaagcaggacaccttcgccctggccagccagcagaaggccgccagagcccagagcaagggctgcttccaggccgagatcgtgcccgtgaccaccaccgtgcacgacgacaagggcaccaagagaagcatcaccgtgacccaggacgagggcatcagacccagcaccaccatggagggcctggccaagctgaagcccgccttcaagaaggacggcagcaccaccgccggcaacagcagccaggtgagcgacggcgccgccgccatcctgctggccagaagaagcaaggccgaggagctgggcctgcccatcctgggcgtgctgagaagctacgccgtggtgggcgtgccccccgacatcatgggcatcggccccgcctacgccatccccgtggccctgcagaaggccggcctgaccgtgagcgacgtggacatcttcgagatcaacgaggccttcgccagccaggccgcctactgcgtggagaagctgagactgccccccgagaaggtgaaccccctgggcggcgccgtggccctgggccaccccctgggctgcaccggcgccagacaggtgatcaccctgctgaacgagctgaagagaagaggcaagagagcctacggcgtggtgagcatgtgcatcggcaccggcatgggcgccgccgccgtgttcgagtaccccggcaactag

SEQ ID NO: 71403 - DNA, 462 bp, synthetic construct
  misc_feature 1..462: note = Description of Artificial Sequence: Synthetic coding sequence
  source 1..462: mol_type = other DNA
atgcagagactgcaggtggtgctgggccacctgagaggccccgccgacagcggctggatgccccaggccgccccctgcctgagcggcgccccccaggccagcgccgccgacgtggtggtggtgcacggcagaagaaccgccatctgcagagccggcagaggcggcttcaaggacaccacccccgacgagctgctgagcgccgtgatgaccgccgtgctgaaggacgtgaacctgagacccgagcagctgggcgacatctgcgtgggcaacgtgctgcagcccggcgccggcgccatcatggccagaatcgcccagttcctgagcgacatccccgagaccgtgcccctgagcaccgtgaacagacagtgcagcagcggcctgcaggccgtggccagcatcgccggctggagcccctgcccctggctgaccgagggcaccctggagatcctgctgagagcctag

SEQ ID NO: 71404 - DNA, 381 bp, synthetic construct
  misc_feature 1..381: note = Description of Artificial Sequence: Synthetic coding sequence
  source 1..381: mol_type = other DNA
atgagcctggccgacagaggcaaccccggcaacatcaccagcagactgatggagaaggagaaggccagagactgcctgatccccatgggcatcaccagcgagaacgtggccgagagattcggcatcagcagagagaagcaggacaccttcgccctggccagccagcagaaggccgccagagcccagagcaagggctgcttccaggccgagatcgtgcccgtgaccaccaccgtgcacgacgacaagggcaccaagagaagcatcaccgtgacccaggacgagggcatcagacccagcaccaccatggagggcctggccaagctgaagcccgccttcaagaaggacggcagcaccaccgccggcgagaccggccccggctag

SEQ ID NO: 71405 - DNA, 996 bp, synthetic construct
  misc_feature 1..996: note = Description of Artificial Sequence: Synthetic coding sequence
  source 1..996: mol_type = other DNA
atgcagagactgcaggtggtgctgggccacctgagaggccccgccgacagcggctggatgccccaggccgccccctgcctgagcggcgccccccaggccagcgccgccgacgtggtggtggtgcacggcagaagaaccgccatctgcagagccggcagaggcggcttcaaggacaccacccccgacgagctgctgagcgccgtgatgaccgccgtgctgaaggacgtgaacctgagacccgagcagctgggcgacatctgcgtgggcaacgtgctgcagcccggcgccggcgccatcatggccagaatcgcccagttcctgagcgacatccccgagaccgtgcccctgagcaccgtgaacagacagtgcagcagcggcctgcaggccgtggccagcatcgccggcggcatcagaaacggcagctacgacatcggcatggcctgcggcatcaccagcgagaacgtggccgagagattcggcatcagcagagagaagcaggacaccttcgccctggccagccagcagaaggccgccagagcccagagcaagggctgcttccaggccgagatcgtgcccgtgaccaccaccgtgcacgacgacaagggcaccaagagaagcatcaccgtgacccaggacgagggcatcagacccagcaccaccatggagggcctggccaagctgaagcccgccttcaagaaggacggcagcaccaccgccggcctgaccgtgagcgacgtggacatcttcgagatcaacgaggccttcgccagccaggccgcctactgcgtggagaagctgagactgccccccgagaaggtgaaccccctgggcggcgccgtggccctgggccaccccctgggctgcaccggcgccagacaggtgatcaccctgctgaacgagctgaagagaagaggcaagagagcctacggcgtggtgagcatgtgcatcggcaccggcatgggcgccgccgccgtgttcgagtaccccggcaactag

SEQ ID NO: 71406 - DNA, 7377 bp, synthetic construct
  misc_feature 1..7377: note = Description of Artificial Sequence: Synthetic coding sequence
  source 1..7377: mol_type = other DNA
atggtgctgctgctgtgcctgagctgcctgatcttcagctgcctgaccttcagctggctgaagatctggggcaagatgaccgacagcaagcccatcaccaagagcaagagcgaggccaacctgatccccagccaggagcccttccccgccagcgacaacagcggcgagaccccccagagaaacggcgagggccacaccctgcccaagacccccagccaggccgagcccgccagccacaagggccccaaggacgccggcagaagaagaaacagcctgccccccagccaccagaagccccccagaaaccccctgagcagcagcgacgccgcccccagccccgagctgcaggccaacggcaccggcacccagggcctggaggccaccgacaccaacggcctgagcagcagcgccagaccccagggccagcaggccggcagccccagcaaggaggacaagaagcaggccaacatcaagagacagctgatgaccaacttcatcctgggcagcttcgacgactacagcagcgacgaggacagcgtggccggcagcagcagagagagcaccagaaagggcagcagagccagcctgggcgccctgagcctggaggcctacctgaccaccggcgaggccgagaccagagtgcccaccatgagacccagcatgagcggcctgcacctggtgaagagaggcagagagcacaagaagctggacctgcacagagacttcaccgtggccagccccgccgagttcgtgaccagattcggcggcgacagagtgatcgagaaggtgctgatcgccaacaacggcatcgccgccgtgaagtgcatgagaagcatcagaagatgggcctacgagatgttcagaaacgagagagccatcagattcgtggtgatggtgacccccgaggacctgaaggccaacgccgagtacatcaagatggccgaccactacgtgcccgtgcccggcggccccaacaacaacaactacgccaacgtggagctgatcgtggacatcgccaagagaatccccgtgcaggccgtgtgggccggctggggccacgccagcgagaaccccaagctgcccgagctgctgtgcaagaacggcgtggccttcctgggcccccccagcgaggccatgtgggccctgggcgacaagatcgccagcaccgtggtggcccagaccctgcaggtgcccaccctgccctggagcggcagcggcctgaccgtggagtggaccgaggacgacctgcagcagggcaagagaatcagcgtgcccgaggacgtgtacgacaagggctgcgtgaaggacgtggacgagggcctggaggccgccgagagaatcggcttccccctgatgatcaaggccagcgagggcggcggcggcaagggcatcagaaaggccgagagcgccgaggacttccccatcctgttcagacaggtgcagagcgagatccccggcagccccatcttcctgatgaagctggcccagcacgccagacacctggaggtgcagatcctggccgaccagtacggcaacgccgtgagcctgttcggcagagactgcagcatccagagaagacaccagaagatcgtggaggaggcccccgccaccatcgcccccctggccatcttcgagttcatggagcagtgcgccatcagactggccaagaccgtgggctacgtgagcgccggcaccgtggagtacctgtacagccaggacggcagcttccacttcctggagctgaaccccagactgcaggtggagcacccctgcaccgagatgatcgccgacgtgaacctgcccgccgcccagctgcagatcgccatgggcgtgcccctgcacagactgaaggacatcagactgctgtacggcgagagcccctggggcgtgacccccatcagcttcgagacccccagcaacccccccctggccagaggccacgtgatcgccgccagaatcaccagcgagaaccccgacgagggcttcaagcccagcagcggcaccgtgcaggagctgaacttcagaagcagcaagaacgtgtggggctacttcagcgtggccgccaccggcggcctgcacgagttcgccgacagccagttcggccactgcttcagctggggcgagaacagagaggaggccatcagcaacatggtggtggccctgaaggagctgagcatcagaggcgacttcagaaccaccgtggagtacctgatcaacctgctggagaccgagagcttccagaacaacgacatcgacaccggctggctggactacctgatcgccgagaaggtgcaggccgagaagcccgacatcatgctgggcgtggtgtgcggcgccctgaacgtggccgacgccatgttcagaacctgcatgaccgacttcctgcacagcctggagagaggccaggtgctgcccgccgacagcctgctgaacctggtggacgtggagctgatctacggcggcgtgaagtacatcctgaaggtggccagacagagcctgaccatgttcgtgctgatcatgaacggctgccacatcgagatcgacgcccacagactgaacgacggcggcctgctgctgagctacaacggcaacagctacaccacctacatgaaggaggaggtggacagctacagaatcaccatcggcaacaagacctgcgtgttcgagaaggagaacgaccccaccgtgctgagaagccccagcgccggcaagctgacccagtacaccgtggaggacggcggccacgtggaggccggcagcagctacgccgagatggaggtgatgaagatgatcatgaccctgaacgtgcaggagagaggcagagtgaagtacatcaagagacccggcgccgtgctggaggccggctgcgtggtggccagactggagctggacgaccccagcaaggtgcaccccgccgagcccttcaccggcgagctgcccgcccagcagaccctgcccatcctgggcgagaagctgcaccaggtgttccacagcgtgctggagaacctgaccaacgtgatgagcggcttctgcctgcccgagcccgtgttcagcatcaagctgaaggagtgggtgcagaagctgatgatgaccctgagacaccccagcctgcccctgctggagctgcaggagatcatgaccagcgtggccggcagaatccccgcccccgtggagaagagcgtgagaagagtgatggcccagtacgccagcaacatcaccagcgtgctgtgccagttccccagccagcagatcgccaccatcctggactgccacgccgccaccctgcagagaaaggccgacagagaggtgttcttcatcaacacccagagcatcgtgcagctggtgcagagatacagaagcggcatcagaggctacatgaagaccgtggtgctggacctgctgagaagatacctgagagtggagcaccacttccagcaggcccactacgacaagtgcgtgatcaacctgagagagcagttcaagcccgacatgagccaggtgctggactgcatcttcagccacgcccaggtggccaagaagaaccagctggtgatcatgctgatcgacgagctgtgcggccccgaccccagcctgagcgacgagctgatcagcatcctgaacgagctgacccagctgagcaagagcgagcactgcaaggtggccctgagagccagacagatcctgatcgccagccacctgcccagctacgagctgagacacaaccaggtggagagcatcttcctgagcgccatcgacatgtacggccaccagttctgccccgagaacctgaagaagctgatcctgagcgagaccaccatcttcgacgtgctgcccaccttcttctaccacgccaacaaggtggtgtgcatggccagcctggaggtgtacgtgagaagaggctacatcgcctacgagctgaacagcctgcagcacagacagctgcccgacggcacctgcgtggtggagttccagttcatgctgcccagcagccaccccaacagaatgaccgtgcccatcagcatcaccaaccccgacctgctgagacacagcaccgagctgttcatggacagcggcttcagccccctgtgccagagaatgggcgccatggtggccttcagaagattcgaggacttcaccagaaacttcgacgaggtgatcagctgcttcgccaacgtgcccaaggacacccccctgttcagcgaggccagaaccagcctgtacagcgaggacgactgcaagagcctgagagaggagcccatccacatcctgaacgtgagcatccagtgcgccgaccacctggaggacgaggccctggtgcccatcctgagaaccttcgtgcagagcaagaagaacatcctggtggactacggcctgagaagaatcaccttcctgatcgcccaggagaaggagttccccaagttcttcaccttcagagccagagacgagttcgccgaggacagaatctacagacacctggagcccgccctggccttccagctggagctgaacagaatgagaaacttcgacctgaccgccgtgccctgcgccaaccacaagatgcacctgtacctgggcgccgccaaggtgaaggagggcgtggaggtgaccgaccacagattcttcatcagagccatcatcagacacagcgacctgatcaccaaggaggccagcttcgagtacctgcagaacgagggcgagagactgctgctggaggccatggacgagctggaggtggccttcaacaacaccagcgtgagaaccgactgcaaccacatcttcctgaacttcgtgcccaccgtgatcatggaccccttcaagatcgaggagagcgtgagatacatggtgatgagatacggcagcagactgtggaagctgagagtgctgcaggccgaggtgaagatcaacatcagacagaccaccaccggcagcgccgtgcccatcagactgttcatcaccaacgagagcggctactacctggacatcagcctgtacaaggaggtgaccgacagcagaagcggcaacatcatgttccacagcttcggcaacaagcagggcccccagcacggcatgctgatcaacaccccctacgtgaccaaggacctgctgcaggccaagagattccaggcccagaccctgggcaccacctacatctacgacttccccgagatgttcagacaggccctgttcaagctgtggggcagccccgacaagtaccccaaggacatcctgacctacaccgagctggtgctggacagccagggccagctggtggagatgaacagactgcccggcggcaacgaggtgggcatggtggccttcaagatgagattcaagacccaggagtaccccgagggcagagacgtgatcgtgatcggcaacgacatcaccttcagaatcggcagcttcggccccggcgaggacctgctgtacctgagagccagcgagatggccagagccgagggcatccccaagatctacgtggccgccaacagcggcgccagaatcggcatggccgaggagatcaagcacatgttccacgtggcctgggtggaccccgaggacccccacaagggcttcaagtacctgtacctgaccccccaggactacaccagaatcagcagcctgaacagcgtgcactgcaagcacatcgaggagggcggcgagagcagatacatgatcaccgacatcatcggcaaggacgacggcctgggcgtggagaacctgagaggcagcggcatgatcgccggcgagagcagcctggcctacgaggagatcgtgaccatcagcctggtgacctgcagagccatcggcatcggcgcctacctggtgagactgggccagagagtgatccaggtggagaacagccacatcatcctgaccggcgccagcgccctgaacaaggtgctgggcagagaggtgtacaccagcaacaaccagctgggcggcgtgcagatcatgcactacaacggcgtgagccacatcaccgtgcccgacgacttcgagggcgtgtacaccatcctggagtggctgagctacatgcccaaggacaaccacagccccgtgcccatcatcacccccaccgaccccatcgacagagagatcgagttcctgcccagcagagccccctacgaccccagatggatgctggccggcagaccccaccccaccctgaagggcacctggcagagcggcttcttcgaccacggcagcttcaaggagatcatggccccctgggcccagaccgtggtgaccggcagagccagactgggcggcatccccgtgggcgtgatcgccgtggagaccagaaccgtggaggtggccgtgcccgccgaccccgccaacctggacagcgaggccaagatcatccagcaggccggccaggtgtggttccccgacagcgcctacaagaccgcccaggccgtgaaggacttcaacagagagaagctgcccctgatgatcttcgccaactggagaggcttcagcggcggcatgaaggacatgtacgaccaggtgctgaagttcggcgcctacatcgtggacggcctgagacagtacaagcagcccatcctgatctacatccccccctacgccgagctgagaggcggcagctgggtggtgatcgacgccaccatcaaccccctgtgcatcgagatgtacgccgacaaggagagcagaggcggcgtgctggagcccgagggcaccgtggagatcaagttcagaaagaaggacctgatcaagagcatgagaagaatcgaccccgcctacaagaagctgatggagcagctgggcgagcccgacctgagcgacaaggacagaaaggacctggagggcagactgaaggccagagaggacctgctgctgcccatctaccaccaggtggccgtgcagttcgccgacttccacgacacccccggcagaatgctggagaagggcgtgatcagcgacatcctggagtggaagaccgccagaaccttcctgtactggagactgagaagactgctgctggaggaccaggtgaagcaggagatcctgcaggccagcggcgagctgagccacgtgcacatccagagcatgctgagaagatggttcgtggagaccgagggcgccgtgaaggcctacctgtgggacaacaaccaggtggtggtgcagtggctggagcagcactggcaggccggcgacggccccagaagcaccatcagagagaacatcacctacctgaagcacgacagcgtgctgaagaccatcagaggcctggtggaggagaaccccgaggtggccgtggactgcgtgatctacctgagccagcacatcagccccgccgagagagcccaggtggtgcacctgctgagcaccatggacagccccgccagcacctag

SEQ ID NO: 71407 - DNA, 7377 bp, synthetic construct; identical to SEQ ID NO: 71406
  misc_feature 1..7377: note = Description of Artificial Sequence: Synthetic coding sequence
  source 1..7377: mol_type = other DNA

SEQ ID NO: 71408 - DNA, 7167 bp, synthetic construct
  misc_feature 1..7167: note = Description of Artificial Sequence: Synthetic coding sequence
  source 1..7167: mol_type = other DNA
atggtgctgctgctgtgcctgagctgcctgatcttcagctgcctgaccttcagctggctgaagatctggggcaagatgaccgacagcaagcccatcaccaagagcaagagcgaggccaacctgatccccagccaggagcccttccccgccagcgacaacagcggcgagaccccccagagaaacggcgagggccacaccctgcccaagacccccagccaggccgagcccgccagccacaagggccccaaggacgccggcagaagaagaaacagcctgccccccagccaccagaagccccccagaaaccccctgagcagcagcgacgccgcccccagccccgagctgcaggccaacggcaccggcacccagggcctggaggccaccgacaccaacggcctgagcagcagcgccagaccccagggccagcaggccggcagccccagcaaggaggacaagaagcaggccaacatcaagagacagctgatgaccaacttcatcctgggcagcttcgacgactacagcagcgacgaggacagcgtggccggcagcagcagagagagcaccagaaagggcagcagagccagcctgggcgccctgagcctggaggcctacctgaccaccggcgaggccgagaccagagtgcccaccatgagacccagcatgagcggcctgcacctggtgaagagaggcagagagcacaagaagctggacctgcacagagacttcaccgtggccagccccgccgagttcgtgaccagattcggcggcgacagagtgatcgagaaggtgctgatcgccaacaacggcatcgccgccgtgaagtgcatgagaagcatcagaagatgggcctacgagatgttcagaaacgagagagccatcagattcgtggtgatggtgacccccgaggacctgaaggccaacgccgagtacatcaagatggccgaccactacgtgcccgtgcccggcggccccaacaacaacaactacgccaacgtggagctgatcgtggacatcgccaagagaatccccgtgcaggccgtgtgggccggctggggccacgccagcgagaaccccaagctgcccgagctgctgtgcaagaacggcgtggccttcctgggcccccccagcgaggccatgtgggccctgggcgacaagatcgccagcaccgtggtggcccagaccctgcaggtgcccaccctgccctggagcggcagcggcctgaccgtggagtggaccgaggacgacctgcagcagggcaagagaatcagcgtgcccgaggacgtgtacgacaagggctgcgtgaaggacgtggacgagggcctggaggccgccgagagaatcggcttccccctgatgatcaaggccagcgagggcggcggcggcaagggcatcagaaaggccgagagcgccgaggacttccccatcctgttcagacaggtgcagagcgagatccccggcagccccatcttcctgatgaagctggcccagcacgccagacacctggaggtgcagatcctggccgaccagtacggcaacgccgtgagcctgttcggcagagactgcagcatccagagaagacaccagaagatcgtggaggaggcccccgccaccatcgcccccctggccatcttcgagttcatggagcagtgcgccatcagactggccaagaccgtgggctacgtgagcgccggcaccgtggagtacctgtacagccaggacggcagcttccacttcctggagctgaaccccagactgcaggtggagcacccctgcaccgagatgatcgccgacgtgaacctgcccgccgcccagctgcagatcgccatgggcgtgcccctgcacagactgaaggacatcagactgctgtacggcgagagcccctggggcgtgacccccatcagcttcgagacccccagcaacccccccctggccagaggccacgtgatcgccgccagaatcaccagcgagaaccccgacgagggcttcaagcccagcagcggcaccgtgcaggagctgaacttcagaagcagcaagaacgtgtggggctacttcagcgtggccgccaccggcggcctgcacgagttcgccgacagccagttcggccactgcttcagctggggcgagaacagagaggaggccatcagcaacatggtggtggccctgaaggagctgagcatcagaggcgacttcagaaccaccgtggagtacctgatcaacctgctggagaccgagagcttccagaacaacgacatcgacaccggctggctggactacctgatcgccgagaaggtgcaggccgagaagcccgacatcatgctgggcgtggtgtgcggcgccctgaacgtggccgacgccatgttcagaacctgcatgaccgacttcctgcacagcctggagagaggccaggtgctgcccgccgacagcctgctgaacctggtggacgtggagctgatctacggcggcgtgaagtacatcctgaaggtggccagacagagcctgaccatgttcgtgctgatcatgaacggctgccacatcgagatcgacgcccacagactgaacgacggcggcctgctgctgagctacaacggcaacagctacaccacctacatgaaggaggaggtggacagctacagaatcaccatcggcaacaagacctgcgtgttcgagaaggagaacgaccccaccgtgctgagaagccccagcgccggcaagctgacccagtacaccgtggaggacggcggccacgtggaggccggcagcagctacgccgagatggaggtgatgaagatgatcatgaccctgaacgtgcaggagagaggcagagtgaagtacatcaagagacccggcgccgtgctggaggccggctgcgtggtggccagactggagctggacgaccccagcaaggtgcaccccgccgagcccttcaccggcgagctgcccgcccagcagaccctgcccatcctgggcgagaagctgcaccaggtgttccacagcgtgctggagaacctgaccaacgtgatgagcggcttctgcctgcccgagcccgtgttcagcatcaagctgaaggagtgggtgcagaagctgatgatgaccctgagacaccccagcctgcccctgctggagctgcaggagatcatgaccagcgtggccggcagaatccccgcccccgtggagaagagcgtgagaagagtgatggcccagtacgccagcaacatcaccagcgtgctgtgccagttccccagccagcagatcgccaccatcctggactgccacgccgccaccctgcagagaaaggccgacagagaggtgttcttcatcaacacccagagcatcgtgcagctggtgcagagcaaggacgagctgtgcggccccgaccccagcctgagcgacgagctgatcagcatcctgaacgagctgacccagctgagcaagagcgagcactgcaaggtggccctgagagccagacagatcctgatcgccagccacctgcccagctacgagctgagacacaaccaggtggagagcatcttcctgagcgccatcgacatgtacggccaccagttctgccccgagaacctgaagaagctgatcctgagcgagaccaccatcttcgacgtgctgcccaccttcttctaccacgccaacaaggtggtgtgcatggccagcctggaggtgtacgtgagaagaggctacatcgcctacgagctgaacagcctgcagcacagacagctgcccgacggcacctgcgtggtggagttccagttcatgctgcccagcagccaccccaacagaatgaccgtgcccatcagcatcaccaaccccgacctgctgagacacagcaccgagctgttcatggacagcggcttcagccccctgtgccagagaatgggcgccatggtggccttcagaagattcgaggacttcaccagaaacttcgacgaggtgatcagctgcttcgccaacgtgcccaaggacacccccctgttcagcgaggccagaaccagcctgtacagcgaggacgactgcaagagcctgagagaggagcccatccacatcctgaacgtgagcatccagtgcgccgaccacctggaggacgaggccctggtgcccatcctgagaaccttcgtgcagagcaagaagaacatcctggtggactacggcctgagaagaatcaccttcctgatcgcccaggagaaggagttccccaagttcttcaccttcagagccagagacgagttcgccgaggacagaatctacagacacctggagcccgccctggccttccagctggagctgaacagaatgagaaacttcgacctgaccgccgtgccctgcgccaaccacaagatgcacctgtacctgggcgccgccaaggtgaaggagggcgtggaggtgaccgaccacagattcttcatcagagccatcatcagacacagcgacctgatcaccaaggaggccagcttcgagtacctgcagaacgagggcgagagactgctgctggaggccatggacgagctggaggtggccttcaacaacaccagcgtgagaaccgactgcaaccacatcttcctgaacttcgtgcccaccgtgatcatggaccccttcaagatcgaggagagcgtgagatacatggtgatgagatacggcagcagactgtggaagctgagagtgctgcaggccgaggtgaagatcaacatcagacagaccaccaccggcagcgccgtgcccatcagactgttcatcaccaacgagagcggctactacctggacatcagcctgtacaaggaggtgaccgacagcagaagcggcaacatcatgttccacagcttcggcaacaagcagggcccccagcacggcatgctgatcaacaccccctacgtgaccaaggacctgctgcaggccaagagattccaggcccagaccctgggcaccacctacatctacgacttccccgagatgttcagacaggccctgttcaagctgtggggcagccccgacaagtaccccaaggacatcctgacctacaccgagctggtgctggacagccagggccagctggtggagatgaacagactgcccggcggcaacgaggtgggcatggtggccttcaagatgagattcaagacccaggagtaccccgagggcagagacgtgatcgtgatcggcaacgacatcaccttcagaatcggcagcttcggccccggcgaggacctgctgtacctgagagccagcgagatggccagagccgagggcatccccaagatctacgtggccgccaacagcggcgccagaatcggcatggccgaggagatcaagcacatgttccacgtggcctgggtggaccccgaggacccccacaagggcttcaagtacctgtacctgaccccccaggactacaccagaatcagcagcctgaacagcgtgcactgcaagcacatcgaggagggcggcgagagcagatacatgatcaccgacatcatcggcaaggacgacggcctgggcgtggagaacctgagaggcagcggcatgatcgccggcgagagcagcctggcctacgaggagatcgtgaccatcagcctggtgacctgcagagccatcggcatcggcgcctacctggtgagactgggccagagagtgatccaggtggagaacagccacatcatcctgaccggcgccagcgccctgaacaaggtgctgggcagagaggtgtacaccagcaacaaccagctgggcggcgtgcagatcatgcactacaacggcgtgagccacatcaccgtgcccgacgacttcgagggcgtgtacaccatcctggagtggctgagctacatgcccaaggacaaccacagccccgtgcccatcatcacccccaccgaccccatcgacagagagatcgagttcctgcccagcagagccccctacgaccccagatggatgctggccggcagaccccaccccaccctgaagggcacctggcagagcggcttcttcgaccacggcagcttcaaggagatcatggccccctgggcccagaccgtggtgaccggcagagccagactgggcggcatccccgtgggcgtgatcgccgtggagaccagaaccgtggaggtggccgtgcccgccgaccccgccaacctggacagcgaggccaagatcatccagcaggccggccaggtgtggttccccgacagcgcctacaagaccgcccaggccgtgaaggacttcaacagagagaagctgcccctgatgatcttcgccaactggagaggcttcagcggcggcatgaaggacatgtacgaccaggtgctgaagttcggcgcctacatcgtggacggcctgagacagtacaagcagcccatcctgatctacatccccccctacgccgagctgagaggcggcagctgggtggtgatcgacgccaccatcaaccccctgtgcatcgagatgtacgccgacaaggagagcagaggcggcgtgctggagcccgagggcaccgtggagatcaagttcagaaagaaggacctgatcaagagcatgagaagaatcgaccccgcctacaagaagctgatggagcagctgggcgagcccgacctgagcgacaaggacagaaaggacctggagggcagactgaaggccagagaggacctgctgctgcccatctaccaccaggtggccgtgcagttcgccgacttccacgacacccccggcagaatgctggagaagggcgtgatcagcgacatcctggagtggaagaccgccagaaccttcctgtactggagactgagaagactgctgctggaggaccaggtgaagcaggagatcctgcaggccagcggcgagctgagccacgtgcacatccagagcatgctgagaagatggttcgtggagaccgagggcgccgtgaaggcctacctgtgggacaacaaccaggtggtggtgcagtggctggagcagcactggcaggccggcgacggccccagaagcaccatcagagagaacatcacctacctgaagcacgacagcgtgctgaagaccatcagaggcctggtggaggagaaccccgaggtggccgtggactgcgtgatctacctgagccagcacatcagccccgccgagagagcccaggtggtgcacctgctgagcaccatggacagccccgccagcacctag

SEQ ID NO: 71409 - DNA, 5070 bp, synthetic construct
  misc_feature 1..5070: note = Description of Artificial Sequence: Synthetic coding sequence
  source 1..5070: mol_type = other DNA
ctgcccttcctgctgaagcccccccagaccctgcccagccccgacgccatgttcagaacctgcatgaccgacttcctgcacagcctggagagaggccaggtgctgcccgccgacagcctgctgaacctggtggacgtggagctgatctacggcggcgtgaagtacatcctgaaggtggccagacagagcctgaccatgttcgtgctgatcatgaacggctgccacatcgagatcgacgcccacagactgaacgacggcggcctgctgctgagctacaacggcaacagctacaccacctacatgaaggaggaggtggacagctacagaatcaccatcggcaacaagacctgcgtgttcgagaaggagaacgaccccaccgtgctgagaagccccagcgccggcaagctgacccagtacaccgtggaggacggcggccacgtggaggccggcagcagctacgccgagatggaggtgatgaagatgatcatgaccctgaacgtgcaggagagaggcagagtgaagtacatcaagagacccggcgccgtgctggaggccggctgcgtggtggccagactggagctggacgaccccagcaaggtgcaccccgccgagcccttcaccggcgagctgcccgcccagcagaccctgcccatcctgggcgagaagctgcaccaggtgttccacagcgtgctggagaacctgaccaacgtgatgagcggcttctgcctgcccgagcccgtgttcagcatcaagctgaaggagtgggtgcagaagctgatgatgaccctgagacaccccagcctgcccctgctggagctgcaggagatcatgaccagcgtggccggcagaatccccgcccccgtggagaagagcgtgagaagagtgatggcccagtacgccagcaacatcaccagcgtgctgtgccagttccccagccagcagatcgccaccatcctggactgccacgccgccaccctgcagagaaaggccgacagagaggtgttcttcatcaacacccagagcatcgtgcagctggtgcagagatacagaagcggcatcagaggctacatgaagaccgtggtgctggacctgctgagaagatacctgagagtggagcaccacttccagcaggcccactacgacaagtgcgtgatcaacctgagagagcagttcaagcccgacatgagccaggtgctggactgcatcttcagccacgcccaggtggccaagaagaaccagctggtgatcatgctgatcgacgagctgtgcggccccgaccccagcctgagcgacgagctgatcagcatcctgaacgagctgacccagctgagcaagagcgagcactgcaaggtggccctgagagccagacagatcctgatcgccagccacctgcccagctacgagctgagacacaaccaggtggagagcatcttcctgagcgccatcgacatgtacggccaccagttctgccccgagaacctgaagaagctgatcctgagcgagaccaccatcttcgacgtgctgcccaccttcttctaccacgccaacaaggtggtgtgcatggccagcctggaggtgtacgtgagaagaggctacatcgcctacgagctgaacagcctgcagcacagacagctgcccgacggcacctgcgtggtggagttccagttcatgctgcccagcagccaccccaacagaatgaccgtgcccatcagcatcaccaaccccgacctgctgagacacagcaccgagctgttcatggacagcggcttcagccccctgtgccagagaatgggcgccatggtggccttcagaagattcgaggacttcaccagaaacttcgacgaggtgatcagctgcttcgccaacgtgcccaaggacacccccctgttcagcgaggccagaaccagcctgtacagcgaggacgactgcaagagcctgagagaggagcccatccacatcctgaacgtgagcatccagtgcgccgaccacctggaggacgaggccctggtgcccatcctgagaaccttcgtgcagagcaagaagaacatcctggtggactacggcctgagaagaatcaccttcctgatcgcccaggagaaggagttccccaagttcttcaccttcagagccagagacgagttcgccgaggacagaatctacagacacctggagcccgccctggccttccagctggagctgaacagaatgagaaacttcgacctgaccgccgtgccctgcgccaaccacaagatgcacctgtacctgggcgccgccaaggtgaaggagggcgtggaggtgaccgaccacagattcttcatcagagccatcatcagacacagcgacctgatcaccaaggaggccagcttcgagtacctgcagaacgagggcgagagactgctgctggaggccatggacgagctggaggtggccttcaacaacaccagcgtgagaaccgactgcaaccacatcttcctgaacttcgtgcccaccgtgatcatggaccccttcaagatcgaggagagcgtgagatacatggtgatgagatacggcagcagactgtggaagctgagagtgctgcaggccgaggtgaagatcaacatcagacagaccaccaccggcagcgccgtgcccatcagactgttcatcaccaacgagagcggctactacctggacatcagcctgtacaaggaggtgaccgacagcagaagcggcaacatcatgttccacagcttcggcaacaagcagggcccccagcacggcatgctgatcaacaccccctacgtgaccaaggacctgctgcaggccaagagattccaggcccagaccctgggcaccacctacatctacgacttccccgagatgttcagacaggccctgttcaagctgtggggcagccccgacaagtaccccaaggacatcctgacctacaccgagctggtgctggacagccagggccagctggtggagatgaacagactgcccggcggcaacgaggtgggcatggtggccttcaagatgagattcaagacccaggagtaccccgagggcagagacgtgatcgtgatcggcaacgacatcaccttcagaatcggcagcttcggccccggcgaggacctgctgtacctgagagccagcgagatggccagagccgagggcatccccaagatctacgtggccgccaacagcggcgccagaatcggcatggccgaggagatcaagcacatgttccacgtggcctgggtggaccccgaggacccccacaagggcttcaagtacctgtacctgaccccccaggactacaccagaatcagcagcctgaacagcgtgcactgcaagcacatcgaggagggcggcgagagcagatacatgatcaccgacatcatcggcaaggacgacggcctgggcgtggagaacctgagaggcagcggcatgatcgccggcgagagcagcctggcctacgaggagatcgtgaccatcagcctggtgacctgcagagccatcggcatcggcgcctacctggtgagactgggccagagagtgatccaggtggagaacagccacatcatcctgaccggcgccagcgccctgaacaaggtgctgggcagagaggtgtacaccagcaacaaccagctgggcggcgtgcagatcatgcactacaacggcgtgagccacatcaccgtgcccgacgacttcgagggcgtgtacaccatcctggagtggctgagctacatgcccaaggacaaccacagccccgtgcccatcatcacccccaccgaccccatcgacagagagatcgagttcctgcccagcagagccccctacgaccccagatggatgctggccggcagaccccaccccaccctgaagggcacctggcagagcggcttcttcgaccacggcagcttcaaggagatcatggccccctgggcccagaccgtggtgaccggcagagccagactgggcggcatccccgtgggcgtgatcgccgtggagaccagaaccgtggaggtggccgtgcccgccgaccccgccaacctggacagcgaggccaagatcatccagcaggccggccaggtgtggttccccgacagcgcctacaagaccgcccaggccgtgaaggacttcaacagagagaagctgcccctgatgatcttcgccaactggagaggcttcagcggcggcatgaaggacatgtacgaccaggtgctgaagttcggcgcctacatcgtggacggcctgagacagtacaagcagcccatcctgatctacatccccccctacgccgagctgagaggcggcagctgggtggtgatcgacgccaccatcaaccccctgtgcatcgagatgtacgccgacaaggagagcagaggcggcgtgctggagcccgagggcaccgtggagatcaagttcagaaagaaggacctgatcaagagcatgagaagaatcgaccccgcctacaagaagctgatggagcagctgggcgagcccgacctgagcgacaaggacagaaaggacctggagggcagactgaaggccagagaggacctgctgctgcccatctaccaccaggtggccgtgcagttcgccgacttccacgacacccccggcagaatgctggagaagggcgtgatcagcgacatcctggagtggaagaccgccagaaccttcctgtactggagactgagaagactgctgctggaggaccaggtgaagcaggagatcctgcaggccagcggcgagctgagccacgtgcacatccagagcatgctgagaagatggttcgtggagaccgagggcgccgtgaaggcctacctgtgggacaacaaccaggtggtggtgcagtggctggagcagcactggcaggccggcgacggccccagaagcaccatcagagagaacatcacctacctgaagcacgacagcgtgctgaagaccatcagaggcctggtggaggagaaccccgaggtggccgtggactgcgtgatctacctgagccagcacatcagccccgccgagagagcccaggtggtgcacctgctgagcaccatggacagccccgccagcacctag

SEQ ID NO: 71410 - DNA, 432 bp, synthetic construct
  misc_feature 1..432: note = Description of Artificial Sequence: Synthetic coding sequence
  source 1..432: mol_type = other DNA
atgaccgacagcaagcccatcaccaagagcaagagcgaggccaacctgatccccagccaggagcccttccccgccagcgacaacagcggcgagaccccccagagaaacggcgagggccacaccctgcccaagacccccagccaggccgagcccgccagccacaagggccccaaggacgccggcagaagaagaaacagcctgccccccagccaccagaagccccccagaaaccccctgagcagcagcgacgccgcccccagccccgagctgcaggccaacggcaccggcacccagggcctggaggccaccgacaccaacggcctgagcagcagcgccagaccccagggccagcaggccggcagccccagcaaggaggacaagaagcaggccaacatcaagagacagctgatgaccaacttcatcctgggctag

SEQ ID NO: 71411 - DNA, 2577 bp, synthetic construct
  misc_feature 1..2577: note = Description of Artificial Sequence: Synthetic coding sequence
  source 1..2577: mol_type = other DNA
atgaccgtgcccatcagcatcaccaaccccgacctgctgagacacagcaccgagctgttcatggacagcggcttcagccccctgtgccagagaatgggcgccatggtggccttcagaagattcgaggacttcaccagaaacttcgacgaggtgatcagctgcttcgccaacgtgcccaaggacacccccctgttcagcgaggccagaaccagcctgtacagcgaggacgactgcaagagcctgagagaggagcccatccacatcctgaacgtgagcatccagtgcgccgaccacctggaggacgaggccctggtgcccatcctgagaaccttcgtgcagagcaagaagaacatcctggtggactacggcctgagaagaatcaccttcctgatcgcccaggagaaggagttccccaagttcttcaccttcagagccagagacgagttcgccgaggacagaatctacagacacctggagcccgccctggccttccagctggagctgaacagaatgagaaacttcgacctgaccgccgtgccctgcgccaaccacaagatgcacctgtacctgggcgccgccaaggtgaaggagggcgtggaggtgaccgaccacagattcttcatcagagccatcatcagacacagcgacctgatcaccaaggaggccagcttcgagtacctgcagaacgagggcgagagactgctgctggaggccatggacgagctggaggtggccttcaacaacaccagcgtgagaaccgactgcaaccacatcttcctgaacttcgtgcccaccgtgatcatggaccccttcaagatcgaggagagcgtgagatacatggtgatgagatacggcagcagactgtggaagctgagagtgctgcaggccgaggtgaagatcaacatcagacagaccaccaccggcagcgccgtgcccatcagactgttcatcaccaacgagagcggctactacctggacatcagcctgtacaaggaggtgaccgacagcagaagcggcaacatcatgttccacagcttcggcaacaagcagggcccccagcacggcatgctgatcaacaccccctacgtgaccaaggacctgctgcaggccaagagattccaggcccagaccctgggcaccacctacatctacgacttccccgagatgttcagacaggccctgttcaagctgtggggcagccccgacaagtaccccaaggacatcctgacctacaccgagctggtgctggacagccagggccagctggtggagatgaacagactgcccggcggcaacgaggtgggcatggtggccttcaagatgagattcaagacccaggagtaccccgagggcagagacgtgatcgtgatcggcaacgacatcaccttcagaatcggcagcttcggccccggcgaggacctgctgtacctgagagccagcgagatggccagagccgagggcatccccaagatctacgtggccgccaacagcggcgccagaatcggcatggccgaggagatcaagcacatgttccacgtggcctgggtggaccccgaggacccccacaagggcttcaagtacctgtacctgaccccccaggactacaccagaatcagcagcctgaacagcgtgcactgcaagcacatcgaggagggcggcgagagcagatacatgatcaccgacatcatcggcaaggacgacggcctgggcgtggagaacctgagaggcagcggcatgatcgccggcgagagcagcctggcctacgaggagatcgtgaccatcagcctggtgacctgcagagccatcggcatcggcgcctacctggtgagactgggccagagagtgatccaggtggagaacagccacatcatcctgaccggcgccagcgccctgaacaaggtgctgggcagagaggtgtacaccagcaacaaccagctgggcggcgtgcagatcatgcactacaacggcgtgagccacatcaccgtgcccgacgacttcgagggcgtgtacaccatcctggagtggctgagctacatgcccaaggacaaccacagccccgtgcccatcatcacccccaccgaccccatcgacagagagatcgagttcctgcccagcagagccccctacgaccccagatggatgctggccggcagaccccaccccaccctgaagggcacctggcagagcggcttcttcgaccacggcagcttcaaggagatcatggccccctgggcccagaccgtggtgaccggcagagccagactgggcggcatccccgtgggcgtgatcgccgtggagaccagaaccgtggaggtggccgtgcccgccgaccccgccaacctggacagcgaggccaagatcatccagcaggccggccaggtgtggttccccgacagcgcctacaagaccgcccaggccgtgaaggacttcaacagagagaagctgcccctgatgatcttcgccaactggagaggcttcagcggcggcatgaagggctgcctgggcacctggagagacgtgagctggtggaagatcagagccatgctgcccatgcacatcggcgagggcagcgtgtag

SEQ ID NO: 71412 - DNA, 1038 bp, synthetic construct
  misc_feature 1..1038: note = Description of Artificial Sequence: Synthetic coding sequence
  source 1..1038: mol_type = other DNA
atgggcagcagcgaggaccaggcctacagactgctgaacgactacgccaacggcttcatggtgagccaggtgctgttcgccgcctgcgagctgggcgtgttcgacctgctggccgaggcccccggccccctggacgtggccgccgtggccgccggcgtgagagccagcgcccacggcaccgagctgctgctggacatctgcgtgagcctgaagctgctgaaggtggagaccagaggcggcaaggccttctacagaaacaccgagctgagcagcgactacctgaccaccgtgagccccaccagccagtgcagcatgctgaagtacatgggcagaaccagctacagatgctggggccacctggccgacgccgtgagagagggcagaaaccagtacctggagaccttcggcgtgcccgccgaggagctgttcaccgccatctacagaagcgagggcgagagactgcagttcatgcaggccctgcaggaggtgtggagcgtgaacggcagaagcgtgctgaccgccttcgacctgagcgtgttccccctgatgtgcgacctgggcggcggcgccggcgccctggccaaggagtgcatgagcctgtaccccggctgcaagatcaccgtgttcgacatccccgaggtggtgtggaccgccaagcagcacttcagcttccaggaggaggagcagatcgacttccaggagggcgacttcttcaaggaccccctgcccgaggccgacctgtacatcctggccagagtgctgcacgactgggccgacggcaagtgcagccacctgctggagagaatctaccacacctgcaagcccggcggcggcatcctggtgatcgagagcctgctggacgaggacagaagaggccccctgctgacccagctgtacagcctgaacatgctggtgcagaccgagggccaggagagaacccccacccactaccacatgctgctgagcagcgccggcttcagagacttccagttcaagaagaccggcgccatctacgacgccatcctggccagaaagtag

SEQ ID NO: 71413 - DNA, 897 bp, synthetic construct
  misc_feature 1..897: note = Description of Artificial Sequence: Synthetic coding sequence
  source 1..897: mol_type = other DNA
atgggcagcagcgaggaccaggcctacagactgctgaacgactacgccaacggcttcatggtgagccaggtgctgttcgccgcctgcgagctgggcgtgttcgacctgctggccgaggcccccggccccctggacgtggccgccgtggccgccggcgtgagagccagcgcccacggcaccgagctgctgctggacatctgcgtgagcctgaagctgctgaaggtggagaccagaggcggcaaggccttctacagaaacaccgagctgagcagcgactacctgaccaccgtgagccccaccagccagtgcagcatgctgaagtacatgggcagaaccagctacagatgctggggccacctggccgacgccgtgagagagggcagaaaccagtacctggagaccttcggcgtgcccgccgaggagctgttcaccgccatctacagaagcgagggcgagagactgcagttcatgcaggccctgcaggaggtgtggagcgtgaacggcagaagcgtgctgaccgccttcgacctgagcgtgttccccctgatgtgcgacctgggcggcgacttcttcaaggaccccctgcccgaggccgacctgtacatcctggccagagtgctgcacgactgggccgacggcaagtgcagccacctgctggagagaatctaccacacctgcaagcccggcggcggcatcctggtgatcgagagcctgctggacgaggacagaagaggccccctgctgacccagctgtacagcctgaacatgctggtgcagaccgagggccaggagagaacccccacccactaccacatgctgctgagcagcgccggcttcagagacttccagttcaagaagaccggcgccatctacgacgccatcctggccagaaagtag

SEQ ID NO: 71414 - DNA, 1122 bp, synthetic construct
  misc_feature 1..1122: note = Description of Artificial Sequence: Synthetic coding sequence
  source 1..1122: mol_type = other DNA
atgggcagcagcgaggaccaggcctacagactgctgaacgactacgccaacggcttcatggtgagccaggtgctgttcgccgcctgcgagctgggcgtgttcgacctgctggccgaggcccccggccccctggacgtggccgccgtggccgccggcgtgagagccagcgcccacggcaccgagctgctgctggacatctgcgtgagcctgaagctgctgaaggtggagaccagaggcggcaaggccttctacagaaacaccgagctgagcagcgactacctgaccaccgtgagccccaccagccagtgcagcatgctgaagtacatgggcagaaccagctacagatgctggggccacctggccgacgccgtgagagagggcagaaaccagtacctggagaccttcggcgtgcccgccgaggagctgttcaccgccatctacagaagcgagggcgagagactgcagttcatgcaggccctgcaggaggtgtggagcgtgaacggcagaagcgtgctgaccgccttcgacctgagcgtgttccccctgatgtgcgacctgggcggcacctggatcaagctggagaccatcatcctgagcaagctgagccagggccagaagaccaagcacagagtgttcagcctgatcggcggcgccggcgccctggccaaggagtgcatgagcctgtaccccggctgcaagatcaccgtgttcgacatccccgaggtggtgtggaccgccaagcagcacttcagcttccaggaggaggagcagatcgacttccaggagggcgacttcttcaaggaccccctgcccgaggccgacctgtacatcctggccagagtgctgcacgactgggccgacggcaagtgcagccacctgctggagagaatctaccacacctgcaagcccggcggcggcatcctggtgatcgagagcctgctggacgaggacagaagaggccccctgctgacccagctgtacagcctgaacatgctggtgcagaccgagggccaggagagaacccccacccactaccacatgctgctgagcagcgccggcttcagagacttccagttcaagaagaccggcgccatctacgacgccatcctggccagaaagtag

SEQ ID NO: 71415 - DNA, 375 bp, synthetic construct
  misc_feature 1..375: note = Description of Artificial Sequence: Synthetic coding sequence
  source 1..375: mol_type = other DNA
gactgcagactgaccagcgtgtgcctgccctgcgtgcccggcgacttcttcaaggaccccctgcccgaggccgacctgtacatcctggccagagtgctgcacgactgggccgacggcaagtgcagccacctgctggagagaatctaccacacctgcaagcccggcggcggcatcctggtgatcgagagcctgctggacgaggacagaagaggccccctgctgacccagctgtacagcctgaacatgctggtgcagaccgagggccaggagagaacccccacccactaccacatgctgctgagcagcgccggcttcagagacttccagttcaagaagaccggcgccatctacgacgccatcctggccagaaagtag

SEQ ID NO: 71416 - DNA, 711 bp, synthetic construct
  misc_feature 1..711: note = Description of Artificial Sequence: Synthetic coding sequence
  source 1..711: mol_type = other DNA
atggagagcagcgccaagatggagagcggcggcgccggccagcagccccagccccagccccagcagcccttcctgccccccgccgcctgcttcttcgccaccgccgccgccgccgccgccgccgccgccgccgccgccgcccagagcgcccagcagcagcagcagcagcagcagcagcagcagcaggccccccagctgagacccgccgccgacggccagcccagcggcggcggccacaagagcgcccccaagcaggtgaagagacagagaagcagcagccccgagctgatgagatgcaagagaagactgaacttcagcggcttcggctacagcctgccccagcagcagcccgccgccgtggccagaagaaacgagagagagagaaacagagtgaagctggtgaacctgggcttcgccaccctgagagagcacgtgcccaacggcgccgccaacaagaagatgagcaaggtggagaccctgagaagcgccgtggagtacatcagagccctgcagcagctgctggacgagcacgacgccgtgagcgccgccttccaggccggcgtgctgagccccaccatcagccccaactacagcaacgacctgaacagcatggccggcagccccgtgagcagctacagcagcgacgagggcagctacgaccccctgagccccgaggagcaggagctgctggacttcaccaactggttctag

SEQ ID NO: 71417 - DNA, 582 bp, synthetic construct
  misc_feature 1..582: note = Description of Artificial Sequence: Synthetic coding sequence
  source 1..582: mol_type = other DNA
atggacggcggcaccctgcccagaagcgccccccccgccccccccgtgcccgtgggctgcgccgccagaagaagacccgccagccccgagctgctgagatgcagcagaagaagaagacccgccaccgccgagaccggcggcggcgccgccgccgtggccagaagaaacgagagagagagaaacagagtgaagctggtgaacctgggcttccaggccctgagacagcacgtgccccacggcggcgccagcaagaagctgagcaaggtggagaccctgagaagcgccgtggagtacatcagagccctgcagagactgctggccgagcacgacgccgtgagaaacgccctggccggcggcctgagaccccaggccgtgagacccagcgcccccagaggcccccccggcaccacccccgtggccgccagccccagcagagccagcagcagccccggcagaggcggcagcagcgagcccggcagccccagaagcgcctacagcagcgacgacagcggctgcgagggcgccctgagccccgccgagagagagctgctggacttcagcagctggctgggcggctactag

SEQ ID NO: 71418 - DNA, 1542 bp, synthetic construct
  misc_feature 1..1542: note = Description of Artificial Sequence: Synthetic coding sequence
  source 1..1542: mol_type = other DNA
atgtgcagcctgggcctgttccccccccccccccccagaggccaggtgaccctgtacgagcacaacaacgagctggtgaccggcagcagctacgagagccccccccccgacttcagaggccagtggatcaacctgcccgtgctgcagctgaccaaggaccccctgaagacccccggcagactggaccacggcaccagaaccgccttcatccaccacagagagcaggtgtggaagagatgcatcaacatctggagagacgtgggcctgttcggcgtgctgaacgagatcgccaacagcgaggaggaggtgttcgagtgggtgaagaccgccagcggctgggccctggccctgtgcagatgggccagcagcctgcacggcagcctgttcccccacctgagcctgagaagcgaggacctgatcgccgagttcgcccaggtgaccaactgcaccatcgtgcccagcctgaagcacagactgcagagaaacgtggccagcctggcctggaagcccctgagcgccagcgtgctggccgtggcctgccagagctgcatcctgatctggaccctggaccccaccagcctgagcaccagacccagcagcggctgcgcccaggtgctgagccaccccggccacacccccgtgaccagcctggcctgggcccccagcggcggcagactgctgagcgccagccccgtggacgccgccatcagagtgtgggacgtgagcaccgagacctgcgtgcccctgccctggttcagaggcggcggcgtgaccaacctgctgtggagccccgacggcagcaagatcctggccaccacccccagcgccgtgttcagagtgtgggaggcccagatgtggacctgcgagagatggcccaccctgagcggcagatgccagaccggctgctggagccccgacggcagcagactgctgttcaccgtgctgggcgagcccctgatctacagcctgagcttccccgagagatgcggcgagggcaagggctgcgtgggcggcgccaagagcgccaccatcgtggccgacctgagcgagaccaccatccagacccccgacggcgaggagagactgggcggcgaggcccacagcatggtgtgggaccccagcggcgagagactggccgtgctgatgaagggcaagcccagagtgcaggacggcaagcccgtgatcctgctgttcagaaccagaaacagccccgtgttcgagctgctgccctgcggcatcatccagggcgagcccggcgcccagccccagctgatcaccttccaccccagcttcaacaagggcgccctgctgagcgtgggctggagcaccggcagaatcgcccacatccccctgtacttcgtgaacgcccagttccccagattcagccccgtgctgggcagagcccaggagccccccgccggcggcggcggcagcatccacgacctgcccctgttcaccgagaccagccccaccagcgccccctgggaccccctgcccggccccccccccgtgctgccccacagcccccacagccacctgtag

SEQ ID NO: 71419 - DNA, 1683 bp, synthetic construct
  misc_feature 1..1683: note = Description of Artificial Sequence: Synthetic coding sequence
  source 1..1683: mol_type = other DNA
atgccccagaccagaagccaggcccaggccaccatcagcttccccaagagaaagctgagcagagccctgaacaaggccaagaacagcagcgacgccaagctggagcccaccaacgtgcagaccgtgacctgcagccccagagtgaaggccctgcccctgagccccagaaagagactgggcgacgacaacctgtgcaacaccccccacctgcccccctgcagcccccccaagcagggcaagaaggagaacggccccccccacagccacaccctgaagggcagaagactggtgttcgacaaccagctgaccatcaagagccccagcaagagagagctggccaaggtgcaccagaacaagatcctgagcagcgtgagaaagagccaggagatcaccaccaacagcgagcagagatgccccctgaagaaggagagcgcctgcgtgagactgttcaagcaggagggcacctgctaccagcaggccaagctggtgctgaacaccgccgtgcccgacagactgcccgccagagagagagagatggacgtgatcagaaacttcctgagagagcacatctgcggcaagaaggccggcagcctgtacctgagcggcgcccccggcaccggcaagaccgcctgcctgagcagaatcctgcaggacctgaagaaggagctgaagggcttcaagaccatcatgctgaactgcatgagcctgagaaccgcccaggccgtgttccccgccatcgcccaggagatctgccaggaggaggtgagcagacccgccggcaaggacatgatgagaaagctggagaagcacatgaccgccgagaagggccccatgatcgtgctggtgctggacgagatggaccagctggacagcaagggccaggacgtgctgtacaccctgttcgagtggccctggctgagcaacagccacctggtgctgatcggcatcgccaacaccctggacctgaccgacagaatcctgcccagactgcaggccagagagaagtgcaagccccagctgctgaacttccccccctacaccagaaaccagatcgtgaccatcctgcaggacagactgaaccaggtgagcagagaccaggtgctggacaacgccgccgtgcagttctgcgccagaaaggtgagcgccgtgagcggcgacgtgagaaaggccctggacgtgtgcagaagagccatcgagatcgtggagagcgacgtgaagagccagaccatcctgaagcccctgagcgagtgcaagagccccagcgagcccctgatccccaagagagtgggcctgatccacatcagccaggtgatcagcgaggtggacggcaacagaatgaccctgagccaggagggcgcccaggacagcttccccctgcagcagaagatcctggtgtgcagcctgatgctgctgatcagacagctgaagatcaaggaggtgaccctgggcaagctgtacgaggcctacagcaaggtgtgcagaaagcagcaggtggccgccgtggaccagagcgagtgcctgagcctgagcggcctgctggaggccagaggcatcctgggcctgaagagaaacaaggagaccagactgaccaaggtgttcttcaagatcgaggagaaggagatcgagcacgccctgaaggacaaggccctgatcggcaacatcctggccaccggcctgccctag

SEQ ID NO: 71420 - DNA, 339 bp, synthetic construct
  misc_feature 1..339: note = Description of Artificial Sequence: Synthetic coding sequence
  source 1..339: mol_type = other DNA
atggccgagcaggccaccaagagcgtgctgttcgtgtgcctgggcaacatctgcagaagccccatcgccgaggccgtgttcagaaagctggtgaccgaccagaacatcagcgagaactggagagtggacagcgccgccaccagcggctacgagatcggcaacccccccgactacagaggccagagctgcatgaagagacacggcatccccatgagccacgtggccagacaggtgcccagcctggacctgaagctgtgcgtgctgtgcttcagcggcagcctgaccgccgtgctgttcctgaccggcacctgggccggcccccagacccaggagctgtag

SEQ ID NO: 71421 - DNA, 477 bp, synthetic construct
  misc_feature 1..477: note = Description of Artificial Sequence: Synthetic coding sequence
  source 1..477: mol_type = other DNA
atggccgagcaggccaccaagagcgtgctgttcgtgtgcctgggcaacatctgcagaagccccatcgccgaggccgtgttcagaaagctggtgaccgaccagaacatcagcgagaactggagagtggacagcgccgccaccagcggctacgagatcggcaacccccccgactacagaggccagagctgcatgaagagacacggcatccccatgagccacgtggccagacagatcaccaaggaggacttcgccaccttcgactacatcctgtgcatggacgagagcaacctgagagacctgaacagaaagagcaaccaggtgaagacctgcaaggccaagatcgagctgctgggcagctacgacccccagaagcagctgatcatcgaggacccctactacggcaacgacagcgacttcgagaccgtgtaccagcagtgcgtgagatgctgcagagccttcctggagaaggcccactag

SEQ ID NO: 71422 - DNA, 477 bp, synthetic construct
  misc_feature 1..477: note = Description of Artificial Sequence: Synthetic coding sequence
  source 1..477: mol_type = other DNA
atggccgagcaggccaccaagagcgtgctgttcgtgtgcctgggcaacatctgcagaagccccatcgccgaggccgtgttcagaaagctggtgaccgaccagaacatcagcgagaactgggtgatcgacagcggcgccgtgagcgactggaacgtgggcagaagccccgaccccagagccgtgagctgcctgagaaaccacggcatccacaccgcccacaaggccagacagatcaccaaggaggacttcgccaccttcgactacatcctgtgcatggacgagagcaacctgagagacctgaacagaaagagcaaccaggtgaagacctgcaaggccaagatcgagctgctgggcagctacgacccccagaagcagctgatcatcgaggacccctactacggcaacgacagcgacttcgagaccgtgtaccagcagtgcgtgagatgctgcagagccttcctggagaaggcccactag

SEQ ID NO: 71423 - DNA, 219 bp, synthetic construct
  misc_feature 1..219: note = Description of Artificial Sequence: Synthetic coding sequence
  source 1..219: mol_type = other DNA
atggccgagcaggccaccaagagcgtgctgttcgtgtgcctgggcaacatctgcagaagccccatcgccgaggccgtgttcagaaagctggtgaccgaccagaacatcagcgagaactggagagtggacagcgccgccaccagcggcggcagcctgaccgccgtgctgttcctgaccggcacctgggccggcccccagaccaagagctgcgccgcctag

SEQ ID NO: 71424 - DNA, 483 bp, synthetic construct
  misc_feature 1..483: note = Description of Artificial Sequence: Synthetic coding sequence
  source 1..483: mol_type = other DNA
atggccggcaagagaagcggctggagcagagccgccctgctgcagctgctgctgggcgtgaacctggtggtgatgccccccaccagagccagaagcctgagattcgtgaccctgctgtacagacacggcgacagaagccccgtgaagacctaccccaaggacccctaccaggaggaggagtggccccagggcttcggccagctgaccaaggagggcatgctgcagcactgggagctgggccaggccctgagacagagataccacggcttcctgaacaccagctaccacagacaggaggtgtacgtgagaagcaccgacttcgacagaaccctgatgagcgccgaggccaacctggccggcctgttcccccccaacggcatgcagagattcaaccccaacatcagctggcagcccatccccgtgcacaccgtgcccatcaccgaggacagagtgagagtggccagccccagcctgggctggtag

SEQ ID NO: 71425 - DNA, 1272 bp, synthetic construct
  misc_feature 1..1272: note = Description of Artificial Sequence: Synthetic coding sequence
  source 1..1272: mol_type = other DNA
atggccggcaagagaagcggctggagcagagccgccctgctgcagctgctgctgggcgtgaacctggtggtgatgccccccaccagagccagaagcctgagattcgtgaccctgctgtacagacacggcgacagaagccccgtgaagacctaccccaaggacccctaccaggaggaggagtggccccagggcttcggccagctgaccaaggagggcatgctgcagcactgggagctgggccaggccctgagacagagataccacggcttcctgaacaccagctaccacagacaggaggtgtacgtgagaagcaccgacttcgacagaaccctgatgagcgccgaggccaacctggccggcctgttcccccccaacggcatgcagagattcaaccccaacatcagctggcagcccatccccgtgcacaccgtgcccatcaccgaggacagactgctgaagttccccctgggcccctgccccagatacgagcagctgcagaacgagaccagacagacccccgagtaccagaacgagagcagcagaaacgcccagttcctggacatggtggccaacgagaccggcctgaccgacctgaccctggagaccgtgtggaacgtgtacgacaccctgttctgcgagcagacccacggcctgagactgcccccctgggccagcccccagaccatgcagagactgagcagactgaaggacttcagcttcagattcctgttcggcatctaccagcaggccgagaaggccagactgcagggcggcgtgctgctggcccagatcagaaagaacctgaccctgatggccaccaccagccagctgcccaagctgctggtgtacagcgcccacgacaccaccctggtggccctgcagatggccctggacgtgtacaacggcgagcaggccccctacgccagctgccacatcttcgagctgtaccaggaggacagcggcaacttcagcgtggagatgtacttcagaaacgagagcgacaaggccccctggcccctgagcctgcccggctgcccccacagatgccccctgcaggacttcctgagactgaccgagcccgtggtgcccaaggactggcagcaggagtgccagctggccagcggccccgccgacaccgaggtgatcgtggccctggccgtgtgcggcagcatcctgttcctgctgatcgtgctgctgctgaccgtgctgttcagaatgcaggcccagccccccggctacagacacgtggccgacggcgaggaccacgcctag

SEQ ID NO: 71426 - DNA, 1176 bp, synthetic construct
  misc_feature 1..1176: note = Description of Artificial Sequence: Synthetic coding sequence
  source 1..1176: mol_type = other DNA
atggccggcaagagaagcggctggagcagagccgccctgctgcagctgctgctgggcgtgaacctggtggtgatgccccccaccagagccagaagcctgagattcgtgaccctggagggcatgctgcagcactgggagctgggccaggccctgagacagagataccacggcttcctgaacaccagctaccacagacaggaggtgtacgtgagaagcaccgacttcgacagaaccctgatgagcgccgaggccaacctggccggcctgttcccccccaacggcatgcagagattcaaccccaacatcagctggcagcccatccccgtgcacaccgtgcccatcaccgaggacagactgctgaagttccccctgggcccctgccccagatacgagcagctgcagaacgagaccagacagacccccgagtaccagaacgagagcagcagaaacgcccagttcctggacatggtggccaacgagaccggcctgaccgacctgaccctggagaccgtgtggaacgtgtacgacaccctgttctgcgagcagacccacggcctgagactgcccccctgggccagcccccagaccatgcagagactgagcagactgaaggacttcagcttcagattcctgttcggcatctaccagcaggccgagaaggccagactgcagggcggcgtgctgctggcccagatcagaaagaacctgaccctgatggccaccaccagccagctgcccaagctgctggtgtacagcgcccacgacaccaccctggtggccctgcagatggccctggacgtgtacaacggcgagcaggccccctacgccagctgccacatcttcgagctgtaccaggaggacagcggcaacttcagcgtggagatgtacttcagaaacgagagcgacaaggccccctggcccctgagcctgcccggctgcccccacagatgccccctgcaggacttcctgagactgaccgagcccgtggtgcccaaggactggcagcaggagtgccagctggccagcggccccgccgacaccgaggtgatcgtggccctggccgtgtgcggcagcatcctgttcctgctgatcgtgctgctgctgaccgtgctgttcagaatgcaggcccagccccccggctacagacacgtggccgacggcgaggaccacgcctag

SEQ ID NO: 71427 - DNA, 711 bp, synthetic construct
  misc_feature 1..711: note = Description of Artificial Sequence: Synthetic coding sequence
  source 1..711: mol_type = other DNA
atggtggccaacgagaccggcctgaccgacctgaccctggagaccgtgtggaacgtgtacgacaccctgttctgcgagcagacccacggcctgagactgcccccctgggccagcccccagaccatgcagagactgagcagactgaaggacttcagcttcagattcctgttcggcatctaccagcaggccgagaaggccagactgcagggcggcgtgctgctggcccagatcagaaagaacctgaccctgatggccaccaccagccagctgcccaagctgctggtgtacagcgcccacgacaccaccctggtggccctgcagatggccctggacgtgtacaacggcgagcaggccccctacgccagctgccacatcttcgagctgtaccaggaggacagcggcaacttcagcgtggagatgtacttcagaaacgagagcgacaaggccccctggcccctgagcctgcccggctgcccccacagatgccccctgcaggacttcctgagactgaccgagcccgtggtgcccaaggactggcagcaggagtgccagctggccagcggccccgccgacaccgaggtgatcgtggccctggccgtgtgcggcagcatcctgttcctgctgatcgtgctgctgctgaccgtgctgttcagaatgcaggcccagccccccggctacagacacgtggccgacggcgaggaccacgcctag

SEQ ID NO: 71428 - DNA, 1242 bp, synthetic construct
  misc_feature 1..1242: note = Description of Artificial Sequence: Synthetic coding sequence
  source 1..1242: mol_type = other DNA
atggccggcaagagaagcggctggagcagagccgccctgctgcagctgctgctgggcgtgaacctggtggtgatgccccccaccagagccagaagcctgagattcgtgaccctgctgtacagacacggcgacagaagccccgtgaagacctaccccaaggacccctaccaggaggaggagtggccccagggcttcggccagctgaccaaggagggcatgctgcagagataccacggcttcctgaacaccagctaccacagacaggaggtgtacgtgagaagcaccgacttcgacagaaccctgatgagcgccgaggccaacctggccggcctgttcccccccaacggcatgcagagattcaaccccaacatcagctggcagcccatccccgtgcacaccgtgcccatcaccgaggacagactgctgaagttccccctgggcccctgccccagatacgagcagctgcagaacgagaccagacagacccccgagtaccagaacgagagcagcagaaacgcccagttcctggacatggtggccaacgagaccggcctgaccgacctgaccctggagaccgtgtggaacgtgtacgacaccctgttctgcgagcagacccacggcctgagactgcccccctgggccagcccccagaccatgcagagactgagcagactgaaggacttcagcttcagattcctgttcggcatctaccagcaggccgagaaggccagactgcagggcggcgtgctgctggcccagatcagaaagaacctgaccctgatggccaccaccagccagctgcccaagctgctggtgtacagcgcccacgacaccaccctggtggccctgcagatggccctggacgtgtacaacggcgagcaggccccctacgccagctgccacatcttcgagctgtaccaggaggacagcggcaacttcagcgtggagatgtacttcagaaacgagagcgacaaggccccctggcccctgagcctgcccggctgcccccacagatgccccctgcaggacttcctgagactgaccgagcccgtggtgcccaaggactggcagcaggagtgccagctggccagcggccccgccgacaccgaggtgatcgtggccctggccgtgtgcggcagcatcctgttcctgctgatcgtgctgctgctgaccgtgctgttcagaatgcaggcccagccccccggctacagacacgtggccgacggcgaggaccacgcctag

SEQ ID NO: 71429 - DNA, 978 bp, synthetic construct
  misc_feature 1..978: note = Description of Artificial Sequence: Synthetic coding sequence
  source 1..978: mol_type = other DNA
atggacatgtggaccgccctgctgatcctgcaggccctgctgctgcccagcctggccgacggcgccacccccgccctgagattcgtggccgtgggcgactggggcggcgtgcccaacgcccccttccacaccgccagagagatggccaacgccaaggagatcgccagaaccgtgcagatcctgggcgccgacttcatcctgagcctgggcgacaacttctacttcaccggcgtgcaggacatcaacgacaagagattccaggagaccttcgaggacgtgttcagcgacagaagcctgagaaaggtgccctggtacgtgctggccggcaaccacgaccacctgggcaacgtgagcgcccagatcgcctacagcaagatcagcaagagatggaacttccccagccccttctacagactgcacttcaagatcccccagaccaacgtgagcgtggccatcttcatgctggacaccgtgaccctgtgcggcaacagcgacgacttcctgagccagcagcccgagagacccagagacgtgaagctggccagaacccagctgagctggctgaagaagcagctggccgccgccagagaggactacgtgctggtggccggccactaccccgtgtggagcatcgccgagcacggccccacccactgcctggtgaagcagctgagacccctgctggccacctacggcgtgaccgcctacctgtgcggccacgaccacaacctgcagtacctgcaggacgagaacggcgtgggctacgtgctgagcggcgccggcaacttcatggaccccagcaagagacaccagagaaaggtgcccaacggctacctgagattccactacggcaccgaggacagcctgggcggcttcgcctacgtggagatcagcagcaaggagatgaccgtgacctacatcgaggccagcggcaagagcctgttcaagaccagactgcccagaagagccagaccctag

SEQ ID NO: 71430 - DNA, 1239 bp, synthetic construct
  misc_feature 1..1239: note = Description of Artificial Sequence: Synthetic coding sequence
  source 1..1239: mol_type = other DNA
atgggcagcccctggaacggcagcgacggccccgagggcgccagagagcccccctggcccgccctgcccccctgcgacgagagaagatgcagccccttccccctgggcgccctggtgcccgtgaccgccgtgtgcctgtgcctgttcgtggtgggcgtgagcggcaacgtggtgaccgtgatgctgatcggcagatacagagacatgagaaccaccaccaacctgtacctgggcagcatggccgtgagcgacctgctgatcctgctgggcctgcccttcgacctgtacagactgtggagaagcagaccctgggtgttcggccccctgctgtgcagactgagcctgtacgtgggcgagggctgcacctacgccaccctgctgcacatgaccgccctgagcgtggagagatacctggccatctgcagacccctgagagccagagtgctggtgaccagaagaagagtgagagccctgatcgccgtgctgtgggccgtggccctgctgagcgccggccccttcctgttcctggtgggcgtggagcaggaccccggcatcagcgtggtgcccggcctgaacggcaccgccagaatcgccagcagccccctggccagcagcccccccctgtggctgagcagagcccccccccccagcccccccagcggccccgagaccgccgaggccgccgccctgttcagcagagagtgcagacccagccccgcccagctgggcgccctgagagtgatgctgtgggtgaccaccgcctacttcttcctgcccttcctgtgcctgagcatcctgtacggcctgatcggcagagagctgtggagcagcagaagacccctgagaggccccgccgccagcggcagagagagaggccacagacagaccgtgagagtgctgctggtggtggtgctggccttcatcatctgctggctgcccttccacgtgggcagaatcatctacatcaacaccgaggacagcagaatgatgtacttcagccagtacttcaacatcgtggccctgcagctgttctacctgagcgccagcatcaaccccatcctgtacaacctgatcagcaagaagtacagagccgccgccttcaagctgctgctggccagaaagagcagacccagaggcttccacagaagcagagacaccgccggcgaggtggccggcgacaccggcggcgacaccgtgggctacaccgagaccagcgccaacgtgaagaccatgggctag

SEQ ID NO: 71431 - DNA, 978 bp, synthetic construct; identical to SEQ ID NO: 71429
  misc_feature 1..978: note = Description of Artificial Sequence: Synthetic coding sequence
  source 1..978: mol_type = other DNA

SEQ ID NO: 71432 - DNA, 978 bp, synthetic construct; identical to SEQ ID NO: 71429
  misc_feature 1..978: note = Description of Artificial Sequence: Synthetic coding sequence
  source 1..978: mol_type = other DNA

SEQ ID NO: 71433 - DNA, 1161 bp, synthetic construct
  misc_feature 1..1161: note = Description of Artificial Sequence: Synthetic coding sequence
  source 1..1161: mol_type = other DNA
atgagagccgcccccctgctgctggccagagccgccagcctgagcctgggcttcctgttcctgctgttcttctggctggacagaagcgtgctggccaaggagctgaagttcgtgaccctggtgttcagacacggcgacagaagccccatcgacaccttccccaccgaccccatcaaggagagcagctggccccagggcttcggccagctgacccagctgggcatggagcagcactacgagctgggcgagtacatcagaaagagatacagaaagttcctgaacgagagctacaagcacgagcaggtgtacatcagaagcaccgacgtggacagaaccctgatgagcgccatgaccaacctggccgccctgttcccccccgagggcgtgagcatctggaaccccatcctgctgtggcagcccatccccgtgcacaccgtgcccctgagcgaggaccagctgctgtacctgcccttcagaaactgccccagattccaggagctggagagcgagaccctgaagagcgaggagttccagaagagactgcacccctacaaggacttcatcgccaccctgggcaagctgagcggcctgcacggccaggacctgttcggcatctggagcaaggtgtacgaccccctgtactgcgagagcgtgcacaacttcaccctgcccagctgggccaccgaggacaccatgaccaagctgagagagctgagcgagctgagcctgctgagcctgtacggcatccacaagcagaaggagaagagcagactgcagggcggcgtgctggtgaacgagatcctgaaccacatgaagagagccacccagatccccagctacaagaagctgatcatgtacagcgcccacgacaccaccgtgagcggcctgcagatggccctggacgtgtacaacggcctgctgcccccctacgccagctgccacctgaccgagctgtacttcgagaagggcgagtacttcgtggagatgtactacagaaacgagacccagcacgagccctaccccctgatgctgcccggctgcagccccagctgccccctggagagattcgccgagctggtgggccccgtgatcccccaggactggagcaccgagtgcatgaccaccaacagccaccagggcaccgaggacagcaccgactag

SEQ ID NO: 71434 - DNA, 1257 bp, synthetic construct
  misc_feature 1..1257: note = Description of Artificial Sequence: Synthetic coding sequence
  source 1..1257: mol_type = other DNA
atgagagccgcccccctgctgctggccagagccgccagcctgagcctgggcttcctgttcctgctgttcttctggctggacagaagcgtgctggccaaggagctgaagttcgtgaccctggtgttcagacacggcgacagaagccccatcgacaccttccccaccgaccccatcaaggagagcagctggccccagggcttcggccagctgacccagctgggcatggagcagcactacgagctgggcgagtacatcagaaagagatacagaaagttcctgaacgagagctacaagcacgagcaggtgtacatcagaagcaccgacgtggacagaaccctgatgagcgccatgaccaacctggccgccctgttcccccccgagggcgtgagcatctggaaccccatcctgctgtggcagcccatccccgtgcacaccgtgcccctgagcgaggaccagctgctgtacctgcccttcagaaactgccccagattccaggagctggagagcgagaccctgaagagcgaggagttccagaagagactgcacccctacaaggacttcatcgccaccctgggcaagctgagcggcctgcacggccaggacctgttcggcatctggagcaaggtgtacgaccccctgtactgcgagagcgtgcacaacttcaccctgcccagctgggccaccgaggacaccatgaccaagctgagagagctgagcgagctgagcctgctgagcctgtacggcatccacaagcagaaggagaagagcagactgcagggcggcgtgctggtgaacgagatcctgaaccacatgaagagagccacccagatccccagctacaagaagctgatcatgtacagcgcccacgacaccaccgtgagcggcctgcagatggccctggacgtgtacaacggcctgctgcccccctacgccagctgccacctgaccgagctgtacttcgagaagggcgagtacttcgtggagatgtactacagaaacgagacccagcacgagccctaccccctgatgctgcccggctgcagccccagctgccccctggagagattcgccgagctggtgggccccgtgatcccccaggactggagcaccgagtgcatgaccaccaacagccaccaggtgctgaaggtgatcttcgccgtggccttctgcctgatcagcgccgtgctgatggtgctgctgttcatccacatcagaagaggcctgtgctggcagagagagagctacggcaacatctag

SEQ ID NO: 71435 - DNA, 1281 bp, synthetic construct
  misc_feature 1..1281: note = Description of Artificial Sequence: Synthetic coding sequence
  source 1..1281: mol_type = other DNA
atggccggcctgggcttctggggccaccccgccggccccctgctgctgctgctgctgctggtgctgccccccagagccctgcccgagggccccctggtgttcgtggccctggtgttcagacacggcgacagagcccccctggccagctaccccatggacccccacaaggaggtggccagcaccctgtggcccagaggcctgggccagctgaccaccgagggcgtgagacagcagctggagctgggcagattcctgagaagcagatacgaggccttcctgagccccgagtacagaagagaggaggtgtacatcagaagcaccgacttcgacagaaccctggagagcgcccaggccaacctggccggcctgttccccgaggccgcccccggcagccccgaggccagatggagacccatccccgtgcacaccgtgcccgtggccgaggacaagctgctgagattccccatgagaagctgccccagataccacgagctgctgagagaggccaccgaggccgccgagtaccaggaggccctggagggctggaccggcttcctgagcagactggagaacttcaccggcctgagcctggtgggcgagcccctgagaagagcctggaaggtgctggacaccctgatgtgccagcaggcccacggcctgcccctgcccgcctgggccagccccgacgtgctgagaaccctggcccagatcagcgccctggacatcggcgcccacgtgggcccccccagagccgccgagaaggcccagctgaccggcggcatcctgctgaacgccatcctggccaacttcagcagagtgcagagactgggcctgcccctgaagatggtgatgtacagcgcccacgacagcaccctgctggccctgcagggcgccctgggcctgtacgacggccacacccccccctacgccgcctgcctgggcttcgagttcagaaagcacctgggcaaccccgccaaggacggcggcaacgtgaccgtgagcctgttctacagaaacgacagcgcccacctgcccctgcccctgagcctgcccggctgccccgccccctgccccctgggcagattctaccagctgaccgcccccgccagaccccccgcccacggcgtgagctgccacggcccctacgaggccgccatcccccccgcccccgtggtgcccctgctggccggcgccgtggccgtgctggtggccctgagcctgggcctgggcctgctggcctggagacccggctgcctgagagccctgggcggccccgtgtag

SEQ ID NO: 71436 - DNA, 1002 bp, synthetic construct
  misc_feature 1..1002: note = Description of Artificial Sequence: Synthetic coding sequence
  source 1..1002: mol_type = other DNA
atggccggcctgggcttctggggccaccccgccggccccctgctgctgctgctgctgctggtgctgccccccagagccctgcccgagggccccctggtgttcgtggccctggtgttcagacacggcgacagagcccccctggccagctaccccatggacccccacaaggaggtggccagcaccctgtggcccagaggcctgggccagctgaccaccgagggcgtgagacagcagctggagctgggcagattcctgagaagcagatacgagggcttcctgagcagactggagaacttcaccggcctgagcctggtgggcgagcccctgagaagagcctggaaggtgctggacaccctgatgtgccagcaggcccacggcctgcccctgcccgcctgggccagccccgacgtgctgagaaccctggcccagatcagcgccctggacatcggcgcccacgtgggcccccccagagccgccgagaaggcccagctgaccggcggcatcctgctgaacgccatcctggccaacttcagcagagtgcagagactgggcctgcccctgaagatggtgatgtacagcgcccacgacagcaccctgctggccctgcagggcgccctgggcctgtacgacggccacacccccccctacgccgcctgcctgggcttcgagttcagaaagcacctgggcaaccccgccaaggacggcggcaacgtgaccgtgagcctgttctacagaaacgacagcgcccacctgcccctgcccctgagcctgcccggctgccccgccccctgccccctgggcagattctaccagctgaccgcccccgccagaccccccgcccacggcgtgagctgccacggcccctacgaggccgccatcccccccgcccccgtggtgcccctgctggccggcgccgtggccgtgctggtggccctgagcctgggcctgggcctgctggcctggagacccggctgcctgagagccctgggcggccccgtgtag

SEQ ID NO: 71437 - DNA, 633 bp, synthetic construct
  misc_feature 1..633: note = Description of Artificial Sequence: Synthetic coding sequence
  source 1..633: mol_type = other DNA
atggagatgggcagaagaatccacctggagctgagaaacagaacccccagcgacgtgaaggagctggtgctggacaacagcagaagcaacgagggcaagctggagggcctgaccgacgagttcgaggagctggagttcctgagcaccatcaacgtgggcctgaccagcatcgccaacctgcccaagctgaacaagctgaagaagctggagctgagcgacaacagagtgagcggcggcctggaggtgctggccgagaagtgccccaacctgacccacctgaacctgagcggcaacaagatcaaggacctgagcaccatcgagcccctgaagaagctggagaacctgaagagcctggacctgttcaactgcgaggtgaccaacctgaacgactacagagagaacgtgttcaagctgctgccccagctgacctacctggacggctacgacagagacgacaaggaggcccccgacagcgacgccgagggctacgtggagggcctggacgacgaggaggaggacgaggacgaggaggagtacgacgacgaggagggctacaacgacggcgaggtggacgacgaggaggacaagaagaagaagaagaagaagaagaagaagaagaagaagaagaagtag

SEQ ID NO: 71438 - DNA, 750 bp, synthetic construct
  misc_feature 1..750: note = Description of Artificial Sequence: Synthetic coding sequence
  source 1..750: mol_type = other DNA
atggagatgggcagaagaatccacctggagctgagaaacagaacccccagcgacgtgaaggagctggtgctggacaacagcagaagcaacgagggcaagctggagggcctgaccgacgagttcgaggagctggagttcctgagcaccatcaacgtgggcctgaccagcatcgccaacctgcccaagctgaacaagctgaagaagctggagctgagcgacaacagagtgagcggcggcctggaggtgctggccgagaagtgccccaacctgacccacctgaacctgagcggcaacaagatcaaggacctgagcaccatcgagcccctgaagaagctggagaacctgaagagcctggacctgttcaactgcgaggtgaccaacctgaacgactacagagagaacgtgttcaagctgctgccccagctgacctacctggacggctacgacagagacgacaaggaggcccccgacagcgacgccgagggctacgtggagggcctggacgacgaggaggaggacgaggacgaggaggagtacgacgaggacgcccaggtggtggaggacgaggaggacgaggacgaggaggaggagggcgaggaggaggacgtgagcggcgaggaggaggaggacgaggagggctacaacgacggcgaggtggacgacgaggaggacgaggaggagctgggcgaggaggagagaggccagaagagaaagagagagcccgaggacgagggcgaggacgacgactag

SEQ ID NO: 71439 - DNA, 396 bp, synthetic construct
  misc_feature 1..396: note = Description of Artificial Sequence: Synthetic coding sequence
  source 1..396: mol_type = other DNA
atggagatgggcaagtggatccacctggagctgagaaacagaacccccagcgacgtgaaggagctgttcctggacaacagccagagcaacgagggcaagctggagggcctgaccgacgagttcgaggagctggagctgctgaacaccatcaacatcggcctgaccagcatcgccaacctgcccaagctgaacaagctgaagaagctggagctgagcagcaacagagccagcgtgggcctggaggtgctggccgagaagtgccccaacctgatccacctgaacctgagcggcaacaagatcaaggacctgagcaccatcgagcccctgaagaagctggagaacctggagagcctggacctgttcacctgcgaggtgaccaacctgaacaactactag

SEQ ID NO: 71440 - DNA, 807 bp, synthetic construct
  misc_feature 1..807: note = Description of Artificial Sequence: Synthetic coding sequence
  source 1..807: mol_type = other DNA
atggagatgaagaagaagatcaacctggagctgagaaacagaagccccgaggaggtgaccgagctggtgctggacaactgcctgtgcgtgaacggcgagatcgagggcctgaacgacaccttcaaggagctggagttcctgagcatggccaacgtggagctgagcagcctggccagactgcccagcctgaacaagctgagaaagctggagctgagcgacaacatcatcagcggcggcctggaggtgctggccgagaagtgccccaacctgacctacctgaacctgagcggcaacaagatcaaggacctgagcaccgtggaggccctgcagaacctgaagaacctgaagagcctggacctgttcaactgcgagatcaccaacctggaggactacagagagagcatcttcgagctgctgcagcagatcacctacctggacggcttcgaccaggaggacaacgaggcccccgacagcgaggaggaggacgacgaggacggcgacgaggacgacgaggaggaggaggagaacgaggccggcccccccgagggctacgaggaggaggaggaggaggaggaggaggaggacgaggacgaggacgaggacgaggacgaggccggcagcgagctgggcgagggcgaggaggaggtgggcctgagctacctgatgaaggaggagatccaggacgaggaggacgacgacgactacgtggaggagggcgaggaggaggaggaggaggaggagggcggcctgagaggcgagaagagaaagagagacgccgaggacgacggcgaggaggaggacgactag

SEQ ID NO: 71441 - DNA, 411 bp, synthetic construct
  misc_feature 1..411: note = Description of Artificial Sequence: Synthetic coding sequence
  source 1..411: mol_type = other DNA
atggagatgaagaagaagatcaacctggagctgagaaacagaagccccgaggaggaggacaacgaggcccccgacagcgaggaggaggacgacgaggacggcgacgaggacgacgaggaggaggaggagaacgaggccggcccccccgagggctacgaggaggaggaggaggaggaggaggaggaggacgaggacgaggacgaggacgaggacgaggccggcagcgagctgggcgagggcgaggaggaggtgggcctgagctacctgatgaaggaggagatccaggacgaggaggacgacgacgactacgtggaggagggcgaggaggaggaggaggaggaggagggcggcctgagaggcgagaagagaaagagagacgccgaggacgacggcgaggaggaggacgactag

SEQ ID NO: 71442 - DNA, 663 bp, synthetic construct
  misc_feature 1..663: note = Description of Artificial Sequence: Synthetic coding sequence
  source 1..663: mol_type = other DNA
atggccaacgtggagctgagcagcctggccagactgcccagcctgaacaagctgagaaagctggagctgagcgacaacatcatcagcggcggcctggaggtgctggccgagaagtgccccaacctgacctacctgaacctgagcggcaacaagatcaaggacctgagcaccgtggaggccctgcagaacctgaagaacctgaagagcctggacctgttcaactgcgagatcaccaacctggaggactacagagagagcatcttcgagctgctgcagcagatcacctacctggacggcttcgaccaggaggacaacgaggcccccgacagcgaggaggaggacgacgaggacggcgacgaggacgacgaggaggaggaggagaacgaggccggcccccccgagggctacgaggaggaggaggaggaggaggaggaggaggacgaggacgaggacgaggacgaggacgaggccggcagcgagctgggcgagggcgaggaggaggtgggcctgagctacctgatgaaggaggagatccaggacgaggaggacgacgacgactacgtggaggagggcgaggaggaggaggaggaggaggagggcggcctgagaggcgagaagagaaagagagacgccgaggacgacggcgaggaggaggacgactag

SEQ ID NO: 71443 - DNA, 684 bp, synthetic construct
  misc_feature 1..684: note = Description of Artificial Sequence: Synthetic coding sequence
  source 1..684: mol_type = other DNA
atggagatgaagaagaagatcaacctggagctgagaaacagaagccccgaggaggtgaccgagctggtgctggacaactgcctgtgcgtgaacggcgagatcgagggcctgaacgacaccttcaaggagctggagttcctgagcatggccaacgtggagctgagcagcctggccagactgcccagcctgaacaagctgagaaagcagaacctgaagaacctgaagagcctggacctgttcaactgcgagatcaccaacctggaggactacagagagagcatcttcgagctgctgcagcagatcacctacctggacggcttcgaccaggaggacaacgaggcccccgacagcgaggaggaggacgacgaggacggcgacgaggacgacgaggaggaggaggagaacgaggccggcccccccgagggctacgaggaggaggaggaggaggaggaggaggaggacgaggacgaggacgaggacgaggacgaggccggcagcgagctgggcgagggcgaggaggaggtgggcctgagctacctgatgaaggaggagatccaggacgaggaggacgacgacgactacgtggaggagggcgaggaggaggaggaggaggaggagggcggcctgagaggcgagaagagaaagagagacgccgaggacgacggcgaggaggaggacgactag

SEQ ID NO: 71444 - DNA, 2076 bp, synthetic construct
  misc_feature 1..2076: note = Description of Artificial Sequence: Synthetic coding sequence
  source 1..2076: mol_type = other DNA
atggacggctgcaagaaggagctgcccagactgcaggagcccgaggaggacgaggactgctacatcctgaacgtgcagagcagcagcgacgacaccagcggcagcagcgtggccagaagagcccccaagagacaggccagctgcatcctgaacgtgcagagcagaagcggcgacaccagcggcagcagcgtggccagaagagcccccaagagacaggccagcagcgtggtggtgatcgacagcgacagcgacgaggagtgccacacccacgaggagaagaaggccaagctgctggagatcaacagcgacgacgagagccccgagtgctgccacgtgaagcccgccatccaggagccccccatcgtgatcagcgacgacgacaacgacgacgacaacggcaacgacctggaggtgcccgacgacaacagcgacgacagcgaggcccccgacgacaacagcgacgacagcgaggcccccgacgacaacagcgacgacagcgaggcccccgacgacaacagcgacgacagcgaggcccccgacgacaacagcgacgacagcgacgtgcccgacgacaacagcgacgacagcagcgacgacaacagcgacgacagcagcgacgacaacagcgacgacagcgacgtgcccgacgacaagagcgacgacagcgacgtgcccgacgacagcagcgacgacagcgacgtgcccgacgacagcagcgacgacagcgaggcccccgacgacagcagcgacgacagcgaggcccccgacgacagcagcgacgacagcgaggcccccgacgacagcagcgacgacagcgaggcccccgacgacagcagcgacgacagcgaggccagcgacgacagcagcgacgacagcgaggccagcgacgacagcagcgacgacagcgaggcccccgacgacaagagcgacgacagcgacgtgcccgaggacaagagcgacgacagcgacgtgcccgacgacaacagcgacgacctggaggtgcccgtgcccgccgaggacctgtgcaacgagggccagatcgccagcgacgaggaggagctggtggaggccgccgccgccgtgagccagcacgacagcagcgacgacgccggcgagcaggacctgggcgagaacctgagcaagccccccagcgaccccgaggccaaccccgaggtgagcgagagaaagctgcccaccgaggaggagcccgcccccgtggtggagcagagcggcaagagaaagagcaagaccaagaccatcgtggagccccccagaaagagacagaccaagaccaagaacatcgtggagccccccagaaagagacagaccaagaccaagaacatcgtggagcccctgagaaagagaaaggccaagaccaagaacgtgagcgtgacccccggccacaagaagagaggccccagcaagaagaagcccggcgccgccaaggtggagaagagaaagaccagaacccccaagtgcaaggtgcccggctgcttcctgcaggacctggagaagagcaagaagtacagcggcaagaacctgaagagaaacaaggacgagctggtgcagagaatctacgacctgttcaacagaagcgtgtgcgacaagaagctgcccgagaagctgagaatcggctggaacaacaagatggtgaagaccgccggcctgtgcagcaccggcgagatgtggtaccccaagtggagaagattcgccaagatccagatcggcctgaaggtgtgcgacagcgccgacagaatcagagacaccctgatccacgagatgtgccacgccgccagctggctgatcgacggcatccacgacagccacggcgacgcctggaagtactacgccagaaagagcaacagaatccaccccgagctgcccagagtgaccagatgccacaactacaagatcaactacaaggtgcactacgagtgcaccggctgcaagaccagaatcggctgctacaccaagagcctggacaccagcagattcatctgcgccaagtgcaagggcagcctggtgatggtgcccctgacccagaaggacggcaccagaatcgtgccccacgtgtag

SEQ ID NO: 71445 - DNA, 2076 bp, synthetic construct; identical to SEQ ID NO: 71444
  misc_feature 1..2076: note = Description of Artificial Sequence: Synthetic coding sequence
  source 1..2076: mol_type = other DNA

SEQ ID NO: 71446 - DNA, 540 bp, synthetic construct
  misc_feature 1..540: note = Description of Artificial Sequence: Synthetic coding sequence
  source 1..540: mol_type = other DNA
atggtgcaggcctggtacatggacgacgcccccggcgaccccagacagccccacagacccgaccccggcagacccgtgggcctggagcagctgagaagactgggcgtgctgtactggaagctggacgccgacaagtacgagaacgaccccgagctggagaagatcagaagagagagaaactacagctggatggacatcatcaccatctgcaaggacaagctgcccaactacgaggagaagatcaagatgttctacgaggagcacctgcacctggacgacgagatcagatacatcctggacggcagcggctacttcgacgtgagagacaaggaggaccagtggatcagaatcttcatggagaagggcgacatggtgaccctgcccgccggcatctaccacagattcaccgtggacgagaagaactacaccaaggccatgagactgttcgtgggcgagcccgtgtggaccgcctacaacagacccgccgaccacttcgaggccagaggccagtacgtgaagttcctggcccagaccgcctag

SEQ ID NO: 71447 - DNA, 2670 bp, synthetic construct
  misc_feature 1..2670: note = Description of Artificial Sequence: Synthetic coding sequence
  source 1..2670: mol_type = other DNA
atgagcaaccccttcgcccacctggccgagcccctggaccccgtgcagcccggcaagaagttcttcaacctgaacaagctggaggacagcagatacggcagactgcccttcagcatcagagtgctgctggaggccgccatcagaaactgcgacgagttcctggtgaagaagcaggacatcgagaacatcctgcactggaacgtgacccagcacaagaacatcgaggtgcccttcaagcccgccagagtgatcctgcaggacttcaccggcgtgcccgccgtggtggacttcgccgccatgagagacgccgtgaagaagctgggcggcgaccccgagaagatcaaccccgtgtgccccgccgacctggtgatcgaccacagcatccaggtggacttcaacagaagagccgacagcctgcagaagaaccaggacctggagttcgagagaaacagagagagattcgagttcctgaagtggggcagccaggccttccacaacatgagaatcatcccccccggcagcggcatcatccaccaggtgaacctggagtacctggccagagtggtgttcgaccaggacggctactactaccccgacagcctggtgggcaccgacagccacaccaccatgatcgacggcctgggcatcctgggctggggcgtgggcggcatcgaggccgaggccgtgatgctgggccagcccatcagcatggtgctgccccaggtgatcggctacagactgatgggcaagccccaccccctggtgaccagcaccgacatcgtgctgaccatcaccaagcacctgagacaggtgggcgtggtgggcaagttcgtggagttcttcggccccggcgtggcccagctgagcatcgccgacagagccaccatcgccaacatgtgccccgagtacggcgccaccgccgccttcttccccgtggacgaggtgagcatcacctacctggtgcagaccggcagagacgaggagaagctgaagtacatcaagaagtacctgcaggccgtgggcatgttcagagacttcaacgaccccagccaggaccccgacttcacccaggtggtggagctggacctgaagaccgtggtgccctgctgcagcggccccaagagaccccaggacaaggtggccgtgagcgacatgaagaaggacttcgagagctgcctgggcgccaagcagggcttcaagggcttccaggtggcccccgagcaccacaacgaccacaagaccttcatctacgacaacaccgagttcaccctggcccacggcagcgtggtgatcgccgccatcaccagctgcaccaacaccagcaaccccagcgtgatgctgggcgccggcctgctggccaagaaggccgtggacgccggcctgaacgtgatgccctacatcaagaccagcctgagccccggcagcggcgtggtgacctactacctgcaggagagcggcgtgatgccctacctgagccagctgggcttcgacgtggtgggctacggctgcatgacctgcatcggcaacagcggccccctgcccgagcccgtggtggaggccatcacccagggcgacctggtggccgtgggcgtgctgagcggcaacagaaacttcgagggcagagtgcaccccaacaccagagccaactacctggccagcccccccctggtgatcgcctacgccatcgccggcaccatcagaatcgacttcgagaaggagcccctgggcgtgaacgccaagggccagcaggtgttcctgaaggacatctggcccaccagagacgagatccaggccgtggagagacagtacgtgatccccggcatgttcaaggaggtgtaccagaagatcgagaccgtgaacgagagctggaacgccctggccacccccagcgacaagctgttcttctggaacagcaagagcacctacatcaagagcccccccttcttcgagaacctgaccctggacctgcagccccccaagagcatcgtggacgcctacgtgctgctgaacctgggcgacagcgtgaccaccgaccacatcagccccgccggcaacatcgccagaaacagccccgccgccagatacctgaccaacagaggcctgacccccagagagttcaacagctacggcagcagaagaggcaacgacgccgtgatggccagaggcaccttcgccaacatcagactgctgaacagattcctgaacaagcaggccccccagaccatccacctgcccagcggcgagatcctggacgtgttcgacgccgccgagagataccagcaggccggcctgcccctgatcgtgctggccggcaaggagtacggcgccggcagcagcagagactgggccgccaagggccccttcctgctgggcatcaaggccgtgctggccgagagctacgagagaatccacagaagcaacctggtgggcatgggcgtgatccccctggagtacctgcccggcgagaacgccgacgccctgggcctgaccggccaggagagatacaccatcatcatccccgagaacctgaagccccagatgaaggtgcaggtgaagctggacaccggcaagaccttccaggccgtgatgagattcgacaccgacgtggagctgacctacttcctgaacggcggcatcctgaactacatgatcagaaagatggccaagtag

SEQ ID NO: 71448 - DNA, 1305 bp, synthetic construct
  misc_feature 1..1305: note = Description of Artificial Sequence: Synthetic coding sequence
  source 1..1305: mol_type = other DNA
atgagcaaccccttcgcccacctggccgagcccctggaccccgtgcagcccggcaagaagttcttcaacctgaacaagctggaggacagcagatacggcagactgcccttcagcatcagagtgctgctggaggccgccatcagaaactgcgacgagttcctggtgaagaagcaggacatcgagaacatcctgcactggaacgtgacccagcacaagaacatcgaggtgcccttcaagcccgccagagtgatcctgcaggacttcaccggcgtgcccgccgtggtggacttcgccgccatgagagacgccgtgaagaagctgggcggcgaccccgagaagatcaaccccgtgtgccccgccgacctggtgatcgaccacagcatccaggtggacttcaacagaagagccgacagcctgcagaagaaccaggacctggagttcgagagaaacagagagagattcgagttcctgaagtggggcagccaggccttccacaacatgagaatcatcccccccggcagcggcatcatccaccaggtgaacctggagtacctggccagagtggtgttcgaccaggacggctactactaccccgacagcctggtgggcaccgacagccacaccaccatgatcgacggcctgggcatcctgggctggggcgtgggcggcatcgaggccgaggccgtgatgctgggccagcccatcagcatggtgctgccccaggtgatcggctacagactgatgggcaagccccaccccctggtgaccagcaccgacatcgtgctgaccatcaccaagcacctgagacaggtgggcgtggtgggcaagttcgtggagttcttcggccccggcgtggcccagctgagcatcgccgacagagccaccatcgccaacatgtgccccgagtacggcgccaccgccgccttcttccccgtggacgaggtgagcatcacctacctggtgcagaccggcagagacgaggagaagctgaagtacatcaagaagtacctgcaggccgtgggcatgttcagagacttcaacgaccccagccaggaccccgacttcacccaggtggtggagctggacctgaagaccgtggtgccctgctgcagcggccccaagagaccccaggacaaggtggccgtgagcgacatgaagaaggacttcgagagctgcctgggcgccaagcagggcttcaagggcttccaggtggcccccgagcaccacaacgaccacaagaccttcatctacgacaacaccgagttcaccctggcccacggcagcgtggtgatcgccgccctgtag

SEQ ID NO: 71449 - DNA, 2670 bp, synthetic construct; identical to SEQ ID NO: 71447
  misc_feature 1..2670: note = Description of Artificial Sequence: Synthetic coding sequence
  source 1..2670: mol_type = other DNA

SEQ ID NO: 71450 - DNA, 2346 bp, synthetic construct
  misc_feature 1..2346: note = Description of Artificial Sequence: Synthetic coding sequence
  source 1..2346: mol_type = other DNA
cagctggagcccagaagcgccagagagagagtgcccctgctgggcagcggcagccccgtggccggcgcccccccctgcagcagaagaaacacctggcccagcgtgatcatgagcaaccccttcgcccacctggccgagcccctggaccccgtgcagcccggcaagaagttcttcaacctgaacaagctggaggacagcagatacggcagactgcccttcagcatcagagtgctgctggaggccgccatcagaaactgcgacgagttcctggtgaagaagcaggacatcgagaacatcctgcactggaacgtgacccagcacaagaacatcgaggtgcccttcaagcccgccagagtgatcctgcaggacttcaccggcgtgcccgccgtggtggacttcgccgccatgagagacgccgtgaagaagctgggcggcgaccccgagaagatcaaccccgtgtgccccgccgacctggtgatcgaccacagcatccaggtggacttcaacagaagagccgacagcctgcagaagaaccaggacctggagttcgagagaaacagagagagattcgagttcctgaagtggggcagccaggccttccacaacatgagaatcatcccccccggcagcggcatcatccaccaggtgaacctggagtacctggccagagtggtgttcgaccaggacggctactactaccccgacagcctggtgggcaccgacagccacaccaccatgatcgacggcctgggcatcctgggctggggcgtgggcggcatcgaggccgaggccgtgatgctgggccagcccatcagcatggtgctgccccaggtgatcggctacagactgatgggcaagccccaccccctggtgaccagcaccgacatcgtgctgaccatcaccaagcacctgagacaggtgggcgtggtgggcaagttcgtggagttcttcggccccggcgtggcccagctgagcatcgccgacagagccaccatcgccaacatgtgccccgagtacggcgccaccgccgccttcttccccgtggacgaggtgagcatcacctacctggtgcagaccggcagagacgaggagaagctgaagtacatcaagaagtacctgcaggccgtgggcatgttcagagacttcaacgaccccagccaggaccccgacttcacccaggtggtggagctggacctgaagaccgtggtgccctgctgcagcggccccaagagaccccaggacaaggtggccgtgagcgacatgaagaaggacttcgagagctgcctgggcgccaagcagggcttcaagggcttccaggtggcccccgagcaccacaacgaccacaagaccttcatctacgacaacaccgagttcaccctggcccacggcagcgtggtgatcgccgccatcaccagctgcaccaacaccagcaaccccagcgtgatgctgggcgccggcctgctggccaagaaggccgtggacgccggcctgaacgtgatgccctacatcaagaccagcctgagccccggcagcggcgtggtgacctactacctgcaggagagcggcgtgatgccctacctgagccagctgggcttcgacgtggtgggctacggctgcatgacctgcatcggcaacagcggccccctgcccgagcccgtggtggaggccatcacccagggcgacctggtggccgtgggcgtgctgagcggcaacagaaacttcgagggcagagtgcaccccaacaccagagccaactacctggccagcccccccctggtgatcgcctacgccatcgccggcaccatcagaatcgacttcgagaaggagcccctgggcgtgaacgccaagggccagcaggtgttcctgaaggacatctggcccaccagagacgagatccaggccgtggagagacagtacgtgatccccggcatgttcaaggaggtgtaccagaagatcgagaccgtgaacgagagctggaacgccctggccacccccagcgacaagctgttcttctggaacagcaagagcacctacatcaagagcccccccttcttcgagaacctgaccctggacctgcagccccccaagagcatcgtggacgcctacgtgctgctgaacctgggcgacagcgtgaccaccgaccacatcagccccgccggcaacatcgccagaaacagccccgccgccagatacctgaccaacagaggcttcgagagacagctgacccaggagaacaccgacctgtgcctgagcccccccctgctgaccagcctgagcagccccctgaagctgtggggccagctgttctgccacggcgagcagtgcctgggcgacctggagaagtag

SEQ ID NO: 71451 - DNA, 2373 bp, synthetic construct
  misc_feature 1..2373: note = Description of Artificial Sequence: Synthetic coding sequence
  source 1..2373: mol_type = other DNA
atgagagacgccgtgaagaagctgggcggcgaccccgagaagatcaaccccgtgtgccccgccgacctggtgatcgaccacagcatccaggtggacttcaacagaagagccgacagcctgcagaagaaccaggacctggagttcgagagaaacagagagagattcgagttcctgaagtggggcagccaggccttccacaacatgagaatcatcccccccggcagcggcatcatccaccaggtgaacctggagtacctggccagagtggtgttcgaccaggacggctactactaccccgacagcctggtgggcaccgacagccacaccaccatgatcgacggcctgggcatcctgggctggggcgtgggcggcatcgaggccgaggccgtgatgctgggccagcccatcagcatggtgctgccccaggtgatcggctacagactgatgggcaagccccaccccctggtgaccagcaccgacatcgtgctgaccatcaccaagcacctgagacaggtgggcgtggtgggcaagttcgtggagttcttcggccccggcgtggcccagctgagcatcgccgacagagccaccatcgccaacatgtgccccgagtacggcgccaccgccgccttcttccccgtggacgaggtgagcatcacctacctggtgcagaccggcagagacgaggagaagctgaagtacatcaagaagtacctgcaggccgtgggcatgttcagagacttcaacgaccccagccaggaccccgacttcacccaggtggtggagctggacctgaagaccgtggtgccctgctgcagcggccccaagagaccccaggacaaggtggccgtgagcgacatgaagaaggacttcgagagctgcctgggcgccaagcagggcttcaagggcttccaggtggcccccgagcaccacaacgaccacaagaccttcatctacgacaacaccgagttcaccctggcccacggcagcgtggtgatcgccgccatcaccagctgcaccaacaccagcaaccccagcgtgatgctgggcgccggcctgctggccaagaaggccgtggacgccggcctgaacgtgatgccctacatcaagaccagcctgagccccggcagcggcgtggtgacctactacctgcaggagagcggcgtgatgccctacctgagccagctgggcttcgacgtggtgggctacggctgcatgacctgcatcggcaacagcggccccctgcccgagcccgtggtggaggccatcacccagggcgacctggtggccgtgggcgtgctgagcggcaacagaaacttcgagggcagagtgcaccccaacaccagagccaactacctggccagcccccccctggtgatcgcctacgccatcgccggcaccatcagaatcgacttcgagaaggagcccctgggcgtgaacgccaagggccagcaggtgttcctgaaggacatctggcccaccagagacgagatccaggccgtggagagacagtacgtgatccccggcatgttcaaggaggtgtaccagaagatcgagaccgtgaacgagagctggaacgccctggccacccccagcgacaagctgttcttctggaacagcaagagcacctacatcaagagcccccccttcttcgagaacctgaccctggacctgcagccccccaagagcatcgtggacgcctacgtgctgctgaacctgggcgacagcgtgaccaccgaccacatcagccccgccggcaacatcgccagaaacagccccgccgccagatacctgaccaacagaggcctgacccccagagagttcaacagctacggcagcagaagaggcaacgacgccgtgatggccagaggcaccttcgccaacatcagactgctgaacagattcctgaacaagcaggccccccagaccatccacctgcccagcggcgagatcctggacgtgttcgacgccgccgagagataccagcaggccggcctgcccctgatcgtgctggccggcaaggagtacggcgccggcagcagcagagactgggccgccaagggccccttcctgctgggcatcaaggccgtgctggccgagagctacgagagaatccacagaagcaacctggtgggcatgggcgtgatccccctggagtacctgcccggcgagaacgccgacgccctgggcctgaccggccaggagagatacaccatcatcatccccgagaacctgaagccccagatgaaggtgcaggtgaagctggacaccggcaagaccttccaggccgtgatgagattcgacaccgacgtggagctgacctacttcctgaacggcggcatcctgaactacatgatcagaaagatggccaagtag

SEQ ID NO: 71452 - DNA, 333 bp, synthetic construct
  misc_feature 1..333: note = Description of Artificial Sequence: Synthetic coding sequence
  source 1..333: mol_type = other DNA
atggccaagcaccaccccgacctgatcttctgcagaaagcaggccggcgtggccatcggcagactgtgcgagaagtgcgacggcaagtgcgtgatctgcgacagctacgtgagaccctgcaccctggtgagaatctgcgacgagtgcaactacggcagctaccagggcagatgcgtgatctgcggcggccccggcgtgagcgacgcctactactgcaaggagtgcaccatccaggagaaggacagagacggctgccccaagatcgtgaacctgggcagcagcaagaccgacctgttctacgagagaaagaagtacggcttcaagaagagatag

SEQ ID NO: 71453 - DNA, 2418 bp, synthetic construct
  misc_feature 1..2418: note = Description of Artificial Sequence: Synthetic coding sequence
  source 1..2418: mol_type = other DNA
atggccccctacagcctgctggtgaccagactgcagaaggccctgggcgtgagacagtaccacgtggccagcgtgctgtgccagagagccaaggtggccatgagccacttcgagcccaacgagtacatccactacgacctgctggagaagaacatcaacatcgtgagaaagagactgaacagacccctgaccctgagcgagaagatcgtgtacggccacctggacgaccccgccagccaggagatcgagagaggcaagagctacctgagactgagacccgacagagtggccatgcaggacgccaccgcccagatggccatgctgcagttcatcagcagcggcctgagcaaggtggccgtgcccagcaccatccactgcgaccacctgatcgaggcccaggtgggcggcgagaaggacctgagaagagccaaggacatcaaccaggaggtgtacaacttcctggccaccgccggcgccaagtacggcgtgggcttctggaagcccggcagcggcatcatccaccagatcatcctggagaactacgcctaccccggcgtgctgctgatcggcaccgacagccacacccccaacggcggcggcctgggcggcatctgcatcggcgtgggcggcgccgacgccgtggacgtgatggccggcatcccctgggagctgaagtgccccaaggtgatcggcgtgaagctgaccggcagcctgagcggctggagcagccccaaggacgtgatcctgaaggtggccggcatcctgaccgtgaagggcggcaccggcgccatcgtggagtaccacggccccggcgtggacagcatcagctgcaccggcgaggagggcggccaggccacctggcccctgccctgcgccggccccgacggcagccccgtgggcagcagaagcggcatggccaccatctgcaacatgggcgccgagatcggcgccaccaccagcgtgttcccctacaaccacagaatgaagaagtacctgagcaagaccggcagagaggacatcgccaacctggccgacgagttcaaggaccacctggtgcccgaccccggctgccactacgaccagctgatcgagatcaacctgagcgagctgaagccccacatcaacggccccttcacccccgacctggcccaccccgtggccgaggtgggcaaggtggccgagaaggagggctggcccctggacatcagagtgggcctgatcggcagctgcaccaacagcagctacgaggacatgggcagaagcgccgccgtggccaagcaggccctggcccacggcctgaagtgcaagagccagttcaccatcacccccggcagcgagcagatcagagccaccatcgagagagacggctacgcccagatcctgagagacctgggcggcatcgtgctggccaacgcctgcggcccctgcatcggccagtgggacagaaaggacatcaagaagggcgagaagaacaccatcgtgaccagctacaacagaaacttcaccggcagaaacgacgccaaccccgagacccacgccttcgtgaccagccccgagatcgtgaccgccctggccatcgccggcaccctgaagttcaaccccgagaccgactacctgaccggcaccgacggcaagaagttcagactggaggcccccgacgccgacgagctgcccaagggcgagttcgaccccggccaggacacctaccagcacccccccaaggacagcagcggccagcacgtggacgtgagccccaccagccagagactgcagctgctggagcccttcgacaagtgggacggcaaggacctggaggacctgcagatcctgatcaaggtgaagggcaagtgcaccaccgaccacatcagcgccgccggcccctggctgaagttcagaggccacctggacaacatcagcaacaacctgctgatcggcgccatcaacatcgagaacggcaaggccaacagcgtgagaaacgccgtgacccaggagttcggccccgtgcccgacaccgccagatactacaagaagcacggcatcagatgggtggtgatcggcgacgagaactacggcgagggcagcagcagagagcacgccgccctggagcccagacacctgggcggcagagccatcatcaccaagagcttcgccagaatccacgagaccaacctgaagaagcagggcctgctgcccctgaccttcgccgaccccgccgactacaacaagatccaccccgtggacaagctgaccatccagggcctgaaggacttcacccccggcaagcccctgaagtgcatcatcaagcaccccaacggcacccaggagaccatcctgctgaaccacaccttcaacgagacccagatcgagtggttcagagccggcagcgccctgaacagaatgaaggagctgcagcagtag

SEQ ID NO: 71454 - DNA, 1506 bp, synthetic construct
  misc_feature 1..1506: note = Description of Artificial Sequence: Synthetic coding sequence
  source 1..1506: mol_type = other DNA
atggccaccatctgcaacatgggcgccgagatcggcgccaccaccagcgtgttcccctacaaccacagaatgaagaagtacctgagcaagaccggcagagaggacatcgccaacctggccgacgagttcaaggaccacctggtgcccgaccccggctgccactacgaccagctgatcgagatcaacctgagcgagctgaagccccacatcaacggccccttcacccccgacctggcccaccccgtggccgaggtgggcaaggtggccgagaaggagggctggcccctggacatcagagtgggcctgatcggcagctgcaccaacagcagctacgaggacatgggcagaagcgccgccgtggccaagcaggccctggcccacggcctgaagtgcaagagccagttcaccatcacccccggcagcgagcagatcagagccaccatcgagagagacggctacgcccagatcctgagagacctgggcggcatcgtgctggccaacgcctgcggcccctgcatcggccagtgggacagaaaggacatcaagaagggcgagaagaacaccatcgtgaccagctacaacagaaacttcaccggcagaaacgacgccaaccccgagacccacgccttcgtgaccagccccgagatcgtgaccgccctggccatcgccggcaccctgaagttcaaccccgagaccgactacctgaccggcaccgacggcaagaagttcagactggaggcccccgacgccgacgagctgcccaagggcgagttcgaccccggccaggacacctaccagcacccccccaaggacagcagcggccagcacgtggacgtgagccccaccagccagagactgcagctgctggagcccttcgacaagtgggacggcaaggacctggaggacctgcagatcctgatcaaggtgaagggcaagtgcaccaccgaccacatcagcgccgccggcccctggctgaagttcagaggccacctggacaacatcagcaacaacctgctgatcggcgccatcaacatcgagaacggcaaggccaacagcgtgagaaacgccgtgacccaggagttcggccccgtgcccgacaccgccagatactacaagaagcacggcatcagatgggtggtgatcggcgacgagaactacggcgagggcagcagcagagagcacgccgccctggagcccagacacctgggcggcagagccatcatcaccaagagcttcgccagaatccacgagaccaacctgaagaagcagggcctgctgcccctgaccttcgccgaccccgccgactacaacaagatccaccccgtggacaagctgaccatccagggcctgaaggacttcacccccggcaagcccctgaagtgcatcatcaagcaccccaacggcacccaggagaccatcctgctgaaccacaccttcaacgagacccagatcgagtggttcagagccggcagcgccctgaacagaatgaaggagctgcagcagtag

SEQ ID NO: 71455 - DNA, 2286 bp, synthetic construct
  misc_feature 1..2286: note = Description of Artificial Sequence: Synthetic coding sequence
  source 1..2286: mol_type = other DNA
atggccccctacagcctgctggtgaccagactgcagaaggccctgggcgtgagacagtaccacgtggccagcgtgctgtgccagagagccaaggtggccatgagccacttcgagcccaacgagtacatccactacgacctgctggagaagaacatcaacatcgtgagaaagagactgaacagacccctgaccctgagcgagaagatcgtgtacggccacctggacgaccccgccagccaggagatcgagagaggcaagagctacctgagactgagacccgacagagtggccatggtggccgtgcccagcaccatccactgcgaccacctgatcgaggcccaggtgggcggcgagaaggacctgagaagagccaaggacatcaaccaggaggtgtacaacttcctggccaccgccggcgccaagtacggcgtgggcttctggaagcccggcagcggcatcatccaccagatcatcctggagaactacgcctaccccggcgtgctgctgatcggcaccgacagccacacccccaacggcggcggcctgggcggcatctgcatcggcgtgggcggcgccgacgccgtggacgtgatggccggcatcccctgggagctgaagtgccccaaggtgatcggcgtgaagctgaccggcagcctgagcggctggagcagccccaaggacgtgatcctgaaggtggccggcatcctgaccgtgaagggcggcaccggcgccatcgtggagtaccacggccccggcgtggacagcatcagctgcaccggcatggccaccatctgcaacatgggcgccgagatcggcgccaccaccagcgtgttcccctacaaccacagaatgaagaagtacctgagcaagaccggcagagaggacatcgccaacctggccgacgagttcaaggaccacctggtgcccgaccccggctgccactacgaccagctgatcgagatcaacctgagcgagctgaagccccacatcaacggccccttcacccccgacctggcccaccccgtggccgaggtgggcaaggtggccgagaaggagggctggcccctggacatcagagtgggcctgatcggcagctgcaccaacagcagctacgaggacatgggcagaagcgccgccgtggccaagcaggccctggcccacggcctgaagtgcaagagccagttcaccatcacccccggcagcgagcagatcagagccaccatcgagagagacggctacgcccagatcctgagagacctgggcggcatcgtgctggccaacgcctgcggcccctgcatcggccagtgggacagaaaggacatcaagaagggcgagaagaacaccatcgtgaccagctacaacagaaacttcaccggcagaaacgacgccaaccccgagacccacgccttcgtgaccagccccgagatcgtgaccgccctggccatcgccggcaccctgaagttcaaccccgagaccgactacctgaccggcaccgacggcaagaagttcagactggaggcccccgacgccgacgagctgcccaagggcgagttcgaccccggccaggacacctaccagcacccccccaaggacagcagcggccagcacgtggacgtgagccccaccagccagagactgcagctgctggagcccttcgacaagtgggacggcaaggacctggaggacctgcagatcctgatcaaggtgaagggcaagtgcaccaccgaccacatcagcgccgccggcccctggctgaagttcagaggccacctggacaacatcagcaacaacctgctgatcggcgccatcaacatcgagaacggcaaggccaacagcgtgagaaacgccgtgacccaggagttcggccccgtgcccgacaccgccagatactacaagaagcacggcatcagatgggtggtgatcggcgacgagaactacggcgagggcagcagcagagagcacgccgccctggagcccagacacctgggcggcagagccatcatcaccaagagcttcgccagaatccacgagaccaacctgaagaagcagggcctgctgcccctgaccttcgccgaccccgccgactacaacaagatccaccccgtggacaagctgaccatccagggcctgaaggacttcacccccggcaagcccctgaagtgcatcatcaagcaccccaacggcacccaggagaccatcctgctgaaccacaccttcaacgagacccagatcgagtggttcagagccggcagcgccctgaacagaatgaaggagctgcagcagtag

SEQ ID NO: 71456 - DNA, 756 bp, synthetic construct
  misc_feature 1..756: note = Description of Artificial Sequence: Synthetic coding sequence
  source 1..756: mol_type = other DNA
atggagctgagcgccatcggcgagcaggtgttcgccgtggagagcatcagaaagaagagagtgagaaagggcaaggtggagtacctggtgaagtggaagggctggccccccaagtacagcacctgggagcccgaggagcacatcctggaccccagactggtgatggcctacgaggagaaggaggagagagacagagccagcggctacagaaagagaggccccaagcccaagagactgctgctgcagagactgtacagcatggacctgagaagcagccacaaggccaagggcaaggagaagctgtgcttcagcctgacctgccccctgggcagcggcagccccgagggcgtggtgaaggccggcgcccccgagctggtggacaagggccccctggtgcccaccctgcccttccccctgagaaagcccagaaaggcccacaagtacctgagactgagcagaaagaagttcccccccagaggccccaacctggagagccacagccacagaagagagctgttcctgcaggagccccccgcccccgacgtgctgcaggccgccggcgagtgggagcccgccgcccagccccccgaggaggaggccgacgccgacctggccgagggcccccccccctggacccccgccctgcccagcagcgaggtgaccgtgaccgacatcaccgccaacagcatcaccgtgaccttcagagaggcccaggccgccgagggcttcttcagagacagaagcggcaagttctag

SEQ ID NO: 71457 - DNA, 633 bp, synthetic construct
  misc_feature 1..633: note = Description of Artificial Sequence: Synthetic coding sequence
  source 1..633: mol_type = other DNA
atgaacagattcctgctgctgatgagcctgtacctgctgggcagcgccagaggcaccagcagccagcccaacgagctgagcggcagcatcgaccaccagaccagcgtgcagcagctgcccggcgagcccgccgccaccgagcacgccgagggcgagcacaccgtgggcgagcagcccagcggcgagcagcccagcggcgagcacctgagcggcgagcagcccctgagcgagctggagagcggcgagcagcccagcgacgagcagcccagcggcgagcacggcagcggcgagcagcccagcggcgagcaggccagcggcgagcagcccagcggcgagcacgccagcggcgagcaggccagcggcgcccccatcagcagcaccagcaccggcaccatcctgaactgctacacctgcgcctacatgaacgaccagggcaagtgcctgagaggcgagggcacctgcatcacccagaacagccagcagtgcatgctgaagaagatcttcgagggcggcaagctgcagttcatggtgcagggctgcgagaacatgtgccccagcatgaacctgttcagccacggcaccagaatgcagatcatctgctgcagaaaccagagcttctgcaacaagatctag

SEQ ID NO: 71458 - DNA, 741 bp, synthetic construct
  misc_feature 1..741: note = Description of Artificial Sequence: Synthetic coding sequence
  source 1..741: mol_type = other DNA
atgaacagattcctgctgctgatgagcctgtacctgctgggcagcgccagaggcaccagcagccagcccaacgagctgagcggcagcatcgaccaccagaccagcgtgcagcagctgcccggcgagttcttcagcctggagaaccccagcgacgccgaggccctgtacgagaccagcagcggcctgaacaccctgagcgagcacggcagcagcgagcacggcagcagcaagcacaccgtggccgagcacaccagcggcgagcacgccgagagcgagcacgccagcggcgagcccgccgccaccgagcacgccgagggcgagcacaccgtgggcgagcagcccagcggcgagcagcccagcggcgagcacctgagcggcgagcagcccctgagcgagctggagagcggcgagcagcccagcgacgagcagcccagcggcgagcacggcagcggcgagcagcccagcggcgagcaggccagcggcgagcagcccagcggcaccatcctgaactgctacacctgcgcctacatgaacgaccagggcaagtgcctgagaggcgagggcacctgcatcacccagaacagccagcagtgcatgctgaagaagatcttcgagggcggcaagctgcagttcatggtgcagggctgcgagaacatgtgccccagcatgaacctgttcagccacggcaccagaatgcagatcatctgctgcagaaaccagagcttctgcaacaagatctag

SEQ ID NO: 71459 - DNA, 468 bp, synthetic construct
  misc_feature 1..468: note = Description of Artificial Sequence: Synthetic coding sequence
  source 1..468: mol_type = other DNA
atgaacagattcctgctgctgatgagcctgtacctgctgggcagcgccagaggcaccagcagccagcccaacgagctgagcggcagcatcgaccaccagaccagcgtgcagcagctgcccggcgagcagcccagcggcgagcagcccagcggcgagcacctgagcggcgagcagcccctgagcgagctggagagcggcgagcagcccagcgacgagcagcccagcggcgagcacggcagcggcgagcagcccagcggcgagcaggccagcggcgagcagcccagcggcgagcacgccagcggcgagcaggccagcggcgcccccatcagcagcaccagcaccggcggcaagctgcagttcatggtgcagggctgcgagaacatgtgccccagcatgaacctgttcagccacggcaccagaatgcagatcatctgctgcagaaaccagagcttctgcaacaagatctag

SEQ ID NO: 71460 - DNA, 498 bp, synthetic construct
  misc_feature 1..498: note = Description of Artificial Sequence: Synthetic coding sequence
  source 1..498: mol_type = other DNA
atgaacagattcctgctgctgatgagcctgtacctgctgggcagcgccagaggcaccagcagccagcccaacgagctgagcggcagcatcgaccaccagaccagcgtgcagcagctgcccggcgagcccgccgccaccgagcacgccgagggcgagcacaccgtgggcgagcagcccagcggcgagcagcccagcggcgagcacgccagcggcgagcaggccagcggcgcccccatcagcagcaccagcaccggcaccatcctgaactgctacacctgcgcctacatgaacgaccagggcaagtgcctgagaggcgagggcacctgcatcacccagaacagccagcagtgcatgctgaagaagatcttcgagggcggcaagctgcagttcatggtgcagggctgcgagaacatgtgccccagcatgaacctgttcagccacggcaccagaatgcagatcatctgctgcagaaaccagagcttctgcaacaagatctag

SEQ ID NO: 71461 - DNA, 246 bp, synthetic construct
  misc_feature 1..246: note = Description of Artificial Sequence: Synthetic coding sequence
  source 1..246: mol_type = other DNA
atgaacagattcctgctgctgatgagcctgtacctgctgggcagcgccagaggcaccagcagccagcccaacgagctgagcggcagcatcgaccaccagaccagcgtgcagcagctgcccggcggcaagctgcagttcatggtgcagggctgcgagaacatgtgccccagcatgaacctgttcagccacggcaccagaatgcagatcatctgctgcagaaaccagagcttctgcaacaagatctag

SEQ ID NO: 71462 - DNA, 366 bp, synthetic construct
  misc_feature 1..366: note = Description of Artificial Sequence: Synthetic coding sequence
  source 1..366: mol_type = other DNA
atgaacagattcctgctgctgatgagcctgtacctgctgggcagcgccagaggcaccagcagccagcccaacgagctgagcggcagcatcgaccaccagaccagcgtgcagcagctgcccggcaccatcctgaactgctacacctgcgcctacatgaacgaccagggcaagtgcctgagaggcgagggcacctgcatcacccagaacagccagcagtgcatgctgaagaagatcttcgagggcggcaagctgcagttcatggtgcagggctgcgagaacatgtgccccagcatgaacctgttcagccacggcaccagaatgcagatcatctgctgcagaaaccagagcttctgcaacaagatctag

SEQ ID NO: 71463 - DNA, 588 bp, synthetic construct
  misc_feature 1..588: note = Description of Artificial Sequence: Synthetic coding sequence
  source 1..588: mol_type = other DNA
atgaacagattcctgctgctgatgagcctgtacctgctgggcagcgccagaggcaccagcagccagcccaacgagctgagcggcagcatcgaccaccagaccagcgtgcagcagctgcccggcgagcagcccagcggcgagcagcccagcggcgagcacctgagcggcgagcagcccctgagcgagctggagagcggcgagcagcccagcgacgagcagcccagcggcgagcacggcagcggcgagcagcccagcggcgagcaggccagcggcgagcagcccagcggcgagcacgccagcggcgagcaggccagcggcgcccccatcagcagcaccagcaccggcaccatcctgaactgctacacctgcgcctacatgaacgaccagggcaagtgcctgagaggcgagggcacctgcatcacccagaacagccagcagtgcatgctgaagaagatcttcgagggcggcaagctgcagttcatggtgcagggctgcgagaacatgtgccccagcatgaacctgttcagccacggcaccagaatgcagatcatctgctgcagaaaccagagcttctgcaacaagatctag

SEQ ID NO: 71464 - DNA, 741 bp, synthetic construct; identical to SEQ ID NO: 71458
  misc_feature 1..741: note = Description of Artificial Sequence: Synthetic coding sequence
  source 1..741: mol_type = other DNA

SEQ ID NO: 71465 - DNA, 513 bp, synthetic construct
  misc_feature 1..513: note = Description of Artificial Sequence: Synthetic coding sequence
  source 1..513: mol_type = other DNA
atgaacagattcctgctgctgatgagcctgtacctgctgggcagcgccagaggcaccagcagccagcccaacgagctgagcggcagcatcgaccaccagaccagcgtgcagcagctgcccggcgagcagcccagcgacgagcagcccagcggcgagcacggcagcggcgagcagcccagcggcgagcaggccagcggcgagcagcccagcggcgagcacgccagcggcgagcaggccagcggcgcccccatcagcagcaccagcaccggcaccatcctgaactgctacacctgcgcctacatgaacgaccagggcaagtgcctgagaggcgagggcacctgcatcacccagaacagccagcagtgcatgctgaagaagatcttcgagggcggcaagctgcagttcatggtgcagggctgcgagaacatgtgccccagcatgaacctgttcagccacggcaccagaatgcagatcatctgctgcagaaaccagagcttctgcaacaagatctag

SEQ ID NO: 71466 - DNA, 531 bp, synthetic construct
  misc_feature 1..531: note = Description of Artificial Sequence: Synthetic coding sequence
  source 1..531: mol_type = other DNA
atgaacagattcctgctgctgatgagcctgtacctgctgggcagcgccagaggcaccagcagccagcccaacgagctgagcggcagcatcgaccaccagaccagcgtgcagcagctgcccggcgagcagcccagcggcgagcagcccagcggcgagcacctgagcggcgagcagcccctgagcgagctggagagcggcgagcagcccagcgacgagcagcccagcggcgagcacggcagcggcgagcagcccagcggcgagcaggccagcggcgagcagcccagcggcaccatcctgaactgctacacctgcgcctacatgaacgaccagggcaagtgcctgagaggcgagggcacctgcatcacccagaacagccagcagtgcatgctgaagaagatcttcgagggcggcaagctgcagttcatggtgcagggctgcgagaacatgtgccccagcatgaacctgttcagccacggcaccagaatgcagatcatctgctgcagaaaccagagcttctgcaacaagatctag

SEQ ID NO: 71467 - DNA, 588 bp, synthetic construct; identical to SEQ ID NO: 71463
  misc_feature 1..588: note = Description of Artificial Sequence: Synthetic coding sequence
  source 1..588: mol_type = other DNA

SEQ ID NO: 71468 - DNA, 633 bp, synthetic construct; identical to SEQ ID NO: 71457
  misc_feature 1..633: note = Description of Artificial Sequence: Synthetic coding sequence
  source 1..633: mol_type = other DNA

SEQ ID NO: 71469 - DNA, 798 bp, synthetic construct
  misc_feature 1..798: note = Description of Artificial Sequence: Synthetic coding sequence
  source 1..798: mol_type = other DNA
atgaacagattcctgctgctgatgagcctgtacctgctgggcagcgccagaggcaccagcagccagcccaacgagctgagcggcagcatcgaccaccagaccagcgtgcagcagctgcccggcgagttcttcagcctggagaaccccagcgacgccgaggccctgtacgagaccagcagcggcctgaacaccctgagcgagcacggcagcagcgagcacggcagcagcaagcacaccgtggccgagcacaccagcggcgagcacgccgagagcgagcacgccagcggcgagcccgccgccaccgagcacgccgagggcgagcacaccgtgggcgagcagcccagcggcgagcagcccagcggcgagcacctgagcggcgagcagcccctgagcgagctggagagcggcgagcagcccagcgacgagcagcccagcggcgagcacggcagcggcgagcagcccagcggcgagcaggccagcggcgagcagcccagcggcgagcacgccagcggcgagcaggccagcggcgcccccatcagcagcaccagcaccggcaccatcctgaactgctacacctgcgcctacatgaacgaccagggcaagtgcctgagaggcgagggcacctgcatcacccagaacagccagcagtgcatgctgaagaagatcttcgagggcggcaagctgcagttcatggtgcagggctgcgagaacatgtgccccagcatgaacctgttcagccacggcaccagaatgcagatcatctgctgcagaaaccagagcttctgcaacaagatctag

SEQ ID NO: 71470 - DNA, 1722 bp, synthetic construct
  misc_feature 1..1722: note = Description of Artificial Sequence: Synthetic coding sequence
  source 1..1722: mol_type = other DNA
atgagcgccgtgagccagccccaggccgcccccagccccctggagaagagccccagcaccgccatcctgtgcaacacctgcggcaacgtgtgcaagggcgaggtgctgagagtgcaggacaagtacttccacatcaagtgcttcgtgtgcaaggcctgcggctgcgacctggccgagggcggcttcttcgtgagacagggcgagtacatctgcaccctggactaccagagactgtacggcaccagatgcttcagctgcgaccagttcatcgagggcgaggtggtgagcgccctgggcaagacctaccaccccgactgcttcgtgtgcgccgtgtgcagactgcccttcccccccggcgacagagtgaccttcaacggcaaggagtgcatgtgccagaagtgcagcctgcccgtgagcgtgggcagcagcgcccacctgagccagggcctgagaagctgcggcggctgcggcaccgagatcaagaacggccaggccctggtggccctggacaagcactggcacctgggctgcttcaagtgcaagagctgcggcaagctgctgaacgccgagtacatcagcaaggacggcctgccctactgcgaggccgactaccacgccaagttcggcatcagatgcgacagctgcgagaagtacatcaccggcagagtgctggaggccggcgagaagcactaccaccccagctgcgccctgtgcgtgagatgcggccagatgttcgccgagggcgaggagatgtacctgcagggcagcagcatctggcaccccgcctgcagacaggccgccagaaccgaggacagaaacaaggagaccagaaccagcagcgagagcatcatcagcgtgcccgccagcagcaccagcggcagccccagcagagtgatctacgccaagctgggcggcgagatcctggactacagagacctggccgccctgcccaagagcaaggccatctacgacatcgacagacccgacatgatcagctacagcccctacatcagccacagcgccggcgacagacagagctacggcgagggcgaccaggacgacagaagctacaagcagtgcagaaccagcagccccagcagcaccggcagcgtgagcctgggcagatacacccccaccagcagaagcccccagcactacagcagacccggcagcgagagcggcagaagcacccccagcctgagcgtgctgagcgacagcaagcccccccccagcacctaccagcaggcccccagacacttccacgtgcccgacaccggcgtgaaggacaacatctacagaaagccccccatctacagacagcacgccgccagaagaagcgacggcgaggacggcagcctggaccaggacaacagaaagcagaagagcagctggctgatgctgaagggcgacgccgacaccagaaccaacagccccgacctggacacccagagcctgagccacagcagcggcaccgacagagaccccctgcagagaatggccggcgacagcttccacagcagagagaagatctacccctacgacagcctgatcgtgaccaacagaatcagagtgaagctgcccaaggacgtggacagaaccagactggagagacacctgagccccgaggagttccaggaggtgttcggcatgagcatcgaggagttcgacagactggccctgtggaagagaaacgacctgaagaagaaggccctgctgttctag

SEQ ID NO: 71471 - DNA, 1041 bp, synthetic construct
  misc_feature 1..1041: note = Description of Artificial Sequence: Synthetic coding sequence
  source 1..1041: mol_type = other DNA
atgttcgccgagggcgaggagatgtacctgcagggcagcagcatctggcaccccgcctgcagacaggccgccagaaccgaggacagaaacaaggagaccagaaccagcagcgagagcatcatcagcgtgcccgccagcagcaccagcggcagccccagcagagtgatctacgccaagctgggcggcgagatcctggactacagagacctggccgccctgcccaagagcaaggccatctacgacatcgacagacccgacatgatcagctacagcccctacatcagccacagcgccggcgacagacagagctacggcgagagcccccagctgctgagccccacccccaccgagggcgaccaggacgacagaagctacaagcagtgcagaaccagcagccccagcagcaccggcagcgtgagcctgggcagatacacccccaccagcagaagcccccagcactacagcagacccgacaccggcgtgaaggacaacatctacagaaagccccccatctacagacagcacgccgccagaagaagcgacggcgaggacggcagcctggaccaggacaacagaaagcagaagagcagctggctgatgctgaagggcgacgccgacaccagaaccaacagccccgacctggacacccagagcctgagccacagcagcggcaccgacagagaccccctgcagagaatggccggcgacagcttccacagcagattcccctacagcaagagcgaccccctgcccggccacggcaagaacggcctggaccagagaaacgccaacctggccccctgcggcgccgaccccgacgccagctggggcatgagagagtacaagatctacccctacgacagcctgatcgtgaccaacagaatcagagtgaagctgcccaaggacgtggacagaaccagactggagagacacctgagccccgaggagttccaggaggtgttcggcatgagcatcgaggagttcgacagactggccctgtggaagagaaacgacctgaagaagaaggccctgctgttctag

SEQ ID NO: 71472 - DNA, 1836 bp, synthetic construct
  misc_feature 1..1836: note = Description of Artificial Sequence: Synthetic coding sequence
  source 1..1836: mol_type = other DNA
atgagcgccgtgagccagccccaggccgcccccagccccctggagaagagccccagcaccgccatcctgtgcaacacctgcggcaacgtgtgcaagggcgaggtgctgagagtgcaggacaagtacttccacatcaagtgcttcgtgtgcaaggcctgcggctgcgacctggccgagggcggcttcttcgtgagacagggcgagtacatctgcaccctggactaccagagactgtacggcaccagatgcttcagctgcgaccagttcatcgagggcgaggtggtgagcgccctgggcaagacctaccaccccgactgcttcgtgtgcgccgtgtgcagactgcccttcccccccggcgacagagtgaccttcaacggcaaggagtgcatgtgccagaagtgcagcctgcccgtgagcgtgggcagcagcgcccacctgagccagggcctgagaagctgcggcggctgcggcaccgagatcaagaacggccaggccctggtggccctggacaagcactggcacctgggctgcttcaagtgcaagagctgcggcaagctgctgaacgccgagtacatcagcaaggacggcctgccctactgcgaggccgactaccacgccaagttcggcatcagatgcgacagctgcgagaagtacatcaccggcagagtgctggaggccggcgagaagcactaccaccccagctgcgccctgtgcgtgagatgcggccagatgttcgccgagggcgaggagatgtacctgcagggcagcagcatctggcaccccgcctgcagacaggccgccagaaccgaggacagaaacaaggagaccagaaccagcagcgagagcatcatcagcgtgcccgccagcagcaccagcggcagccccagcagagtgatctacgccaagctgggcggcgagatcctggactacagagacctggccgccctgcccaagagcaaggccatctacgacatcgacagacccgacatgatcagctacagcccctacatcagccacagcgccggcgacagacagagctacggcgagggcgaccaggacgacagaagctacaagcagtgcagaaccagcagccccagcagcaccggcagcgtgagcctgggcagatacacccccaccagcagaagcccccagcactacagcagacccggcagcgagagcggcagaagcacccccagcctgagcgtgctgagcgacagcaagcccccccccagcacctaccagcaggcccccagacacttccacgtgcccgacaccggcgtgaaggacaacatctacagaaagccccccatctacagacagcacgccgccagaagaagcgacggcgaggacggcagcctggaccaggacaacagaaagaagagcagctggctgatgctgaagggcgacgccgacaccagaaccaacagccccgacctggacacccagagcctgagccacagcagcggcaccgacagagaccccctgcagagaatggccggcgacagcttccacagcagattcccctacagcaagagcgaccccctgcccggccacggcaagaacggcctggaccagagaaacgccaacctggccccctgcggcgccgaccccgacgccagctggggcatgagagagtacaagatctacccctacgacagcctgatcgtgaccaacagaatcagagtgaagctgcccaaggacgtggacagaaccagactggagagacacctgagccccgaggagttccaggaggtgttcggcatgagcatcgaggagttcgacagactggccctgtggaagagaaacgacctgaagaagaaggccctgctgttctag

SEQ ID NO: 71473 - DNA, 1719 bp, synthetic construct
  misc_feature 1..1719: note = Description of Artificial Sequence: Synthetic coding sequence
  source 1..1719: mol_type = other DNA
atgagcgccgtgagccagccccaggccgcccccagccccctggagaagagccccagcaccgccatcctgtgcaacacctgcggcaacgtgtgcaagggcgaggtgctgagagtgcaggacaagtacttccacatcaagtgcttcgtgtgcaaggcctgcggctgcgacctggccgagggcggcttcttcgtgagacagggcgagtacatctgcaccctggactaccagagactgtacggcaccagatgcttcagctgcgaccagttcatcgagggcgaggtggtgagcgccctgggcaagacctaccaccccgactgcttcgtgtgcgccgtgtgcagactgcccttcccccccggcgacagagtgaccttcaacggcaaggagtgcatgtgccagaagtgcagcctgcccgtgagcgtgggcagcagcgcccacctgagccagggcctgagaagctgcggcggctgcggcaccgagatcaagaacggccaggccctggtggccctggacaagcactggcacctgggctgcttcaagtgcaagagctgcggcaagctgctgaacgccgagtacatcagcaaggacggcctgccctactgcgaggccgactaccacgccaagttcggcatcagatgcgacagctgcgagaagtacatcaccggcagagtgctggaggccggcgagaagcactaccaccccagctgcgccctgtgcgtgagatgcggccagatgttcgccgagggcgaggagatgtacctgcagggcagcagcatctggcaccccgcctgcagacaggccgccagaaccgaggacagaaacaaggagaccagaaccagcagcgagagcatcatcagcgtgcccgccagcagcaccagcggcagccccagcagagtgatctacgccaagctgggcggcgagatcctggactacagagacctggccgccctgcccaagagcaaggccatctacgacatcgacagacccgacatgatcagctacagcccctacatcagccacagcgccggcgacagacagagctacggcgagggcgaccaggacgacagaagctacaagcagtgcagaaccagcagccccagcagcaccggcagcgtgagcctgggcagatacacccccaccagcagaagcccccagcactacagcagacccggcagcgagagcggcagaagcacccccagcctgagcgtgctgagcgacagcaagcccccccccagcacctaccagcaggcccccagacacttccacgtgcccgacaccggcgtgaaggacaacatctacagaaagccccccatctacagacagcacgccgccagaagaagcgacggcgaggacggcagcctggaccaggacaacagaaagaagagcagctggctgatgctgaagggcgacgccgacaccagaaccaacagccccgacctggacacccagagcctgagccacagcagcggcaccgacagagaccccctgcagagaatggccggcgacagcttccacagccagtacaagatctacccctacgacagcctgatcgtgaccaacagaatcagagtgaagctgcccaaggacgtggacagaaccagactggagagacacctgagccccgaggagttccaggaggtgttcggcatgagcatcgaggagttcgacagactggccctgtggaagagaaacgacctgaagaagaaggccctgctgttctag

SEQ ID NO: 71474 - DNA, 1596 bp, synthetic construct
  misc_feature 1..1596: note = Description of Artificial Sequence: Synthetic coding sequence
  source 1..1596: mol_type = other DNA
atgagcgccgtgagccagccccaggccgcccccagccccctggagaagagccccagcaccgccatcctgtgcaacacctgcggcaacgtgtgcaagggcgaggtgctgagagtgcaggacaagtacttccacatcaagtgcttcgtgtgcaaggcctgcggctgcgacctggccgagggcggcttcttcgtgagacagggcgagtacatctgcaccctggactaccagagactgtacggcaccagatgcttcagctgcgaccagttcatcgagggcgaggtggtgagcgccctgggcaagacctaccaccccgactgcttcgtgtgcgccgtgtgcagactgcccttcccccccggcgacagagtgaccttcaacggcaaggagtgcatgtgccagaagtgcagcctgcccgtgagcgtgggcagcagcgcccacctgagccagggcctgagaagctgcggcggctgcggcaccgagatcaagaacggccaggccctggtggccctggacaagcactggcacctgggctgcttcaagtgcaagagctgcggcaagctgctgaacgccgagtacatcagcaaggacggcctgccctactgcgaggccgactaccacgccaagttcggcatcagatgcgacagctgcgagaagtacatcaccggcagagtgctggaggccggcgagaagcactaccaccccagctgcgccctgtgcgtgagatgcggccagatgttcgccgagggcgaggagatgtacctgcagggcagcagcatctggcaccccgcctgcagacaggccgccagaaccgaggacagaaacaaggagaccagaaccagcagcgagagcatcatcagcgtgcccgccagcagcaccagcggcagccccagcagagtgatctacgccaagctgggcggcgagatcctggactacagagacctggccgccctgcccaagagcaaggccatctacgacatcgacagacccgacatgatcagctacagcccctacatcagccacagcgccggcgacagacagagctacggcgagagcccccagctgctgagccccacccccaccgagggcgaccaggacgacagaagctacaagcagtgcagaaccagcagccccagcagcaccggcagcgtgagcctgggcagatacacccccaccagcagaagcccccagcactacagcagacccgccgccagaagaagcgacggcgaggacggcagcctggaccaggacaacagaaagaagagcagctggctgatgctgaagggcgacgccgacaccagaaccaacagccccgacctggacacccagagcctgagccacagcagcggcaccgacagagaccccctgcagagaatggccggcgacagcttccacagccagtacaagatctacccctacgacagcctgatcgtgaccaacagaatcagagtgaagctgcccaaggacgtggacagaaccagactggagagacacctgagccccgaggagttccaggaggtgttcggcatgagcatcgaggagttcgacagactggccctgtggaagagaaacgacctgaagaagaaggccctgctgttctag

SEQ ID NO: 71475 - DNA, 1935 bp, synthetic construct
  misc_feature 1..1935: note = Description of Artificial Sequence: Synthetic coding sequence
  source 1..1935: mol_type = other DNA
atgagcgccgtgagccagccccaggccgcccccagccccctggagaagagccccagcaccgccatcctgtgcaacacctgcggcaacgtgtgcaagggcgaggtgctgagagtgcaggacaagtacttccacatcaagtgcttcgtgtgcaaggcctgcggctgcgacctggccgagggcggcttcttcgtgagacagggcgagtacatctgcaccctggactaccagagactgtacggcaccagatgcttcagctgcgaccagttcatcgagggcgaggtggtgagcgccctgggcaagacctaccaccccgactgcttcgtgtgcgccgtgtgcagactgcccttcccccccggcgacagagtgaccttcaacggcaaggagtgcatgtgccagaagtgcagcctgcccgtgagcgtgggcagcagcgcccacctgagccagggcctgagaagctgcggcggctgcggcaccgagatcaagaacggccaggccctggtggccctggacaagcactggcacctgggctgcttcaagtgcaagagctgcggcaagctgctgaacgccgagtacatcagcaaggacggcctgccctactgcgaggccgactaccacgccaagttcggcatcagatgcgacagctgcgagaagtacatcaccggcagagtgctggaggccggcgagaagcactaccaccccagctgcgccctgtgcgtgagatgcggccagatgttcgccgagggcgaggagatgtacctgcagggcagcagcatctggcaccccgcctgcagacaggccgccagaaccgaggacagaaacaaggagaccagaaccagcagcgagagcatcatcagcgtgcccgccagcagcaccagcggcagccccagcagagtgatctacgccaagctgggcggcgagatcctggactacagagacctggccgccctgcccaagagcaaggccatctacgacatcgacagacccgacatgatcagctacagcccctacatcagccacagcgccggcgacagacagagctacggcgagggcgaccaggacgacagaagctacaagcagtgcagaaccagcagccccagcagcaccggcagcgtgagcctgggcagatacacccccaccagcagaagcccccagcactacagcagacccgccggcaccgtgagcgtgggcaccagcagctgcctgagcctgagccagcaccccagccccaccagcgtgttcagacaccactacatcccctacttcagaggcagcgagagcggcagaagcacccccagcctgagcgtgctgagcgacagcaagcccccccccccccccaccagcagacacctggccacccacgtgcccgacaccggcgtgaaggacaacatctacagaaagccccccatctacagacagcacgccgccagaagaagcgacggcgaggacggcagcctggaccaggacaacagaaagcagaagagcagctggctgatgctgaagggcgacgccgacaccagaaccaacagccccgacctggacacccagagcctgagccacagcagcggcaccgacagagaccccctgcagagaatggccggcgacagcttccacagcagattcccctacagcaagagcgaccccctgcccggccacggcaagaacggcctggaccagagaaacgccaacctggccccctgcggcgccgaccccgacgccagctggggcatgagagagtacaagatctacccctacgacagcctgatcgtgaccaacagaatcagagtgaagctgcccaaggacgtggacagaaccagactggagagacacctgagccccgaggagttccaggaggtgttcggcatgagcatcgaggagttcgacagactggccctgtggaagagaaacgacctgaagaagaaggccctgctgttctag

SEQ ID NO: 71476 - DNA, 1566 bp, synthetic construct
  misc_feature 1..1566: note = Description of Artificial Sequence: Synthetic coding sequence
  source 1..1566: mol_type = other DNA
atgagcgccgtgagccagccccaggccgcccccagccccctggagaagagccccagcaccgccatcctgtgcaacacctgcggcaacgtgtgcaagggcgaggtgctgagagtgcaggacaagtacttccacatcaagtgcttcgtgtgcaaggcctgcggctgcgacctggccgagggcggcttcttcgtgagacagggcgagtacatctgcaccctggactaccagagactgtacggcaccagatgcttcagctgcgaccagttcatcgagggcgaggtggtgagcgccctgggcaagacctaccaccccgactgcttcgtgtgcgccgtgtgcagactgcccttcccccccggcgacagagtgaccttcaacggcaaggagtgcatgtgccagaagtgcagcctgcccgtgagcgtgggcagcagcgcccacctgagccagggcctgagaagctgcggcggctgcggcaccgagatcaagaacggccaggccctggtggccctggacaagcactggcacctgggctgcttcaagtgcaagagctgcggcaagctgctgaacgccgagtacatcagcaaggacggcctgccctactgcgaggccgactaccacgccaagttcggcatcagatgcgacagctgcgagaagtacatcaccggcagagtgctggaggccggcgagaagcactaccaccccagctgcgccctgtgcgtgagatgcggccagatgttcgccgagggcgaggagatgtacctgcagggcagcagcatctggcaccccgcctgcagacaggccgccagaaccgaggacagaaacaaggagaccagaaccagcagcgagagcatcatcagcgtgcccgccagcagcaccagcggcagccccagcagagtgatctacgccaagctgggcggcgagatcctggactacagagacctggccgccctgcccaagagcaaggccatctacgacatcgacagacccgacatgatcagctacagcccctacatcagccacagcgccggcgacagacagagctacggcgagggcgaccaggacgacagaagctacaagcagtgcagaaccagcagccccagcagcaccggcagcgtgagcctgggcagatacacccccaccagcagaagcccccagcactacagcagacccgccgccagaagaagcgacggcgaggacggcagcctggaccaggacaacagaaagcagaagagcagctggctgatgctgaagggcgacgccgacaccagaaccaacagccccgacctggacacccagagcctgagccacagcagcggcaccgacagagaccccctgcagagaatggccggcgacagcttccacagccagtacaagatctacccctacgacagcctgatcgtgaccaacagaatcagagtgaagctgcccaaggacgtggacagaaccagactggagagacacctgagccccgaggagttccaggaggtgttcggcatgagcatcgaggagttcgacagactggccctgtggaagagaaacgacctgaagaagaaggccctgctgttctag

SEQ ID NO: 71477 - DNA, 1413 bp, synthetic construct
  misc_feature 1..1413: note = Description of Artificial Sequence: Synthetic coding sequence
  source 1..1413: mol_type = other DNA
atgagcgccgtgagccagccccaggccgcccccagccccctggagaagagccccagcaccgccatcctgtgcaacacctgcggcaacgtgtgcaagggcgaggtgctgagagtgcaggacaagtacttccacatcaagtgcttcgtgtgcaaggcctgcggctgcgacctggccgagggcggcttcttcgtgagacagggcgagtacatctgcaccctggactaccagagactgtacggcaccagatgcttcagctgcgaccagttcatcgagggcgaggtggtgagcgccctgggcaagacctaccaccccgactgcttcgtgtgcgccgtgtgcagactgcccttcccccccggcgacagagtgaccttcaacggcaaggagtgcatgtgccagaagtgcagcctgcccgtgagcgtgggcagcagcgcccacctgagccagggcctgagaagctgcggcggctgcggcaccgagatcaagaacggccaggccctggtggccctggacaagcactggcacctgggctgcttcaagtgcaagagctgcggcaagctgctgaacgccgagtacatcagcaaggacggcctgccctactgcgaggccgactaccacgccaagttcggcatcagatgcgacagctgcgagaagtacatcaccggcagagtgctggaggccggcgagaagcactaccaccccagctgcgccctgtgcgtgagatgcggccagatgttcgccgagggcgaggagatgtacctgcagggcagcagcatctggcaccccgcctgcagacaggccgccagaaccgaggacagaaacaaggagaccagaaccagcagcgagagcatcatcagcgtgcccgccagcagcaccagcggcagccccagcagagtgatctacgccaagctgggcggcgagatcctggactacagagacctggccgccctgcccaagagcaaggccatctacgacatcgacagacccgacatgatcagctacagcccctacatcagccacagcgccggcgacagacagagctacggcgagagcccccagctgctgagccccacccccaccgagggcgaccaggacgacagaagctacaagcagtgcagaaccagcagccccagcagcaccggcagcgtgagcctgggcagatacacccccaccagcagaagcccccagcactacagcagacccgccgccagaagaagcgacggcgaggacggcagcctggaccaggacaacagaaagcagaagagcagctggctgatgctgaagggcgacgccgacaccagaaccaacagccccgacctggacacccagagcctgagccacagcagcggcaccgacagagaccccctgcagagaatggccggcgacagcttccacagcagagagtggttcttctag

SEQ ID NO: 71478 - DNA, 1938 bp, synthetic construct
  misc_feature 1..1938: note = Description of Artificial Sequence: Synthetic coding sequence
  source 1..1938: mol_type = other DNA
atgagcgccgtgagccagccccaggccgcccccagccccctggagaagagccccagcaccgccatcctgtgcaacacctgcggcaacgtgtgcaagggcgaggtgctgagagtgcaggacaagtacttccacatcaagtgcttcgtgtgcaaggcctgcggctgcgacctggccgagggcggcttcttcgtgagacagggcgagtacatctgcaccctggactaccagagactgtacggcaccagatgcttcagctgcgaccagttcatcgagggcgaggtggtgagcgccctgggcaagacctaccaccccgactgcttcgtgtgcgccgtgtgcagactgcccttcccccccggcgacagagtgaccttcaacggcaaggagtgcatgtgccagaagtgcagcctgcccgtgagcgtgggcagcagcgcccacctgagccagggcctgagaagctgcggcggctgcggcaccgagatcaagaacggccaggccctggtggccctggacaagcactggcacctgggctgcttcaagtgcaagagctgcggcaagctgctgaacgccgagtacatcagcaaggacggcctgccctactgcgaggccgactaccacgccaagttcggcatcagatgcgacagctgcgagaagtacatcaccggcagagtgctggaggccggcgagaagcactaccaccccagctgcgccctgtgcgtgagatgcggccagatgttcgccgagggcgaggagatgtacctgcagggcagcagcatctggcaccccgcctgcagacaggccgccagaaccgaggacagaaacaaggagaccagaaccagcagcgagagcatcatcagcgtgcccgccagcagcaccagcggcagccccagcagagtgatctacgccaagctgggcggcgagatcctggactacagagacctggccgccctgcccaagagcaaggccatctacgacatcgacagacccgacatgatcagctacagcccctacatcagccacagcgccggcgacagacagagctacggcgagggcgaccaggacgacagaagctacaagcagtgcagaaccagcagccccagcagcaccggcagcgtgagcctgggcagatacacccccaccagcagaagcccccagcactacagcagacccgccggcaccgtgagcgtgggcaccagcagctgcctgagcctgagccagcaccccagccccaccagcgtgttcagacaccactacatcccctacttcagaggcagcgagagcggcagaagcacccccagcctgagcgtgctgagcgacagcaagcccccccccagcacctaccagcaggcccccagacacttccacgtgcccgacaccggcgtgaaggacaacatctacagaaagccccccatctacagacagcacgccgccagaagaagcgacggcgaggacggcagcctggaccaggacaacagaaagcagaagagcagctggctgatgctgaagggcgacgccgacaccagaaccaacagccccgacctggacacccagagcctgagccacagcagcggcaccgacagagaccccctgcagagaatggccggcgacagcttccacagcagattcccctacagcaagagcgaccccctgcccggccacggcaagaacggcctggaccagagaaacgccaacctggccccctgcggcgccgaccccgacgccagctggggcatgagagagtacaagatctacccctacgacagcctgatcgtgaccaacagaatcagagtgaagctgcccaaggacgtggacagaaccagactggagagacacctgagccccgaggagttccaggaggtgttcggcatgagcatcgaggagttcgacagactggccctgtggaagagaaacgacctgaagaagaaggccctgctgttctag

SEQ ID NO: 71479 - DNA, 1680 bp, synthetic construct
  misc_feature 1..1680: note = Description of Artificial Sequence: Synthetic coding sequence
  source 1..1680: mol_type = other DNA
atgagcgccgtgagccagccccaggccgcccccagccccctggagaagagccccagcaccgccatcctgtgcaacacctgcggcaacgtgtgcaagggcgaggtgctgagagtgcaggacaagtacttccacatcaagtgcttcgtgtgcaaggcctgcggctgcgacctggccgagggcggcttcttcgtgagacagggcgagtacatctgcaccctggactaccagagactgtacggcaccagatgcttcagctgcgaccagttcatcgagggcgaggtggtgagcgccctgggcaagacctaccaccccgactgcttcgtgtgcgccgtgtgcagactgcccttcccccccggcgacagagtgaccttcaacggcaaggagtgcatgtgccagaagtgcagcctgcccgtgagcgtgggcagcagcgcccacctgagccagggcctgagaagctgcggcggctgcggcaccgagatcaagaacggccaggccctggtggccctggacaagcactggcacctgggctgcttcaagtgcaagagctgcggcaagctgctgaacgccgagtacatcagcaaggacggcctgccctactgcgaggccgactaccacgccaagttcggcatcagatgcgacagctgcgagaagtacatcaccggcagagtgctggaggccggcgagaagcactaccaccccagctgcgccctgtgcgtgagatgcggccagatgttcgccgagggcgaggagatgtacctgcagggcagcagcatctggcaccccgcctgcagacaggccgccagaaccgaggacagaaacaaggagaccagaaccagcagcgagagcatcatcagcgtgcccgccagcagcaccagcggcagccccagcagagtgatctacgccaagctgggcggcgagatcctggactacagagacctggccgccctgcccaagagcaaggccatctacgacatcgacagacccgacatgatcagctacagcccctacatcagccacagcgccggcgacagacagagctacggcgagggcgaccaggacgacagaagctacaagcagtgcagaaccagcagccccagcagcaccggcagcgtgagcctgggcagatacacccccaccagcagaagcccccagcactacagcagacccgccgccagaagaagcgacggcgaggacggcagcctggaccaggacaacagaaagaagagcagctggctgatgctgaagggcgacgccgacaccagaaccaacagccccgacctggacacccagagcctgagccacagcagcggcaccgacagagaccccctgcagagaatggccggcgacagcttccacagcagattcccctacagcaagagcgaccccctgcccggccacggcaagaacggcctggaccagagaaacgccaacctggccccctgcggcgccgaccccgacgccagctggggcatgagagagtacaagatctacccctacgacagcctgatcgtgaccaacagaatcagagtgaagctgcccaaggacgtggacagaaccagactggagagacacctgagccccgaggagttccaggaggtgttcggcatgagcatcgaggagttcgacagactggccctgtggaagagaaacgacctgaagaagaaggccctgctgttctag

SEQ ID NO: 71480 - DNA, 1041 bp, synthetic construct; identical to SEQ ID NO: 71471
  misc_feature 1..1041: note = Description of Artificial Sequence: Synthetic coding sequence
  source 1..1041: mol_type = other DNA

SEQ ID NO: 71481 - DNA, 1716 bp, synthetic construct
  misc_feature 1..1716: note = Description of Artificial Sequence: Synthetic coding sequence
  source 1..1716: mol_type = other DNA
atgagcgccgtgagccagccccaggccgcccccagccccctggagaagagccccagcaccgccatcctgtgcaacacctgcggcaacgtgtgcaagggcgaggtgctgagagtgcaggacaagtacttccacatcaagtgcttcgtgtgcaaggcctgcggctgcgacctggccgagggcggcttcttcgtgagacagggcgagtacatctgcaccctggactaccagagactgtacggcaccagatgcttcagctgcgaccagttcatcgagggcgaggtggtgagcgccctgggcaagacctaccaccccgactgcttcgtgtgcgccgtgtgcagactgcccttcccccccggcgacagagtgaccttcaacggcaaggagtgcatgtgccagaagtgcagcctgcccgtgagcgtgggcagcagcgcccacctgagccagggcctgagaagctgcggcggctgcggcaccgagatcaagaacggccaggccctggtggccctggacaagcactggcacctgggctgcttcaagtgcaagagctgcggcaagctgctgaacgccgagtacatcagcaaggacggcctgccctactgcgaggccgactaccacgccaagttcggcatcagatgcgacagctgcgagaagtacatcaccggcagagtgctggaggccggcgagaagcactaccaccccagctgcgccctgtgcgtgagatgcggccagatgttcgccgagggcgaggagatgtacctgcagggcagcagcatctggcaccccgcctgcagacaggccgccagaaccgaggacagaaacaaggagaccagaaccagcagcgagagcatcatcagcgtgcccgccagcagcaccagcggcagccccagcagagtgatctacgccaagctgggcggcgagatcctggactacagagacctggccgccctgcccaagagcaaggccatctacgacatcgacagacccgacatgatcagctacagcccctacatcagccacagcgccggcgacagacagagctacggcgagggcgaccaggacgacagaagctacaagcagtgcagaaccagcagccccagcagcaccggcagcgtgagcctgggcagatacacccccaccagcagaagcccccagcactacagcagacccggcagcgagagcggcagaagcacccccagcctgagcgtgctgagcgacagcaagcccccccccagcacctaccagcaggcccccagacacttccacgtgcccgacaccggcgtgaaggacaacatctacagaaagccccccatctacagacagcacgccgccagaagaagcgacggcgaggacggcagcctggaccaggacaacagaaagaagagcagctggctgatgctgaagggcgacgccgacaccagaaccaacagccccgacctggacacccagagcctgagccacagcagcggcaccgacagagaccccctgcagagaatggccggcgacagcttccacagccagcagatctacccctacgacagcctgatcgtgaccaacagaatcagagtgaagctgcccaaggacgtggacagaaccagactggagagacacctgagccccgaggagttccaggaggtgttcggcatgagcatcgaggagttcgacagactggccctgtggaagagaaacgacctgaagaagaaggccctgctgttctag

SEQ ID NO: 71482 - DNA, 1596 bp, synthetic construct
  misc_feature 1..1596: note = Description of Artificial Sequence: Synthetic coding sequence
  source 1..1596: mol_type = other DNA
atgagcgccgtgagccagccccaggccgcccccagccccctggagaagagccccagcaccgccatcctgtgcaacacctgcggcaacgtgtgcaagggcgaggtgctgagagtgcaggacaagtacttccacatcaagtgcttcgtgtgcaaggcctgcggctgcgacctggccgagggcggcttcttcgtgagacagggcgagtacatctgcaccctggactaccagagactgtacggcaccagatgcttcagctgcgaccagttcatcgagggcgaggtggtgagcgccctgggcaagacctaccaccccgactgcttcgtgtgcgccgtgtgcagactgcccttcccccccggcgacagagtgaccttcaacggcaaggagtgcatgtgccagaagtgcagcctgcccgtgagcgtgggcagcagcgcccacctgagccagggcctgagaagctgcggcggctgcggcaccgagatcaagaacggccaggccctggtggccctggacaagcactggcacctgggctgcttcaagtgcaagagctgcggcaagctgctgaacgccgagtacatcagcaaggacggcctgccctactgcgaggccgactaccacgccaagttcggcatcagatgcgacagctgcgagaagtacatcaccggcagagtgctggaggccggcgagaagcactaccaccccagctgcgccctgtgcgtgagatgcggccagatgttcgccgagggcgaggagatgtacctgcagggcagcagcatctggcaccccgcctgcagacaggccgccagaaccgaggacagaaacaaggagaccagaaccagcagcgagagcatcatcagcgtgcccgccagcagcaccagcggcagccccagcagagtgatctacgccaagctgggcggcgagatcctggactacagagacctggccgccctgcccaagagcaaggccatctacgacatcgacagacccgacatgatcagctacagcccctacatcagccacagcgccggcgacagacagagctacggcgagagcccccagctgctgagccccacccccaccgagggcgaccaggacgacagaagctacaagcagtgcagaaccagcagccccagcagcaccggcagcgtgagcctgggcagatacacccccaccagcagaagcccccagcactacagcagacccgccgccagaagaagcgacggcgaggacggcagcctggaccaggacaacagaaagaagagcagctggctgatgctgaagggcgacgccgacaccagaaccaacagccccgacctggacacccagagcctgagccacagcagcggcaccgacagagaccccctgcagagaatggccggcgacagcttccacagcagagagcagatctacccctacgacagcctgatcgtgaccaacagaatcagagtgaagctgcccaaggacgtggacagaaccagactggagagacacctgagccccgaggagttccaggaggtgttcggcatgagcatcgaggagttcgacagactggccctgtggaagagaaacgacctgaagaagaaggccctgctgttctag

SEQ ID NO: 71483 - DNA, 2193 bp, synthetic construct
  misc_feature 1..2193: note = Description of Artificial Sequence: Synthetic coding sequence
  source 1..2193: mol_type = other DNA
atggaggagctgatcgtggagctgagactgttcctggagctgctggaccacgagtacctgaccagcaccgtgagagagaagaaggccgtgatcaccaacatcctgctgagaatccagagcagcaagggcttcgacgtgaaggaccacgcccagaagcaggagaccgccaacagcctgcccgcccccccccagatgcccctgcccgagatcccccagccctggctgccccccgacagcggccccccccccctgcccaccagcagcctgcccgagggctactacgaggaggccgtgcccctgagccccggcaaggcccccgagtacatcaccagcaactacgacagcgacgccatgagcagcagctacgagagctacgacgaggaggaggaggacggcaagggcaagaagaccagacaccagtggcccagcgaggaggccagcatggacctggtgaaggacgccaagatctgcgccttcctgctgagaaagaagagattcggccagtggaccaagctgctgtgcgtgatcaaggacaccaagctgctgtgctacaagagcagcaaggaccagcagccccagatggagctgcccctgcagggctgcaacatcacctacatccccaaggacagcaagaagaagaagcacgagctgaagatcacccagcagggcaccgaccccctggtgctggccgtgcagagcaaggagcaggccgagcagtggctgaaggtgatcaaggaggcctacagcggctgcagcggccccgtggacagcgagtgcccccccccccccagcagccccgtgcacaaggccgagctggagaagaagctgagcagcgagagacccagcagcgacggcgagggcgtggtggagaacggcatcaccacctgcaacggcaaggagcaggtgaagagaaagaagagcagcaagagcgaggccaagggcaccgtgagcaaggtgaccggcaagaagatcaccaagatcatcagcctgggcaagaagaagcccagcaccgacgagcagaccagcagcgccgaggaggacgtgcccacctgcggctacctgaacgtgctgagcaacagcagatggagagagagatggtgcagagtgaaggacaacaagctgatcttccacaaggacagaaccgacctgaagacccacatcgtgagcatccccctgagaggctgcgaggtgatccccggcctggacagcaagcaccccctgaccttcagactgctgagaaacggccaggaggtggccgtgctggaggccagcagcagcgaggacatgggcagatggatcggcatcctgctggccgagaccggcagcagcaccgaccccgaggccctgcactacgactacatcgacgtggagatgagcgccagcgtgatccagaccgccaagcagaccttctgcttcatgaacagaagagtgatcagcgccaacccctacctgggcggcaccagcaacggctacgcccaccccagcggcaccgccctgcactacgacgacgtgccctgcatcaacggcagcctgaagggcaagaagccccccgtggccagcaacggcgtgaccggcaagggcaagaccctgagcagccagcccaagaaggccgaccccgccgccgtggtgaagagaaccggcagcaacgccgcccagtacaagtacggcaagaacagagtggaggccgacgccaagagactgcagaccaaggaggaggagctgctgaagagaaaggaggccctgagaaacagactggcccagctgagaaaggagagaaaggacctgagagccgccatcgaggtgaacgccggcagaaagccccaggccatcctggaggagaagctgaagcagctggaggaggagtgcagacagaaggaggccgagagagtgagcctggagctggagctgaccgaggtgaaggagagcctgaagaaggccctggccggcggcgtgaccctgggcctggccatcgagcccaagagcggcaccagcagcccccagagccccgtgttcagacacagaaccctggagaacagccccatcagcagctgcgacaccagcgacaccgagggccccgtgcccgtgaacagcgccgccgtgctgaagaagagccaggccgcccccggcagcagcccctgcagaggccacgtgctgagaaaggccaaggagtgggagctgaagaacggcacctag

SEQ ID NO: 71484 - DNA, 2193 bp, synthetic construct; identical to SEQ ID NO: 71483
  misc_feature 1..2193: note = Description of Artificial Sequence: Synthetic coding sequence
  source 1..2193: mol_type = other DNA

SEQ ID NO: 71485 - DNA, 2445 bp, synthetic construct
  misc_feature 1..2445: note = Description of Artificial Sequence: Synthetic coding sequence
  source 1..2445: mol_type = other DNA
atggaggagctgatcgtggagctgagactgttcctggagctgctggaccacgagtacctgaccagcaccgtgagagagaagaaggccgtgatcaccaacatcctgctgagaatccagagcagcaagggcttcgacgtgaaggaccacgcccagaagcaggagaccgccaacagcctgcccgcccccccccagatgcccctgcccgagatcccccagccctggctgccccccgacagcggccccccccccctgcccaccagcagcctgcccgagggctactacgaggaggccgtgcccctgagccccggcaaggcccccgagtacatcaccagcaactacgacagcgacgccatgagcagcagctacgagagctacgacgaggaggaggaggacggcaagggcaagaagaccagacaccagtggcccagcgaggaggccagcatggacctggtgaaggacgccaagatctgcgccttcctgctgagaaagaagagattcggccagtggaccaagctgctgtgcgtgatcaaggacaccaagctgctgtgctacaagagcagcaaggaccagcagccccagatggagctgcccctgcagggctgcaacatcacctacatccccaaggacagcaagaagaagaagcacgagctgaagatcacccagcagggcaccgaccccctggtgctggccgtgcagagcaaggagcaggccgagcagtggctgaaggtgatcaaggaggcctacagcggctgcagcggccccgtggacagcgagtgcccccccccccccagcagccccgtgcacaaggccgagctggagaagaagctgagcagcgagagacccagcagcgacggcgagggcgtggtggagaacggcatcaccacctgcaacggcaaggagcaggtgaagagaaagaagagcagcaagagcgaggccaagggcaccgtgagcaaggtgaccggcaagaagatcaccaagatcatcagcctgggcaagaagaagcccagcaccgacgagcagaccagcagcgccgaggaggacgtgcccacctgcggctacctgaacgtgctgagcaacagcagatggagagagagatggtgcagagtgaaggacaacaagctgatcttccacaaggacagaaccgacctgaagacccacatcgtgagcatccccctgagaggctgcgaggtgatccccggcctggacagcaagcaccccctgaccttcagactgctgagaaacggccaggaggtggccgtgctggaggccagcagcagcgaggacatgggcagatggatcggcatcctgctggccgagaccggcagcagcaccgaccccgaggccctgcactacgactacatcgacgtggagatgagcgccagcgtgatccagaccgccaagcagaccttctgcttcatgaacagaagagtgatcagcgccaacccctacctgggcggcaccagcaacggctacgcccaccccagcggcaccgccctgcactacgacgacgtgccctgcatcaacggcagctgggagcccgaggacggcttccccgccagctgcagcagaggcctgggcgaggaggtgctgtacgacaacgccggcctgtacgacaacctgccccccccccacatcttcgccagatacagccccgccgacagaaaggccagcagactgagcgccgacaagctgagcagcaaccactacaagtaccccgccagcgcccagagcgtgaccaacaccagcagcgtgggcagagccagcctgggcctgaacagccagctgaagggcaagaagccccccgtggccagcaacggcgtgaccggcaagggcaagaccctgagcagccagcccaagaaggccgaccccgccgccgtggtgaagagaaccggcagcaacgccgcccagtacaagtacggcaagaacagagtggaggccgacgccaagagactgcagaccaaggaggaggagctgctgaagagaaaggaggccctgagaaacagactggcccagctgagaaaggagagaaaggacctgagagccgccatcgaggtgaacgccggcagaaagccccaggccatcctggaggagaagctgaagcagctggaggaggagtgcagacagaaggaggccgagagagtgagcctggagctggagctgaccgaggtgaaggagagcctgaagaaggccctggccggcggcgtgaccctgggcctggccatcgagcccaagagcggcaccagcagcccccagagccccgtgttcagacacagaaccctggagaacagccccatcagcagctgcgacaccagcgacaccgagggccccgtgcccgtgaacagcgccgccgtgctgaagaagagccaggccgcccccggcagcagcccctgcagaggccacgtgctgagaaaggccaaggagtgggagctgaagaacggcacctag

SEQ ID NO: 71486 - DNA, 2307 bp, synthetic construct
  misc_feature 1..2307: note = Description of Artificial Sequence: Synthetic coding sequence
  source 1..2307: mol_type = other DNA
atggacagaggccaggtgctggagcagctgctgcccgagctgaccggcctgctgagcctgctggaccacgagtacctgagcgacaccaccctggagaagaagatggccgtggccagcatcctgcagagcctgcagcccctgcccgccaaggaggtgagctacctgtacgtgaacaccgccgacctgcacagcggccccagcttcgtggagagcctgttcgaggagttcgactgcgacctgagcgacctgagagacatgcccgaggacgacggcgagcccagcaagggcgccagccccgagctggccaagagccccagactgagaaacgccgccgacctgcccccccccctgcccaacaagcccccccccgaggactactacgaggaggccctgcccctgggccccggcaagagccccgagtacatcagcagccacaacggctgcagccccagccacagcatcgtggacggctactacgaggacgccgacagcagctaccccgccaccagagtgaacggcgagctgaagagcagctacaacgacagcgacgccatgagcagcagctacgagagctacgacgaggaggaggaggagggcaagagcccccagcccagacaccagtggcccagcgaggaggccagcatgcacctggtgagagagtgcagaatctgcgccttcctgctgagaaagaagagattcggccagtgggccaagcagctgaccgtgatcagagaggaccagctgctgtgctacaagagcagcaaggacagacagccccacctgagactggccctggacacctgcagcatcatctacgtgcccaaggacagcagacacaagagacacgagctgagattcacccagggcgccaccgaggtgctggtgctggccctgcagagcagagagcaggccgaggagtggctgaaggtgatcagagaggtgagcaagcccgtgggcggcgccgagggcgtggaggtgcccagaagccccgtgctgctgtgcaagctggacctggacaagagactgagccaggagaagcagaccagcgacagcgacagcgtgggcgtgggcgacaactgcagcaccctgggcagaagagagacctgcgaccacggcaagggcaagaagagcagcctggccgagctgaagggcagcatgagcagagccgccggcagaaagatcaccagaatcatcggcttcagcaagaagaagaccctggccgacgacctgcagaccagcagcaccgaggaggaggtgccctgctgcggctacctgaacgtgctggtgaaccagggctggaaggagagatggtgcagactgaagtgcaacaccctgtacttccacaaggaccacatggacctgagaacccacgtgaacgccatcgccctgcagggctgcgaggtggcccccggcttcggccccagacaccccttcgccttcagaatcctgagaaacagacaggaggtggccatcctggaggccagctgcagcgaggacatgggcagatggctgggcctgctgctggtggagatgggcagcagagtgacccccgaggccctgcactacgactacgtggacgtggagaccctgaccagcatcgtgagcgccggcagaaacagcttcctgtacgccagaagctgccagaaccagtggcccgagcccagagtgtacgacgacgtgccctacgagaagatgcaggacgaggagcccgagagacccaccggcgcccaggtgaagagacacgccagcagctgcagcgagaagagccacagagtggacccccaggtgaaggtgaagagacacgccagcagcgccaaccagtacaagtacggcaagaacagagccgaggaggacgccagaagatacctggtggagaaggagaagctggagaaggagaaggagaccatcagaaccgagctgatcgccctgagacaggagaagagagagctgaaggaggccatcagaagcagccccggcgccaagctgaaggccctggaggaggccgtggccaccctggaggcccagtgcagagccaaggaggagagaagaatcgacctggagctgaagctggtggccgtgaaggagagactgcagcagagcctggccggcggccccgccctgggcctgagcgtgagcagcaagcccaagagcggcgagaccgccaacaagccccagaacagcgtgcccgagcagcccctgcccgtgaactgcgtgagcgagctgagaaagagaagccccagcatcgtggccagcaaccagggcagagtgctgcagaaggccaaggagtgggagatgaagaagacctag

SEQ ID NO: 71487 - DNA, 2178 bp, synthetic construct
  misc_feature 1..2178: note = Description of Artificial Sequence: Synthetic coding sequence
  source 1..2178: mol_type = other DNA
atggacagaggccaggtgctggagcagctgctgcccgagctgaccggcctgctgagcctgctggaccacgagtacctgagcgacaccaccctggagaagaagatggccgtggccagcatcctgcagagcctgcagcccctgcccgccaaggaggtgagctacctgtacgtgaacaccgccgacctgcacagcggccccagcttcgtggagagcctgttcgaggagttcgactgcgacctgagcgacctgagagacatgcccgaggacgacggcgagcccagcaagggcgccagccccgagctggccaagagccccagactgagaaacgccgccgacctgcccccccccctgcccaacaagcccccccccgaggactactacgaggaggccctgcccctgggccccggcaagagccccgagtacatcagcagccacaacggctgcagccccagccacagcatcgtggacggctactacgaggacgccgacagcagctaccccgccaccagagtgaacggcgagctgaagagcagctacaacgacagcgacgccatgagcagcagctacgagagctacgacgaggaggaggaggagggcaagagcccccagcccagacaccagtggcccagcgaggaggccagcatgcacctggtgagagagtgcagaatctgcgccttcctgctgagaaagaagagattcggccagtgggccaagcagctgaccgtgatcagagaggaccagctgctgtgctacaagagcagcaaggacagacagccccacctgagactggccctggacacctgcagcatcatctacgtgcccaaggacagcagacacaagagacacgagctgagattcacccagggcgccaccgaggtgctggtgctggccctgcagagcagagagcaggccgaggagtggctgaaggtgatcagagaggtgagcaagcccgtgggcggcgccgagggcgtggaggtgcccagaagccccgtgctgctgtgcaagctggacctggacaagagactgagccaggagaagcagaccagcgacagcgacagcgtgggcgtgggcgacaactgcagcaccctgggcagaagagagacctgcgaccacggcaagggcaagaagagcagcctggccgagctgaagggcagcatgagcagagccgccggcagaaagatcaccagaatcatcggcttcagcaagaagaagaccctggccgacgacctgcagaccagcagcaccgaggaggaggtgccctgctgcggctacctgaacgtgctggtgaaccagggctggaaggagagatggtgcagactgaagtgcaacaccctgtacttccacaaggaccacatggacctgagaacccacgtgaacgccatcgccctgcagggctgcgaggtggcccccggcttcggccccagacaccccttcgccttcagaatcctgagaaacagacaggaggtggccatcctggaggccagctgcagcgaggacatgggcagatggctgggcctgctgctggtggagatgggcagcagagtgacccccgaggccctgcactacgactacgtggacgtggagaccctgaccagcatcgtgagcgccggcagaaacagcttcctgtacgccagaagctgccagaaccagtggcccgagcccagagtgtacgacgacgtgccctacgagaagatgcaggacgaggagcccgagagacccaccggcgcccaggtgaagagacacgccagcagctgcagcgagaagagccacagagtggacccccaggtgaaggtgaagagacacgccagcagcgccaaccagtacaagtacggcaagaacagagccgaggaggacgccagaagatacctggtggagaaggagaagctggagaaggagaaggagaccatcagaaccgagctgatcgccctgagacaggagaagagagagctgaaggaggccatcagaagcagccccggcgccaagctgaaggccctggaggaggccgtggccaccctggaggcccagtgcagagccaaggaggagagaagaatcgacctggagctgaagctggtggccgtgaaggagagactgcagcagagcctggccggcggccccgccctgggcctgagcgtgagcagcaagcccaagagcggcgagtgggagatgaagaagacctag

SEQ ID NO: 71488 - DNA, 2457 bp, synthetic construct
  misc_feature 1..2457: note = Description of Artificial Sequence: Synthetic coding sequence
  source 1..2457: mol_type = other DNA
atggagagatacaaggccctggagcagctgctgaccgagctggacgacttcctgaagatcctggaccaggagaacctgagcagcaccgccctggtgaagaagagctgcctggccgagctgctgagactgtacaccaagagcagcagcagcgacgaggagtacatctacatgaacaaggtgaccatcaacaagcagcagaacgccgagagccagggcaaggcccccgaggagcagggcctgctgcccaacggcgagcccagccagcacagcagcgccccccagaagagcctgcccgacctgcccccccccaagatgatccccgagagaaagcagctggccatccccaagaccgagagccccgagggctactacgaggaggccgagccctacgacaccagcctgaacgaggacggcgaggccgtgagcagcagctacgagagctacgacgaggaggacggcagcaagggcaagagcgccccctaccagtggcccagccccgaggccggcatcgagctgatgagagacgccagaatctgcgccttcctgtggagaaagaagtggctgggccagtgggccaagcagctgtgcgtgatcaaggacaacagactgctgtgctacaagagcagcaaggaccacagcccccagctggacgtgaacctgctgggcagcagcgtgatccacaaggagaagcaggtgagaaagaaggagcacaagctgaagatcacccccatgaacgccgacgtgatcgtgctgggcctgcagagcaaggaccaggccgagcagtggctgagagtgatccaggaggtgagcggcctgcccagcgagggcgccagcgagggcaaccagtacacccccgacgcccagagattcaactgccagaagcccgacatcgccgagaagtacctgagcgccagcgagtacggcagcagcgtggacggccaccccgaggtgcccgagaccaaggacgtgaagaagaagtgcagcgccggcctgaagctgagcaacctgatgaacctgggcagaaagaagagcaccagcctggagcccgtggagagaagcctggagaccagcagctacctgaacgtgctggtgaacagccagtggaagagcagatggtgcagcgtgagagacaaccacctgcacttctaccaggacagaaacagaagcaaggtggcccagcagcccctgagcctggtgggctgcgaggtggtgcccgaccccagccccgaccacctgtacagcttcagaatcctgcacaagggcgaggagctggccaagctggaggccaagagcagcgaggagatgggccactggctgggcctgctgctgagcgagagcggcagcaagaccgaccccgaggagttcacctacgactacgtggacgccgacagagtgagctgcatcgtgagcgccgccaagaacagcctgctgctgatgcagagaaagttcagcgagcccaacacctacatcgacggcctgcccagccaggacagacaggaggagctgtacgacgacgtggacctgagcgagctgaccgccgccgtggagcccaccgaggaggccacccccgtggccgacgaccccaacgagagagagagcgacagagtgtacctggacctgacccccgtgaagagcttcctgcacggccccagcagcgcccaggcccaggccagcagccccaccctgagctgcctggacaacgccaccgaggccctgcccgccgacagcggccccggccccacccccgacgagccctgcatcaagtgccccgagaacctgggcgagcagcagctggagagcctggagcccgaggaccccagcctgagaatcaccaccgtgaagatccagaccgagcagcagagaatcagcttcccccccagctgccccgacgccgtggtggccaccccccccggcgccagcccccccgtgaaggacagactgagagtgaccagcgccgagatcaagctgggcaagaacagaaccgaggccgaggtgaagagatacaccgaggagaaggagagactggagaagaagaaggaggagatcagaggccacctggcccagctgagaaaggagaagagagagctgaaggagaccctgctgaagtgcaccgacaaggaggtgctggccagcctggagcagaagctgaaggagatcgacgaggagtgcagaggcgaggagagcagaagagtggacctggagctgagcatcatggaggtgaaggacaacctgaagaaggccgaggccggccccgtgaccctgggcaccaccgtggacaccacccacctggagaacgtgagccccagacccaaggccgtgacccccgccagcgcccccgactgcacccccgtgaacagcgccaccaccctgaagaacagacccctgagcgtggtggtgaccggcaagggcaccgtgctgcagaaggccaaggagtgggagaagaagggcgccagctag

SEQ ID NO: 71489 - DNA, 2445 bp, synthetic construct
  misc_feature 1..2445: note = Description of Artificial Sequence: Synthetic coding sequence
  source 1..2445: mol_type = other DNA
atggagagatacaaggccctggagcagctgctgaccgagctggacgacttcctgaagatcctggaccaggagaacctgagcagcaccgccctggtgaagaagagctgcctggccgagctgctgagactgtacaccaagagcagcagcagcgacgaggagtacatctacatgaacaaggtgaccatcaacaagcagcagaacgccgagagccagggcaaggcccccgaggagcagggcctgctgcccaacggcgagcccagccagcacagcagcgccccccagaagagcctgcccgacctgcccccccccaagatgatccccgagagaaagcagctggccatccccaagaccgagagccccgagggctactacgaggaggccgagccctacgacaccagcctgaacgaggacggcgaggccgtgagcagcagctacgagagctacgacgaggaggacggcagcaagggcaagagcgccccctaccagtggcccagccccgaggccggcatcgagctgatgagagacgccagaatctgcgccttcctgtggagaaagaagtggctgggccagtgggccaagcagctgtgcgtgatcaaggacaacagactgctgtgctacaagagcagcaaggaccacagcccccagctggacgtgaacctgctgggcagcagcgtgatccacaaggagaagcaggtgagaaagaaggagcacaagctgaagatcacccccatgaacgccgacgtgatcgtgctgggcctgcagagcaaggaccaggccgagcagtggctgagagtgatccaggaggtgagcggcctgcccagcgagggcgccagcgagggcaaccagtacacccccgacgcccagagattcaactgccagaagcccgacatcgccgagaagtacctgagcgccagcgagtacggcagcagcgtggacggccaccccgaggtgcccgagaccaaggacgtgaagaagaagtgcagcgccggcctgaagctgagcaacctgatgaacctgggcagaaagaagagcaccagcctggagcccgtggagagaagcctggagaccagcagctacctgaacgtgctggtgaacagccagtggaagagcagatggtgcagcgtgagagacaaccacctgcacttctaccaggacagaaacagaagcaaggtggcccagcagcccctgagcctggtgggctgcgaggtggtgcccgaccccagccccgaccacctgtacagcttcagaatcctgcacaagggcgaggagctggccaagctggaggccaagagcagcgaggagatgggccactggctgggcctgctgctgagcgagagcggcagcaagaccgaccccgaggagttcacctacgactacgtggacgccgacagagtgagctgcatcgtgagcgccgccaagaacagcctgctgctgatgcagagaaagttcagcgagcccaacacctacatcgacggcctgcccagccaggacagacaggaggagctgtacgacgacgtggacctgagcgagctgaccgccgccgtggagcccaccgaggaggccacccccgtggccgacgaccccaacgagagagagagcgacagagtgtacctggacctgacccccgtgaagagcttcctgcacggccccagcagcgcccaggcccaggccagcagccccaccctgagctgcctggacaacgccaccgaggccctgcccgccgacagcggccccggccccacccccgacgagccctgcatcaagtgccccgagaacctgggcgagcagcagctggagagcctggagcccgaggaccccagcctgagaatcaccaccgtgaagatccagaccgagcagcagagaatcagcttcccccccagctgccccgacgccgtggtggccaccccccccggcgccagcccccccgtgaaggacagactgagagtgaccagcgccgagatcaagctgggcaagaacagaaccgaggccgaggtgaagagatacaccgaggagaaggagagactggagaagaagaaggaggagatcagaggccacctggcccagctgagaaaggagaagagagagctgaaggagaccctgctgaagtgcaccgacaaggaggtgctggccagcctggagcagaagctgaaggagatcgacgaggagtgcagaggcgaggagagcagaagagtggacctggagctgagcatcatggaggtgaaggacaacctgaagaaggccgaggccggccccgtgaccctgggcaccaccgtggacaccacccacctggagaaccccaaggccgtgacccccgccagcgcccccgactgcacccccgtgaacagcgccaccaccctgaagaacagacccctgagcgtggtggtgaccggcaagggcaccgtgctgcagaaggccaaggagtgggagaagaagggcgccagctag

SEQ ID NO: 71490 - DNA, 2526 bp, synthetic construct
  misc_feature 1..2526: note = Description of Artificial Sequence: Synthetic coding sequence
  source 1..2526: mol_type = other DNA
cagagagtgagagccctggagcagctgctgaccgagctggacgacttcctgaagatcctggaccaggagaacctgagcagcaccgccctggtgaagaagagctgcctggccgagctgctgagactgtacaccaagagcagcagcagcgacgaggagtacatctacatgaacaaggtgaccatcaacaagcagcagaacgccgagagccagggcaaggcccccgaggagcagggcctgctgcccaacggcgagcccagccagcacagcagcgccccccagaagagcctgcccgacctgcccccccccaagatgatccccgagagaaagcagctggccatccccaagaccgagagccccgagggctactacgaggaggccgagccctacgacaccagcctgaacggccacagcggcggcttcctgcccaccggcgtgcccagatgggtgcaggtgcccgagggcgtgatctacgccaccatcaccctggaggacggcgaggccgtgagcagcagctacgagagctacgacgaggaggacggcagcaagggcaagagcgccccctaccagtggcccagccccgaggccggcatcgagctgatgagagacgccagaatctgcgccttcctgtggagaaagaagtggctgggccagtgggccaagcagctgtgcgtgatcaaggacaacagactgctgtgctacaagagcagcaaggaccacagcccccagctggacgtgaacctgctgggcagcagcgtgatccacaaggagaagcaggtgagaaagaaggagcacaagctgaagatcacccccatgaacgccgacgtgatcgtgctgggcctgcagagcaaggaccaggccgagcagtggctgagagtgatccaggaggtgagcggcctgcccagcgagggcgccagcgagggcaaccagtacacccccgacgcccagagattcaactgccagaagcccgacatcgccgagaagtacctgagcgccagcgagtacggcagcagcgtggacggccaccccgaggtgcccgagaccaaggacgtgaagaagaagtgcagcgccggcctgaagctgagcaacctgatgaacctgggcagaaagaagagcaccagcctggagcccgtggagagaagcctggagaccagcagctacctgaacgtgctggtgaacagccagtggaagagcagatggtgcagcgtgagagacaaccacctgcacttctaccaggacagaaacagaagcaaggtggcccagcagcccctgagcctggtgggctgcgaggtggtgcccgaccccagccccgaccacctgtacagcttcagaatcctgcacaagggcgaggagctggccaagctggaggccaagagcagcgaggagatgggccactggctgggcctgctgctgagcgagagcggcagcaagaccgaccccgaggagttcacctacgactacgtggacgccgacagagtgagctgcatcgtgagcgccgccaagaacagcctgctgctgatgcagagaaagttcagcgagcccaacacctacatcgacggcctgcccagccaggacagacaggaggagctgtacgacgacgtggacctgagcgagctgaccgccgccgtggagcccaccgaggaggccacccccgtggccgacgaccccaacgagagagagagcgacagagtgtacctggacctgacccccgtgaagagcttcctgcacggccccagcagcgcccaggcccaggccagcagccccaccctgagctgcctggacaacgccaccgaggccctgcccgccgacagcggccccggccccacccccgacgagccctgcatcaagtgccccgagaacctgggcgagcagcagctggagagcctggagcccgaggaccccagcctgagaatcaccaccgtgaagatccagaccgagcagcagagaatcagcttcccccccagctgccccgacgccgtggtggccaccccccccggcgccagcccccccgtgaaggacagactgagagtgaccagcgccgagatcaagctgggcaagaacagaaccgaggccgaggtgaagagatacaccgaggagaaggagagactggagaagaagaaggaggagatcagaggccacctggcccagctgagaaaggagaagagagagctgaaggagaccctgctgaagtgcaccgacaaggaggtgctggccagcctggagcagaagctgaaggagatcgacgaggagtgcagaggcgaggagagcagaagagtggacctggagctgagcatcatggaggtgaaggacaacctgaagaaggccgaggccggccccgtgaccctgggcaccaccgtggacaccacccacctggagaaccccaaggccgtgacccccgccagcgcccccgactgcacccccgtgaacagcgccaccaccctgaagaacagacccctgagcgtggtggtgaccggcaagggcaccgtgctgcagaaggccaaggagtgggagaagaagggcgccagctag

SEQ ID NO: 71491 - DNA, 939 bp, synthetic construct
  misc_feature 1..939: note = Description of Artificial Sequence: Synthetic coding sequence
  source 1..939: mol_type = other DNA
atggagagatacaaggcccagggctgctgctgcctggtggtgcagagaagaatcagacaggtgagcgccagcctggagcagctgctgaccgagctggacgacttcctgaagatcctggaccaggagaacctgagcagcaccgccctggtgaagaagagctgcctggccgagctgctgagactgtacaccaagagcagcagcagcgacgaggagtacatctacatgaacaaggtgaccatcaacaagcagcagaacgccgagagccagggcaaggcccccgaggagcagggcctgctgcccaacggcgagcccagccagcacagcagcgccccccagaagagcctgcccgacctgcccccccccaagatgatccccgagagaaagcagctggccatccccaagaccgagagccccgagggctactacgaggaggccgagccctacgacaccagcctgaacgaggacggcgaggccgtgagcagcagctacgagagctacgacgaggaggacggcagcaagggcaagagcgccccctaccagtggcccagccccgaggccggcatcgagctgatgagagacgccagaatctgcgccttcctgtggagaaagaagtggctgggccagtgggccaagcagctgtgcgtgatcaaggacaacagactgctgtgctacaagagcagcaaggaccacagcccccagctggacgtgaacctgctgggcagcagcgtgatccacaaggagaagcaggtgagaaagaaggagcacaagctgaagatcacccccatgaacgccgacgtgatcgtgctgggcctgcagagcaaggaccaggccgagcagtggctgagagtgatccaggaggtgagcggcctgcccagcgagggcgccagcgagggcaaccagtacacccccgacgcccagagattcaactgccagaagtag

SEQ ID NO: 71492 - DNA, 939 bp, synthetic construct; identical to SEQ ID NO: 71491
  misc_feature 1..939: note = Description of Artificial Sequence: Synthetic coding sequence
  source 1..939: mol_type = other DNA

SEQ ID NO: 71493 - DNA, 2616 bp, synthetic construct
  misc_feature 1..2616: note = Description of Artificial Sequence: Synthetic coding sequence
  source 1..2616: mol_type = other DNA
atggagagatacaaggccctggagcagctgctgaccgagctggacgacttcctgaagatcctggaccaggagaacctgagcagcaccgccctggtgaagaagagctgcctggccgagctgctgagactgtacaccaagagcagcagcagcgacgaggagtacatctacatgaacaaggtgaccatcaacaagcagcagaacgccgagagccagggcaaggcccccgaggagcagggcctgctgcccaacggcgagcccagccagcacagcagcgccccccagaagagcctgcccgacctgcccccccccaagatgagaatcctgaccctgggccagatcagcggcgcccagagcttcagccccgacggcacccacctgaccggcaccgagttcctgggcggctggagctggagacccagccagatcagactgatgagccccggcacccactggggcgacctgaccgccaccgagatccccgagagaaagcagctggccatccccaagaccgagagccccgagggctactacgaggaggccgagccctacgacaccagcctgaacgaggacggcgaggccgtgagcagcagctacgagagctacgacgaggaggacggcagcaagggcaagagcgccccctaccagtggcccagccccgaggccggcatcgagctgatgagagacgccagaatctgcgccttcctgtggagaaagaagtggctgggccagtgggccaagcagctgtgcgtgatcaaggacaacagactgctgtgctacaagagcagcaaggaccacagcccccagctggacgtgaacctgctgggcagcagcgtgatccacaaggagaagcaggtgagaaagaaggagcacaagctgaagatcacccccatgaacgccgacgtgatcgtgctgggcctgcagagcaaggaccaggccgagcagtggctgagagtgatccaggaggtgagcggcctgcccagcgagggcgccagcgagggcaaccagtacacccccgacgcccagagattcaactgccagaagcccgacatcgccgagaagtacctgagcgccagcgagtacggcagcagcgtggacggccaccccgaggtgcccgagaccaaggacgtgaagaagaagtgcagcgccggcctgaagctgagcaacctgatgaacctgggcagaaagaagagcaccagcctggagcccgtggagagaagcctggagaccagcagctacctgaacgtgctggtgaacagccagtggaagagcagatggtgcagcgtgagagacaaccacctgcacttctaccaggacagaaacagaagcaaggtggcccagcagcccctgagcctggtgggctgcgaggtggtgcccgaccccagccccgaccacctgtacagcttcagaatcctgcacaagggcgaggagctggccaagctggaggccaagagcagcgaggagatgggccactggctgggcctgctgctgagcgagagcggcagcaagaccgaccccgaggagttcacctacgactacgtggacgccgacagagtgagctgcatcgtgagcgccgccaagaacagcctgctgctgatgcagagaaagttcagcgagcccaacacctacatcgacggcctgcccagccaggacagacaggaggagctgtacgacgacgtggacctgagcgagctgaccgccgccgtggagcccaccgaggaggccacccccgtggccgacgaccccaacgagagagagagcgacagagtgtacctggacctgacccccgtgaagagcttcctgcacggccccagcagcgcccaggcccaggccagcagccccaccctgagctgcctggacaacgccaccgaggccctgcccgccgacagcggccccggccccacccccgacgagccctgcatcaagtgccccgagaacctgggcgagcagcagctggagagcctggagcccgaggaccccagcctgagaatcaccaccgtgaagatccagaccgagcagcagagaatcagcttcccccccagctgccccgacgccgtggtggccaccccccccggcgccagcccccccgtgaaggacagactgagagtgaccagcgccgagatcaagctgggcaagaacagaaccgaggccgaggtgaagagatacaccgaggagaaggagagactggagaagaagaaggaggagatcagaggccacctggcccagctgagaaaggagaagagagagctgaaggagaccctgctgaagtgcaccgacaaggaggtgctggccagcctggagcagaagctgaaggagatcgacgaggagtgcagaggcgaggagagcagaagagtggacctggagctgagcatcatggaggtgaaggacaacctgaagaaggccgaggccggccccgtgaccctgggcaccaccgtggacaccacccacctggagaacgtgagccccagacccaaggccgtgacccccgccagcgcccccgactgcacccccgtgaacagcgccaccaccctgaagaacagacccctgagcgtggtggtgaccggcaagggcaccgtgctgcagaaggccaaggagtgggagaagaagggcgccagctag

SEQ ID NO: 71494 - DNA, 1002 bp, synthetic construct
  misc_feature 1..1002: note = Description of Artificial Sequence: Synthetic coding sequence
  source 1..1002: mol_type = other DNA
atgtgcgaggaggagaccaccgccctggtgtgcgacaacggcagcggcctgtgcaaggccggcttcgccggcgacgacgcccccagagccgtgttccccagcatcgtgggcagacccagacaccagatctggcaccacagcttctacaacgagctgagagtggcccccgaggagcaccccaccctgctgaccgaggcccccctgaaccccaaggccaacagagagaagatgacccagatcatgttcgagaccttcaacgtgcccgccatgtacgtggccatccaggccgtgctgagcctgtacgccagcggcagaaccaccggcatcgtgctggacagcggcgacggcgtgacccacaacgtgcccatctacgagggctacgccctgccccacgccatcatgagactggacctggccggcagagacctgaccgactacctgatgaagatcctgaccgagagaggctacagcttcgtgaccaccgccgagagagagatcgtgagagacatcaaggagaagctgtgctacgtggccctggacttcgagaacgagatggccaccgccgccagcagcagcagcctggagaagagctacgagctgcccgacggccaggtgatcaccatcggcaacgagagattcagatgccccgagaccctgttccagcccagcttcatcggcatggagagcgccggcatccacgagaccacctacaacagcatcatgaagtgcgacatcgacatcagaaaggacctgtacgccaacaacgtgctgagcggcggcaccaccatgtaccccggcatcgccgacagaatgcagaaggagatcaccgccctggcccccagcaccatgaagatcaagatcatcgccccccccgagagaaagtacagcgtgtggatcggcggcagcatcctggccagcctgagcaccttccagcagatgtggatcagcaagcccgagtacgacgaggccggccccagcatcgtgcacagaaagtgcttctag

SEQ ID NO: 71495 - DNA, 1113 bp, synthetic construct
  misc_feature 1..1113: note = Description of Artificial Sequence: Synthetic coding sequence
  source 1..1113: mol_type = other DNA
atgagcctgcaccagttcctgctggagcccatcacctgccacgcctggaacagagacagaacccagatcgccctgagccccaacaaccacgaggtgcacatctacaagaagaacggcagccagtgggtgaaggcccacgagctgaaggagcacaacggccacatcaccggcatcgactgggcccccaagagcgacagaatcgtgacctgcggcgccgacagaaacgcctacgtgtggagccagaaggacggcgtgtggaagcccaccctggtgatcctgagaatcaacagagccgccaccttcgtgaagtggagccccctggagaacaagttcgccgtgggcagcggcgccagactgatcagcgtgtgctacttcgagagcgagaacgactggtgggtgagcaagcacatcaagaagcccatcagaagcaccgtgctgagcctggactggcaccccaacaacgtgctgctggccgccggcagctgcgacttcaagtgcagagtgttcagcgcctacatcaaggaggtggacgagaagcccgccagcaccccctggggcagcaagatgcccttcggccagctgatgagcgagttcggcggcagcggcaccggcggctgggtgcacggcgtgagcttcagcgccagcggcagcagactggcctgggtgagccacgacagcaccgtgagcgtggccgacgccagcaagagcgtgcaggtgagcaccctgaagaccgagttcctgcccctgctgagcgtgagcttcgtgagcgagaacagcgtggtggccgccggccacgactgctgccccatgctgttcaactacgacgacagaggctgcctgaccttcgtgagcaagctggacatccccaagcagagcatccagagaaacatgagcgccatggagagattcagaaacatggacaagagagccaccaccgaggacagaaacaccgccctggagaccctgcaccagaacagcatcacccaggtgagcatctacgaggtggacaagcaggactgcagaaagttctgcaccaccggcatcgacggcgccatgaccatctgggacttcaagaccctggagagcagcatccagggcctgagaatcatgtag

SEQ ID NO: 71496 - DNA, 1038 bp, synthetic construct
  misc_feature 1..1038: note = Description of Artificial Sequence: Synthetic coding sequence
  source 1..1038: mol_type = other DNA
atgcacgagagattcatccactgcttctgcatcgactgggcccccaagagcgacagaatcgtgacctgcggcgccgacagaaacgcctacgtgtggagccagaaggacggcgtgtggaagcccaccctggtgatcctgagaatcaacagagccgccaccttcgtgaagtggagccccctggagaacaagttcgccgtgggcagcggcgccagactgatcagcgtgtgctacttcgagagcgagaacgactggtgggtgagcaagcacatcaagaagcccatcagaagcaccgtgctgagcctggactggcaccccaacaacgtgctgctggccgccggcagctgcgacttcaagtgcagagtgttcagcgcctacatcaaggaggtggacgagaagcccgccagcaccccctggggcagcaagatgcccttcggccagctgatgagcgagttcggcggcagcggcaccggcggctgggtgcacggcgtgagcttcagcgccagcggcagcagactggcctgggtgagccacgacagcaccgtgagcgtggccgacgccagcaagagcgtgcaggtgagcaccctgaagaccgagttcctgcccctgctgagcgtgagcttcgtgagcgagaacagcgtggtggccgccggccacgactgctgccccatgctgttcaactacgacgacagaggctgcctgaccttcgtgagcaagctggacatccccaagcagagcatccagagaaacatgagcgccatggagagattcagaaacatggacaagagagccaccaccgaggacagaaacaccgccctggagaccctgcaccagaacagcatcacccaggtgagcatctacgaggtggacaagcaggactgcagaaagttctgcaccaccggcatcgacggcgccatgaccatctgggacttcaaggagcccagcagacacggcctgccccagctgcccggcggcgcccaccagctgcccagactggagcagggcccccaccccgactgccacctgccccagcagccctag

SEQ ID NO: 71497 - DNA, 1119 bp, synthetic construct
  misc_feature 1..1119: note = Description of Artificial Sequence: Synthetic coding sequence
  source 1..1119: mol_type = other DNA
atggcctaccacagcttcctggtggagcccatcagctgccacgcctggaacaaggacagaacccagatcgccatctgccccaacaaccacgaggtgcacatctacgagaagagcggcgccaagtggaccaaggtgcacgagctgaaggagcacaacggccaggtgaccggcatcgactgggcccccgagagcaacagaatcgtgacctgcggcaccgacagaaacgcctacgtgtggaccctgaagggcagaacctggaagcccaccctggtgatcctgagaatcaacagagccgccagatgcgtgagatgggcccccaacgagaacaagttcgccgtgggcagcggcagcagagtgatcagcatctgctacttcgagcaggagaacgactggtgggtgtgcaagcacatcaagaagcccatcagaagcaccgtgctgagcctggactggcaccccaacaacgtgctgctggccgccggcagctgcgacttcaagtgcagaatcttcagcgcctacatcaaggaggtggaggagagacccgcccccaccccctggggcagcaagatgcccttcggcgagctgatgttcgagagcagcagcagctgcggctgggtgcacggcgtgtgcttcagcgccagcggcagcagagtggcctgggtgagccacgacagcaccgtgtgcctggccgacgccgacaagaagatggccgtggccaccctggccagcgagaccctgcccctgctggccctgaccttcatcaccgacaacagcctggtggccgccggccacgactgcttccccgtgctgttcacctacgacgccgccgccggcatgctgagcttcggcggcagactggacgtgcccaagcagagcagccagagaggcctgaccgccagagagagattccagaacctggacaagaaggccagcagcgagggcggcaccgccgccggcgccggcctggacagcctgcacaagaacagcgtgagccagatcagcgtgctgagcggcggcaaggccaagtgcagccagttctgcaccaccggcatggacggcggcatgagcatctgggacgtgaagagcctggagagcgccctgaaggacctgaagatcaagtag

SEQ ID NO: 71498 - DNA, 309 bp, synthetic construct
  misc_feature 1..309: note = Description of Artificial Sequence: Synthetic coding sequence
  source 1..309: mol_type = other DNA
atggcctaccacagcttcctggtggagcccatcagctgccacgcctggaacaaggacagaacccagatcgccatctgccccaacaaccacgaggtgcacatctacgagaagagcggcgccaagtggaccaaggtgcacgagctgaaggagcacaacggccaggtgaccggcatcgactgggcccccgagagcaacagaatcgtgacctgcggcaccgacagaaacgcctacgtgtggaccctgaagggcagaacctggaagcccaccctggtgatcctgagaatcaacagagccgccagatgcgtgtag

SEQ ID NO: 71499 - DNA, 393 bp, synthetic construct
  misc_feature 1..393: note = Description of Artificial Sequence: Synthetic coding sequence
  source 1..393: mol_type = other DNA
atggcctaccacagcttcctggtggagcccatcagctgccacgcctggaacaaggacagaacccagatcgccatctgccccaacaaccacgaggtgcacatctacgagaagagcggcgccaagtggaccaaggtgcacgagctgaaggagcacaacggccaggtgaccggcatcgactgggcccccgagagcaacagaatcgtgacctgcggcaccgacagaaacgcctacgtgtggaccctgaagggcagaacctggaagcccaccctggtgatcctgagaatcaacagagccgccagatgcgtgagatgggcccccaacgagaacaagttcgccgtgggcagcggcagcagagtgatcagcatctgctacttcgagcaggagaacgactag

SEQ ID NO: 71500 - DNA, 252 bp, synthetic construct
  misc_feature 1..252: note = Description of Artificial Sequence: Synthetic coding sequence
  source 1..252: mol_type = other DNA
atggcctaccacagcttcctggtggagcccatcagctgccacgcctggaacaaggacagaacccagatcgccatctgccccaacaaccacgaggtgcacatctacgagaagagcggcgccaagtggaccaaggtgcacgagctgaaggagcacaacggccaggtgaccggcatcgactgggcccccgagagcaacagaatcgtgacctgcggcaccgacagaaacgcctacgtgtggaccctgaagggctag

SEQ ID NO: 71501 - DNA, 402 bp, synthetic construct
  misc_feature 1..402: note = Description of Artificial Sequence: Synthetic coding sequence
  source 1..402: mol_type = other DNA
atggcctaccacagcttcctggtggagcccatcagctgccacgcctggaacaaggacagaacccagatcgccatctgccccaacaaccacgaggtgcacatctacgagaagagcggcgccaagtggaccaaggtgcacgagctgaaggagcacaacggccaggtgaccggcatcgactgggcccccgagagcaacagaatcgtgacctgcggcaccgacagaaacgcctacgtgtggaccctgaagggcagaacctggaagcccaccctggtgatcctgagaatcaacagagccgccagatgcgtgagatgggcccccaacgagaacaagttcgccgtgggcagcggcagcagagtgatcagcatctgctacttcgagcaggagaacgactggtgggtgtag

SEQ ID NO: 71502 - DNA, 66 bp, synthetic construct
  misc_feature 1..66: note = Description of Artificial Sequence: Synthetic coding sequence
  source 1..66: mol_type = other DNA
atggcctaccacagcttcctggtggagcccatcagctgccacgcctggaacaaggacagaacctag

SEQ ID NO: 71503 - DNA, 402 bp, synthetic construct; identical to SEQ ID NO: 71501
  misc_feature 1..402: note = Description of Artificial Sequence: Synthetic coding sequence
  source 1..402: mol_type = other DNA

SEQ ID NO: 71504 - DNA, 327 bp, synthetic construct
  misc_feature 1..327: note = Description of Artificial Sequence: Synthetic coding sequence
  source 1..327: mol_type = other DNA
atggcctaccacagcttcctggtggagcccatcagctgccacgcctggaacaaggacagaacccagatcgccatctgccccaacaaccacgaggtgcacatctacgagaagagcggcgccaagtggaccaaggtgcacgagctgaaggagcacaacggccaggtgaccggcatcgactgggcccccgagagcaacagaatcgtgacctgcggcaccgacagaaacgcctacgtgtggaccctgaagggcagaacctggaagcccaccctggtgatcctgagaatcaacagagccgccagatgcgtgagatgggcccccaacgagtag

SEQ ID NO: 71505 - DNA, 1119 bp, synthetic construct; identical to SEQ ID NO: 71497
  misc_feature 1..1119: note = Description of Artificial Sequence: Synthetic coding sequence
  source 1..1119: mol_type = other DNA

SEQ ID NO: 71506 - DNA, 387 bp, synthetic construct
  misc_feature 1..387: note = Description of Artificial Sequence: Synthetic coding sequence
  source 1..387: mol_type = other DNA
atggcctaccacagcttcctggtggagcccatcagctgccacgcctggaacaaggacagaacccagatcgccatctgccccaacaaccacgaggtgcacatctacgagaagagcggcgccaagtggaccaaggtgcacgagctgaaggagcacaacggccaggtgaccggcatcgactgggcccccgagagcaacagaatcgtgacctgcggcaccgacagaaacgcctacgtgtggaccctgaagggcagaacctggaagcccaccctggtgatcctgagaatcaacagagccgccagatgcgtgagatgggcccccaacgagaacaagttcgccgtgggcagcggcagcagagtgatcagcatctgctacttcgagcaggagtag

SEQ ID NO: 71507 - DNA, 402 bp, synthetic construct; identical to SEQ ID NO: 71501
  misc_feature 1..402: note = Description of Artificial Sequence: Synthetic coding sequence
  source 1..402: mol_type = other DNA

SEQ ID NO: 71508 - DNA, 903 bp, synthetic construct
  misc_feature 1..903: note = Description of Artificial Sequence: Synthetic coding sequence
  source 1..903: mol_type = other DNA
atgatcctgctggaggtgaacaacagaatcatcgaggagaccctggccctgaagttcgagaacgccgccgccggcaacaagcccgaggccgtggaggtgaccttcgccgacttcgacggcgtgctgtaccacatcagcaaccccaacggcgacaagaccaaggtgatggtgagcatcagcctgaagttctacaaggagctgcaggcccacggcgccgacgagctgctgaagagagtgtacggcagcttcctggtgaaccccgagagcggctacaacgtgagcctgctgtacgacctggagaacctgcccgccagcaaggacagcatcgtgcaccaggccggcatgctgaagagaaactgcttcgccagcgtgttcgagaagtacttccagttccaggaggagggcaaggagggcgagaacagagccgtgatccactacagagacgacgagaccatgtacgtggagagcaagaaggacagagtgaccgtggtgttcagcaccgtgttcaaggacgacgacgacgtggtgatcggcaaggtgttcatgcaggagttcaaggagggcagaagagccagccacaccgccccccaggtgctgttcagccacagagagccccccctggagctgaaggacaccgacgccgccgtgggcgacaacatcggctacatcaccttcgtgctgttccccagacacaccaacgccagcgccagagacaacaccatcaacctgatccacaccttcagagactacctgcactaccacatcaagtgcagcaaggcctacatccacaccagaatgagagccaagaccagcgacttcctgaaggtgctgaacagagccagacccgacgccgagaagaaggagatgaagaccatcaccggcaagaccttcagcagcagatag

SEQ ID NO: 71509 - DNA, 903 bp, synthetic construct; identical to SEQ ID NO: 71508
  misc_feature 1..903: note = Description of Artificial Sequence: Synthetic coding sequence
  source 1..903: mol_type = other DNA

SEQ ID NO: 71510 - DNA, 273 bp, synthetic construct
  misc_feature 1..273: note = Description of Artificial Sequence: Synthetic coding sequence
  source 1..273: mol_type = other DNA
atgatcctgctggaggtgaacaacagaatcatcgaggagaccctggccctgaagttcgagaacgccgccgccggcaacaagcccgaggccgtggaggtgaccttcgccgacttcgacggcgtgctgtaccacatcagcaaccccaacggcgacaagaccaaggtgatggtgagcatcagcctgaagttctacaaggagctgcaggcccacggcgccgacgagctgctgaagagagtgtacggcagcttcctggtgaaccccgagagcggctag

SEQ ID NO: 71511 - DNA, 864 bp, synthetic construct
  misc_feature 1..864: note = Description of Artificial Sequence: Synthetic coding sequence
  source 1..864: mol_type = other DNA
atgtgcgacgaggacgagaccaccgccctggtgtgcgacaacggcagcggcctggtgaaggccggcttcgccggcgacgacgcccccagagccgtgttccccagcatcgtgggcagacccagacaccagggcgtgatggtgggcatgggccagaaggacagctacgtgggcgacgaggcccagagcaagagaggcatcctgaccctgaagtaccccatcgagcacggcatcatcaccaactgggacgacatggagaagatctggcaccacaccttctacaacgagctgagagtggcccccgaggagcaccccaccctgctgaccgaggcccccctgaaccccaaggccaacagagagatcgtgagagacatcaaggagaagctgtgctacgtggccctggacttcgagaacgagatggccaccgccgccagcagcagcagcctggagaagagctacgagctgcccgacggccaggtgatcaccatcggcaacgagagattcagatgccccgagaccctgttccagcccagcttcatcggcatggagagcgccggcatccacgagaccacctacaacagcatcatgaagtgcgacatcgacatcagaaaggacctgtacgccaacaacgtgatgagcggcggcaccaccatgtaccccggcatcgccgacagaatgcagaaggagatcaccgccctggcccccagcaccatgaagatcaagatcatcgccccccccgagagaaagtacagcgtgtggatcggcggcagcatcctggccagcctgagcaccttccagcagatgtggatcaccaagcaggagtacgacgaggccggccccagcatcgtgcacagaaagtgcttctag

SEQ ID NO: 71512 - DNA, 765 bp, synthetic construct
  misc_feature 1..765: note = Description of Artificial Sequence: Synthetic coding sequence
  source 1..765: mol_type = other DNA
atgtgcgacgaggacgagaccaccgccctggtgtgcgacaacggcagcggcctggtgaaggccggcttcgccggcgacgacgcccccagagccgtgttccccagcatcgtgggcagacccagacaccagggcgtgatggtgggcatgggccagaaggacagctacgtgggcgacgaggcccagagcaagagaggcatcctgaccctgaagtaccccatcgagcacggcatcatcaccaactgggacgacatggagaagatctggcaccacaccttctacaacgagctgagagtggcccccgaggagcaccccaccctgctgaccgaggcccccctgaaccccaaggccaacagagagaagatgacccagatcatgttcgagaccttcaacgtgcccgccatgtacgtggccatccaggccgtgctgagcctgtacgccagcggcagaaccaccggcatcgtgctggacagcggcgacggcatcatgaagtgcgacatcgacatcagaaaggacctgtacgccaacaacgtgatgagcggcggcaccaccatgtaccccggcatcgccgacagaatgcagaaggagatcaccgccctggcccccagcaccatgaagatcaagatcatcgccccccccgagagaaagtacagcgtgtggatcggcggcagcatcctggccagcctgagcaccttccagcagatgtggatcaccaagcaggagtacgacgaggccggccccagcatcgtgcacagaaagtgcttctag

SEQ ID NO: 71513 - DNA, 1029 bp, synthetic construct
  misc_feature 1..1029: note = Description of Artificial Sequence: Synthetic coding sequence
  source 1..1029: mol_type = other DNA
atgtgcgacgaggacgagaccaccgccctggtgtgcgacaacggcagcggcctggtgaaggccggcttcgccggcgacgacgcccccagagccgtgttccccagcatcgtgggcagacccagacaccagggcgtgatggtgggcatgggccagaaggacagctacgtgggcgacgaggcccagagcaagagaggcatcctgaccctgaagtaccccatcgagcacggcatcatcaccaaggccaacagagagaagatgacccagatcatgttcgagaccttcaacgtgcccgccatgtacgtggccatccaggccgtgctgagcctgtacgccagcggcagaaccaccggcatcgtgctggacagcggcgacggcgtgacccacaacgtgcccatctacgagggctacgccctgccccacgccatcatgagactggacctggccggcagagacctgaccgactacctgatgaagatcctgaccgagagaggctacagcttcgtgaccaccgccgagagagagatcgtgagagacatcaaggagaagctgtgctacgtggccctggacttcgagaacgagatggccaccgccgccagcagcagcagcctggagaagagctacgagctgcccgacggccaggtgatcaccatcggcaacgagagattcagatgccccgagaccctgttccagcccagcttcatcggcatggagagcgccggcatccacgagaccacctacaacagcatcatgaagtgcgacatcgacatcagaaaggacctgtacgccaacaacgtgatgagcggcggcaccaccatgtaccccggcatcgccgacagaatgcagaaggagatcaccgccctggcccccagcaccatgaagatcaagatcatcgccccccccgagagaaagtacagcgtgtggatcggcggcagcatcctggccagcctgagcaccttccagcagatgtggatcaccaagcaggagtacgacgaggccggccccagcatcgtgcacagaaagtgcttctag

SEQ ID NO: 71514 - DNA, 870 bp, synthetic construct
  misc_feature 1..870: note = Description of Artificial Sequence: Synthetic coding sequence
  source 1..870: mol_type = other DNA
atgtgcgacgaggacgagaccaccgccctggtgtgcgacaacggcagcggcctggtgaaggccggcttcgccggcgacgacgcccccagagccgtgttccccagcatcgtgggcagacccagacaccagggcgtgatggtgggcatgggccagaaggacagctacgtgggcgacgaggcccagagcaagagaggcatcctgaccctgaagtaccccatcgagcacggcatcatcaccaactgggacgacatggagaagatctggcaccacaccttctacaacgagctgagagtggcccccgaggagcaccccaccctgctgaccgaggcccccctgaaccccaaggccaaccccgagagagagatcgtgagagacatcaaggagaagctgtgctacgtggccctggacttcgagaacgagatggccaccgccgccagcagcagcagcctggagaagagctacgagctgcccgacggccaggtgatcaccatcggcaacgagagattcagatgccccgagaccctgttccagcccagcttcatcggcatggagagcgccggcatccacgagaccacctacaacagcatcatgaagtgcgacatcgacatcagaaaggacctgtacgccaacaacgtgatgagcggcggcaccaccatgtaccccggcatcgccgacagaatgcagaaggagatcaccgccctggcccccagcaccatgaagatcaagatcatcgccccccccgagagaaagtacagcgtgtggatcggcggcagcatcctggccagcctgagcaccttccagcagatgtggatcaccaagcaggagtacgacgaggccggccccagcatcgtgcacagaaagtgcttctag

SEQ ID NO: 71515 - DNA, 1134 bp, synthetic construct
  misc_feature 1..1134: note = Description of Artificial Sequence: Synthetic coding sequence
  source 1..1134: mol_type = other DNA
atgtgcgacgaggacgagaccaccgccctggtgtgcgacaacggcagcggcctggtgaaggccggcttcgccggcgacgacgcccccagagccgtgttccccagcatcgtgggcagacccagacaccagggcgtgatggtgggcatgggccagaaggacagctacgtgggcgacgaggcccagagcaagagaggcatcctgaccctgaagtaccccatcgagcacggcatcatcaccaactgggacgacatggagaagatctggcaccacaccttctacaacgagctgagagtggcccccgaggagcaccccaccctgctgaccgaggcccccctgaaccccaaggccaacagagagaagatgacccagatcatgttcgagaccttcaacgtgcccgccatgtacgtggccatccaggccgtgctgagcctgtacgccagcggcagaaccaccggcatcgtgctggacagcggcgacggcgtgacccacaacgtgcccatctacgagggctacgccctgccccacgccatcatgagactggacctggccggcagagacctgaccgactacctgatgaagatcctgaccgagagaggctacagcttcgtgaccaccgccgagagagagatcgtgagagacatcaaggagaagctgtgctacgtggccctggacttcgagaacgagatggccaccgccgccagcagcagcagcctggagaagagctacgagctgcccgacggccaggtgatcaccatcggcaacgagagattcagatgccccgagaccctgttccagcccagcttcatcggcatggagagcgccggcatccacgagaccacctacaacagcatcatgaagtgcgacatcgacatcagaaaggacctgtacgccaacaacgtgatgagcggcggcaccaccatgtaccccggcatcgccgacagaatgcagaaggagatcaccgccctggcccccagcaccatgaagatcaagatcatcgccccccccgagagaaagtacagcgtgtggatcggcggcagcatcctggccagcctgagcaccttccagcagatgtggatcaccaagcaggagtacgacgaggccggccccagcatcgtgcacagaaagtgcttctag

SEQ ID NO: 71516 - DNA, 1146 bp, synthetic construct
  misc_feature 1..1146: note = Description of Artificial Sequence: Synthetic coding sequence
  source 1..1146: mol_type = other DNA
atggcccccggcgagaaggagagcggcgagggccccgccaagagcgccctgagaaagatcagaaccgccaccctggtgatcagcctggccagaggctggcagcagtgggccaacgagaacagcatcagacaggcccaggagcccaccggctggctgcccggcggcacccaggacagcccccaggcccccaagcccatcaccccccccaccagccaccagaaggcccagagcgcccccaagagcccccccagactgcccgagggccacggcgacggccagagcagcgagaaggcccccgaggtgagccacatcaagaagaaggaggtgagcaagaccgtggtgagcaagacctacgagagaggcggcgacgtgagccacctgagccacagatacgagagagacgccggcgtgctggagcccggccagcccgagaacgacatcgacagaatcctgcacagccacggcagccccaccagaagaagaaagtgcgccaacctggtgagcgagctgaccaagggctggagagtgatggagcaggaggagcccacctggagaagcgacagcgtggacaccgaggacagcggctacggcggcgaggccgaggagagacccgagcaggacggcgtgcaggtggccgtggtgagaatcaagagacccctgcccagccaggtgaacagattcaccgagaagctgaactgcaaggcccagcagaagtacagccccgtgggcaacctgaagggcagatggcagcagtgggccgacgagcacatccagagccagaagctgaaccccttcagcgaggagttcgactacgagctggccatgagcaccagactgcacaagggcgacgagggctacggcagacccaaggagggcaccaagaccgccgagagagccaagagagccgaggagcacatctacagagagatgatggacatgtgcttcatcatctgcaccatggccagacacagaagagacggcaagatccaggtgaccttcggcgacctgttcgacagatacgtgagaatcagcgacaaggtggtgggcatcctgatgagagccagaaagcacggcctggtggacttcgagggcgagatgctgtggcagggcagagacgaccacgtggtgatcaccctgctgaagtag

SEQ ID NO: 71517 - DNA, 2685 bp, synthetic construct
  misc_feature 1..2685: note = Description of Artificial Sequence: Synthetic coding sequence
  source 1..2685: mol_type = other DNA
atgaaccagatcgagcccggcgtgcagtacaactacgtgtacgacgaggacgagtacatgatccaggaggaggagtgggacagagacctgctgctggaccccgcctgggagaagcagcagagaaagaccttcaccgcctggtgcaacagccacctgagaaaggccggcacccagatcgagaacatcgaggaggacttcagaaacggcctgaagctgatgctgctgctggaggtgatcagcggcgagagactgcccaagcccgacagaggcaagatgagattccacaagatcgccaacgtgaacaaggccctggactacatcgccagcaagggcgtgaagctggtgagcatcggcgccgaggagatcgtggacggcaacgtgaagatgaccctgggcatgatctggaccatcatcctgagattcgccatccaggacatcagcgtggaggagaccagcgccaaggagggcctgctgctgtggtgccagagaaagaccgccccctacagaaacgtgaacatccagaacttccacaccagctggaaggacggcctgggcctgtgcgccctgatccacagacacagacccgacctgatcgactacagcaagctgaacaaggacgaccccatcggcaacatcaacctggccatggagatcgccgagaagcacctggacatccccaagatgctggacgccgaggacatcgtgaacacccccaagcccgacgagagagccatcatgacctacgtgagctgcttctaccacgccttcgccggcgccgagcaggccgagaccgccgccaacagaatctgcaaggtgctggccgtgaaccaggagaacgagagactgatggaggagtacgagagactggccagcgagctgctggagtggatcagaagaaccatcccctggctggagaacagaacccccgagaagaccatgcaggccatgcagaagaagctggaggacttcagagactacagaagaaagcacaagccccccaaggtgcaggagaagtgccagctggagatcaacttcaacaccctgcagaccaagctgagaatcagcaacagacccgccttcatgcccagcgagggcaagatggtgagcgacatcgccggcgcctggcagagactggagcaggccgagaagggctacgaggagtggctgctgaacgagatcagaagactggagagactggagcacctggccgagaagttcagacagaaggccagcacccacgagacctgggcctacggcaaggagcagatcctgctgcagaaggactacgagagcgccagcctgaccgaggtgagagccctgctgagaaagcacgaggccttcgagagcgacctggccgcccaccaggacagagtggagcagatcgccgccatcgcccaggagctgaacgagctggactaccacgacgccgtgaacgtgaacgacagatgccagaagatctgcgaccagtgggacagactgggcaccctgacccagaagagaagagaggccctggagagaatggagaagctgctggagaccatcgaccagctgcacctggagttcgccaagagagccgcccccttcaacaactggatggagggcgccatggaggacctgcaggacatgttcatcgtgcacagcatcgaggagatccagagcctgatcaccgcccacgagcagttcaaggccaccctgcccgaggccgacggcgagagacagagcatcatggccatccagaacgaggtggagaaggtgatccagagctacaacatcagaatcagcagcagcaacccctacagcaccgtgaccatggacgagctgagaaccaagtgggacaaggtgaagcagctggtgcccatcagagaccagagcctgcaggaggagctggccagacagcacgccaacgagagactgagaagacagttcgccgcccaggccaacgccatcggcccctggatccagaacaagatggaggagatcgccagaagcagcatccagatcaccggcgccctggaggaccagatgaaccagctgaagcagtacgagcacaacatcatcaactacaagaacaacatcgacaagctggagggcgaccaccagctgatccaggaggccctggtgttcgacaacaagcacaccaactacaccatggagcacatcagagtgggctgggagctgctgctgaccaccatcgccagaaccatcaacgaggtggagacccagatcctgaccagagacgccaagggcatcacccaggagcagatgaacgagttcagagccagcttcaaccacttcgacagaagaaagaacggcctgatggaccacgaggacttcagagcctgcctgatcagcatgggctacgacctgggcgaggccgagttcgccagaatcatgaccctggtggaccccaacggccagggcaccgtgaccttccagagcttcatcgacttcatgaccagagagaccgccgacaccgacaccgccgagcaggtgatcgccagcttcagaatcctggccagcgacaagccctacatcctggccgaggagctgagaagagagctgccccccgaccaggcccagtactgcatcaagagaatgcccgcctacagcggccccggcagcgtgcccggcgccctggactacgccgccttcagcagcgccctgtacggcgagagcgacctgtag

SEQ ID NO: 71518 - DNA, 2685 bp, synthetic construct
  misc_feature 1..2685: note = Description of Artificial Sequence: Synthetic coding sequence
  source 1..2685: mol_type = other DNA
atgaaccagatcgagcccggcgtgcagtacaactacgtgtacgacgaggacgagtacatgatccaggaggaggagtgggacagagacctgctgctggaccccgcctgggagaagcagcagagaaagaccttcaccgcctggtgcaacagccacctgagaaaggccggcacccagatcgagaacatcgaggaggacttcagaaacggcctgaagctgatgctgctgctggaggtgatcagcggcgagagactgcccaagcccgacagaggcaagatgagattccacaagatcgccaacgtgaacaaggccctggactacatcgccagcaagggcgtgaagctggtgagcatcggcgccgaggagatcgtggacggcaacgtgaagatgaccctgggcatgatctggaccatcatcctgagattcgccatccaggacatcagcgtggaggagaccagcgccaaggagggcctgctgctgtggtgccagagaaagaccgccccctacagaaacgtgaacatccagaacttccacaccagctggaaggacggcctgggcctgtgcgccctgatccacagacacagacccgacctgatcgactacagcaagctgaacaaggacgaccccatcggcaacatcaacctggccatggagatcgccgagaagcacctggacatccccaagatgctggacgccgaggacctggtgtacaccgccagacccgacgagagagccatcatgacctacgtgagctgctactaccacgccttcgccggcgcccagaaggccgagaccgccgccaacagaatctgcaaggtgctggccgtgaaccaggagaacgagagactgatggaggagtacgagagactggccagcgagctgctggagtggatcagaagaaccatcccctggctggagaacagaacccccgagaagaccatgcaggccatgcagaagaagctggaggacttcagagactacagaagaaagcacaagccccccaaggtgcaggagaagtgccagctggagatcaacttcaacaccctgcagaccaagctgagaatcagcaacagacccgccttcatgcccagcgagggcaagatggtgagcgacatcgccggcgcctggcagagactggagcaggccgagaagggctacgaggagtggctgctgaacgagatcagaagactggagagactggagcacctggccgagaagttcagacagaaggccagcacccacgagacctgggcctacggcaaggagcagatcctgctgcagaaggactacgagagcgccagcctgaccgaggtgagagccctgctgagaaagcacgaggccttcgagagcgacctggccgcccaccaggacagagtggagcagatcgccgccatcgcccaggagctgaacgagctggactaccacgacgccgtgaacgtgaacgacagatgccagaagatctgcgaccagtgggacagactgggcaccctgacccagaagagaagagaggccctggagagaatggagaagctgctggagaccatcgaccagctgcacctggagttcgccaagagagccgcccccttcaacaactggatggagggcgccatggaggacctgcaggacatgttcatcgtgcacagcatcgaggagatccagagcctgatcaccgcccacgagcagttcaaggccaccctgcccgaggccgacggcgagagacagagcatcatggccatccagaacgaggtggagaaggtgatccagagctacaacatcagaatcagcagcagcaacccctacagcaccgtgaccatggacgagctgagaaccaagtgggacaaggtgaagcagctggtgcccatcagagaccagagcctgcaggaggagctggccagacagcacgccaacgagagactgagaagacagttcgccgcccaggccaacgccatcggcccctggatccagaacaagatggaggagatcgccagaagcagcatccagatcaccggcgccctggaggaccagatgaaccagctgaagcagtacgagcacaacatcatcaactacaagaacaacatcgacaagctggagggcgaccaccagctgatccaggaggccctggtgttcgacaacaagcacaccaactacaccatggagcacatcagagtgggctgggagctgctgctgaccaccatcgccagaaccatcaacgaggtggagacccagatcctgaccagagacgccaagggcatcacccaggagcagatgaacgagttcagagccagcttcaaccacttcgacagaagaaagaacggcctgatggaccacgaggacttcagagcctgcctgatcagcatgggctacgacctgggcgaggccgagttcgccagaatcatgaccctggtggaccccaacggccagggcaccgtgaccttccagagcttcatcgacttcatgaccagagagaccgccgacaccgacaccgccgagcaggtgatcgccagcttcagaatcctggccagcgacaagccctacatcctggccgaggagctgagaagagagctgccccccgaccaggcccagtactgcatcaagagaatgcccgcctacagcggccccggcagcgtgcccggcgccctggactacgccgccttcagcagcgccctgtacggcgagagcgacctgtag

SEQ ID NO: 71519 - DNA, 1992 bp, synthetic construct
  misc_feature 1..1992: note = Description of Artificial Sequence: Synthetic coding sequence
  source 1..1992: mol_type = other DNA
agcaccctgagcagcgtggagggcccccccgagagcagcacctgcagctaccaggagatgagaagaagcagcgtgaacagcagcgccatggccgagaccgccgccaacagaatctgcaaggtgctggccgtgaaccaggagaacgagagactgatggaggagtacgagagactggccagcgagctgctggagtggatcagaagaaccatcccctggctggagaacagaacccccgagaagaccatgcaggccatgcagaagaagctggaggacttcagagactacagaagaaagcacaagccccccaaggtgcaggagaagtgccagctggagatcaacttcaacaccctgcagaccaagctgagaatcagcaacagacccgccttcatgcccagcgagggcaagatggtgagcgacatcgccggcgcctggcagagactggagcaggccgagaagggctacgaggagtggctgctgaacgagatcagaagactggagagactggagcacctggccgagaagttcagacagaaggccagcacccacgagacctgggcctacggcaaggagcagatcctgctgcagaaggactacgagagcgccagcctgaccgaggtgagagccctgctgagaaagcacgaggccttcgagagcgacctggccgcccaccaggacagagtggagcagatcgccgccatcgcccaggagctgaacgagctggactaccacgacgccgtgaacgtgaacgacagatgccagaagatctgcgaccagtgggacagactgggcaccctgacccagaagagaagagaggccctggagagaatggagaagctgctggagaccatcgaccagctgcacctggagttcgccaagagagccgcccccttcaacaactggatggagggcgccatggaggacctgcaggacatgttcatcgtgcacagcatcgaggagatccagagcctgatcaccgcccacgagcagttcaaggccaccctgcccgaggccgacggcgagagacagagcatcatggccatccagaacgaggtggagaaggtgatccagagctacaacatcagaatcagcagcagcaacccctacagcaccgtgaccatggacgagctgagaaccaagtgggacaaggtgaagcagctggtgcccatcagagaccagagcctgcaggaggagctggccagacagcacgccaacgagagactgagaagacagttcgccgcccaggccaacgccatcggcccctggatccagaacaagatggaggagatcgccagaagcagcatccagatcaccggcgccctggaggaccagatgaaccagctgaagcagtacgagcacaacatcatcaactacaagaacaacatcgacaagctggagggcgaccaccagctgatccaggaggccctggtgttcgacaacaagcacaccaactacaccatggagcacatcagagtgggctgggagctgctgctgaccaccatcgccagaaccatcaacgaggtggagacccagatcctgaccagagacgccaagggcatcacccaggagcagatgaacgagttcagagccagcttcaaccacttcgacagaagaaagaacggcctgatggaccacgaggacttcagagcctgcctgatcagcatgggctacgacctgggcgaggccgagttcgccagaatcatgaccctggtggaccccaacggccagggcaccgtgaccttccagagcttcatcgacttcatgaccagagagaccgccgacaccgacaccgccgagcaggtgatcgccagcttcagaatcctggccagcgacaagccctacatcctggccgaggagctgagaagagagctgccccccgaccaggcccagtactgcatcaagagaatgcccgcctacagcggccccggcagcgtgcccggcgccctggactacgccgccttcagcagcgccctgtacggcgagagcgacctgtag

SEQ ID NO: 71520 - DNA, 1167 bp, synthetic construct
  misc_feature 1..1167: note = Description of Artificial Sequence: Synthetic coding sequence
  source 1..1167: mol_type = other DNA
atggagaagctgctggagaccatcgaccagctgcacctggagttcgccaagagagccgcccccttcaacaactggatggagggcgccatggaggacctgcaggacatgttcatcgtgcacagcatcgaggagatccagagcctgatcaccgcccacgagcagttcaaggccaccctgcccgaggccgacggcgagagacagagcatcatggccatccagaacgaggtggagaaggtgatccagagctacaacatcagaatcagcagcagcaacccctacagcaccgtgaccatggacgagctgagaaccaagtgggacaaggtgaagcagctggtgcccatcagagaccagagcctgcaggaggagctggccagacagcacgccaacgagagactgagaagacagttcgccgcccaggccaacgccatcggcccctggatccagaacaagatggaggagatcgccagaagcagcatccagatcaccggcgccctggaggaccagatgaaccagctgaagcagtacgagcacaacatcatcaactacaagaacaacatcgacaagctggagggcgaccaccagctgatccaggaggccctggtgttcgacaacaagcacaccaactacaccatggagcacatcagagtgggctgggagctgctgctgaccaccatcgccagaaccatcaacgaggtggagacccagatcctgaccagagacgccaagggcatcacccaggagcagatgaacgagttcagagccagcttcaaccacttcgacagaagaaagaacggcctgatggaccacgaggacttcagagcctgcctgatcagcatgggctacgacctgggcgaggccgagttcgccagaatcatgaccctggtggaccccaacggccagggcaccgtgaccttccagagcttcatcgacttcatgaccagagagaccgccgacaccgacaccgccgagcaggtgatcgccagcttcagaatcctggccagcgacaagccctacatcctggccgaggagctgagaagagagctgccccccgaccaggcccagtactgcatcaagagaatgcccgcctacagcggccccggcagcgtgcccggcgccctggactacgccgccttcagcagcgccctgtacggcgagagcgacctgtag

SEQ ID NO: 71521 - DNA, 1131 bp, synthetic construct
  misc_feature 1..1131: note = Description of Artificial Sequence: Synthetic coding sequence
  source 1..1131: mol_type = other DNA
atgttcaacccccacgccctggacgtgcccgccgtgatcttcgacaacggcagcggcctgtgcaaggccggcctgagcggcgagatcggccccagacacgtgatcagcagcgtgctgggccactgcaagttcaacgtgcccctggccagactgaaccagaagtacttcgtgggccaggaggccctgtacaagtacgaggccctgcacctgcactaccccatcgagagaggcctggtgaccggctgggacgacatggagaagctgtggaagcacctgttcgagagagagctgggcgtgaagcccagccagcagcccgtgctgatgaccgagcccagcctgaaccccagagagatcagagagaagctggccgagatgatgttcgagaccttcagcgtgcccggcttctacctgagcaaccacgccgtggccgccctgtacgccagcgcctgcgtgaccggcctggtggtggacagcggcgacggcgtgacctgcaccgtgcccatcttcgagggctacagcctgccccacgccgtgaccaagctgtgcatggccggcagagacatcaccgagcacctgaccagactgctgttcgccagcggcttcaacttcccctgcatcctgaacaaggccgtggtgaacaacatcaaggagaagctgtgctacatcgccctggagcccgagaaggagctgagaaagagcagaggcgaggtgctgggcgcctacagactgcccgacggccacgtgatccacttcggcgacgagctgtaccaggtgcccgaggtgctgttcgcccccgaccagctgggcatccacagccccggcctgagcaagatggtgagcagcagcatcatgaagtgcgacaccgacatccagaacaagctgtacgccgacatcgtgctgagcggcggcaccaccctgctgcccggcctggaggagagactgatgaaggaggtggagcagctggccagcaagggcacccccatcaagatcaccgccagccccgacagatgcttcagcgcctggatcggcgccagcatcatgaccagcatgagcagcttcaagcagatgtgggtgaccagcgccgacttcaaggagtacggcaccagcgtggtgcagagaagatgcttctag

SEQ ID NO: 71522 - DNA, 1134 bp, synthetic construct
  misc_feature 1..1134: note = Description of Artificial Sequence: Synthetic coding sequence
  source 1..1134: mol_type = other DNA
atgttcaacccccacgccctggacagccccgccgtgatcttcgacaacggcagcggcttctgcaaggccggcctgagcggcgagttcggccccagacacatggtgagcagcatcgtgggccacctgaagttccaggcccccagcgccgaggccaaccagaagaagtacttcgtgggcgaggaggccctgtacaagcaggaggccctgcagctgcacagccccttcgagagaggcctgatcaccggctgggacgacgtggagagactgtggaagcacctgttcgagtgggagctgggcgtgaagcccagcgaccagcccctgctggccaccgagcccagcctgaaccccagagagaacagagagaagatggccgaggtgatgttcgagaacttcggcgtgcccgccttctacctgagcgaccaggccgtgctggccctgtacgccagcgcctgcgtgaccggcctggtggtggacagcggcgacgccgtgacctgcaccgtgcccatcttcgagggctacagcctgccccacgccgtgaccaagctgcacgtggccggcagagacatcaccgagctgctgatgcagctgctgctggccagcggccacaccttcccctgccagctggacaagggcctggtggacgacatcaagaagaagctgtgctacgtggccctggagcccgagaaggagctgagcagaagacccgaggaggtgctgagagagtacaagctgcccgacggcaacatcatcagcctgggcgaccccctgcaccaggcccccgaggccctgttcgtgccccagcagctgggcagccagagccccggcctgagcaacatggtgagcagcagcatcaccaagtgcgacaccgacatccagaagatcctgttcggcgagatcgtgctgagcggcggcaccaccctgttccacggcctggacgacagactgctgaaggagctggagcagctggccagcaaggacacccccatcaagatcaccgccccccccgacagatggttcagcacctggatcggcgccagcatcgtgaccagcctgagcagcttcaagcagatgtgggtgaccgccgccgacttcaaggagttcggcaccagcgtggtgcagagaagatgcttctag

SEQ ID NO: 71523 - DNA, 987 bp, synthetic construct
  misc_feature 1..987: note = Description of Artificial Sequence: Synthetic coding sequence
  source 1..987: mol_type = other DNA
atgttcaacccccacgccctggacagccccgccgtgatcttcgacaacggcagcggcttctgcaaggccggcctgagcggcgagttcggccccagacacatggtgagcagcatcgtgggccacctgaagttccaggcccccagcgccgaggccaaccagaagaagtacttcgtgggcgaggaggccctgtacaagcaggaggccctgcagctgcacagccccttcgagagaggcctgatcaccggctgggacgacgtggagagactgtggaagcacctgttcgagtgggagctgggcgtgaagcccagcgaccagcccctgctggccaccgagcccagcctgaaccccagagagaacagagagaagatggccgaggtgatgttcgagaacttcggcgtgcccgccttctacctgagcgaccaggccgtgctggccctgtacgccagcgcctgcgtgaccggcctggtggtggacagcggcgacgccgtgacctgcaccgtgcccatcttcgagggctacagcctgccccacgccgtgaccaagctgcacgtggccggcagagacatcaccgagctgctgatgcagctgctgctggccagcggccacaccttcccctgccagctggacaagggcctggtggacgacatcaagaagaagctgtgctacgtggccctggagcccgagaaggagctgagcagaagacccgaggaggtgctgagagagtacaagctgcccgacggcaacatcatcagcctgggcgaccccctgcaccaggcccccgaggccctgttcgtgccccagcagctgggcagccagagccccggcctgagcaacatggtgagcagcagcatcaccaagtgcgacaccgacatccagaagatcctgttcggcgagatcgtgctgagcggcggcaccaccctgttccacggcctggacgacagactgctgcacctggactggagcctgcacagacacctgagcgagtag

SEQ ID NO: 71524 - DNA, 1752 bp, synthetic construct
  misc_feature 1..1752: note = Description of Artificial Sequence: Synthetic coding sequence
  source 1..1752: mol_type = other DNA
atggagagcaagggcgccagcagctgcagactgctgttctgcctgctgatcagcgccaccgtgttcagacccggcctgggctggtacaccgtgaacagcgcctacggcgacaccatcatcatcccctgcagactggacgtgccccagaacctgatgttcggcaagtggaagtacgagaagcccgacggcagccccgtgttcatcgccttcagaagcagcaccaagaagagcgtgcagtacgacgacgtgcccgagtacaaggacagactgaacctgagcgagaactacaccctgagcatcagcaacgccagaatcagcgacgagaagagattcgtgtgcatgctggtgaccgaggacaacgtgttcgaggcccccaccatcgtgaaggtgttcaagcagcccagcaagcccgagatcgtgagcaaggccctgttcctggagaccgagcagctgaagaagctgggcgactgcatcagcgaggacagctaccccgacggcaacatcacctggtacagaaacggcaaggtgctgcaccccctggagggcgccgtggtgatcatcttcaagaaggagatggaccccgtgacccagctgtacaccatgaccagcaccctggagtacaagaccaccaaggccgacatccagatgcccttcacctgcagcgtgacctactacggccccagcggccagaagaccatccacagcgagcaggccgtgttcgacatctactaccccaccgagcaggtgaccatccaggtgctgccccccaagaacgccatcaaggagggcgacaacatcaccctgaagtgcctgggcaacggcaaccccccccccgaggagttcctgttctacctgcccggccagcccgagggcatcagaagcagcaacacctacaccctgaccgacgtgagaagaaacgccaccggcgactacaagtgcagcctgatcgacaagaagagcatgatcgccagcaccgccatcaccgtgcactacctggacctgagcctgaaccccagcggcgaggtgaccagacagatcggcgacgccctgcccgtgagctgcaccatcagcgccagcagaaacgccaccgtggtgtggatgaaggacaacatcagactgagaagcagccccagcttcagcagcctgcactaccaggacgccggcaactacgtgtgcgagaccgccctgcaggaggtggagggcctgaagaagagagagagcctgaccctgatcgtggagggcaagccccagatcaagatgaccaagaagaccgaccccagcggcctgagcaagaccatcatctgccacgtggagggcttccccaagcccgccatccagtggaccatcaccggcagcggcagcgtgatcaaccagaccgaggagagcccctacatcaacggcagatactacagcaagatcatcatcagccccgaggagaacgtgaccctgacctgcaccgccgagaaccagctggagagaaccgtgaacagcctgaacgtgagcgccatcagcatccccgagcacgacgaggccgacgagatcagcgacgagaacagagagaaggtgaacgaccaggccaagctgatcgtgggcatcgtggtgggcctgctgctggccgccctggtggccggcgtggtgtactggctgtacatgaagaagagcaagaccgccagcaagcacgtgaacaaggacctgggcaacatggaggagaacaagaagctggaggagaacaaccacaagaccgaggcctag

SEQ ID NO: 71525 - DNA, 918 bp, synthetic construct
  misc_feature 1..918: note = Description of Artificial Sequence: Synthetic coding sequence
  source 1..918: mol_type = other DNA
atggaccccgtgacccagctgtacaccatgaccagcaccctggagtacaagaccaccaaggccgacatccagatgcccttcacctgcagcgtgacctactacggccccagcggccagaagaccatccacagcgagcaggccgtgttcgacatctactacctggacctgagcctgaaccccagcggcgaggtgaccagacagatcggcgacgccctgcccgtgagctgcaccatcagcgccagcagaaacgccaccgtggtgtggatgaaggacaacatcagactgagaagcagccccagcttcagcagcctgcactaccaggacgccggcaactacgtgtgcgagaccgccctgcaggaggtggagggcctgaagaagagagagagcctgaccctgatcgtggagggcaagccccagatcaagatgaccaagaagaccgaccccagcggcctgagcaagaccatcatctgccacgtggagggcttccccaagcccgccatccagtggaccatcaccggcagcggcagcgtgatcaaccagaccgaggagagcccctacatcaacggcagatactacagcaagatcatcatcagccccgaggagaacgtgaccctgacctgcaccgccgagaaccagctggagagaaccgtgaacagcctgaacgtgagcgccatcagcatccccgagcacgacgaggccgacgagatcagcgacgagaacagagagaaggtgaacgaccaggccaagctgatcgtgggcatcgtggtgggcctgctgctggccgccctggtggccggcgtggtgtactggctgtacatgaagaagagcaagaccgccagcaagcacgtgaacaaggacctgggcaacatggaggagaacaagaagctggaggagaacaaccacaagaccgaggcctag

SEQ ID NO: 71526 - DNA, 1035 bp, synthetic construct
  misc_feature 1..1035: note = Description of Artificial Sequence: Synthetic coding sequence
  source 1..1035: mol_type = other DNA
tgactgggcgactgcatcagcgaggacagctaccccgacggcaacatcacctggtacagaaacggcaaggtgctgcaccccctggagggcgccgtggtgatcatcttcaagaaggagatggaccccgtgacccagctgtacaccatgaccagcaccctggagtacaagaccaccaaggccgacatccagatgcccttcacctgcagcgtgacctactacggccccagcggccagaagaccatccacagcgagcaggccgtgttcgacatctactacctggacctgagcctgaaccccagcggcgaggtgaccagacagatcggcgacgccctgcccgtgagctgcaccatcagcgccagcagaaacgccaccgtggtgtggatgaaggacaacatcagactgagaagcagccccagcttcagcagcctgcactaccaggacgccggcaactacgtgtgcgagaccgccctgcaggaggtggagggcctgaagaagagagagagcctgaccctgatcgtggagggcaagccccagatcaagatgaccaagaagaccgaccccagcggcctgagcaagaccatcatctgccacgtggagggcttccccaagcccgccatccagtggaccatcaccggcagcggcagcgtgatcaaccagaccgaggagagcccctacatcaacggcagatactacagcaagatcatcatcagccccgaggagaacgtgaccctgacctgcaccgccgagaaccagctggagagaaccgtgaacagcctgaacgtgagcgccatcagcatccccgagcacgacgaggccgacgagatcagcgacgagaacagagagaaggtgaacgaccaggccaagctgatcgtgggcatcgtggtgggcctgctgctggccgccctggtggccggcgtggtgtactggctgtacatgaagaagagcaagaccgccagcaagcacgtgaacaaggacctgggcaacatggaggagaacaagaagctggaggagaacaaccacaagaccgaggcctag

SEQ ID NO: 71527 - DNA, 1713 bp, synthetic construct
  misc_feature 1..1713: note = Description of Artificial Sequence: Synthetic coding sequence
  source 1..1713: mol_type = other DNA
atggagagcaagggcgccagcagctgcagactgctgttctgcctgctgatcagcgccaccgtgttcagacccggcctgggctggtacaccgtgaacagcgcctacggcgacaccatcatcatcccctgcagactggacgtgccccagaacctgatgttcggcaagtggaagtacgagaagcccgacggcagccccgtgttcatcgccttcagaagcagcaccaagaagagcgtgcagtacgacgacgtgcccgagtacaaggacagactgaacctgagcgagaactacaccctgagcatcagcaacgccagaatcagcgacgagaagagattcgtgtgcatgctggtgaccgaggacaacgtgttcgaggcccccaccatcgtgaaggtgttcaagcagcccagcaagcccgagatcgtgagcaaggccctgttcctggagaccgagcagctgaagaagctgggcgactgcatcagcgaggacagctaccccgacggcaacatcacctggtacagaaacggcaaggtgctgcaccccctggagggcgccgtggtgatcatcttcaagaaggagatggaccccgtgacccagctgtacaccatgaccagcaccctggagtacaagaccaccaaggccgacatccagatgcccttcacctgcagcgtgacctactacggccccagcggccagaagaccatccacagcgagcaggccgtgttcgacatctactaccccaccgagcaggtgaccatccaggtgctgccccccaagaacgccatcaaggagggcgacaacatcaccctgaagtgcctgggcaacggcaaccccccccccgaggagttcctgttctacctgcccggccagcccgagggcatcagaagcagcaacacctacaccctgaccgacgtgagaagaaacgccaccggcgactacaagtgcagcctgatcgacaagaagagcatgatcgccagcaccgccatcaccgtgcactacctggacctgagcctgaaccccagcggcgaggtgaccagacagatcggcgacgccctgcccgtgagctgcaccatcagcgccagcagaaacgccaccgtggtgtggatgaaggacaacatcagactgagaagcagccccagcttcagcagcctgcactaccaggacgccggcaactacgtgtgcgagaccgccctgcaggaggtggagggcctgaagaagagagagagcctgaccctgatcgtggagggcaagccccagatcaagatgaccaagaagaccgaccccagcggcctgagcaagaccatcatctgccacgtggagggcttccccaagcccgccatccagtggaccatcaccggcagcggcagcgtgatcaaccagaccgaggagagcccctacatcaacggcagatactacagcaagatcatcatcagccccgaggagaacgtgaccctgacctgcaccgccgagaaccagctggagagaaccgtgaacagcctgaacgtgagcgccaacgagaacagagagaaggtgaacgaccaggccaagctgatcgtgggcatcgtggtgggcctgctgctggccgccctggtggccggcgtggtgtactggctgtacatgaagaagagcaagaccgccagcaagcacgtgaacaaggacctgggcaacatggaggagaacaagaagctggaggagaacaaccacaagaccgaggcctag

SEQ ID NO: 71528 - DNA, 1074 bp, synthetic construct
  misc_feature 1..1074: note = Description of Artificial Sequence: Synthetic coding sequence
  source 1..1074: mol_type = other DNA
atggaggtgctgagaccccagctgatcagaatcgacggcagaaactacagaaagaaccccgtgcaggagcagacctaccagcacgaggaggacgaggaggacttctaccagggcagcatggagtgcgccgacgagccctgcgacgcctacgaggtggagcagaccccccagggcttcagaagcaccctgagagcccccagcctgctgtacaagcacatcgtgggcaagagaggcgacaccagaaagaagatcgagatggagaccaagaccagcatcagcatccccaagcccggccaggacggcgagatcgtgatcaccggccagcacagaaacggcgtgatcagcgccagaaccagaatcgacgtgctgctggacaccttcagaagaaagcagcccttcacccacttcctggccttcttcctgaacgaggtggaggtgcaggagggcttcctgagattccaggaggaggtgctggccaagtgcagcatggaccacggcgtggacagcagcatcttccagaaccccaagaagctgcacctgaccatcggcatgctggtgctgctgagcgaggaggagatccagcagacctgcgagatgctgcagcagtgcaaggaggagttcatcaacgacatcagcggcggcaagcccctggaggtggagatggccggcatcgagtacatgaacgacgaccccggcatggtggacgtgctgtacgccaaggtgcacatgaaggacggcagcaacagactgcaggagctggtggacagagtgctggagagattccaggccagcggcctgatcgtgaaggagtggaacagcgtgaagctgcacgccaccgtgatgaacaccctgttcagaaaggaccccaacgccgagggcagatacaacctgtacaccgccgagggcaagtacatcttcaaggagagagagagcttcgacggcagaaacatcctgaagctgttcgagaacttctacttcggcagcctgaagctgaacagcatccacatcagccagagattcaccgtggacagcttcggcaactacgccagctgcggccagatcgacttcagctag

SEQ ID NO: 71529 - DNA, 1074 bp, synthetic construct; identical to SEQ ID NO: 71528
  misc_feature 1..1074: note = Description of Artificial Sequence: Synthetic coding sequence
  source 1..1074: mol_type = other DNA

SEQ ID NO: 71530 - DNA, 1203 bp, synthetic construct
  misc_feature 1..1203: note = Description of Artificial Sequence: Synthetic coding sequence
  source 1..1203: mol_type = other DNA
atggaggtgctgagaccccagctgatcagaatcgacggcagaaactacagaaagaaccccgtgcaggagcagacctaccagcacgaggaggacgaggaggacttctaccagggcagcatggagtgcgccgacgagccctgcgacgcctacgaggtggagcagaccccccagggcttcagaagcaccctgagagcccccagcctgctgtacaacctgatccacctgaacaccagcaacgactgcggcttccagaagatcaccctggactgccagaacatctacacctggaagagcagacacatcgtgggcaagagaggcgacaccagaaagaagatcgagatggagaccaagaccagcatcagcatccccaagcccggccaggacggcgagatcgtgatcaccggccagcacagaaacggcgtgatcagcgccagaaccagaatcgacgtgctgctggacaccttcagaagaaagcagcccttcacccacttcctggccttcttcctgaacgaggtggaggtgcaggagggcttcctgagattccaggaggaggtgctggccaagtgcagcatggaccacggcgtggacagcagcatcttccagaaccccaagaagctgcacctgaccatcggcatgctggtgctgctgagcgaggaggagatccagcagacctgcgagatgctgcagcagtgcaaggaggagttcatcaacgacatcagcggcggcaagcccctggaggtggagatggccggcatcgagtacatgaacgacgaccccggcatggtggacgtgctgtacgccaaggtgcacatgaaggacggcagcaacagactgcaggagctggtggacagagtgctggagagattccaggccagcggcctgatcgtgaaggagtggaacagcgtgaagctgcacgccaccgtgatgaacaccctgttcagaaaggaccccaacgccgagggcagatacaacctgtacaccgccgagggcaagtacatcttcaaggagagagagagcttcgacggcagaaacatcctgaagagcttcgccctgctgcccagactggagtacaacgacgccatcagcgcccactgcaacctgtgcctgcccggcagcagcgacagccccgccagcgccagccaggtggccggcatcaccggcgtgagcgacgcctacagccagagcctgcccggcaagagctag

SEQ ID NO: 71531 - DNA, 1074 bp, synthetic construct; identical to SEQ ID NO: 71528
  misc_feature 1..1074: note = Description of Artificial Sequence: Synthetic coding sequence
  source 1..1074: mol_type = other DNA

SEQ ID NO: 71532 - DNA, 1203 bp, synthetic construct; identical to SEQ ID NO: 71530
  misc_feature 1..1203: note = Description of Artificial Sequence: Synthetic coding sequence
  source 1..1203: mol_type = other DNA

SEQ ID NO: 71533 - DNA, 1074 bp, synthetic construct; identical to SEQ ID NO: 71528
  misc_feature 1..1074: note = Description of Artificial Sequence: Synthetic coding sequence
  source 1..1074: mol_type = other DNA

SEQ ID NO: 71534 - DNA, 879 bp, synthetic construct
  misc_feature 1..879: note = Description of Artificial Sequence: Synthetic coding sequence
  source 1..879: mol_type = other DNA
tgatacaagcacatcgtgggcaagagaggcgacaccagaaagaagatcgagatggagaccaagaccagcatcagcatccccaagcccggccaggacggcgagatcgtgatcaccggccagcacagaaacggcgtgatcagcgccagaaccagaatcgacgtgctgctggacaccttcagaagaaagcagcccttcacccacttcctggccttcttcctgaacgaggtggaggtgcaggagggcttcctgagattccaggaggaggtgctggccaagtgcagcatggaccacggcgtggacagcagcatcttccagaaccccaagaagctgcacctgaccatcggcatgctggtgctgctgagcgaggaggagatccagcagacctgcgagatgctgcagcagtgcaaggaggagttcatcaacgacatcagcggcggcaagcccctggaggtggagatggccggcatcgagtacatgaacgacgaccccggcatggtggacgtgctgtacgccaaggtgcacatgaaggacggcagcaacagactgcaggagctggtggacagagtgctggagagattccaggccagcggcctgatcgtgaaggagtggaacagcgtgaagctgcacgccaccgtgatgaacaccctgttcagaaaggaccccaacgccgagggcagatacaacctgtacaccgccgagggcaagtacatcttcaaggagagagagagcttcgacggcagaaacatcctgaagagcttcgccctgctgcccagactggagtacaacgacgccatcagcgcccactgcaacctgtgcctgcccggcagcagcgacagccccgccagcgccagccaggtggccggcatcaccgtggtgtag

SEQ ID NO: 71535 - DNA, 828 bp, synthetic construct
  misc_feature 1..828: note = Description of Artificial Sequence: Synthetic coding sequence
  source 1..828: mol_type = other DNA
atggagaccaagaccagcatcagcatccccaagcccggccaggacggcgagatcgtgatcaccggccagcacagaaacggcgtgatcagcgccagaaccagaatcgacgtgctgctggacaccttcagaagaaagcagcccttcacccacttcctggccttcttcctgaacgaggtggaggtgcaggagggcttcctgagattccaggaggaggtgctggccaagtgcagcatggaccacggcgtggacagcagcatcttccagaaccccaagaagctgcacctgaccatcggcatgctggtgctgctgagcgaggaggagatccagcagacctgcgagatgctgcagcagtgcaaggaggagttcatcaacgacatcagcggcggcaagcccctggaggtggagatggccggcatcgagtacatgaacgacgaccccggcatggtggacgtgctgtacgccaaggtgcacatgaaggacggcagcaacagactgcaggagctggtggacagagtgctggagagattccaggccagcggcctgatcgtgaaggagtggaacagcgtgaagctgcacgccaccgtgatgaacaccctgttcagaaaggaccccaacgccgagggcagatacaacctgtacaccgccgagggcaagtacatcttcaaggagagagagagcttcgacggcagaaacatcctgaagagcttcgccctgctgcccagactggagtacaacgacgccatcagcgcccactgcaacctgtgcctgcccggcagcagcgacagccccgccagcgccagccaggtggccggcatcaccgtggtgtag

SEQ ID NO: 71536 - DNA, 372 bp, synthetic construct
  misc_feature 1..372: note = Description of Artificial Sequence: Synthetic coding sequence
  source 1..372: mol_type = other DNA
atggaggtgctgagaccccagctgatcagaatcgacggcagaaactacagaaagaaccccgtgcaggagcagacctaccagcacgaggaggacgaggaggacttctaccagggcagcatggagtgcgccgacgagccctgcgacgcctacgaggtggagcagaccccccagggcttcagaagcaccctgagagcccccagcctgctgtacaagcacatcgtgggcaagagaggcgacaccagaaagaagatcgagatggagaccaagaccagcatcagcatccccaagcccggccaggacggcgagatcgtgatcaccggccagcacagaaacggcgtgatcagcgccagaaccagaatcgacgtgctgtag

SEQ ID NO: 71537 - DNA, 312 bp, synthetic construct
  misc_feature 1..312: note = Description of Artificial Sequence: Synthetic coding sequence
  source 1..312: mol_type = other DNA
atggaggtgctgagaccccagctgatcagaatcgacggcagaaactacagaaagaaccccgtgcaggagcagacctaccagcacgaggaggacgaggaggacttctaccagggcagcatggagtgcgccgacgagccctgcgacgcctacgaggtggagcagaccccccagggcttcagaagcaccctgagagcccccagcctgctgtacaagcacatcgtgggcaagagaggcgacaccagaaagaagatcgagatggagaccaagaccagcatcagcatccccaagcccggccaggacggcgagatctag

SEQ ID NO: 71538 - DNA, 459 bp, synthetic construct
  misc_feature 1..459: note = Description of Artificial Sequence: Synthetic coding sequence
  source 1..459: mol_type = other DNA
atggaggtgctgagaccccagctgatcagaatcgacggcagaaactacagaaagaaccccgtgcaggagcagacctaccagcacgaggaggacgaggaggacttctaccagggcagcatggagtgcgccgacgagccctgcgacgcctacgaggtggagcagaccccccagggcttcagaagcaccctgagagcccccagcctgctgtacaagcacatcgtgggcaagagaggcgacaccagaaagaagatcgagatggagaccaagaccagcatcagcatccccaagcccggccaggacggcgagatcgtgatcaccggccagcacagaaacggcgtgatcagcgccagaaccagaatcgacgtgctgctggacaccttcagaagaaagcagcccttcacccacttcctggccttcttcctgaacgaggtggaggtgcaggagggcttcctgagatag

SEQ ID NO: 71539 - DNA, 171 bp, synthetic construct
  misc_feature 1..171: note = Description of Artificial Sequence: Synthetic coding sequence
  source 1..171: mol_type = other DNA
atggaggtgctgagaccccagctgatcagaatcgacggcagaaactacagaaagaaccccgtgcaggagcagacctaccagcacgaggaggacgaggaggacttctaccagggcagcatggagtgcgccgacgagccctgcgacgcctacgaggtggagcagaccccctag

SEQ ID NO: 71540 - DNA, 1140 bp, synthetic construct
  misc_feature 1..1140: note = Description of Artificial Sequence: Synthetic coding sequence
  source 1..1140: mol_type = other DNA
atgatgaagtaccccggcacctggccctgccagggcatcatcggcatcagcttcggcgagagcgtgatggaggtgctgagaccccagctgatcagaatcgacggcagaaactacagaaagaaccccgtgcaggagcagacctaccagcacgaggaggacgaggaggacttctaccagggcagcatggagtgcgccgacgagccctgcgacgcctacgaggtggagcagaccccccagggcttcagaagcaccctgagagcccccagcctgctgtacaagcacatcgtgggcaagagaggcgacaccagaaagaagatcgagatggagaccaagaccagcatcagcatccccaagcccggccaggacggcgagatcgtgatcaccggccagcacagaaacggcgtgatcagcgccagaaccagaatcgacgtgctgctggacaccttcagaagaaagcagcccttcacccacttcctggccttcttcctgaacgaggtggaggtgcaggagggcttcctgagattccaggaggaggtgctggccaagtgcagcatggaccacggcgtggacagcagcatcttccagaaccccaagaagctgcacctgaccatcggcatgctggtgctgctgagcgaggaggagatccagcagacctgcgagatgctgcagcagtgcaaggaggagttcatcaacgacatcagcggcggcaagcccctggaggtggagatggccggcatcgagtacatgaacgacgaccccggcatggtggacgtgctgtacgccaaggtgcacatgaaggacggcagcaacagactgcaggagctggtggacagagtgctggagagattccaggccagcggcctgatcgtgaaggagtggaacagcgtgaagctgcacgccaccgtgatgaacaccctgttcagaaaggaccccaacgccgagggcagatacaacctgtacaccgccgagggcaagtacatcttcaaggagagagagagcttcgacggcagaaacatcctgaagctgttcgagaacttctacttcggcagcctgaagctgaacagcatccacatcagccagagattcaccgtggacagcttcggcaactacgccagctgcggccagatcgacttcagctag

SEQ ID NO: 71541 - DNA, 2274 bp, synthetic construct
  misc_feature 1..2274: note = Description of Artificial Sequence: Synthetic coding sequence
  source 1..2274: mol_type = other DNA
atgcccgccctgcccctggaccagctgcagatcacccacaaggaccccaagaccggcaagctgagaaccagccccgccctgcaccccgagcagaaggccgacagatacttcgtgctgtacaagcccccccccaaggacaacatccccgccctggtggaggagtacctggagagagccaccttcgtggccaacgacctggactggctgctggccctgccccacgacaagttctggtgccaggtgatcttcgacgagaccctgcagaagtgcctggacagctacctgagatacgtgcccagaaagttcgacgagggcgtggccagcgcccccgaggtggtggacatgcagaagagactgcacagaagcgtgttcctgaccttcctgagaatgagcacccacaaggagagcaaggaccacttcatcagccccagcgccttcggcgagatcctgtacaacaacttcctgttcgacatccccaagatcctggacctgtgcgtgctgttcggcaagggcaacagccccctgctgcagaagatgatcggcaacatcttcacccagcagcccagctactacagcgacctggacgagaccctgcccaccatcctgcaggtgttcagcaacatcctgcagcactgcggcctgcagggcgacggcgccaacaccaccccccagaagctggaggagagaggcagactgacccccagcgacatgcccctgctggagctgaaggacatcgtgctgtacctgtgcgacacctgcaccaccctgtgggccttcctggacatcttccccctggcctgccagaccttccagaagcacgacttctgctacagactggccagcttctacgaggccgccatccccgagatggagagcgccatcaagaagagaagactggaggacagcaagctgctgggcgacctgtggcagagactgagccacagcagaaagaagctgatggagatcttccacatcatcctgaaccagatctgcctgctgcccatcctggagagcagctgcgacaacatccagggcttcatcgaggagttcctgcagatcttcagcagcctgctgcaggagaagagattcctgagagactacgacgccctgttccccgtggccgaggacatcagcctgctgcagcaggccagcagcgtgctggacgagaccagaaccgcctacatcctgcaggccgtggagagcgcctgggagggcgtggacagaagaaaggccaccgacgccaaggaccccagcgtgatcgaggagcccaacggcgagcccaacggcgtgaccgtgaccgccgaggccgtgagccaggccagcagccaccccgagaacagcgaggaggaggagtgcatgggcgccgccgccgccgtgggccccgccatgtgcggcgtggagctggacagcctgatcagccaggtgaaggacctgctgcccgacctgggcgagggcttcatcctggcctgcctggagtactaccactacgaccccgagcaggtgatcaacaacatcctggaggagagactggcccccaccctgagccagctggacagaaacctggacagagagatgaagcccgaccccacccccctgctgaccagcagacacaacgtgttccagaacgacgagttcgacgtgttcagcagagacagcgtggacctgagcagagtgcacaagggcaagagcaccagaaaggaggagaacaccagaagcctgctgaacgacaagagagccgtggccgcccagagacagagatacgagcagtacagcgtggtggtggaggaggtgcccctgcagcccggcgagagcctgccctaccacagcgtgtactacgaggacgagtacgacgacacctacgacggcaaccaggtgggcgccaacgacgccgacagcgacgacgagctgatcagcagaagacccttcaccatcccccaggtgctgagaaccaaggtgcccagagagggccaggaggaggacgacgacgacgaggaggacgacgccgacgaggaggcccccaagcccgaccacttcgtgcaggaccccgccgtgctgagagagaaggccgaggccagaagaatggccttcctggccaagaagggctacagacacgacagcagcaccgccgtggccggcagccccagaggccacggccagagcagagagaccacccaggagagaagaaagaaggaggccaacaaggccaccagagccaaccacaacagaagaaccatggccgacagaaagagaagcaagggcatgatccccagctag

SEQ ID NO: 71542 - DNA, 2274 bp, synthetic construct; identical to SEQ ID NO: 71541
  misc_feature 1..2274: note = Description of Artificial Sequence: Synthetic coding sequence
  source 1..2274: mol_type = other DNA

SEQ ID NO: 71543 - DNA, 723 bp, synthetic construct
  misc_feature 1..723: note = Description of Artificial Sequence: Synthetic coding sequence
  source 1..723: mol_type = other DNA
atgcccgccctgcccctggaccagctgcagatcacccacaaggaccccaagaccggcaagctgagaaccagccccgccctgcaccccgagcagaaggccgacagatacttcgtgctgtacaagcccccccccaaggacaacatccccgccctggtggaggagtacctggagagagccaccttcgtggccaacgacctggactggctgctggccctgccccacgacaagttctggtgccaggtgatcttcgacgagaccctgcagaagtgcctggacagctacctgagatacgtgcccagaaagttcgacgagggcgtggccagcgcccccgaggtggtggacatgcagaagagactgcacagaagcgtgttcctgaccttcctgagaatgagcacccacaaggagagcaaggaccacttcatcagccccagcgccttcggcgagatcctgtacaacaacttcctgttcgacatccccaagatcctggacctgtgcgtgctgttcggcaagggcaacagccccctgctgcagaagatgatcggcaacatcttcacccagcagcccagctactacagcgacctggacgagaccctgcccaccatcctgcaggtgttcagcaacatcctgcagcactgcggcctgcagggcgacggcgccaacaccaccccccagaagctggaggagagaggcagactgacccccagcgacatgcccctgctgtag

SEQ ID NO: 71544 - DNA, 2046 bp, synthetic construct
  misc_feature 1..2046: note = Description of Artificial Sequence: Synthetic coding sequence
  source 1..2046: mol_type = other DNA
atgcccgccctgcccctggaccagctgcagatcacccacaaggaccccaagaccggcaagctgagaaccagccccgccctggtgatcttcgacgagaccctgcagaagtgcctggacagctacctgagatacgtgcccagaaagttcgacgagggcgtggccagcgcccccgaggtggtggacatgcagaagagactgcacagaagcgtgttcctgaccttcctgagaatgagcacccacaaggagagcaagatcctggacctgtgcgtgctgttcggcaagggcaacagccccctgctgcagaagatgatcggcaacatcttcacccagcagcccagctactacagcgacctggacgagaccctgcccaccatcctgcaggtgttcagcaacatcctgcagcactgcggcctgcagggcgacggcgccaacaccaccccccagaagctggaggagagaggcagactgacccccagcgacatgcccctgctggagctgaaggacatcgtgctgtacctgtgcgacacctgcaccaccctgtgggccttcctggacatcttccccctggcctgccagaccttccagaagcacgacttctgctacagactggccagcttctacgaggccgccatccccgagatggagagcgccatcaagaagagaagactggaggacagcaagctgctgggcgacctgtggcagagactgagccacagcagaaagaagctgatggagatcttccacatcatcctgaaccagatctgcctgctgcccatcctggagagcagctgcgacaacatccagggcttcatcgaggagttcctgcagatcttcagcagcctgctgcaggagaagagattcctgagagactacgacgccctgttccccgtggccgaggacatcagcctgctgcagcaggccagcagcgtgctggacgagaccagaaccgcctacatcctgcaggccgtggagagcgcctgggagggcgtggacagaagaaaggccaccgacgccaaggaccccagcgtgatcgaggagcccaacggcgagcccaacggcgtgaccgtgaccgccgaggccgtgagccaggccagcagccaccccgagaacagcgaggaggaggagtgcatgggcgccgccgccgccgtgggccccgccatgtgcggcgtggagctggacagcctgatcagccaggtgaaggacctgctgcccgacctgggcgagggcttcatcctggcctgcctggagtactaccactacgaccccgagcaggtgatcaacaacatcctggaggagagactggcccccaccctgagccagctggacagaaacctggacagagagatgaagcccgaccccacccccctgctgaccagcagacacaacgtgttccagaacgacgagttcgacgtgttcagcagagacagcgtggacctgagcagagtgcacaagggcaagagcaccagaaaggaggagaacaccagaagcctgctgaacgacaagagagccgtggccgcccagagacagagatacgagcagtacagcgtggtggtggaggaggtgcccctgcagcccggcgagagcctgccctaccacagcgtgtactacgaggacgagtacgacgacacctacgacggcaaccaggtgggcgccaacgacgccgacagcgacgacgagctgatcagcagaagacccttcaccatcccccaggtgctgagaaccaaggtgcccagagagggccaggaggaggacgacgacgacgaggaggacgacgccgacgaggaggcccccaagcccgaccacttcgtgcaggaccccgccgtgctgagagagaaggccgaggccagaagaatggccttcctggccaagaagggctacagacacgacagcagcaccgccgtggccggcagccccagaggccacggccagagcagagagaccacccaggagagaagaaagaaggaggccaacaaggccaccagagccaaccacaacagaagaaccatggccgacagaaagagaagcaagggcatgatccccagctag

SEQ ID NO: 71545 - DNA, 531 bp, synthetic construct
  misc_feature 1..531: note = Description of Artificial Sequence: Synthetic coding sequence
  source 1..531: mol_type = other DNA
atggccctgcccagactgaccggcgccctgagaagcttcagcaacgtgaccaagcaggacaactacaacgaggaggtggccgacctgaagatcaagagaagcaagctgcacgagcaggtgctggacctgggcctgacctggaagaagatcatcaagttcctgaacgagaagctggagaagagcaagatgcagagcatcaacgaggacctgaaggacatcctgcacgccgccaagcagatcgtgggcaccgacaacggcagagaggccatcgagagcggcgccgccttcctgttcatgaccttccacctgaaggacagcgtgggccacaaggagaccaaggccatcaagcagatgttcggccccttccccagcagcagcgccaccgccgcctgcaacgccaccaacagaatcatcagccacttcagccaggacgacctgaccgccctggtgcagatgaccgagaaggagcacggcgacagagtgttcttcggcaagaacctggccttcagcttcgacatgcacgacctgtag

SEQ ID NO: 71546 - DNA, 336 bp, synthetic construct
  misc_feature 1..336: note = Description of Artificial Sequence: Synthetic coding sequence
  source 1..336: mol_type = other DNA
atggccctgcccagactgaccggcgccctgagaagcttcagcaacgtgaccaagcaggacaactacaacgaggaggtggccgacctgaagatcaagagaagcaagctgcacgagcaggtgctggacctgggcctgacctggaagaagatcatcaagttcctgaacgagaagctggagaagagcaagatgcagagcatcaacgaggacctgaaggacatcctgcacgccgccaagcagatcgaggtgaactgccccttccagaagagaagactggacggcaaggaggaggacgagaagatgagcagagccagcgacagattcagaggcctgagatag

SEQ ID NO: 71547 - DNA, 6609 bp, synthetic construct
  misc_feature 1..6609: note = Description of Artificial Sequence: Synthetic coding sequence
  source 1..6609: mol_type = other DNA
atggccctgcccagactgaccggcgccctgagaagcttcagcaacgtgaccaagcaggacaactacaacgaggaggtggccgacctgaagatcaagagaagcaagctgcacgagcaggtgctggacctgggcctgacctggaagaagatcatcaagttcctgaacgagaagctggagaagagcaagatgcagagcatcaacgaggacctgaaggacatcctgcacgccgccaagcagatcgtgggcaccgacaacggcagagaggccatcgagagcggcgccgccttcctgttcatgaccttccacctgaaggacagcgtgggccacaaggagaccaaggccatcaagcagatgttcggccccttccccagcagcagcgccaccgccgcctgcaacgccaccaacagaatcatcagccacttcagccaggacgacctgaccgccctggtgcagatgaccgagaaggagcacggcgacagagtgttcttcggcaagaacctggccttcagcttcgacatgcacgacctggaccacttcgacgagctgcccatcaacggcgagacccagaagaccatcagcctggactacaagaagttcctgaacgagcacctgcaggaggcctgcacccccgagctgaagcccgtggagaagaccaacggcagcttcctgtggtgcgaggtggagaagtacctgaacagcaccctgaaggagatgaccgaggtgcccagagtggaggacctgtgctgcaccctgtacgacatgctggccagcatcaagagcggcgacgagctgcaggacgagctgttcgagctgctgggccccgagggcctggagctgatcgagaagctgctgcagaacagaatcaccatcgtggacagattcctgaacagcagcaacgaccacagattccaggccctgcaggacaactgcaagaagatcctgggcgagaacgccaagcccaactacggctgccaggtgaccatccagagcgagcaggagaagcagctgatgaagcagtacagaagagaggagaagagaatcgccagaagagagaagaaggccggcgaggacctggaggtgagcgagggcctgatgtgcttcgaccccaaggagctgagaatccagagagagcaggccctgctgaacgccagaagcgtgcccatcctgagcagacagagagacgccgacgtggagaagatccactacccccacgtgtacgacagccaggccgaggccatgaagaccagcgccttcatcgccggcgccaagatgatcctgcccgagggcatccagagagagaacaacaagctgtacgaggaggtgagaatcccctacagcgagcccatgcccctgagcttcgaggagaagcccgtgtacatccaggacctggacgagatcggccagctggccttcaagggcatgaagagactgaacagaatccagagcatcgtgttcgagaccgcctacaacaccaacgagaacatgctgatctgcgcccccaccggcgccggcaagaccaacatcgccatgctgaccgtgctgcacgagatcagacagcacttccagcagggcgtgatcaagaagaacgagttcaagatcgtgtacgtggcccccatgaaggccctggccgccgagatgaccgactacttcagcagaagactggagcccctgggcatcatcgtgaaggagctgaccggcgacatgcagctgagcaagagcgagatcctgagaacccagatgctggtgaccacccccgagaagtgggacgtggtgaccagaaagagcgtgggcgacgtggccctgagccagatcgtgagactgctgatcctggacgaggtgcacctgctgcacgaggacagaggccccgtgctggagagcatcgtggccagaaccctgagacaggtggagagcacccagagcatgatcagaatcctgggcctgagcgccaccctgcccaactacctggacgtggccaccttcctgcacgtgaacccctacatcggcctgttcttcttcgacggcagattcagacccgtgcccctgggccagaccttcctgggcatcaagtgcgccaacaagatgcagcagctgaacaacatggacgaggtgtgctacgagaacgtgctgaagcaggtgaaggccggccaccaggtgatggtgttcgtgcacgccagaaacgccaccgtgagaaccgccatgagcctgatcgagagagccaagaactgcggccacatccccttcttcttccccacccagggccacgactacgtgctggccgagaagcaggtgcagagaagcagaaacaagcaggtgagagagctgttccccgacggcttcagcatccaccacgccggcatgctgagacaggacagaaacctggtggagaacctgttcagcaacggccacatcaaggtgctggtgtgcaccgccaccctggcctggggcgtgaacctgcccgcccacgccgtgatcatcaagggcacccagatctacgccgccaagagaggcagcttcgtggacctgggcatcctggacgtgatgcagatcttcggcagagccggcagaccccagttcgacaagttcggcgagggcatcatcatcaccacccacgacaagctgagccactacctgaccctgctgacccagagaaaccccatcgagagccagttcctggagagcctggccgacaacctgaacgccgagatcgccctgggcaccgtgaccaacgtggaggaggccgtgaagtggatcagctacacctacctgtacgtgagaatgagagccaaccccctggcctacggcatcagccacaaggcctaccagatcgaccccaccctgagaaagcacagagagcagctggtgatcgaggtgggcagaaagctggacaaggcccagatgatcagattcgaggagagaaccggctacttcagcagcaccgacctgggcagaaccgccagccactactacatcaagtacaacaccatcgagaccttcaacgagctgttcgacgcccacaagaccgagggcgacatcttcgccatcgtgagcaaggccgaggagttcgaccagatcaaggtgagagaggaggagatcgaggagctggacaccctgctgagcaacttctgcgagctgagcacccccggcggcgtggagaacagctacggcaagatcaacatcctgctgcagacctacatcagcagaggcgagatggacagcttcagcctgatcagcgacagcgcctacgtggcccagaacgccgccagaatcgtgagagccctgttcgagatcgccctgagaaagagatggcccaccatgacctacagactgctgaacctgagcaaggtgatcgacaagagactgtggggctgggccagccccctgagacagttcagcatcctgcccccccacatcctgaccagactggaggagaagaagctgaccgtggacaagctgaaggacatgagaaaggacgagatcggccacatcctgcaccacgtgaacatcggcctgaaggtgaagcagtgcgtgcaccagatccccagcgtgatgatggaggccagcatccagcccatcaccagaaccgtgctgagagtgaccctgagcatctacgccgacttcacctggaacgaccaggtgcacggcaccgtgggcgagccctggtggatctgggtggaggaccccaccaacgaccacatctaccacagcgagtacttcctggccctgaagaagcaggtgatcagcaaggaggcccagctgctggtgttcaccatccccatcttcgagcccctgcccagccagtactacatcagagccgtgagcgacagatggctgggcgccgaggccgtgtgcatcatcaacttccagcacctgatcctgcccgagagacaccccccccacaccgagctgctggacctgcagcccctgcccatcaccgccctgggctgcaaggcctacgaggccctgtacaacttcagccacttcaaccccgtgcagacccagatcttccacaccctgtaccacaccgactgcaacgtgctgctgggcgcccccaccggcagcggcaagaccgtggccgccgagctggccatcttcagagtgttcaacaagtaccccaccagcaaggccgtgtacatcgcccccctgaaggccctggtgagagagagaatggacgactggaaggtgagaatcgaggagaagctgggcaagaaggtgatcgagctgaccggcgacgtgacccccgacatgaagagcatcgccaaggccgacctgatcgtgaccacccccgagaagtgggacggcgtgagcagaagctggcagaacagaaactacgtgcagcaggtgaccatcctgatcatcgacgagatccacctgctgggcgaggagagaggccccgtgctggaggtgatcgtgagcagaaccaacttcatcagcagccacaccgagaagcccgtgagaatcgtgggcctgagcaccgccctggccaacgccagagacctggccgactggctgaacatcaagcagatgggcctgttcaacttcagacccagcgtgagacccgtgcccctggaggtgcacatccagggcttccccggccagcactactgccccagaatggccagcatgaacaagcccgccttccaggccatcagaagccacagccccgccaagcccgtgctgatcttcgtgagcagcagaagacagaccagactgaccgccctggagctgatcgccttcctggccaccgaggaggaccccaagcagtggctgaacatggacgagagagagatggagaacatcatcgccaccgtgagagacagcaacctgaagctgaccctggccttcggcatcggcatgcaccacgccggcctgcacgagagagacagaaagaccgtggaggagctgttcgtgaactgcaaggtgcaggtgctgatcgccaccagcaccctggcctggggcgtgaacttccccgcccacctggtgatcatcaagggcaccgagtactacgacggcaagaccagaagatacgtggacttccccatcaccgacgtgctgcagatgatgggcagagccggcagaccccagttcgacgaccagggcaaggccgtgatcctggtgcacgacatcaagaaggacttctacaagaagttcctgtacgagcccttccccgtggagagcagcctgctgggcgtgctgagcgaccacctgaacgccgagatcgccggcggcaccatcaccagcaagcaggacgccctggactacatcacctggacctacttcttcagaagactgatcatgaaccccagctactacaacctgggcgacgtgagccacgacagcgtgaacaagttcctgagccacctgatcgagaagagcctgatcgagctggagctgagctactgcatcgagatcggcgaggacaacagaagcatcgagcccctgacctacggcagaatcgccagctactactacctgaagcaccagaccgtgaagatgttcaaggacagactgaagcccgagtgcagcaccgaggagctgctgagcatcctgagcgacgccgaggagtacaccgacctgcccgtgagacacaacgaggaccacatgaacagcgagctggccaagtgcctgcccatcgagagcaacccccacagcttcgacagcccccacaccaaggcccacctgctgctgcaggcccacctgagcagagccatgctgccctgccccgactacgacaccgacaccaagaccgtgctggaccaggccctgagagtgtgccaggccatgctggacgtggccgccaaccagggctggctggtgaccgtgctgaacatcaccaacctgatccagatggtgatccagggcagatggctgaaggacagcagcctgctgaccctgcccaacatcgagaaccaccacctgcacctgttcaagaagtggaagcccatcatgaagggcccccacgccagaggcagaaccagcatcgagagcctgcccgagctgatccacgcctgcggcggcaaggaccacgtgttcagcagcatggtggagagcgagctgcacgccgccaagaccaagcaggcctggaacttcctgagccacctgcccgtgatcaacgtgggcatcagcgtgaagggcagctgggacgacctggtggagggccacaacgagctgagcgtgagcaccctgaccgccgacaagagagacgacaacaagtggatcaagctgcacgccgaccaggagtacgtgctgcaggtgagcctgcagagagtgcacttcggcttccacaagggcaagcccgagagctgcgccgtgacccccagattccccaagagcaaggacgagggctggttcctgatcctgggcgaggtggacaagagagagctgatcgccctgaagagagtgggctacatcagaaaccaccacgtggccagcctgagcttctacacccccgagatccccggcagatacatctacaccctgtacttcatgagcgactgctacctgggcctggaccagcagtacgacatctacctgaacgtgacccaggccagcctgagcgcccaggtgaacaccaaggtgagcgacagcctgaccgacctggccctgaagtag

SEQ ID NO: 71548 - DNA, 816 bp, synthetic construct
  misc_feature 1..816: note = Description of Artificial Sequence: Synthetic coding sequence
  source 1..816: mol_type = other DNA
atggaggacagccacaagagcaccaccagcgagaccgccccccagcccggcagcgccgtgcagggcgcccacatcagccacatcgcccagcaggtgagcagcctgagcgagagcgaggagagccaggacagcagcgacagcatcggcagcagccagaaggcccacggcatcctggccagaagacccagctacagaaagatcctgaaggacctgagcagcgaggacaccagaggcagaaagggcgacggcgagaacagcggcgtgagcgccgccgtgaccagcatgagcgtgcccacccccatctaccagaccagcagcggccagtacatcgccatcgcccccaacggcgccctgcagctggccagccccggcaccgacggcgtgcagggcctgcagaccctgaccatgaccaacagcggcagcacccagcagggcaccaccatcctgcagtacgcccagaccagcgacggccagcagatcctggtgcccagcaaccaggtggtggtgcagaccgccagcggcgacatgcagacctaccagatcagaaccacccccagcgccaccagcctgccccagaccgtggtgatgaccagccccgtgaccctgaccagccagaccaccaagaccgacgacccccagctgaagagagagatcagactgatgaagaacagagaggccgccagagagtgcagaagaaagaagaaggagtacgtgaagtgcctggagaacagagtggccgtgctggagaaccagaacaagaccctgatcgaggagctgaagaccctgaaggacctgtacagcaacaagagcgtgtag

SEQ ID NO: 71549 - DNA, 411 bp, synthetic construct
  misc_feature 1..411: note = Description of Artificial Sequence: Synthetic coding sequence
  source 1..411: mol_type = other DNA
atgaccaacagcggcagcacccagcagggcaccaccatcctgcagtacgcccagaccagcgacggccagcagatcctggtgcccagcaaccaggtggtggtgcagaccgccagcggcgacatgcagacctaccagatcagaaccacccccagcgccaccagcctgccccagaccgtggtgatgaccagccccgtgaccctgaccagccagaccaccaagaccgacgacccccagctgaagagagagatcagactgatgaagaacagagaggccgccagagagtgcagaagaaagaagaaggagtacgtgaagtgcctggagaacagagtggccgtgctggagaaccagaacaagaccctgatcgaggagctgaagaccctgaaggacctgtacagcaacaagagcgtgtag

SEQ ID NO: 71550 - DNA, 603 bp, synthetic construct
  misc_feature 1..603: note = Description of Artificial Sequence: Synthetic coding sequence
  source 1..603: mol_type = other DNA
atggaggacagccacaagagcaccaccagcgagaccgccccccagcccggcagcgccgtgcagggcgcccacatcagccacatcgcccagcaggtgagcagcctgagcgagagcgaggagagccaggacagcagcgacagcatcggcagcagccagaaggcccacggcatcctggccagaagacccagctacagaaagatcctgaaggacctgagcagcgaggacaccagaggcagaaagggcgacggcgagaacagcggcgtgagcgccgccgtgaccagcatgagcgtgcccacccccatctaccagaccagcagcggccagtacatcgccatcgcccccaacggcgccctgcagctggccagccccggcaccgacggcgtgcagggcctgcagaccctgaccatgaccaacagcggcagcacccagcagggcaccaccatcctgcagtacgcccagaccagcgacggccagcagatcctggtgcccagcaaccaggtggtggtgcagaccgccagcggcgacatgcagacctaccagatcagaaccacccccagcgccaccagcctgccccagaccgtggtgatgaccagccccgtgtag

SEQ ID NO: 71551 - DNA, 513 bp, synthetic construct
  misc_feature 1..513: note = Description of Artificial Sequence: Synthetic coding sequence
  source 1..513: mol_type = other DNA
atggaggacagccacaagagcaccaccagcgagaccgccccccagcccggcagcgccgtgcagggcgcccacatcagccacatcgcccagcaggtgagcagcctgagcgagagcgaggagagccaggacagcagcgacagcatcggcagcagccagaaggcccacggcatcctggccagaagacccagctacagaaagatcctgaaggacctgagcagcgaggacaccagaggcagaaagggcgacggcgagaacagcggcgtgagcgccgccgtgaccagcatgagcgtgcccacccccatctaccagaccagcagcggccagtacatcgccatcgcccccaacggcgccctgcagctggccagccccggcaccgacggcgtgcagggcctgcagaccctgaccatgaccaacagcggcagcacccagcagggcaccaccatcctgcagtacgcccagaccagcgacggccagcagatcctggtgcccagcaaccaggtggtggtgcagtag

SEQ ID NO: 71552 - DNA, 321 bp, synthetic construct
  misc_feature 1..321: note = Description of Artificial Sequence: Synthetic coding sequence
  source 1..321: mol_type = other DNA
atgatgctgcagcaccccggccaggtgagcgccagcgaggaggagctgagattcgccatccagaacaagcacctgtgccacagaatgagcagcgccctggagagcgtgaccgtgagcgacagacccctgggcgtgagcatcaccaaggccgaggtggcccccgaggaggacgagagaaagaagagaagaagagagagaaacaagatcgccgccgccaagtgcagaaacaagaagaaggagaagaccgagtgcctgcagaagctgcccagacccttctgggtgcagaagacctgcatctgggccgtggacagctgcaagtag

SEQ ID NO: 71553 - DNA, 546 bp, synthetic construct
  misc_feature 1..546: note = Description of Artificial Sequence: Synthetic coding sequence
  source 1..546: mol_type = other DNA
atgatgctgcagcaccccggccaggtgagcgccagcgaggtgagcgccagcgccatcgtgccctgcctgagcccccccggcagcctggtgttcgaggacttcgccaacctgacccccttcgtgaaggaggagctgagattcgccatccagaacaagcacctgtgccacagaatgagcagcgccctggagagcgtgaccgtgagcgacagacccctgggcgtgagcatcaccaaggccgaggtggcccccgaggaggacgagagaaagaagagaagaagagagagaaacaagatcgccgccgccaagtgcagaaacaagaagaaggagaagaccgagtgcctgcagaaggagagcgagaagctggagagcgtgaacgccgagctgaaggcccagatcgaggagctgaagaacgagaagcagcacctgatctacatgctgaacctgcacagacccacctgcatcgtgagagcccagaacggcagaacccccgaggacgagagaaacctgttcatccagcagatcaaggagggcaccctgcagagctag

SEQ ID NO: 71554 - DNA, 528 bp, synthetic construct
  misc_feature 1..528: note = Description of Artificial Sequence: Synthetic coding sequence
  source 1..528: mol_type = other DNA
atgatgctgcagcaccccggccaggtgagcgccagcgaggtgagcgccagcgccatcgtgccctgcctgagcccccccggcagcctggtgttcgaggacttcgccaacctgacccccttcgtgaaggaggagctgagattcgccatccagaacaagcacctgtgccacagaatgagcagcgccctggagagcgtgaccgtgagcgacagacccctgggcgtgagcatcaccaaggccgaggtggcccccgaggaggacgagagaaagaagagaagaagagagagaaacaagatcgccgccgccaagtgcagaaacaagaagaaggagaagaccgagtgcctgcagaaggagagcgagaagctggagagcgtgaacgccgagctgaaggcccagatcgaggagctgaagaacgagaagcagcacctgatctacatgctgaacctgcacagacccacctgcatcgtgagagcccagaacggcagaacccccgaggacgagagaaacctgttcatccagcagatcaagtag

SEQ ID NO: 71555 - DNA, 408 bp, synthetic construct
  misc_feature 1..408: note = Description of Artificial Sequence: Synthetic coding sequence
  source 1..408: mol_type = other DNA
atgatgctgcagcaccccggccaggtgagcgccagcgaggtgagcgccagcgccatcgtgccctgcctgagcccccccggcagcctggtgttcgaggacttcgccaacctgacccccttcgtgaaggaggagctgagattcgccatccagaacaagcacctgtgccacagaatgagcagcgccctggagagcgtgaccgtgagcgacagacccctgggcgtgagcatcaccaaggccgaggtggcccccgaggaggacgagagaaagaagagaagaagagagagaaacaagatcgccgccgccaagtgcagaaacaagaagaaggagaagaccgagtgcctgcagaagctgcccagacccttctgggtgcagaagacctgcatctgggccgtggacagctgcaagtag

SEQ ID NO: 71556 - DNA, 375 bp, synthetic construct
  misc_feature 1..375: note = Description of Artificial Sequence: Synthetic coding sequence
  source 1..375: mol_type = other DNA
atgagcagcgccctggagagcgtgaccgtgagcgacagacccctgggcgtgagcatcaccaaggccgaggtggcccccgaggaggacgagagaaagaagagaagaagagagagaaacaagatcgccgccgccaagtgcagaaacaagaagaaggagaagaccgagtgcctgcagaaggagagcgagaagctggagagcgtgaacgccgagctgaaggcccagatcgaggagctgaagaacgagaagcagcacctgatctacatgctgaacctgcacagacccacctgcatcgtgagagcccagaacggcagaacccccgaggacgagagaaacctgttcatccagcagatcaaggagggcaccctgcagagctag

SEQ ID NO: 71557 - DNA, 546 bp, synthetic construct; identical to SEQ ID NO: 71553
  misc_feature 1..546: note = Description of Artificial Sequence: Synthetic coding sequence
  source 1..546: mol_type = other DNA

SEQ ID NO: 71558 - DNA, 408 bp, synthetic construct; identical to SEQ ID NO: 71555
  misc_feature 1..408: note = Description of Artificial Sequence: Synthetic coding sequence
  source 1..408: mol_type = other DNA

SEQ ID NO: 71559 - DNA, 1056 bp, synthetic construct
  misc_feature 1..1056: note = Description of Artificial Sequence: Synthetic coding sequence
  source 1..1056: mol_type = other DNA
atgaccgagatgagcttcctgagcagcgaggtgctggtgggcgacctgatgagccccttcgaccagagcggcctgggcgccgaggagagcctgggcctgctggacgactacctggaggtggccaagcacttcaagccccacggcttcagcagcgacaaggccaaggccggcagcagcgagtggctggccgtggacggcctggtgagccccagcaacaacagcaaggaggacgccttcagcggcaccgactggatgctggagaagatggacctgaaggagttcgacctggacgccctgctgggcatcgacgacctggagaccatgcccgacgacctgctgaccaccctggacgacacctgcgacctgttcgcccccctggtgcaggagaccaacaagcagcccccccagaccgtgaaccccatcggccacctgcccgagagcctgaccaagcccgaccaggtggcccccttcaccttcctgcagcccctgcccctgagccccggcgtgctgagcagcacccccgaccacagcttcagcctggagctgggcagcgaggtggacatcaccgagggcgacagaaagcccgactacaccgcctacgtggccatgatcccccagtgcatcaaggaggaggacacccccagcgacaacgacagcggcatctgcatgagccccgagagctacctgggcagcccccagcacagccccagcaccagaggcagccccaacagaagcctgcccagccccggcgtgctgtgcggcagcgccagacccaagccctacgacccccccggcgagaagatggtggccgccaaggtgaagggcgagaagctggacaagaagctgaagaagatggagcagaacaagaccgccgccaccagatacagacagaagaagagagccgagcaggaggccctgaccggcgagtgcaaggagctggagaagaagaacgaggccctgaaggagagagccgacagcctggccaaggagatccagtacctgaaggacctgatcgaggaggtgagaaaggccagaggcaagaagagagtgccctag

SEQ ID NO: 71560 - DNA, 1056 bp, synthetic construct; identical to SEQ ID NO: 71559
  misc_feature 1..1056: note = Description of Artificial Sequence: Synthetic coding sequence
  source 1..1056: mol_type = other DNA

SEQ ID NO: 71561 - DNA, 1056 bp, synthetic construct; identical to SEQ ID NO: 71559
  misc_feature 1..1056: note = Description of Artificial Sequence: Synthetic coding sequence
  source 1..1056: mol_type = other DNA

SEQ ID NO: 71562 - DNA, 849 bp, synthetic construct
  misc_feature 1..849: note = Description of Artificial Sequence: Synthetic coding sequence
  source 1..849: mol_type = other DNA
atgagcctgctggccaccctgggcctggagctggacagagccctgctgcccgccagcggcctgggctggctggtggactacggcaagctgccccccgcccccgcccccctggccccctacgaggtgctgggcggcgccctggagggcggcctgcccgtgggcggcgagcccctggccggcgacggcttcagcgactggatgaccgagagagtggacttcaccgccctgctgcccctggagccccccctgccccccggcaccctgccccagcccagccccaccccccccgacctggaggccatggccagcctgctgaagaaggagctggagcagatggaggacttcttcctggacgccccccccctgcccccccccagccccccccccctgccccccccccccctgccccccgcccccagcctgcccctgagcctgcccagcttcgacctgccccagccccccgtgctggacaccctggacctgctggccatctactgcagaaacgaggccggccaggaggaggtgggcatgccccccctgccccccccccagcagccccccccccccagccccccccagcccagcagactggccccctacccccaccccgccaccaccagaggcgacagaaagcagaagaagagagaccagaacaagagcgccgccctgagatacagacagagaaagagagccgagggcgaggccctggagggcgagtgccagggcctggaggccagaaacagagagctgaaggagagagccgagagcgtggagagagagatccagtacgtgaaggacctgctgatcgaggtgtacaaggccagaagccagagaaccagaagctgctag

SEQ ID NO: 71563 - DNA, 2013 bp, synthetic construct
  misc_feature 1..2013: note = Description of Artificial Sequence: Synthetic coding sequence
  source 1..2013: mol_type = other DNA
atgggcgagcccgccggcgtggccggcaccatggagagccccttcagccccggcctgttccacagactggacgaggactgggacagcgccctgttcgccgagctgggctacttcaccgacaccgacgagctgcagctggaggccgccaacgagacctacgagaacaacttcgacaacctggacttcgacctggacctgatgccctgggagagcgacatctgggacatcaacaaccagatctgcaccgtgaaggacatcaaggccgagccccagcccctgagccccgccagcagcagctacagcgtgagcagccccagaagcgtggacagctacagcagcacccagcacgtgcccgaggagctggacctgagcagcagcagccagatgagccccctgagcctgtacggcgagaacagcaacagcctgagcagcgccgagcccctgaaggaggacaagcccgtgaccggccccagaaacaagaccgagaacggcctgacccccaagaagaagatccaggtgaacagcaagcccagcatccagcccaagcccctgctgctgcccgccgcccccaagacccagaccaacagcagcgtgcccgccaagaccatcatcatccagaccgtgcccaccctgatgcccctggccaagcagcagcccatcatcagcctgcagcccgcccccaccaagggccagaccgtgctgctgagccagcccaccgtggtgcagctgcaggcccccggcgtgctgcccagcgcccagcccgtgctggccgtggccggcggcgtgacccagctgcccaaccacgtggtgaacgtggtgcccgcccccagcgccaacagccccgtgaacggcaagctgagcgtgaccaagcccgtgctgcagagcaccatgagaaacgtgggcagcgacatcgccgtgctgagaagacagcagagaatgatcaagaacagagagagcgcctgccagagcagaaagaagaagaaggagtacatgctgggcctggaggccagactgaaggccgccctgagcgagaacgagcagctgaagaaggagaacggcaccctgaagagacagctggacgaggtggtgagcgagaaccagagactgaaggtgcccagccccaagagaagagtggtgtgcgtgatgatcgtgctggccttcatcatcctgaactacggccccatgagcatgctggagcaggacagcagaagaatgaaccccagcgtgagccccgccaaccagagaagacacctgctgggcttcagcgccaaggaggcccaggacaccagcgacggcatcatccagaagaacagctacagatacgaccacagcgtgagcaacgacaaggccctgatggtgctgaccgaggagcccctgctgtacatccccccccccccctgccagcccctgatcaacaccaccgagagcctgagactgaaccacgagctgagaggctgggtgcacagacacgaggtggagagaaccaagagcagaagaatgaccaacaaccagcagaagaccagaatcctgcagggcgccctggagcagggcagcaacagccagctgatggccgtgcagtacaccgagaccaccagcagcatcagcagaaacagcggcagcgagctgcaggtgtactacgccagccccagaagctaccaggacttcttcgaggccatcagaagaagaggcgacaccttctacgtggtgagcttcagaagagaccacctgctgctgcccgccaccacccacaacaagaccaccagacccaagatgagcatcgtgctgcccgccatcaacatcaacgagaacgtgatcaacggccaggactacgaggtgatgatgcagatcgactgccaggtgatggacaccagaatcctgcacatcaagagcagcagcgtgcccccctacctgagagaccagcagagaaaccagaccaacaccttcttcggcagcccccccgccgccaccgaggccacccacgtggtgagcaccatccccgagagcctgcagtag

SEQ ID NO: 71564 - DNA, 2112 bp, synthetic construct
  misc_feature 1..2112: note = Description of Artificial Sequence: Synthetic coding sequence
  source 1..2112: mol_type = other DNA
atggccgagctgatgctgctgagcgagatcgccgaccccaccagattcttcaccgacaacctgctgagccccgaggactggggcctgcagaacagcaccctgtacagcggcctggacgaggtggccgaggagcagacccagctgttcagatgccccgagcaggacgtgcccttcgacggcagcagcctggacgtgggcatggacgtgagccccagcgagcccccctgggagctgctgcccatcttccccgacctgcaggtgaagagcgagcccagcagcccctgcagcagcagcagcctgagcagcgagagcagcagactgagcaccgagcccagcagcgaggccctgggcgtgggcgaggtgctgcacgtgaagaccgagagcctggccccccccctgtgcctgctgggcgacgaccccaccagcagcttcgagaccgtgcagatcaacgtgatccccaccagcgacgacagcagcgacgtgcagaccaagatcgagcccgtgagcccctgcagcagcgtgaacagcgaggccagcctgctgagcgccgacagcagcagccaggccttcatcggcgaggaggtgctggaggtgaagaccgagagcctgagccccagcggctgcctgctgtgggacgtgcccgcccccagcctgggcgccgtgcagatcagcatgggccccagcctggacggcagcagcggcaaggccctgcccaccagaaagccccccctgcagcccaagcccgtggtgctgaccaccgtgcccatgcccagcagagccgtgccccccagcaccaccgtgctgctgcagagcctggtgcagcccccccccgtgagccccgtggtgctgatccagggcgccatcagagtgcagcccgagggccccgcccccagcctgcccagacccgagagaaagagcatcgtgcccgcccccatgcccggcaacagctgcccccccgaggtggacgccaagctgctgaagagacagcagagaatgatcaagaacagagagagcgcctgccagagcagaagaaagaagaaggagtacctgcagggcctggaggccagactgcaggccgtgctggccgacaaccagcagctgagaagagagaacgccgccctgagaagaagactggaggccctgctggccgagaacagcgagctgaagctgggcagcggcaacagaaaggtggtgtgcatcatggtgttcctgctgttcatcgccttcaacttcggccccgtgagcatcagcgagccccccagcgcccccatcagccccagaatgaacaagggcgagccccagcccagaagacacctgctgggcttcagcgagcaggagcccgtgcagggcgtggagcccctgcagggcagcagccagggccccaaggagccccagcccagccccaccgaccagcccagcttcagcaacctgaccgccttccccggcggcgccaaggagctgctgctgagagacctggaccagctgttcctgagcagcgactgcagacacttcaacagaaccgagagcctgagactggccgacgagctgagcggctgggtgcagagacaccagagaggcagaagaaagatcccccagagagcccaggagagacagaagagccagcccagaaagaagagcccccccgtgaaggccgtgcccatccagccccccggcccccccgagagagacagcgtgggccagctgcagctgtacagacaccccgacagaagccagcccgccttcctggacgccatcgacagaagagaggacaccttctacgtggtgagcttcagaagagaccacctgctgctgcccgccatcagccacaacaagaccagcagacccaagatgagcctggtgatgcccgccatggcccccaacgagaccctgagcggcagaggcgcccccggcgactacgaggagatgatgcagatcgagtgcgaggtgatggacaccagagtgatccacatcaagaccagcaccgtgccccccagcctgagaaagcagcccagccccacccccggcaacgccaccggcggccccctgcccgtgagcgccgccagccaggcccaccaggccagccaccagcccctgtacctgaaccacccctag

SEQ ID NO: 71565 - DNA, 669 bp, synthetic construct
  misc_feature 1..669: note = Description of Artificial Sequence: Synthetic coding sequence
  source 1..669: mol_type = other DNA
atggccgagctgatgctgctgagcgagatcgccgaccccaccagattcttcaccgacaacctgctgagccccgaggactggggcctgcagaacagcaccctgtacagcggcctggacgaggtggccgaggagcagacccagctgttcagatgccccgagcaggacgtgcccttcgacggcagcagcctggacgtgggcatggacgtgagccccaccgaccagcccagcttcagcaacctgaccgccttccccggcggcgccaaggagctgctgctgagagacctggaccagctgttcctgagcagcgactgcagacacttcaacagaaccgagagcctgagactggccgacgagctgagcggctgggtgcagagacaccagagaggcagaagaaagatcccccagagagcccaggagagacagaagagccagcccagaaagaagagcccccccgtgaaggccgtgcccatccagccccccggcccccccgagagagacagcgtgggccagctgcagctgtacagacaccccgacagaagccagcccgccttcctggacgccatcgacagaagagaggacaccttctacgtggtgagcttcagaagaaccacctgctgcagccagcccagcgccaccaccagaccccccggccccagatgcccctggtag

SEQ ID NO: 71566 - DNA, 2103 bp, synthetic construct
  misc_feature 1..2103: note = Description of Artificial Sequence: Synthetic coding sequence
  source 1..2103: mol_type = other DNA
atggccgagctgatgctgctgagcgagatcgccgaccccaccagattcttcaccgacaacctgctgagccccgaggactgggacagcaccctgtacagcggcctggacgaggtggccgaggagcagacccagctgttcagatgccccgagcaggacgtgcccttcgacggcagcagcctggacgtgggcatggacgtgagccccagcgagcccccctgggagctgctgcccatcttccccgacctgcaggtgaagagcgagcccagcagcccctgcagcagcagcagcctgagcagcgagagcagcagactgagcaccgagcccagcagcgaggccctgggcgtgggcgaggtgctgcacgtgaagaccgagagcctggccccccccctgtgcctgctgggcgacgaccccaccagcagcttcgagaccgtgcagatcaacgtgatccccaccagcgacgacagcagcgacgtgcagaccaagatcgagcccgtgagcccctgcagcagcgtgaacagcgaggccagcctgctgagcgccgacagcagcagccaggccttcatcggcgaggaggtgctggaggtgaagaccgagagcctgagccccagcggctgcctgctgtgggacgtgcccgcccccagcctgggcgccgtgcagatcagcatgggccccagcctggacggcagcagcggcaaggccctgcccaccagaaagccccccctgcagcccaagcccgtggtgctgaccaccgtgcccatgcccagcagagccgtgccccccagcaccaccgtgctgctgcagagcctggtgcagcccccccccgtgagccccgtggtgctgatccagggcgccatcagagtgcagcccgagggccccgcccccagcctgcccagacccgagagaaagagcatcgtgcccgcccccatgcccggcaacagctgcccccccgaggtggacgccaagctgctgaagagacagcagagaatgatcaagaacagagagagcgcctgccagagcagaagaaagaagaaggagtacctgcagggcctggaggccagactgcaggccgtgctggccgacaaccagcagctgagaagagagaacgccgccctgagaagaagactggaggccctgctggccgagaacagcgagctgaagctgggcagcggcaacagaaaggtggtgtgcatcatggtgttcctgctgttcatcgccttcaacttcggccccgtgagcatcagcgagccccccagcgcccccatcagccccagaatgaacaagggcgagccccagcccagaagacacctgctgggcttcagcgagcaggagcccgtgcagggcgtggagcccctgcagggcagcagccagggccccaaggagccccagcccagccccaccgaccagcccagcttcagcaacctgaccgccttccccggcggcgccaaggagctgctgctgagagacctggaccagctgttcctgagcagcgactgcagacacttcaacagaaccgagagcctgagactggccgacgagctgagcggctgggtgcagagacaccagagaggcagaagaaagatcccccagagagcccaggagagacagaagagccagcccagaaagaagagcccccccgtgaaggccgtgcccatccagccccccggcccccccgagagagacagcgtgggccagctgcagctgtacagacaccccgacagaagccagcccgccttcctggacgccatcgacagaagagaggacaccttctacgtggtgagcttcagaagagaccacctgctgctgcccgccatcagccacaacaagaccagcagacccaagatgagcctggtgatgcccgccatggcccccaacgagaccctgagcggcagaggcgcccccggcgactacgaggagatgatgcagatcgagtgcgaggtgatggacaccagagtgatccacatcaagaccagcaccgtgccccccagcctgagaaagcagcccagccccacccccggcaacgccaccggcggccccctgcccgtgagcgccgccagccaggcccaccaggccagccaccagcccctgtacctgaaccacccctag

SEQ ID NO: 71567 - DNA, 2112 bp, synthetic construct; identical to SEQ ID NO: 71564
  misc_feature 1..2112: note = Description of Artificial Sequence: Synthetic coding sequence
  source 1..2112: mol_type = other DNA

SEQ ID NO: 71568 - DNA, 2103 bp, synthetic construct; identical to SEQ ID NO: 71566
  misc_feature 1..2103: note = Description of Artificial Sequence: Synthetic coding sequence
  source 1..2103: mol_type = other DNA

SEQ ID NO: 71569 - DNA, 429 bp, synthetic construct
  misc_feature 1..429: note = Description of Artificial Sequence: Synthetic coding sequence
  source 1..429: mol_type = other DNA
tgacagcccagccccaccgaccagcccagcttcagcaacctgaccgccttccccggcggcgccaaggagctgctgctgagagacctggaccagctgttcctgagcagcgactgcagacacttcaacagaaccgagagcctgagactggccgacgagctgagcggctgggtgcagagacaccagagaggcagaagaaagatcccccagagagcccaggagagacagagcctggacaccagccccagcagaagcctgagccacggcagaagccacctgcagctgagacagagccccagcaaccccctggacccccagaagggcatcctgtgggccagctgcaactacatcgccacccagaccgtgagaagccagcacagctggatgcagctgaccgacggcaagacccacttcatgctgagcctgagctag

SEQ ID NO: 71570 - DNA, 429 bp, synthetic construct; identical to SEQ ID NO: 71569
  misc_feature 1..429: note = Description of Artificial Sequence: Synthetic coding sequence
  source 1..429: mol_type = other DNA

SEQ ID NO: 71571 - DNA, 2112 bp, synthetic construct; identical to SEQ ID NO: 71564
  misc_feature 1..2112: note = Description of Artificial Sequence: Synthetic coding sequence
  source 1..2112: mol_type = other DNA

SEQ ID NO: 71572 - DNA, 2112 bp, synthetic construct; identical to SEQ ID NO: 71564
  misc_feature 1..2112: note = Description of Artificial Sequence: Synthetic coding sequence
  source 1..2112: mol_type = other DNA

SEQ ID NO: 71573 - DNA, 2103 bp, synthetic construct; identical to SEQ ID NO: 71566
  misc_feature 1..2103: note = Description of Artificial Sequence: Synthetic coding sequence
  source 1..2103: mol_type = other DNA

SEQ ID NO: 71574 - DNA, 429 bp, synthetic construct; identical to SEQ ID NO: 71569
  misc_feature 1..429: note = Description of Artificial Sequence: Synthetic coding sequence
  source 1..429: mol_type = other DNA

SEQ ID NO: 71575 - DNA, 2103 bp, synthetic construct; identical to SEQ ID NO: 71566
  misc_feature 1..2103: note = Description of Artificial Sequence: Synthetic coding sequence
  source 1..2103: mol_type = other DNA

SEQ ID NO: 71576 - DNA, 429 bp, synthetic construct; identical to SEQ ID NO: 71569
  misc_feature 1..429: note = Description of Artificial Sequence: Synthetic coding sequence
  source 1..429: mol_type = other DNA

SEQ ID NO: 71577 - DNA, 669 bp, synthetic construct; identical to SEQ ID NO: 71565
  misc_feature 1..669: note = Description of Artificial Sequence: Synthetic coding sequence
  source 1..669: mol_type = other DNA

SEQ ID NO: 71578 - DNA, 669 bp, synthetic construct; identical to SEQ ID NO: 71565
  misc_feature 1..669: note = Description of Artificial Sequence: Synthetic coding sequence
  source 1..669: mol_type = other DNA

SEQ ID NO: 71579 - DNA, 669 bp, synthetic construct; identical to SEQ ID NO: 71565
  misc_feature 1..669: note = Description of Artificial Sequence: Synthetic coding sequence
  source 1..669: mol_type = other DNA

SEQ ID NO: 71580 - DNA, 924 bp, synthetic construct
  misc_feature 1..924: note = Description of Artificial Sequence: Synthetic coding sequence
  source 1..924: mol_type = other DNA
atgggcgacgacagacccttcgtgtgcaacgcccccggctgcggccagagattcaccaacgaggaccacctggccgtgcacaagcacaagcacgagatgaccctgaagttcggccccgccagaaccgacagcgtgatcatcgccgaccagacccccacccccaccagattcctgaagaactgcgaggaggtgggcctgttcaacgagctggccagcagcttcgagcacgagttcaagaaggccgccgacgaggacgagaagaaggccgccgccggccccctggacatgagcctgcccagcacccccgacatcaagatcaaggaggaggagcccgtggaggtggacagcagcccccccgacagccccgccagcagcccctgcagcccccccctgaaggagaagagccccgcccagcccacccccagcaccggcggcagaagaagaagaaccgtggacgaggaccccgacgagagaagacagagattcctggagagaaacagagccgccgccagcagatgcagacagaagagaaagctgtgggtgagcagcctggagaagaaggccgaggagctgaccagccagaacatccagctgagcaacgaggtgaccctgctgagaaacgaggtggcccagctgaagcagctgctgctggcccacaaggactgccccgtgaccgccctgcagaagaagacccagggctacctggagagccccaaggagagcagcgagcccaccggcagccccgcccccgtgatccagcacagcagcgccaccgcccccagcaacggcctgagcgtgagaagcgccgccgaggccgtggccaccagcgtgctgacccagatggccagccagagaaccgagctgagcatgcccatccagagccacgtgatcatgaccccccagagccagagcgccggcagatag

SEQ ID NO: 71581 - DNA, 1485 bp, synthetic construct
  misc_feature 1..1485: note = Description of Artificial Sequence: Synthetic coding sequence
  source 1..1485: mol_type = other DNA
atgggcgacgacagacccttcgtgtgcaacgcccccggctgcggccagagattcaccaacgaggaccacctggccgtgcacaagcacaagcacgagatgaccctgaagttcggccccgccagaaccgacagcgtgatcatcgccgaccagacccccacccccaccagattcctgaagaactgcgaggaggtgggcctgttcaacgagctggccagcagcttcgagcacgagttcaagaaggccgccgacgaggacgagaagaaggccagaagcagaaccgtggccaagaagctggtggccgccgccggccccctggacatgagcctgcccagcacccccgacatcaagatcaaggaggaggagcccgtggaggtggacagcagcccccccgacagccccgccagcagcccctgcagcccccccctgaaggagaaggaggtgacccccaagcccgtgctgatcagcacccccacccccaccatcgtgagacccggcagcctgcccctgcacctgggctacgaccccctgcaccccaccctgcccagccccaccagcgtgatcacccaggccccccccagcaacagacagatgggcagccccaccggcagcctgcccctggtgatgcacctggccaacggccagaccatgcccgtgctgcccggcccccccgtgcagatgcccagcgtgatcagcctggccagacccgtgagcatggtgcccaacatccccggcatccccggcccccccgtgaacagcagcggcagcatcagccccagcggccaccccatccccagcgaggccaagatgagactgaaggccaccctgacccaccaggtgagcagcatcaacggcggctgcggcatggtggtgggcaccgccagcaccatggtgaccgccagacccgagcagagccagatcctgatccagcaccccgacgcccccagccccgcccagccccaggtgagccccgcccagcccacccccagcaccggcggcagaagaagaagaaccgtggacgaggaccccgacgagagaagacagagattcctggagagaaacagagccgccgccagcagatgcagacagaagagaaagctgtgggtgagcagcctggagaagaaggccgaggagctgaccagccagaacatccagctgagcaacgaggtgaccctgctgagaaacgaggtggcccagctgaagcagctgctgctggcccacaaggactgccccgtgaccgccctgcagaagaagacccagggctacctggagagccccaaggagagcagcgagcccaccggcagccccgcccccgtgatccagcacagcagcgccaccgcccccagcaacggcctgagcgtgagaagcgccgccgaggccgtggccaccagcgtgctgacccagatggccagccagagaaccgagctgagcatgcccatccagagccacgtgatcatgaccccccagagccagagcgccggcagatag

SEQ ID NO: 71582 - DNA, 1389 bp, synthetic construct
  misc_feature 1..1389: note = Description of Artificial Sequence: Synthetic coding sequence
  source 1..1389: mol_type = other DNA
atgggcgacgacagacccttcgtgtgcaacgcccccggctgcggccagagattcaccaacgaggaccacctggccgtgcacaagcacaagcacgagatgaccctgaagttcggccccgccagaaccgacagcgtgatcatcgccgaccagacccccacccccaccagattcctgaagaactgcgaggaggtgggcctgttcaacgagctggccagcagcttcgagcacgagttcaagaaggccgccgacgaggacgagaagaaggccgccgccggccccctggacatgagcctgcccagcacccccgacatcaagatcaaggaggaggagcccgtggaggaggtgacccccaagcccgtgctgatcagcacccccacccccaccatcgtgagacccggcagcctgcccctgcacctgggctacgaccccctgcaccccaccctgcccagccccaccagcgtgatcacccaggccccccccagcaacagacagatgggcagccccaccggcagcctgcccctggtgatgcacctggccaacggccagaccatgcccgtgctgcccggcccccccgtgcagatgcccagcgtgatcagcctggccagacccgtgagcatggtgcccaacatccccggcatccccggcccccccgtgaacagcagcggcagcatcagccccagcggccaccccatccccagcgaggccaagatgagactgaaggccaccctgacccaccaggtgagcagcatcaacggcggctgcggcatggtggtgggcaccgccagcaccatggtgaccgccagacccgagcagagccagatcctgatccagcaccccgacgcccccagccccgcccagccccaggtgagccccgcccagcccacccccagcaccggcggcagaagaagaagaaccgtggacgaggaccccgacgagagaagacagagattcctggagagaaacagagccgccgccagcagatgcagacagaagagaaagctgtgggtgagcagcctggagaagaaggccgaggagctgaccagccagaacatccagctgagcaacgaggtgaccctgctgagaaacgaggtggcccagctgaagcagctgctgctggcccacaaggactgccccgtgaccgccctgcagaagaagacccagggctacctggagagccccaaggagagcagcgagcccaccggcagccccgcccccgtgatccagcacagcagcgccaccgcccccagcaacggcctgagcgtgagaagcgccgccgaggccgtggccaccagcgtgctgacccagatggccagccagagaaccgagctgagcatgcccatccagagccacgtgatcatgaccccccagagccagagcgccggcagatag

SEQ ID NO: 71583 - DNA, 1452 bp, synthetic construct
  misc_feature 1..1452: note = Description of Artificial Sequence: Synthetic coding sequence
  source 1..1452: mol_type = other DNA
atgggcgacgacagacccttcgtgtgcaacgcccccggctgcggccagagattcaccaacgaggaccacctggccgtgcacaagcacaagcacgagatgaccctgaagttcggccccgccagaaccgacagcgtgatcatcgccgaccagacccccacccccaccagattcctgaagaactgcgaggaggtgggcctgttcaacgagctggccagcagcttcgagcacgagttcaagaaggccgccgacgaggacgagaagaaggccgccgccggccccctggacatgagcctgcccagcacccccgacatcaagatcaaggaggaggagcccgtggaggtggacagcagcccccccgacagccccgccagcagcccctgcagcccccccctgaaggagaaggaggtgacccccaagcccgtgctgatcagcacccccacccccaccatcgtgagacccggcagcctgcccctgcacctgggctacgaccccctgcaccccaccctgcccagccccaccagcgtgatcacccaggccccccccagcaacagacagatgggcagccccaccggcagcctgcccctggtgatgcacctggccaacggccagaccatgcccgtgctgcccggcccccccgtgcagatgcccagcgtgatcagcctggccagacccgtgagcatggtgcccaacatccccggcatccccggcccccccgtgaacagcagcggcagcatcagccccagcggccaccccatccccagcgaggccaagatgagactgaaggccaccctgacccaccaggtgagcagcatcaacggcggctgcggcatggtggtgggcaccgccagcaccatggtgaccgccagacccgagcagagccagatcctgatccagcaccccgacgcccccagccccgcccagccccaggtgagccccgcccagcccacccccagcaccggcggcagaagaagaagaaccgtggacgaggaccccgacgagagaagacagagattcctggagagaaacagagccgccgccagcagatgcagacagaagagaaagctgtgggtgagcagcctggagaagaaggccgaggagctgaccagccagaacatccagctgagcaacgaggtgaccctgctgagaaacgaggtggcccagctgaagcagctgctgctggcccacaaggactgccccgtgaccgccctgcagaagaagacccagggctacctggagagccccaaggagagcagcgagcccaccggcagccccgcccccgtgatccagcacagcagcgccaccgcccccagcaacggcctgagcgtgagaagcgccgccgaggccgtggccaccagcgtgctgacccagatggccagccagagaaccgagctgagcatgcccatccagagccacgtgatcatgaccccccagagccagagcgccggcagatag

SEQ ID NO: 71584 - DNA, 1452 bp, synthetic construct; identical to SEQ ID NO: 71583
  misc_feature 1..1452: note = Description of Artificial Sequence: Synthetic coding sequence
  source 1..1452: mol_type = other DNA

SEQ ID NO: 71585 - DNA, 1485 bp, synthetic construct; identical to SEQ ID NO: 71581
  misc_feature 1..1485: note = Description of Artificial Sequence: Synthetic coding sequence
  source 1..1485: mol_type = other DNA

SEQ ID NO: 71586 - DNA, 354 bp, synthetic construct
  misc_feature 1..354: note = Description of Artificial Sequence: Synthetic coding sequence
  source 1..354: mol_type = other DNA
atgggcgacgacagacccttcgtgtgcaacgcccccggctgcggccagagattcaccaacgaggaccacctggccgtgcacaagcacaagcacgagatgaccctgaagttcggccccgccagaaccgacagcgtgatcatcgccgaccagacccccacccccaccagattcctgaagaactgcgaggaggtgggcctgttcaacgagctggccagcagcttcgagcacgagttcaagaaggccgccgacgaggacgagaagaaggccagaagcagaaccgtggccaagaagctggtggtgttcagacccagactgttcctgctgtgcttcggcatcatcttcctgatcggctag

SEQ ID NO: 71587 - DNA, 354 bp, synthetic construct; identical to SEQ ID NO: 71586
  misc_feature 1..354: note = Description of Artificial Sequence: Synthetic coding sequence
  source 1..354: mol_type = other DNA

SEQ ID NO: 71588 - DNA, 3813 bp, synthetic construct
  misc_feature 1..3813: note = Description of Artificial Sequence: Synthetic coding sequence
  source 1..3813: mol_type = other DNA
atggacagcctggaggagccccagaagaaggtgttcaaggccagaaagaccatgagagtgagcgacagacagcagctggaggccgtgtacaaggtgaaggaggagctgctgaagaccgacgtgaagctgctgaacggcaaccacgagaacggcgacctggaccccaccagccccctggagaacatggactacatcaaggacaaggaggaggtgaacggcatcgaggagatctgcttcgaccccgagggcagcaaggccgagtggaaggagaccccctgcatcctgagcgtgaacgtgaagaacaagcaggacgacgacctgaactgcgagcccctgagcccccacaacatcacccccgagcccgtgagcaagctgcccgccgagcccgtgagcggcgaccccgcccccggcgacctggacgccggcgaccccgccagcggcgtgctggccagcggcgacagcaccagcggcgaccccaccagcagcgagcccagcagcagcgacgccgccagcggcgacgccaccagcggcgacgcccccagcggcgacgtgagccccggcgacgccaccagcggcgacgccaccgccgacgacctgagcagcggcgaccccaccagcagcgaccccatccccggcgagcccgtgcccgtggagcccatcagcggcgactgcgccgccgacgacatcgccagcagcgagatcaccagcgtggacctggccagcggcgcccccgccagcaccgaccccgccagcgacgacctggccagcggcgacctgagcagcagcgagctggccagcgacgacctggccaccggcgagctggccagcgacgagctgaccagcgagagcaccttcgacagaaccttcgagcccaagagcgtgcccgtgtgcgagcccgtgcccgagatcgacaacatcgagcccagcagcaacaaggacgacgacttcctggagaagaacggcgccgacgagaagctggagcagatccagagcaaggacagcctggacgagaagaacaaggccgacaacaacatcgacgccaacgaggagaccctggagaccgacgacaccaccatctgcagcgacagaccccccgagaacgagaagaaggtggaggaggacatcatcaccgagctggccctgggcgaggacgccatcagcagcagcatggagatcgaccagggcgagaagaacgaggacgagaccagcgccgacctggtggagaccatcaacgagaacgtgatcgaggacaacaagagcgagaacatcctggagaacaccgacagcatggagaccgacgagatcatccccatcctggagaagctggcccccagcgaggacgagctgacctgcttcagcaagaccagcctgctgcccatcgacgagaccaaccccgacctggaggagaagatggagagcagcttcggcagccccagcaagcaggagagcagcgagagcctgcccaaggaggccttcctggtgctgagcgacgaggaggacatcagcggcgagaaggacgagagcgaggtgatcagccagaacgagacctgcagccccgccgaggtggagagcaacgagaaggacaacaagcccgaggaggaggagcaggtgatccacgaggacgacgagagacccagcgagaagaacgagttcagcagaagaaagagaagcaagagcgaggacatggacaacgtgcagagcaagagaagaagatacatggaggaggagtacgaggccgagttccaggtgaagatcaccgccaagggcgacatcaaccagaagctgcagaaggtgatccagtggctgctggaggagaagctgtgcgccctgcagtgcgccgtgttcgacaagaccctggccgagctgaagaccagagtggagaagatcgagtgcaacaagagacacaagaccgtgctgaccgagctgcaggccaagatcgccagactgaccaagagattcgaggccgccaaggaggacctgaagaagagacacgagcacccccccaacccccccgtgagccccggcaagaccgtgaacgacgtgaacagcaacaacaacatgagctacagaaacgccggcaccgtgagacagatgctggagagcaagagaaacgtgagcgagagcgccccccccagcttccagacccccgtgaacaccgtgagcagcaccaacctggtgaccccccccgccgtggtgagcagccagcccaagctgcagacccccgtgaccagcggcagcctgaccgccaccagcgtgctgcccgcccccaacaccgccaccgtggtggccaccacccaggtgcccagcggcaacccccagcccaccatcagcctgcagcccctgcccgtgatcctgcacgtgcccgtggccgtgagcagccagccccagctgctgcagagccaccccggcaccctggtgaccaaccagcccagcggcaacgtggagttcatcagcgtgcagagcccccccaccgtgagcggcctgaccaagaaccccgtgagcctgcccagcctgcccaaccccaccaagcccaacaacgtgcccagcgtgcccagccccagcatccagagaaaccccaccgccagcgccgcccccctgggcaccaccctggccgtgcaggccgtgcccaccgcccacagcatcgtgcaggccaccagaaccagcctgcccaccgtgggccccagcggcctgtacagccccagcaccaacagaggccccatccagatgaagatccccatcagcgccttcagcaccagcagcgccgccgagcagaacagcaacaccacccccagaatcgagaaccagaccaacaagaccatcgacgccagcgtgagcaagaaggccgccgacagcaccagccagtgcggcaaggccaccggcagcgacagcagcggcgtgatcgacctgaccatggacgacgaggagagcggcgccagccaggaccccaagaagctgaaccacacccccgtgagcaccatgagcagcagccagcccgtgagcagacccctgcagcccatccagcccgccccccccctgcagcccagcggcgtgcccaccagcggccccagccagaccaccatccacctgctgcccaccgcccccaccaccgtgaacgtgacccacagacccgtgacccaggtgaccaccagactgcccgtgcccagagcccccgccaaccaccaggtggtgtacaccaccctgcccgccccccccgcccaggcccccctgagaggcaccgtgatgcaggcccccgccgtgagacaggtgaacccccagaacagcgtgaccgtgagagtgccccagaccaccacctacgtggtgaacaacggcctgaccctgggcagcaccggcccccagctgaccgtgcaccacagacccccccaggtgcacaccgagccccccagacccgtgcaccccgcccccctgcccgaggccccccagccccagagactgccccccgaggccgccagcaccagcctgccccagaagccccacctgaagctggccagagtgcagagccagaacggcatcgtgctgagctggagcgtgctggaggtggacagaagctgcgccaccgtggacagctaccacctgtacgcctaccacgaggagcccagcgccaccgtgcccagccagtggaagaagatcggcgaggtgaaggccctgcccctgcccatggcctgcaccctgacccagttcgtgagcggcagcaagtactacttcgccgtgagagccaaggacatctacggcagattcggccccttctgcgacccccagagcaccgacgtgatcagcagcacccagagcagctag

SEQ ID NO: 71589 - DNA, 1548 bp, synthetic construct
  misc_feature 1..1548: note = Description of Artificial Sequence: Synthetic coding sequence
  source 1..1548: mol_type = other DNA
atggacagcctggaggagccccagaagaaggtgttcaaggccagaaagaccatgagagtgagcgacagacagcagctggaggccgtgtacaaggtgaaggaggagctgctgaagaccgacgtgaagctgctgaacggcaaccacgagaacggcgacctggaccccaccagccccctggagaacatggactacatcaaggacaaggaggaggtgaacggcatcgaggagatctgcttcgaccccgagggcagcaaggccgagtggaaggagaccccctgcatcctgagcgtgaacgtgaagaacaagcaggacgacgacctgaactgcgagcccctgagcccccacaacatcacccccgagcccgtgagcaagctgcccgccgagcccgtgagcggcgaccccgcccccggcgacctggacgccggcgaccccgccagcggcgtgctggccagcggcgacagcaccagcggcgaccccaccagcagcgagcccagcagcagcgacgccgccagcggcgacgccaccagcggcgacgcccccagcggcgacgtgagccccggcgacgccaccagcggcgacgccaccgccgacgacctgagcagcggcgaccccaccagcagcgaccccatccccggcgagcccgtgcccgtggagcccatcagcggcgactgcgccgccgacgacatcgccagcagcgagatcaccagcgtggacctggccagcggcgcccccgccagcaccgaccccgccagcgacgacctggccagcggcgacctgagcagcagcgagctggccagcgacgacctggccaccggcgagctggccagcgacgagctgaccagcgagagcaccttcgacagaaccttcgagcccaagagcgtgcccgtgtgcgagcccgtgcccgagatcgacaacatcgagcccagcagcaacaaggacgacgacttcctggagaagaacggcgccgacgagaagctggagcagatccagagcaaggacagcctggacgagaagaacaaggccgacaacaacatcgacgccaacgaggagaccctggagaccgacgacaccaccatctgcagcgacagaccccccgagaacgagaagaaggtggaggaggacatcatcaccgagctggccctgggcgaggacgccatcagcagcagcatggagatcgaccagggcgagaagaacgaggacgagaccagcgccgacctggtggagaccatcaacgagaacgtgatcgaggacaacaagagcgagaacatcctggagaacaccgacagcatggagaccgacgagatcatccccatcctggagaagctggcccccagcgaggacgagctgacctgcttcagcaagaccagcctgctgcccatcgacgagaccaaccccgacctggaggagaagatggagagcagcttcggcagccccagcaagcaggagagcagcgagagcctgcccaaggaggccttcctggtgctgagcgacgaggaggacatcagcggcgagaaggacgagagcgaggtgatcagccagaacgagtag

SEQ ID NO: 71590 - DNA, 378 bp, synthetic construct
  misc_feature 1..378: note = Description of Artificial Sequence: Synthetic coding sequence
  source 1..378: mol_type = other DNA
atggacagcctggaggagccccagaagaaggtgttcaaggccagaaagaccatgagagtgagcgacagacagcagctggaggccgtgtacaaggtgaaggaggagctgctgaagaccgacgtgaagctgctgaacggcaaccacgagaacggcgacctggaccccaccagccccctggagaacatggactacatcaaggacaaggaggaggtgaacggcatcgaggagatctgcttcgaccccgagggcagcaaggccgagtggaaggagaccccctgcatcctgagcgtgaacgtgaagaacaagcaggacgacgacctgaactgcgagcccctgagcccccacaacatcacccccgagcccgtgagcaagctgtag

SEQ ID NO: 71591 - DNA, 459 bp, synthetic construct
  misc_feature 1..459: note = Description of Artificial Sequence: Synthetic coding sequence
  source 1..459: mol_type = other DNA
atggacagcctggaggagccccagaagaaggtgttcaaggccagaaagaccatgagagtgagcgacagacagcagctggaggccgtgtacaaggtgaaggaggagctgctgaagaccgacgtgaagctgctgaacggcaaccacgagaacggcgacctggaccccaccagccccctggagaacatggactacatcaaggacaaggaggaggtgaacggcatcgaggagatctgcttcgaccccgagggcagcaaggccgagtggaaggagaccccctgcatcctgagcgtgaacgtgaagaacaagcaggacgacgacctgaactgcgagcccctgagcccccacaacatcacccccgagcccgtgagcaagctgcccgccgagcccgtgagcggcgaccccgcccccggcgacctggacgccggcgaccccgccagcggcgtgctggccagcggctag

SEQ ID NO: 71592 - DNA, 312 bp, synthetic construct
  misc_feature 1..312: note = Description of Artificial Sequence: Synthetic coding sequence
  source 1..312: mol_type = other DNA
atggacagcctggaggagccccagaagaaggtgttcaaggccagaaagaccatgagagtgagcgacagacagcagctggaggccgtgtacaaggtgaaggaggagctgctgaagaccgacgtgaagctgctgaacggcaaccacgagaacggcgacctggaccccaccagccccctggagaacatggactacatcaaggacaaggaggaggtgaacggcatcgaggagatctgcttcgaccccgagggcagcaaggccgagtggaaggagaccccctgcatcctgagcgtgaacgtgaagaacaagcagtag

SEQ ID NO: 71593 - DNA, 270 bp, synthetic construct
  misc_feature 1..270: note = Description of Artificial Sequence: Synthetic coding sequence
  source 1..270: mol_type = other DNA
atggacagcctggaggagccccagaagaaggtgttcaaggccagaaagaccatgagagtgagcgacagacagcagctggaggccgtgtacaaggtgaaggaggagctgctgaagaccgacgtgaagctgctgaacggcaaccacgagaacggcgacctggaccccaccagccccctggagaacatggactacatcaaggacaaggaggaggtgaacggcatcgaggagatctgcttcgaccccgagggcagcaaggccgagtggaagtag

SEQ ID NO: 71594 - DNA, 534 bp, synthetic construct
  misc_feature 1..534: note = Description of Artificial Sequence: Synthetic coding sequence
  source 1..534: mol_type = other DNA
atggacagcctggaggagccccagaagaaggtgttcaaggccagaaagaccatgagagtgagcgacagacagcagctggaggccgtgtacaaggtgaaggaggagctgctgaagaccgacgtgaagctgctgaacggcaaccacgagaacggcgacctggaccccaccagccccctggagaacatggactacatcaaggacaaggaggaggtgaacggcatcgaggagatctgcttcgaccccgagggcagcaaggccgagtggaaggagaccccctgcatcctgagcgtgaacgtgaagaacaagcaggacgacgacctgaactgcgagcccctgagcccccacaacatcacccccgagcccgtgagcaagctgcccgccgagcccgtgagcggcgaccccgcccccggcgacctggacgccggcgaccccgccagcggcgtgctggccagcggcgacagcaccagcggcgaccccaccagcagcgagcccagcagcagcgacgccgccagcggcgacgccaccagcggctag

SEQ ID NO: 71595 - DNA, 3813 bp, synthetic construct; identical to SEQ ID NO: 71588
  misc_feature 1..3813: note = Description of Artificial Sequence: Synthetic coding sequence
  source 1..3813: mol_type = other DNA

SEQ ID NO: 71596 - DNA, 510 bp, synthetic construct
  misc_feature 1..510: note = Description of Artificial Sequence: Synthetic coding sequence
  source 1..510: mol_type = other DNA
atggacagcctggaggagccccagaagaaggtgttcaaggccagaaagaccatgagagtgagcgacagacagcagctggaggccgtgtacaaggtgaaggaggagctgctgaagaccgacgtgaagctgctgaacggcaaccacgagaacggcgacctggaccccaccagccccctggagaacatggactacatcaaggacaaggaggaggtgaacggcatcgaggagatctgcttcgaccccgagggcagcaaggccgagtggaaggagaccccctgcatcctgagcgtgaacgtgaagaacaagcaggacgacgacctgaactgcgagcccctgagcccccacaacatcacccccgagcccgtgagcaagctgcccgccgagcccgtgagcggcgaccccgcccccggcgacctggacgccggcgaccccgccagcggcgtgctggccagcggcgacagcaccagcggcgaccccaccagcagcgagcccagcagcagcgacgcctag

SEQ ID NO: 71597 - DNA, 99 bp, synthetic construct
  misc_feature 1..99: note = Description of Artificial Sequence: Synthetic coding sequence
  source 1..99: mol_type = other DNA
atggacagcctggaggagccccagaagaaggtgttcaaggccagaaagaccatgagagtgagcgacagacagcagctggaggccgtgtacaaggtgtag

SEQ ID NO: 71598 - DNA, 399 bp, synthetic construct
  misc_feature 1..399: note = Description of Artificial Sequence: Synthetic coding sequence
  source 1..399: mol_type = other DNA
atggacagcctggaggagccccagaagaaggtgttcaaggccagaaagaccatgagagtgagcgacagacagcagctggaggccgtgtacaaggtgaaggaggagctgctgaagaccgacgtgaagctgctgaacggcaaccacgagaacggcgacctggaccccaccagccccctggagaacatggactacatcaaggacaaggaggaggtgaacggcatcgaggagatctgcttcgaccccgagggcagcaaggccgagtggaaggagaccccctgcatcctgagcgtgaacgtgaagaacaagcaggacgacgacctgaactgcgagcccctgagcccccacaacatcacccccgagcccgtgagcaagctgcccgccgagcccgtgagcggctag

SEQ ID NO: 71599 - DNA, 531 bp, synthetic construct
  misc_feature 1..531: note = Description of Artificial Sequence: Synthetic coding sequence
  source 1..531: mol_type = other DNA
atggacagcctggaggagccccagaagaaggtgttcaaggccagaaagaccatgagagtgagcgacagacagcagctggaggccgtgtacaaggtgaaggaggagctgctgaagaccgacgtgaagctgctgaacggcaaccacgagaacggcgacctggaccccaccagccccctggagaacatggactacatcaaggacaaggaggaggtgaacggcatcgaggagatctgcttcgaccccgagggcagcaaggccgagtggaaggagaccccctgcatcctgagcgtgaacgtgaagaacaagcaggacgacgacctgaactgcgagcccctgagcccccacaacatcacccccgagcccgtgagcaagctgcccgccgagcccgtgagcggcgaccccgcccccggcgacctggacgccggcgaccccgccagcggcgtgctggccagcggcgacagcaccagcggcgaccccaccagcagcgagcccagcagcagcgacgccgccagcggcgacgccaccagctag

SEQ ID NO: 71600 - DNA, 180 bp, synthetic construct
  misc_feature 1..180: note = Description of Artificial Sequence: Synthetic coding sequence
  source 1..180: mol_type = other DNA
atggacagcctggaggagccccagaagaaggtgttcaaggccagaaagaccatgagagtgagcgacagacagcagctggaggccgtgtacaaggtgaaggaggagctgctgaagaccgacgtgaagctgctgaacggcaaccacgagaacggcgacctggaccccaccagccccctgtag

SEQ ID NO: 71601 - DNA, 3318 bp, synthetic construct
  misc_feature 1..3318: note = Description of Artificial Sequence: Synthetic coding sequence
  source 1..3318: mol_type = other DNA
atggacagcctggaggagccccagaagaaggtgttcaaggccagaaagaccatgagagtgagcgacagacagcagctggaggccgtgtacaaggtgaaggaggagctgctgaagaccgacgtgaagctgctgaacggcaaccacgagaacggcgacctggaccccaccagccccctggagaacatggactacatcaaggacaaggaggaggtgaacggcatcgaggagatctgcttcgaccccgagggcagcaaggccgagtggaaggagaccccctgcatcctgagcgtgaacgtgaagaacaagcaggacgacgacctgaactgcgagcccctgagcccccacaacatcacccccgagcccgtgagcaagctgcccgccgagcccgtgagcggcgaccccgcccccggcgacctggacgccggcgaccccgccagcggcgtgctggccagcggcgacagcaccagcggcgaccccaccagcagcgagcccagcagcagcgacgccgccagcggcgacgccaccagcggcgacgcccccagcggcgacgtgagccccggcgacgccaccagcggcgacgccaccgccgacgacctgagcagcggcgaccccaccagcagcgaccccatccccggcgagcccgtgcccgtggagcccatcagcggcgactgcgccgccgacgacatcgccagcagcgagatcaccagcgtggacctggccagcggcgcccccgccagcaccgaccccgccagcgacgacctggccagcggcgacctgagcagcagcgagctggccagcgacgacctggccaccggcgagctggccagcgacgagctgaccagcgagagcaccttcgacagaaccttcgagcccaagagcgtgcccgtgtgcgagcccgtgcccgagatcgacaacatcgagcccagcagcaacaaggacgacgacttcctggagaagaacggcgccgacgagaagctggagcagatccagagcaaggacagcctggacgagaagaacaaggccgacaacaacatcgacgccaacgaggagaccctggagaccgacgacaccaccatctgcagcgacagaccccccgagaacgagaagaaggtggaggaggacatcatcaccgagctggccctgggcgaggacgccatcagcagcagcatggagatcgaccagggcgagaagaacgaggacgagaccagcgccgacctggtggagaccatcaacgagaacgtgatcgaggacaacaagagcgagaacatcctggagaacaccgacagcatggagaccgacgagatcatccccatcctggagaagctggcccccagcgaggacgagctgacctgcttcagcaagaccagcctgctgcccatcgacgagaccaaccccgacctggaggagaagatggagagcagcttcggcagccccagcaagcaggagagcagcgagagcctgcccaaggaggccttcctggtgctgagcgacgaggaggacatcagcggcgagaaggacgagagcgaggtgatcagccagaacgagacctgcagccccgaggtggagagcaacgagaaggacaacaagcccgaggaggaggagcaggtgatccacgaggacgacgagagacccagcgagaagaacgagttcagcagaagaaagagaagcaagagcgaggacatggacaacgtgcagagcaagagaagaagatacatggaggaggagtacgaggccgagttccaggtgaagatcaccgccaagggcgacatcaaccagaagctgcagaaggtgatccagtggctgctggaggagaagctgtgcgccctgcagtgcgccgtgttcgacaagaccctggccgagctgaagaccagagtggagaagatcgagtgcaacaagagacacaagaccgtgctgaccgagctgcaggccaagatcgccagactgaccaagagattcgaggccgccaaggaggacctgaagaagagacacgagcacccccccaacccccccgtgagccccggcaagaccgtgaacgacgtgaacagcaacaacaacatgagctacagaaacgccggcaccgtgagacagatgctggagagcaagagaaacgtgagcgagagcgccccccccagcttccagacccccgtgaacaccgtgagcagcaccaacctggtgaccccccccgccgtggtgagcagccagcccaagctgcagacccccgtgaccagcggcagcctgaccgccaccagcgtgctgcccgcccccaacaccgccaccgtggtggccaccacccaggtgcccagcggcaacccccagcccaccatcagcctgcagcccctgcccgtgatcctgcacgtgcccgtggccgtgagcagccagccccagctgctgcagagccaccccggcaccctggtgaccaaccagcccagcggcaacgtggagttcatcagcgtgcagagcccccccaccgtgagcggcctgaccaagaaccccgtgagcctgcccagcctgcccaaccccaccaagcccaacaacgtgcccagcgtgcccagccccagcatccagagaaaccccaccgccagcgccgcccccctgggcaccaccctggccgtgcaggccgtgcccaccgcccacagcatcgtgcaggccaccagaaccagcctgcccaccgtgggccccagcggcctgtacagccccagcaccaacagaggccccatccagatgaagatccccatcagcgccttcagcaccagcagcgccgccgagcagaacagcaacaccacccccagaatcgagaaccagaccaacaagaccatcgacgccagcgtgagcaagaaggccgccgacagcaccagccagtgcggcaaggccaccggcagcgacagcagcggcgtgatcgacctgaccatggacgacgaggagagcggcgccagccaggaccccaagaagctgaaccacacccccgtgagcaccatgagcagcagccagcccgtgagcagacccctgcagcccatccagcccgccccccccctgcagcccagcggcgtgcccaccagcggccccagccagaccaccatccacctgctgcccaccgcccccaccaccgtgaacgtgacccacagacccgtgacccaggtgaccaccagactgcccgtgcccagagcccccgccaaccaccaggtggtgtacaccaccctgcccgccccccccgcccaggcccccctgagaggcaccgtgatgcaggcccccgccgtgagacaggtgaacccccagaacagcaagagattcttcctgtacatggcccccagatacatgtag

SEQ ID NO: 71602 - DNA, 3837 bp, synthetic construct
  misc_feature 1..3837: note = Description of Artificial Sequence: Synthetic coding sequence
  source 1..3837: mol_type = other DNA
atgcaccaggaccagagattcagaatggacagcctggaggagccccagaagaaggtgttcaaggccagaaagaccatgagagtgagcgacagacagcagctggaggccgtgtacaaggtgaaggaggagctgctgaagaccgacgtgaagctgctgaacggcaaccacgagaacggcgacctggaccccaccagccccctggagaacatggactacatcaaggacaaggaggaggtgaacggcatcgaggagatctgcttcgaccccgagggcagcaaggccgagtggaaggagaccccctgcatcctgagcgtgaacgtgaagaacaagcaggacgacgacctgaactgcgagcccctgagcccccacaacatcacccccgagcccgtgagcaagctgcccgccgagcccgtgagcggcgaccccgcccccggcgacctggacgccggcgaccccgccagcggcgtgctggccagcggcgacagcaccagcggcgaccccaccagcagcgagcccagcagcagcgacgccgccagcggcgacgccaccagcggcgacgcccccagcggcgacgtgagccccggcgacgccaccagcggcgacgccaccgccgacgacctgagcagcggcgaccccaccagcagcgaccccatccccggcgagcccgtgcccgtggagcccatcagcggcgactgcgccgccgacgacatcgccagcagcgagatcaccagcgtggacctggccagcggcgcccccgccagcaccgaccccgccagcgacgacctggccagcggcgacctgagcagcagcgagctggccagcgacgacctggccaccggcgagctggccagcgacgagctgaccagcgagagcaccttcgacagaaccttcgagcccaagagcgtgcccgtgtgcgagcccgtgcccgagatcgacaacatcgagcccagcagcaacaaggacgacgacttcctggagaagaacggcgccgacgagaagctggagcagatccagagcaaggacagcctggacgagaagaacaaggccgacaacaacatcgacgccaacgaggagaccctggagaccgacgacaccaccatctgcagcgacagaccccccgagaacgagaagaaggtggaggaggacatcatcaccgagctggccctgggcgaggacgccatcagcagcagcatggagatcgaccagggcgagaagaacgaggacgagaccagcgccgacctggtggagaccatcaacgagaacgtgatcgaggacaacaagagcgagaacatcctggagaacaccgacagcatggagaccgacgagatcatccccatcctggagaagctggcccccagcgaggacgagctgacctgcttcagcaagaccagcctgctgcccatcgacgagaccaaccccgacctggaggagaagatggagagcagcttcggcagccccagcaagcaggagagcagcgagagcctgcccaaggaggccttcctggtgctgagcgacgaggaggacatcagcggcgagaaggacgagagcgaggtgatcagccagaacgagacctgcagccccgccgaggtggagagcaacgagaaggacaacaagcccgaggaggaggagcaggtgatccacgaggacgacgagagacccagcgagaagaacgagttcagcagaagaaagagaagcaagagcgaggacatggacaacgtgcagagcaagagaagaagatacatggaggaggagtacgaggccgagttccaggtgaagatcaccgccaagggcgacatcaaccagaagctgcagaaggtgatccagtggctgctggaggagaagctgtgcgccctgcagtgcgccgtgttcgacaagaccctggccgagctgaagaccagagtggagaagatcgagtgcaacaagagacacaagaccgtgctgaccgagctgcaggccaagatcgccagactgaccaagagattcgaggccgccaaggaggacctgaagaagagacacgagcacccccccaacccccccgtgagccccggcaagaccgtgaacgacgtgaacagcaacaacaacatgagctacagaaacgccggcaccgtgagacagatgctggagagcaagagaaacgtgagcgagagcgccccccccagcttccagacccccgtgaacaccgtgagcagcaccaacctggtgaccccccccgccgtggtgagcagccagcccaagctgcagacccccgtgaccagcggcagcctgaccgccaccagcgtgctgcccgcccccaacaccgccaccgtggtggccaccacccaggtgcccagcggcaacccccagcccaccatcagcctgcagcccctgcccgtgatcctgcacgtgcccgtggccgtgagcagccagccccagctgctgcagagccaccccggcaccctggtgaccaaccagcccagcggcaacgtggagttcatcagcgtgcagagcccccccaccgtgagcggcctgaccaagaaccccgtgagcctgcccagcctgcccaaccccaccaagcccaacaacgtgcccagcgtgcccagccccagcatccagagaaaccccaccgccagcgccgcccccctgggcaccaccctggccgtgcaggccgtgcccaccgcccacagcatcgtgcaggccaccagaaccagcctgcccaccgtgggccccagcggcctgtacagccccagcaccaacagaggccccatccagatgaagatccccatcagcgccttcagcaccagcagcgccgccgagcagaacagcaacaccacccccagaatcgagaaccagaccaacaagaccatcgacgccagcgtgagcaagaaggccgccgacagcaccagccagtgcggcaaggccaccggcagcgacagcagcggcgtgatcgacctgaccatggacgacgaggagagcggcgccagccaggaccccaagaagctgaaccacacccccgtgagcaccatgagcagcagccagcccgtgagcagacccctgcagcccatccagcccgccccccccctgcagcccagcggcgtgcccaccagcggccccagccagaccaccatccacctgctgcccaccgcccccaccaccgtgaacgtgacccacagacccgtgacccaggtgaccaccagactgcccgtgcccagagcccccgccaaccaccaggtggtgtacaccaccctgcccgccccccccgcccaggcccccctgagaggcaccgtgatgcaggcccccgccgtgagacaggtgaacccccagaacagcgtgaccgtgagagtgccccagaccaccacctacgtggtgaacaacggcctgaccctgggcagcaccggcccccagctgaccgtgcaccacagacccccccaggtgcacaccgagccccccagacccgtgcaccccgcccccctgcccgaggccccccagccccagagactgccccccgaggccgccagcaccagcctgccccagaagccccacctgaagctggccagagtgcagagccagaacggcatcgtgctgagctggagcgtgctggaggtggacagaagctgcgccaccgtggacagctaccacctgtacgcctaccacgaggagcccagcgccaccgtgcccagccagtggaagaagatcggcgaggtgaaggccctgcccctgcccatggcctgcaccctgacccagttcgtgagcggcagcaagtactacttcgccgtgagagccaaggacatctacggcagattcggccccttctgcgacccccagagcaccgacgtgatcagcagcacccagagcagctag

SEQ ID NO: 71603 - DNA, 510 bp, synthetic construct; identical to SEQ ID NO: 71596
  misc_feature 1..510: note = Description of Artificial Sequence: Synthetic coding sequence
  source 1..510: mol_type = other DNA

SEQ ID NO: 71604 - DNA, 1632 bp, synthetic construct
  misc_feature 1..1632: note = Description of Artificial Sequence: Synthetic coding sequence
  source 1..1632: mol_type = other DNA
atggccagccccgacagaagcaagagaaagatcctgaaggccaagaagaccatgcccctgagctgcagaaagcaggtggagatgctgaacaagagcagaaacgtggaggccctgaagaccgccatcggcagcaacgtgcccagcggcaaccagagcttcagccccagcgtgatcaccagaaccaccgagatcaccaagtgcagccccagcgagaacggcgccagcagcctggacagcaacaagaacagcatcagcgagaagagcaaggtgttcagccagaactgcatcaagcccgtggaggagatcgtgcacagcgagaccaagctggagcaggtggtgtgcagctaccagaagcccagcagaaccaccgagagccccagcagagtgttcaccgaggaggccaaggacagcctgaacaccagcgagaacgacagcgagcaccagaccaacgtgaccagaagcctgttcgagcacgagggcgcctgcagcctgaagagcagctgctgcccccccagcgtgctgagcggcgtggtgcagatgcccgagagcaccgtgaccagcaccgtgggcgacaagaagaccgaccagatggtgttccacctggagaccaacagcaacagcgagagccacgacaagagacagagcgacaacatcctgtgcagcgaggacagcggcttcgtgcccgtggagaagacccccaacctggtgaacagcgtgaccagcaacaactgcgccgacgacatcctgaagaccgacgagtgcagcagaaccagcatcagcaactgcgagagcgccgacagcacctggcagagcagcctggacaccaacaacaacagccactaccagaagaagagaatgttcagcgagaacgaggagaacgtgaagagaatgaagaccagcgagcagatcaacgagaacatctgcgtgagcctggagagacagaccgccttcctggagcaggtgagacacctgatccagcaggagatctacagcatcaactacgagctgttcgacaagaagctgaaggagctgaaccagagaatcggcaagaccgagtgcagaaacaagcacgagggcatcgccgacaagctgctggccaagatcgccaagctgcagagaagaatcaagaccgtgctgctgttccagagaaactgcctgaagcccaacatgctgagcagcaacggcgccagcaaggtggccaacagcgaggccatgatcctggacaagaacctggagagcgtgaacagccccatcgagaagagcagcgtgaactacgagcccagcaaccccagcgagaagggcagcaagaagatcaacctgagcagcgaccagaacaagagcgtgagcgagagcaacaacgacgacgtgatgctgatcagcgtggagagccccaacctgaccacccccatcaccagcaaccccaccgacaccagaaagatcaccagcggcaacagcagcaacagccccaacgccgaggtgatgaaggtgcagtaccccccctggagccacatcagaaagctgctgcagacccagagaaagcagccccactggcacaagatgcagagcagattcctgagccccctgagcacctgccacctgagccagaaccaccagcaccactacctgaactag

SEQ ID NO: 71605 - DNA, 2049 bp, synthetic construct
  misc_feature 1..2049: note = Description of Artificial Sequence: Synthetic coding sequence
  source 1..2049: mol_type = other DNA
atggccagccccgacagaagcaagagaaagatcctgaaggccaagaagaccatgcccctgagctgcagaaagcaggtggagatgctgaacaagagcagaaacgtggaggccctgaagaccgccatcggcagcaacgtgcccagcggcaaccagagcttcagccccagcgtgatcaccagaaccaccgagatcaccaagtgcagccccagcgagaacggcgccagcagcctggacagcaacaagaacagcatcagcgagaagagcaaggtgttcagccagaactgcatcaagcccgtggaggagatcgtgcacagcgagaccaagctggagcaggtggtgtgcagctaccagaagcccagcagaaccaccgagagccccagcagagtgttcaccgaggaggccaaggacagcctgaacaccagcgagaacgacagcgagcaccagaccaacgtgaccagaagcctgttcgagcacgagggcgcctgcagcctgaagagcagctgctgcccccccagcgtgctgagcggcgtggtgcagatgcccgagagcaccgtgaccagcaccgtgggcgacaagaagaccgaccagatggtgttccacctggagaccaacagcaacagcgagagccacgacaagagacagagcgacaacatcctgtgcagcgaggacagcggcttcgtgcccgtggagaagacccccaacctggtgaacagcgtgaccagcaacaactgcgccgacgacatcctgaagaccgacgagtgcagcagaaccagcatcagcaactgcgagagcgccgacagcacctggcagagcagcctggacaccaacaacaacagccactaccagaagaagagaatgttcagcgagaacgaggagaacgtgaagagaatgaagaccagcgagcagatcaacgagaacatctgcgtgagcctggagagacagaccgccttcctggagcaggtgagacacctgatccagcaggagatctacagcatcaactacgagctgttcgacaagaagctgaaggagctgaaccagagaatcggcaagaccgagtgcagaaacaagcacgagggcatcgccgacaagctgctggccaagatcgccaagctgcagagaagaatcaagaccgtgctgctgttccagagaaactgcctgaagcccaacatgctgagcagcaacggcgccagcaaggtggccaacagcgaggccatgatcctggacaagaacctggagagcgtgaacagccccatcgagaagagcagcgtgaactacgagcccagcaaccccagcgagaagggcagcaagaagatcaacctgagcagcgaccagaacaagagcgtgagcgagagcaacaacgacgacgtgatgctgatcagcgtggagagccccaacctgaccacccccatcaccagcaaccccaccgacaccagaaagatcaccagcggcaacagcagcaacagccccaacgccgaggtgatggccgtgcagaagaagctggacagcatcatcgacctgaccaaggagggcctgagcaactgcaacaccgagagccccgtgagccccctggagagccacagcaaggccgccagcaacagcaaggagaccacccccctggcccagaacgccgtgcaggtgcccgagagcttcgagcacctgccccccctgcccgagccccccgcccccctgcccgagctggtggacaagaccagagacaccctgcccccccagaagcccgagctgaaggtgaagagagtgttcagacccaacggcatcgccctgacctggaacatcaccaagatcaaccccaagtgcgcccccgtggagagctaccacctgttcctgtgccacgagaacagcaacaacaagctgatctggaagaagatcggcgagatcaaggccctgcccctgcccatggcctgcaccctgagccagttcctggccagcaacagatactacttcaccgtgcagagcaaggacatcttcggcagatacggccccttctgcgacatcaagagcatccccggcttcagcgagaacctgacctag

SEQ ID NO: 71606 - DNA, 1632 bp, synthetic construct; identical to SEQ ID NO: 71604
  misc_feature 1..1632: note = Description of Artificial Sequence: Synthetic coding sequence
  source 1..1632: mol_type = other DNA

SEQ ID NO: 71607 - DNA, 2049 bp, synthetic construct; identical to SEQ ID NO: 71605
  misc_feature 1..2049: note = Description of Artificial Sequence: Synthetic coding sequence
  source 1..2049: mol_type = other DNA

SEQ ID NO: 71608 - DNA, 1278 bp, synthetic construct
  misc_feature 1..1278: note = Description of Artificial Sequence: Synthetic coding sequence
  source 1..1278: mol_type = other DNA
atggccagccccgacagaagcaagagaaagatcctgaaggccaagaagaccatgcccctgagctgcagaaagcaggtggagatgctgaacaagagcagaaacgtggaggccctgaagaccgccatcggcagcaacgtgcccagcggcaaccagagcttcagccccagcgtgatcaccagaaccaccgagatcaccaagtgcagccccagcgagaacggcgccagcagcctggacagcaacaagaacagcatcagcgagaagagcaaggtgttcagccagaactgcatcaagcccgtggaggagatcgtgcacagcgagaccaagctggagcaggtggtgtgcagctaccagaagcccagcagaaccaccgagagccccagcagagtgttcaccgaggaggccaaggacagcctgaacaccagcgagaacgacagcgagcaccagaccaacgtgaccagaagcctgttcgagcacgagggcgcctgcagcctgaagagcagctgctgcccccccagcgtgctgagcggcgtggtgcagatgcccgagagcaccgtgaccagcaccgtgggcgacaagaagaccgaccagatggtgttccacctggagaccaacagcaacagcgagagccacgacaagagacagagcgacaacatcctgtgcagcgaggacagcggcttcgtgcccgtggagaagacccccaacctggtgaacagcgtgaccagcaacaactgcgccgacgacatcctgaagaccgacgagtgcagcagaaccagcatcagcaactgcgagagcgccgacagcacctggcagagcagcctggacaccaacaacaacagccactaccagaagaagagaatgttcagcgagaacgaggagaacgtgaagagaatgaagaccagcgagcagatcaacgagaacatctgcgtgagcctggagagacagaccgccttcctggagcaggtgagacacctgatccagcaggagatctacagcatcaactacgagctgttcgacaagaagctgaaggagctgaaccagagaatcggcaagaccgagtgcagaaacaagcacgagggcatcgccgacaagctgctggccaagatcgccaagctgcagagaagaatcaagaccgtgctgctgttccagagaaactgcctgaagcccaacatgctgagcagcaacggcgccagcaagatccccgagaagctgcaccaggagatcctggccatcctgcccatgctgaagctgtggctgtacagaagaaacctgatcctgtag

SEQ ID NO: 71609 - DNA, 681 bp, synthetic construct
  misc_feature 1..681: note = Description of Artificial Sequence: Synthetic coding sequence
  source 1..681: mol_type = other DNA
atgctgatcagcgtggagagccccaacctgaccacccccatcaccagcaaccccaccgacaccagaaagatcaccagcggcaacagcagcaacagccccaacgccgaggtgatggccgtgcagaagaagctggacagcatcatcgacctgaccaaggagggcctgagcaactgcaacaccgagagccccgtgagccccctggagagccacagcaaggccgccagcaacagcaaggagaccacccccctggcccagaacgccgtgcaggtgcccgagagcttcgagcacctgccccccctgcccgagccccccgcccccctgcccgagctggtggacaagaccagagacaccctgcccccccagaagcccgagctgaaggtgaagagagtgttcagacccaacggcatcgccctgacctggaacatcaccaagatcaaccccaagtgcgcccccgtggagagctaccacctgttcctgtgccacgagaacagcaacaacaagctgatctggaagaagatcggcgagatcaaggccctgcccctgcccatggcctgcaccctgagccagttcctggccagcaacagatactacttcaccgtgcagagcaaggacatcttcggcagatacggccccttctgcgacatcaagagcatccccggcttcagcgagaacctgacctag

SEQ ID NO: 71610 - DNA, 714 bp, synthetic construct
  misc_feature 1..714: note = Description of Artificial Sequence: Synthetic coding sequence
  source 1..714: mol_type = other DNA
atgaccagcgagatcacctacgccgaggtgagattcaagaacgagttcaagagcagcggcatcaacaccgccagcagcgccgccagcaaggagagaaccgccccccacaagagcaacaccggcttccccaagctgctgtgcgccagcctgctgatcttcttcctgctgctggccatcagcttcttcatcgccttcgtgatcttcttccagaagtacagccagctgctggagaagaagaccaccaaggagctggtgcacaccaccctggagtgcgtgaagaagaacatgcccgtggaggagaccgcctggagctgctgccccaagaactggaagagcttcagcagcaactgctacttcatcagcaccgagagcgccagctggcaggacagcgagaaggactgcgccagaatggaggcccacctgctggtgatcaacacccaggaggagcaggacttcatcttccagaacctgcaggaggagagcgcctacttcgtgggcctgagcgaccccgagggccagagacactggcagtgggtggaccagaccccctacaacgagagcagcaccttctggcaccccagagagcccagcgaccccaacgagagatgcgtggtgctgaacttcagaaagagccccaagagatggggctggaacgacgtgaactgcctgggcccccagagaagcgtgtgcgagatgatgaagatccacctgtag

SEQ ID NO: 71611 - DNA, 2469 bp, synthetic construct
  misc_feature 1..2469: note = Description of Artificial Sequence: Synthetic coding sequence
  source 1..2469: mol_type = other DNA
atggaggaggaggaggaggccatcggcctgctggacaaggtgctggaggacgaggacgtgttcctgctggaggagtgcgagctgggcacccccaccagccccggcagcggcagccccttcctggtggccgtgaaggtggaggccggcaagggcctggagatgagaaagctggtgctgagcggcttcctggccagcgaggagatctacatcaaccagctggaggccctgctgctgcccatgaagcccctgaaggccaccgccaccaccagccagcccgtgctgaccatccagcagatcgagaccatcttctacaagatccaggacatctacgagatccacaaggagttctacgacaacctgtgccccaaggtgcagcagtgggacagccaggtgaccatgggccacctgttccagaagctggccagccagctgggcgtgtacaaggccttcgtggacaactacaaggtggccctggagaccgccgagaagtgcagccagagcaacaaccagttccagaagatcagcgaggagctgaaggtgaagggccccaaggacagcaaggacagccacaccagcgtgaccatggaggccctgctgtacaagcccatcgacagagtgaccagaagcaccctggtgctgcacgacctgctgaagcacacccccgtggaccaccccgactaccccctgctgcaggacgccctgagaatcagccagaacttcctgagcagcatcaacgaggacatcgaccccagaagaaccgccgtgaccacccccaagggcgagaccagacagctggtgaaggacggcttcctggtggaggtgagcgagagcagcagaaagctgagacacgtgttcctgttcaccgacgtgctgctgtgcgccaagctgaagaagaccagcgccggcaagcaccagcagtacgactgcaagtggtacatccccctggccgacctggtgttccccagccccgaggagagcgaggccagcccccaggtgcaccccttccccgaccacgagctggaggacatgaagatgaagatcagcgccctgaagagcgagatccagaaggagaaggccaacaagggccagagcagagccatcgagagactgaagaagaagatgttcgagaacgagttcctgctgctgctgaacagccccaccatccccttcagaatccacaacagaaacggcaagagctacctgttcctgctgagcagcgactacgagagaagcgagtggagagaggccatccagaagctgcagaagaaggacctgcaggccttcgtgctgagcagcgtggagctgcaggtgctgaccggcagctgcttcaagctgagaaccgtgcacaacatccccgtgaccagcaacaaggacgacgacgagagccccggcctgtacggcttcctgcacgtgatcgtgcacagcgccaagggcttcaagcagagcgccaacctgtactgcaccctggaggtggacagcttcggctacttcgtgagcaaggccaagaccagagtgttcagagacaccgccgagcccaagtgggacgaggagttcgagatcgagctggagggcagccagagcctgagaatcctgtgctacgagaagtgctacgacaagaccaaggtgaacaaggacaacaacgagatcgtggacaagatcatgggcaagggccagatccagctggacccccagaccgtggagaccaagaactggcacaccgacgtgatcgagatgaacggcatcaaggtggagttcagcatgaagttcaccagcagagacatgagcctgaagagaacccccagcaagaagcagaccggcgtgttcggcgtgaagatcagcgtggtgaccaagagagagagaagcaaggtgccctacatcgtgagacagtgcgtggaggaggtggagaagagaggcatcgaggaggtgggcatctacagaatcagcggcgtggccaccgacatccaggccctgaaggccgtgttcgacgccaacaacaaggacatcctgctgatgctgagcgacatggacatcaacgccatcgccggcaccctgaagctgtacttcagagagctgcccgagcccctgctgaccgacagactgtaccccgccttcatggagggcatcgccctgagcgaccccgccgccaaggagaactgcatgatgcacctgctgagaagcctgcccgaccccaacctgatcaccttcctgttcctgctggagcacctgaagagagtggccgagaaggagcccatcaacaagatgagcctgcacaacctggccaccgtgttcggccccaccctgctgagacccagcgaggtggagagcaaggcccacctgaccagcgccgccgacatctggagccacgacgtgatggcccaggtgcaggtgctgctgtactacctgcagcacccccccatcagcttcgccgagctgaagagaaacaccctgtacttcagcaccgacgtgtag

SEQ ID NO: 71612 - DNA, 2580 bp, synthetic construct
  misc_feature 1..2580: note = Description of Artificial Sequence: Synthetic coding sequence
  source 1..2580: mol_type = other DNA
atggagcccctgagccacagaggcctgcccagactgagctggatcgacaccctgtacagcaacttcagctacggcaccgacgagtacgacggcgagggcaacgaggagcagaagggcccccccgagggcagcgagaccatgccctacatcgacgagagccccaccatgagcccccagctgagcgccagaagccagggcggcggcgacggcgtgagccccaccccccccgagggcctggcccccggcgtggaggccggcaagggcctggagatgagaaagctggtgctgagcggcttcctggccagcgaggagatctacatcaaccagctggaggccctgctgctgcccatgaagcccctgaaggccaccgccaccaccagccagcccgtgctgaccatccagcagatcgagaccatcttctacaagatccaggacatctacgagatccacaaggagttctacgacaacctgtgccccaaggtgcagcagtgggacagccaggtgaccatgggccacctgttccagaagctggccagccagctgggcgtgtacaaggccttcgtggacaactacaaggtggccctggagaccgccgagaagtgcagccagagcaacaaccagttccagaagatcagcgaggagctgaaggtgaagggccccaaggacagcaaggacagccacaccagcgtgaccatggaggccctgctgtacaagcccatcgacagagtgaccagaagcaccctggtgctgcacgacctgctgaagcacacccccgtggaccaccccgactaccccctgctgcaggacgccctgagaatcagccagaacttcctgagcagcatcaacgaggacatcgaccccagaagaaccgccgtgaccacccccaagggcgagaccagacagctggtgaaggacggcttcctggtggaggtgagcgagagcagcagaaagctgagacacgtgttcctgttcaccgacgtgctgctgtgcgccaagctgaagaagaccagcgccggcaagcaccagcagtacgactgcaagtggtacatccccctggccgacctggtgttccccagccccgaggagagcgaggccagcccccaggtgcaccccttccccgaccacgagctggaggacatgaagatgaagatcagcgccctgaagagcgagatccagaaggagaaggccaacaagggccagagcagagccatcgagagactgaagaagaagatgttcgagaacgagttcctgctgctgctgaacagccccaccatccccttcagaatccacaacagaaacggcaagagctacctgttcctgctgagcagcgactacgagagaagcgagtggagagaggccatccagaagctgcagaagaaggacctgcaggccttcgtgctgagcagcgtggagctgcaggtgctgaccggcagctgcttcaagctgagaaccgtgcacaacatccccgtgaccagcaacaaggacgacgacgagagccccggcctgtacggcttcctgcacgtgatcgtgcacagcgccaagggcttcaagcagagcgccaacctgtactgcaccctggaggtggacagcttcggctacttcgtgagcaaggccaagaccagagtgttcagagacaccgccgagcccaagtgggacgaggagttcgagatcgagctggagggcagccagagcctgagaatcctgtgctacgagaagtgctacgacaagaccaaggtgaacaaggacaacaacgagatcgtggacaagatcatgggcaagggccagatccagctggacccccagaccgtggagaccaagaactggcacaccgacgtgatcgagatgaacggcatcaaggtggagttcagcatgaagttcaccagcagagacatgagcctgaagagaacccccagcaagaagcagaccggcgtgttcggcgtgaagatcagcgtggtgaccaagagagagagaagcaaggtgccctacatcgtgagacagtgcgtggaggaggtggagaagagaggcatcgaggaggtgggcatctacagaatcagcggcgtggccaccgacatccaggccctgaaggccgtgttcgacgccaacaacaaggacatcctgctgatgctgagcgacatggacatcaacgccatcgccggcaccctgaagctgtacttcagagagctgcccgagcccctgctgaccgacagactgtaccccgccttcatggagggcatcgccctgagcgaccccgccgccaaggagaactgcatgatgcacctgctgagaagcctgcccgaccccaacctgatcaccttcctgttcctgctggagcacctgaagagagtggccgagaaggagcccatcaacaagatgagcctgcacaacctggccaccgtgttcggccccaccctgctgagacccagcgaggtggagagcaaggcccacctgaccagcgccgccgacatctggagccacgacgtgatggcccaggtgcaggtgctgctgtactacctgcagcacccccccatcagcttcgccgagctgaagagaaacaccctgtacttcagcaccgacgtgtag

SEQ ID NO: 71613 - DNA, 1092 bp, synthetic construct
  misc_feature 1..1092: note = Description of Artificial Sequence: Synthetic coding sequence
  source 1..1092: mol_type = other DNA
atgaagcccctgaaggccaccgccaccaccagccagcccgtgctgaccatccagcagatcgagaccatcttctacaagatccaggacatctacgagatccacaaggagttctacgacaacctgtgccccaaggtgcagcagtgggacagccaggtgaccatgggccacctgttccagaagctggccagccagctgggcgtgtacaaggccttcgtggacaactacaaggtggccctggagaccgccgagaagtgcagccagagcaacaaccagttccagaagatcagcgaggagctgaaggtgaagggccccaaggacagcaaggacagccacaccagcgtgaccatggaggccctgctgtacaagcccatcgacagagtgaccagaagcaccctggtgctgcacgacctgctgaagcacacccccgtggaccaccccgactaccccctgctgcaggacgccctgagaatcagccagaacttcctgagcagcatcaacgaggacatcgaccccagaagaaccgccgtgaccacccccaagggcgagaccagacagctggtgaaggacggcttcctggtggaggtgagcgagagcagcagaaagctgagacacgtgttcctgttcaccgacgtgctgctgtgcgccaagctgaagaagaccagcgccggcaagcaccagcagtacgactgcaagtggtacatccccctggccgacctggtgttccccagccccgaggagagcgaggccagcccccaggtgcaccccttccccgaccacgagctggaggacatgaagatgaagatcagcgccctgaagagcgagatccagaaggaggaggtggagaagagaggcatcgaggaggtgggcatctacagaatcagcggcgtggccaccgacatccaggccctgaaggccgtgttcgacgccaacaacaaggacatcctgctgatgctgagcgacatggacatcaacgccatcgccggcaccctgaagctgtacttcagagagctgcccgagcccctgctgaccgacagactgagcccctgccccacccccaccagcagccccagcagcagctgctggaacacctag

SEQ ID NO: 71614 - DNA, 1926 bp, synthetic construct
  misc_feature 1..1926: note = Description of Artificial Sequence: Synthetic coding sequence
  source 1..1926: mol_type = other DNA
atggagatcctgctgatcatcagattctgctgcaactgcacctacgccctgctgtacaagcccatcgacagagtgaccagaagcaccctggtgctgcacgacctgctgaagcacacccccgtggaccaccccgactaccccctgctgcaggacgccctgagaatcagccagaacttcctgagcagcatcaacgaggacatcgaccccagaagaaccgccgtgaccacccccaagggcgagaccagacagctggtgaaggacggcttcctggtggaggtgagcgagagcagcagaaagctgagacacgtgttcctgttcaccgacgtgctgctgtgcgccaagctgaagaagaccagcgccggcaagcaccagcagtacgactgcaagtggtacatccccctggccgacctggtgttccccagccccgaggagagcgaggccagcccccaggtgcaccccttccccgaccacgagctggaggacatgaagatgaagatcagcgccctgaagagcgagatccagaaggagaaggccaacaagggccagagcagagccatcgagagactgaagaagaagatgttcgagaacgagttcctgctgctgctgaacagccccaccatccccttcagaatccacaacagaaacggcaagagctacctgttcctgctgagcagcgactacgagagaagcgagtggagagaggccatccagaagctgcagaagaaggacctgcaggccttcgtgctgagcagcgtggagctgcaggtgctgaccggcagctgcttcaagctgagaaccgtgcacaacatccccgtgaccagcaacaaggacgacgacgagagccccggcctgtacggcttcctgcacgtgatcgtgcacagcgccaagggcttcaagcagagcgccaacctgtactgcaccctggaggtggacagcttcggctacttcgtgagcaaggccaagaccagagtgttcagagacaccgccgagcccaagtgggacgaggagttcgagatcgagctggagggcagccagagcctgagaatcctgtgctacgagaagtgctacgacaagaccaaggtgaacaaggacaacaacgagatcgtggacaagatcatgggcaagggccagatccagctggacccccagaccgtggagaccaagaactggcacaccgacgtgatcgagatgaacggcatcaaggtggagttcagcatgaagttcaccagcagagacatgagcctgaagagaacccccagcaagaagcagaccggcgtgttcggcgtgaagatcagcgtggtgaccaagagagagagaagcaaggtgccctacatcgtgagacagtgcgtggaggaggtggagaagagaggcatcgaggaggtgggcatctacagaatcagcggcgtggccaccgacatccaggccctgaaggccgtgttcgacgccaacaacaaggacatcctgctgatgctgagcgacatggacatcaacgccatcgccggcaccctgaagctgtacttcagagagctgcccgagcccctgctgaccgacagactgtaccccgccttcatggagggcatcgccctgagcgaccccgccgccaaggagaactgcatgatgcacctgctgagaagcctgcccgaccccaacctgatcaccttcctgttcctgctggagcacctgaagagagtggccgagaaggagcccatcaacaagatgagcctgcacaacctggccaccgtgttcggccccaccctgctgagacccagcgaggtggagagcaaggcccacctgaccagcgccgccgacatctggagccacgacgtgatggcccaggtgcaggtgctgctgtactacctgcagcacccccccatcagcttcgccgagctgaagagaaacaccctgtacttcagcaccgacgtgtag

SEQ ID NO: 71615 - DNA, 933 bp, synthetic construct
  misc_feature 1..933: note = Description of Artificial Sequence: Synthetic coding sequence
  source 1..933: mol_type = other DNA
atgaccgacgtgctgccccagcccgactgcagccccaaggccggcagagagcccctggccctggaggagagcggcagcaagagaccccccaacaccggcgccagactgtggggcagagtgagaaacaagctgctgagaaacaagctggacccccagaccgtggagaccaagaactggcacaccgacgtgatcgagatgaacggcatcaaggtggagttcagcatgaagttcaccagcagagacatgagcctgaagagaacccccagcaagaagcagaccggcgtgttcggcgtgaagatcagcgtggtgaccaagagagagagaagcaaggtgccctacatcgtgagacagtgcgtggaggaggtggagaagagaggcatcgaggaggtgggcatctacagaatcagcggcgtggccaccgacatccaggccctgaaggccgtgttcgacgccaacaacaaggacatcctgctgatgctgagcgacatggacatcaacgccatcgccggcaccctgaagctgtacttcagagagctgcccgagcccctgctgaccgacagactgtaccccgccttcatggagggcatcgccctgagcgaccccgccgccaaggagaactgcatgatgcacctgctgagaagcctgcccgaccccaacctgatcaccttcctgttcctgctggagcacctgaagagagtggccgagaaggagcccatcaacaagatgagcctgcacaacctggccaccgtgttcggccccaccctgctgagacccagcgaggtggagagcaaggcccacctgaccagcgccgccgacatctggagccacgacgtgatggcccaggtgcaggtgctgctgtactacctgcagcacccccccatcagcttcgccgagctgaagagaaacaccctgtacttcagcaccgacgtgtag

SEQ ID NO: 71616 - DNA, 2442 bp, synthetic construct
  misc_feature 1..2442: note = Description of Artificial Sequence: Synthetic coding sequence
  source 1..2442: mol_type = other DNA
atgccctacatcgacgagagccccaccatgagcccccagctgagcgccagaagccagggcggcggcgacggcgtgagccccaccccccccgagggcctggcccccggcgtggaggccggcaagggcctggagatgagaaagctggtgctgagcggcttcctggccagcgaggagatctacatcaaccagctggaggccctgctgctgcccatgaagcccctgaaggccaccgccaccaccagccagcccgtgctgaccatccagcagatcgagaccatcttctacaagatccaggacatctacgagatccacaaggagttctacgacaacctgtgccccaaggtgcagcagtgggacagccaggtgaccatgggccacctgttccagaagctggccagccagctgggcgtgtacaaggccttcgtggacaactacaaggtggccctggagaccgccgagaagtgcagccagagcaacaaccagttccagaagatcagcgaggagctgaaggtgaagggccccaaggacagcaaggacagccacaccagcgtgaccatggaggccctgctgtacaagcccatcgacagagtgaccagaagcaccctggtgctgcacgacctgctgaagcacacccccgtggaccaccccgactaccccctgctgcaggacgccctgagaatcagccagaacttcctgagcagcatcaacgaggacatcgaccccagaagaaccgccgtgaccacccccaagggcgagaccagacagctggtgaaggacggcttcctggtggaggtgagcgagagcagcagaaagctgagacacgtgttcctgttcaccgacgtgctgctgtgcgccaagctgaagaagaccagcgccggcaagcaccagcagtacgactgcaagtggtacatccccctggccgacctggtgttccccagccccgaggagagcgaggccagcccccaggtgcaccccttccccgaccacgagctggaggacatgaagatgaagatcagcgccctgaagagcgagatccagaaggagaaggccaacaagggccagagcagagccatcgagagactgaagaagaagatgttcgagaacgagttcctgctgctgctgaacagccccaccatccccttcagaatccacaacagaaacggcaagagctacctgttcctgctgagcagcgactacgagagaagcgagtggagagaggccatccagaagctgcagaagaaggacctgcaggccttcgtgctgagcagcgtggagctgcaggtgctgaccggcagctgcttcaagctgagaaccgtgcacaacatccccgtgaccagcaacaaggacgacgacgagagccccggcctgtacggcttcctgcacgtgatcgtgcacagcgccaagggcttcaagcagagcgccaacctgtactgcaccctggaggtggacagcttcggctacttcgtgagcaaggccaagaccagagtgttcagagacaccgccgagcccaagtgggacgaggagttcgagatcgagctggagggcagccagagcctgagaatcctgtgctacgagaagtgctacgacaagaccaaggtgaacaaggacaacaacgagatcgtggacaagatcatgggcaagggccagatccagctggacccccagaccgtggagaccaagaactggcacaccgacgtgatcgagatgaacggcatcaaggtggagttcagcatgaagttcaccagcagagacatgagcctgaagagaacccccagcaagaagcagaccggcgtgttcggcgtgaagatcagcgtggtgaccaagagagagagaagcaaggtgccctacatcgtgagacagtgcgtggaggaggtggagaagagaggcatcgaggaggtgggcatctacagaatcagcggcgtggccaccgacatccaggccctgaaggccgtgttcgacgccaacaacaaggacatcctgctgatgctgagcgacatggacatcaacgccatcgccggcaccctgaagctgtacttcagagagctgcccgagcccctgctgaccgacagactgtaccccgccttcatggagggcatcgccctgagcgaccccgccgccaaggagaactgcatgatgcacctgctgagaagcctgcccgaccccaacctgatcaccttcctgttcctgctggagcacctgaagagagtggccgagaaggagcccatcaacaagatgagcctgcacaacctggccaccgtgttcggccccaccctgctgagacccagcgaggtggagagcaaggcccacctgaccagcgccgccgacatctggagccacgacgtgatggcccaggtgcaggtgctgctgtactacctgcagcacccccccatcagcttcgccgagctgaagagaaacaccctgtacttcagcaccgacgtgtag

SEQ ID NO: 71617 - DNA, 1332 bp, synthetic construct
  misc_feature 1..1332: note = Description of Artificial Sequence: Synthetic coding sequence
  source 1..1332: mol_type = other DNA
atgctgaccaacggcaaggagcaggtgatcaagagctgcgtgagcctgcccgagctgaacgcccaggtgttctgccacagcagcaacaacgtgaccaagaccgagtgctgcttcaccgacttctgcaacaacatcaccctgcacctgcccaccgccagccccaacgcccccaagctgggccccatggagctggccatcatcatcaccgtgcccgtgtgcctgctgagcatcgccgccatgctgaccgtgtgggcctgccagggcagacagtgcagctacagaaagaagaagagacccaacgtggaggagcccctgagcgagtgcaacctggtgaacgccggcaagaccctgaaggacctgatctacgacgtgaccgccagcggcagcggcagcggcctgcccctgctggtgcagagaaccatcgccagaaccatcgtgctgcaggagatcgtgggcaagggcagattcggcgaggtgtggcacggcagatggtgcggcgaggacgtggccgtgaagatcttcagcagcagagacgagagaagctggttcagagaggccgagatctaccagaccgtgatgctgagacacgagaacatcctgggcttcatcgccgccgacaacaaggacaacggcacctggacccagctgtggctggtgagcgagtaccacgagcagggcagcctgtacgactacctgaacagaaacatcgtgaccgtggccggcatgatcaagctggccctgagcatcgccagcggcctggcccacctgcacatggagatcgtgggcacccagggcaagcccgccatcgcccacagagacatcaagagcaagaacatcctggtgaagaagtgcgagacctgcgccatcgccgacctgggcctggccgtgaagcacgacagcatcctgaacaccatcgacatcccccagaaccccaaggtgggcaccaagagatacatggcccccgagatgctggacgacaccatgaacgtgaacatcttcgagagcttcaagagagccgacatctacagcgtgggcctggtgtactgggagatcgccagaagatgcagcgtgggcggcatcgtggaggagtaccagctgccctactacgacatggtgcccagcgaccccagcatcgaggagatgagaaaggtggtgtgcgaccagaagttcagacccagcatccccaaccagtggcagagctgcgaggccctgagagtgatgggcagaatcatgagagagtgctggtacgccaacggcgccgccagactgaccgccctgagaatcaagaagaccatcagccagctgtgcgtgaaggaggactgcaaggcctag

SEQ ID NO: 71618 - DNA, 1512 bp, synthetic construct
  misc_feature 1..1512: note = Description of Artificial Sequence: Synthetic coding sequence
  source 1..1512: mol_type = other DNA
atgaccctgggcagccccagaaagggcctgctgatgctgctgatggccctggtgacccagggcgaccccgtgaagcccagcagaggccccctggtgacctgcacctgcgagagcccccactgcaagggccccacctgcagaggcgcctggtgcaccgtggtgctggtgagagaggagggcagacacccccaggagcacagaggctgcggcaacctgcacagagagctgtgcagaggcagacccaccgagttcgtgaaccactactgctgcgacagccacctgtgcaaccacaacgtgagcctggtgctggaggccacccagccccccagcgagcagcccggcaccgacggccagctggccctgatcctgggccccgtgctggccctgctggccctggtggccctgggcgtgctgggcctgtggcacgtgagaagaagacaggagaagcagagaggcctgcacagcgagctgggcgagagcagcctgatcctgaaggccagcgagcagggcgacagcatgctgggcgacctgctggacagcgactgcaccaccggcagcggcagcggcctgcccttcctggtgcagagaaccgtggccagacaggtggccctggtggagtgcgtgggcaagggcagatacggcgaggtgtggagaggcctgtggcacggcgagagcgtggccgtgaagatcttcagcagcagagacgagcagagctggttcagagagaccgagatctacaacaccgtgctgctgagacacgacaacatcctgggcttcatcgccagcgacatgaccagcagaaacagcagcacccagctgtggctgatcacccactaccacgagcacggcagcctgtacgacttcctgcagagacagaccctggagccccacctggccctgagactggccgtgagcgccgcctgcggcctggcccacctgcacgtggagatcttcggcacccagggcaagcccgccatcgcccacagagacttcaagagcagaaacgtgctggtgaagagcaacctgcagtgctgcatcgccgacctgggcctggccgtgatgcacagccagggcagcgactacctggacatcggcaacaaccccagagtgggcaccaagagatacatggcccccgaggtgctggacgagcagatcagaaccgactgcttcgagagctacaagtggaccgacatctgggccttcggcctggtgctgtgggagatcgccagaagaaccatcgtgaacggcatcgtggaggactacagaccccccttctacgacgtggtgcccaacgaccccagcttcgaggacatgaagaaggtggtgtgcgtggaccagcagacccccaccatccccaacagactggccgccgaccccgtgctgagcggcctggcccagatgatgagagagtgctggtaccccaaccccagcgccagactgaccgccctgagaatcaagaagaccctgcagaagatcagcaacagccccgagaagcccaaggtgatccagtag

SEQ ID NO: 71619 - DNA, 1512 bp, synthetic construct; identical to SEQ ID NO: 71618
  misc_feature 1..1512: note = Description of Artificial Sequence: Synthetic coding sequence
  source 1..1512: mol_type = other DNA

SEQ ID NO: 71620 - DNA, 990 bp, synthetic construct
  misc_feature 1..990: note = Description of Artificial Sequence: Synthetic coding sequence
  source 1..990: mol_type = other DNA
atggccctgaccccccccctgctgctgctgagcgccggcaccatgaccctgggcagccccagaaagggcctgctgatgctgctgatggccctggtgacccagggcaagggcagatacggcgaggtgtggagaggcctgtggcacggcgagagcgtggccgtgaagatcttcagcagcagagacgagcagagctggttcagagagaccgagatctacaacaccgtgctgctgagacacgacaacatcctgggcttcatcgccagcgacatgaccagcagaaacagcagcacccagctgtggctgatcacccactaccacgagcacggcagcctgtacgacttcctgcagagacagaccctggagccccacctggccctgagactggccgtgagcgccgcctgcggcctggcccacctgcacgtggagatcttcggcacccagggcaagcccgccatcgcccacagagacttcaagagcagaaacgtgctggtgaagagcaacctgcagtgctgcatcgccgacctgggcctggccgtgatgcacagccagggcagcgactacctggacatcggcaacaaccccagagtgggcaccaagagatacatggcccccgaggtgctggacgagcagatcagaaccgactgcttcgagagctacaagtggaccgacatctgggccttcggcctggtgctgtgggagatcgccagaagaaccatcgtgaacggcatcgtggaggactacagaccccccttctacgacgtggtgcccaacgaccccagcttcgaggacatgaagaaggtggtgtgcgtggaccagcagacccccaccatccccaacagactggccgccgaccccgtgctgagcggcctggcccagatgatgagagagtgctggtaccccaaccccagcgccagactgaccgccctgagaatcaagaagaccctgcagaagatcagcaacagccccgagaagcccaaggtgatccagtag

SEQ ID NO: 71621 - DNA, 480 bp, synthetic construct
  misc_feature 1..480: note = Description of Artificial Sequence: Synthetic coding sequence
  source 1..480: mol_type = other DNA
atggccctgaccccccccctgctgctgctgagcgccggcaccatgaccctgggcagccccagaaagggcctgctgatgctgctgatggccctggtgacccagggcgaccccgtgaagcccagcagaggccccctggtgacctgcacctgcgagagcccccactgcaagggccccacctgcagaggcgcctggtgcaccgtggtgctggtgagagaggagggcagacacccccaggagcacagaggctgcggcaacctgcacagagagctgtgcagaggcagacccaccgagttcgtgaaccactactgctgcgacagccacctgtgcaaccacaacgtgagcctggtgctggagggcaagggcagatacggcgaggtgtggagaggcctgtggcacggcgagagcgtggccgtgaagatcttcagcagcagagacgagcagagctggttcagagagaccgagatctacaacaccgtgtag

SEQ ID NO: 71622 - DNA, 1554 bp, synthetic construct
  misc_feature 1..1554: note = Description of Artificial Sequence: Synthetic coding sequence
  source 1..1554: mol_type = other DNA
atggccctgaccccccccctgctgctgctgagcgccggcaccatgaccctgggcagccccagaaagggcctgctgatgctgctgatggccctggtgacccagggcgaccccgtgaagcccagcagaggccccctggtgacctgcacctgcgagagcccccactgcaagggccccacctgcagaggcgcctggtgcaccgtggtgctggtgagagaggagggcagacacccccaggagcacagaggctgcggcaacctgcacagagagctgtgcagaggcagacccaccgagttcgtgaaccactactgctgcgacagccacctgtgcaaccacaacgtgagcctggtgctggaggccacccagccccccagcgagcagcccggcaccgacggccagctggccctgatcctgggccccgtgctggccctgctggccctggtggccctgggcgtgctgggcctgtggcacgtgagaagaagacaggagaagcagagaggcctgcacagcgagctgggcgagagcagcctgatcctgaaggccagcgagcagggcgacagcatgctgggcgacctgctggacagcgactgcaccaccggcagcggcagcggcctgcccttcctggtgcagagaaccgtggccagacaggtggccctggtggagtgcgtgggcaagggcagatacggcgaggtgtggagaggcctgtggcacggcgagagcgtggccgtgaagatcttcagcagcagagacgagcagagctggttcagagagaccgagatctacaacaccgtgctgctgagacacgacaacatcctgggcttcatcgccagcgacatgaccagcagaaacagcagcacccagctgtggctgatcacccactaccacgagcacggcagcctgtacgacttcctgcagagacagaccctggagccccacctggccctgagactggccgtgagcgccgcctgcggcctggcccacctgcacgtggagatcttcggcacccagggcaagcccgccatcgcccacagagacttcaagagcagaaacgtgctggtgaagagcaacctgcagtgctgcatcgccgacctgggcctggccgtgatgcacagccagggcagcgactacctggacatcggcaacaaccccagagtgggcaccaagagatacatggcccccgaggtgctggacgagcagatcagaaccgactgcttcgagagctacaagtggaccgacatctgggccttcggcctggtgctgtgggagatcgccagaagaaccatcgtgaacggcatcgtggaggactacagaccccccttctacgacgtggtgcccaacgaccccagcttcgaggacatgaagaaggtggtgtgcgtggaccagcagacccccaccatccccaacagactggccgccgaccccgtgctgagcggcctggcccagatgatgagagagtgctggtaccccaaccccagcgccagactgaccgccctgagaatcaagaagaccctgcagaagatcagcaacagccccgagaagcccaaggtgatccagtag

SEQ ID NO: 71623 - DNA, 1530 bp, synthetic construct
  misc_feature 1..1530: note = Description of Artificial Sequence: Synthetic coding sequence
  source 1..1530: mol_type = other DNA
atggtggacggcgtgatgatcctgcccgtgctgatcatgatcgccctgcccagccccagcatggaggacgagaagcccaaggtgaaccccaagctgtacatgtgcgtgtgcgagggcctgagctgcggcaacgaggaccactgcgagggccagcagtgcttcagcagcctgagcatcaacgacggcttccacgtgtaccagaagggctgcttccaggtgtacgagcagggcaagatgacctgcaagaccccccccagccccggccaggccgtggagtgctgccagggcgactggtgcaacagaaacatcaccgcccagctgcccaccaagggcaagagcttccccggcacccagaacttccacctggaggtgggcctgatcatcctgagcgtggtgttcgccgtgtgcctgctggcctgcctgctgggcgtggccctgagaaagttcaagagaagaaaccaggagagactgaaccccagagacgtggagtacggcaccatcgagggcctgatcaccaccaacgtgggcgacagcaccctggccgacctgctggaccacagctgcaccagcggcagcggcagcggcctgcccttcctggtgcagagaaccgtggccagacagatcaccctgctggagtgcgtgggcaagggcagatacggcgaggtgtggagaggcagctggcagggcgagaacgtggccgtgaagatcttcagcagcagagacgagaagagctggttcagagagaccgagctgtacaacaccgtgatgctgagacacgagaacatcctgggcttcatcgccagcgacatgaccagcagacacagcagcacccagctgtggctgatcacccactaccacgagatgggcagcctgtacgactacctgcagctgaccaccctggacaccgtgagctgcctgagaatcgtgctgagcatcgccagcggcctggcccacctgcacatcgagatcttcggcacccagggcaagcccgccatcgcccacagagacctgaagagcaagaacatcctggtgaagaagaacggccagtgctgcatcgccgacctgggcctggccgtgatgcacagccagagcaccaaccagctggacgtgggcaacaaccccagagtgggcaccaagagatacatggcccccgaggtgctggacgagaccatccaggtggactgcttcgacagctacaagagagtggacatctgggccttcggcctggtgctgtgggaggtggccagaagaatggtgagcaacggcatcgtggaggactacaagccccccttctacgacgtggtgcccaacgaccccagcttcgaggacatgagaaaggtggtgtgcgtggaccagcagagacccaacatccccaacagatggttcagcgaccccaccctgaccagcctggccaagctgatgaaggagtgctggtaccagaaccccagcgccagactgaccgccctgagaatcaagaagaccctgaccaagatcgacaacagcctggacaagctgaagaccgactgctag

SEQ ID NO: 71624 - DNA, 1530 bp, synthetic construct; identical to SEQ ID NO: 71623
  misc_feature 1..1530: note = Description of Artificial Sequence: Synthetic coding sequence
  source 1..1530: mol_type = other DNA

SEQ ID NO: 71625 - DNA, 1530 bp, synthetic construct; identical to SEQ ID NO: 71623
  misc_feature 1..1530: note = Description of Artificial Sequence: Synthetic coding sequence
  source 1..1530: mol_type = other DNA

SEQ ID NO: 71626 - DNA, 264 bp, synthetic construct
  misc_feature 1..264: note = Description of Artificial Sequence: Synthetic coding sequence
  source 1..264: mol_type = other DNA
atggtggacggcgtgatgatcctgcccgtgctgatcatgatcgccctgcccagccccagcatggaggacgagaagcccaaggtgaaccccaagctgtacatgtgcgtgtgcgagggcctgagctgcggcaacgaggaccactgcgagggccagcagtgcttcagcagcctgagcatcaacgacggcttccacgtgtaccagaagggctgcttccaggtgtacgagcagggcaagatgacctgcaagaccccccccagcccctag

SEQ ID NO: 71627 - DNA, 66 bp, synthetic construct
  misc_feature 1..66: note = Description of Artificial Sequence: Synthetic coding sequence
  source 1..66: mol_type = other DNA
atggtggacggcgtgatgatcctgcccgtgctgatcatgatcgccctgcccagccccagcatgtag

SEQ ID NO: 71628 - DNA, 216 bp, synthetic construct
  misc_feature 1..216: note = Description of Artificial Sequence: Synthetic coding sequence
  source 1..216: mol_type = other DNA
atggtggacggcgtgatgatcctgcccgtgctgatcatgatcgccctgcccagccccagcatggaggacgagaagcccaaggtgaaccccaagctgtacatgtgcgtgtgcgagggcctgagctgcggcaacgaggaccactgcgagggccagcagtgcttcagcagcctgagcatcaacgacggcttccacgtgtaccagaagggctgcttctag

SEQ ID NO: 71629 - DNA, 1530 bp, synthetic construct; identical to SEQ ID NO: 71623
  misc_feature 1..1530: note = Description of Artificial Sequence: Synthetic coding sequence
  source 1..1530: mol_type = other DNA

SEQ ID NO: 71630 - DNA, 264 bp, synthetic construct; identical to SEQ ID NO: 71626
  misc_feature 1..264: note = Description of Artificial Sequence: Synthetic coding sequence
  source 1..264: mol_type = other DNA

SEQ ID NO: 71631 - DNA, 222 bp, synthetic construct
  misc_feature 1..222: note = Description of Artificial Sequence: Synthetic coding sequence
  source 1..222: mol_type = other DNA
atggtggacggcgtgatgatcctgcccgtgctgatcatgatcgccctgcccagccccagcatggaggacgagaagcccaaggtgaaccccaagctgtacatgtgcgtgtgcgagggcctgagctgcggcaacgaggaccactgcgagggccagcagtgcttcagcagcctgagcatcaacgacggcttccacgtgtaccagaagggctgcttccaggtgtag

SEQ ID NO: 71632 - DNA, 1518 bp, synthetic construct
  misc_feature 1..1518: note = Description of Artificial Sequence: Synthetic coding sequence
  source 1..1518: mol_type = other DNA
atggccgagagcgccggcgccagcagcttcttccccctggtggtgctgctgctggccggcagcggcggcagcggccccagaggcgtgcaggccctgctgtgcgcctgcaccagctgcctgcaggccaactacacctgcgagaccgacggcgcctgcatggtgagcatcttcaacctggacggcatggagcaccacgtgagaacctgcatccccaaggtggagctggtgcccgccggcaagcccttctactgcctgagcagcgaggacctgagaaacacccactgctgctacaccgactactgcaacagaatcgacctgagagtgcccagcggccacctgaaggagcccgagcaccccagcatgtggggccccgtggagctggtgggcatcatcgccggccccgtgttcctgctgttcctgatcatcatcatcgtgttcctggtgatcaactaccaccagagagtgtaccacaacagacagagactggacatggaggaccccagctgcgagatgtgcctgagcaaggacaagaccctgcaggacctggtgtacgacctgagcaccagcggcagcggcagcggcctgcccctgttcgtgcagagaaccgtggccagaaccatcgtgctgcaggagatcatcggcaagggcagattcggcgaggtgtggagaggcagatggagaggcggcgacgtggccgtgaagatcttcagcagcagagaggagagaagctggttcagagaggccgagatctaccagaccgtgatgctgagacacgagaacatcctgggcttcatcgccgccgacaacaaggacaacggcacctggacccagctgtggctggtgagcgactaccacgagcacggcagcctgttcgactacctgaacagatacaccgtgaccatcgagggcatgatcaagctggccctgagcgccgccagcggcctggcccacctgcacatggagatcgtgggcacccagggcaagcccggcatcgcccacagagacctgaagagcaagaacatcctggtgaagaagaacggcatgtgcgccatcgccgacctgggcctggccgtgagacacgacgccgtgaccgacaccatcgacatcgcccccaaccagagagtgggcaccaagagatacatggcccccgaggtgctggacgagaccatcaacatgaagcacttcgacagcttcaagtgcgccgacatctacgccctgggcctggtgtactgggagatcgccagaagatgcaacagcggcggcgtgcacgaggagtaccagctgccctactacgacctggtgcccagcgaccccagcatcgaggagatgagaaaggtggtgtgcgaccagaagctgagacccaacatccccaactggtggcagagctacgaggccctgagagtgatgggcaagatgatgagagagtgctggtacgccaacggcgccgccagactgaccgccctgagaatcaagaagaccctgagccagctgagcgtgcaggaggacgtgaagatctag

SEQ ID NO: 71633 - DNA, 1464 bp, synthetic construct
  misc_feature 1..1464: note = Description of Artificial Sequence: Synthetic coding sequence
  source 1..1464: mol_type = other DNA
atggccgagagcgccggcgccagcagcttcttccccctggtggtgctgctgctggccggcagcggcggcagcggccccagaggcgtgcaggccctgctgtgcgcctgcaccagctgcctgcaggccaactacacctgcgagaccgacggcgcctgcatggtgagcatcttcaacctggacggcatggagcaccacgtgagaacctgcatccccaaggtggagctggtgcccgccggcaagcccttctactgcctgagcagcgaggacctgagaaacacccactgctgctacaccgactactgcaacagaatcgacctgagagtgcccagcggccacctgaaggagcccgagcaccccagcatgtggggccccgtggagctggtgggcatcatcgccggccccgtgttcctgctgttcctgatcatcatcatcgtgttcctggtgatcaactaccaccagagagtgtaccacaacagacagagactggacatggaggaccccagctgcgagatgtgcctgagcaaggacaagaccctgcaggacctggtgtacgacctgagcaccagcggcagcggcagcggcctgcccctgttcgtgcagagaaccgtggccagaaccatcgtgctgcaggagatcatcggcaagggcagattcggcgaggtgtggagaggcagatggagaggcggcgacgtggccgtgaagatcttcagcagcagagaggagagaagctggttcagagaggccgagatctaccagaccgtgatgctgagacacgagaacatcctgggcttcatcgccgccgacaacaaggacaacggcacctggacccagctgtggctggtgagcgactaccacgagcacggcagcctgttcgactacctgaacagatacaccgtgaccatcgagggcatgatcaagctggccctgagcgccgccagcggcctggcccacctgcacatggagatcgtgggcacccagggcaagcccggcatcgcccacagagacctgaagagcaagaacatcctggtgaagaagaacggcatgtgcgccatcgccgacctgggcctggccgtgagacacgacgccgtgaccgacaccatcgacatcgcccccaaccagagagtgggcaccaagagatacatggcccccgaggtgctggacgagaccatcaacatgaagcacttcgacagcttcaagtgcgccgacatctacgccctgggcctggtgtactgggagatcgccagaagatgcaacagcggcggcaccttcctgttctgcctgtgcagctacctgcccttccaggacgccggcagccccaaggccgtgctgctgccccccttcttcctgcagcccgtgggctgcctgctgcccgagcccgagagcagcttcaaggtggccatcaagggcgtggaggtggccgtgctgagagtgagactgttcttcagagaccagttcgtggagtag

SEQ ID NO: 71634 - DNA, 1431 bp, synthetic construct
  misc_feature 1..1431: note = Description of Artificial Sequence: Synthetic coding sequence
  source 1..1431: mol_type = other DNA
atggccgagagcgccggcgccagcagcttcttccccctggtggtgctgctgctggccggcagcggcggcagcggccccagaggcgtgcaggccctgctgtgcgcctgcaccagctgcctgcaggccaactacacctgcgagaccgacggcgcctgcatggtgagcatcttcaacctggacggcatggagcaccacgtgagaacctgcatccccaaggtggagctggtgcccgccggcaagcccttctactgcctgagcagcgaggacctgagaaacacccactgctgctacaccgactactgcaacagaatcgacctgagagtgcccagcggccacctgaaggagcccgagcaccccagcatgtggggccccgtggagctggtgggcatcatcgccggccccgtgttcctgctgttcctgatcatcatcatcgtgttcctggtgatcaactaccaccagagagtgtaccacaacagacagagactggacatggaggaccccagctgcgagatgtgcctgagcaaggacaagaccctgcaggacctggtgtacgacctgagcaccagcggcagcggcagcggcctgcccctgttcgtgcagagaaccgtggccagaaccatcgtgctgcaggagatcatcggcaagggcagattcggcgaggtgtggagaggcagatggagaggcggcgacgtggccgtgaagatcttcagcagcagagaggagagaagctggttcagagaggccgagatctaccagaccgtgatgctgagacacgagaacatcctgggcttcatcgccgccgacaacaaggacaacggcacctggacccagctgtggctggtgagcgactaccacgagcacggcagcctgttcgactacctgaacagatacaccgtgaccatcgagggcatgatcaagctggccctgagcgccgccagcggcctggcccacctgcacatggagatcgtgggcacccagggcaagcccggcatcgcccacagagacctgaagagcaagaacatcctggtgaagaagaacggcatgtgcgccatcgccgacctgggcctggccgtgagacacgacgccgtgaccgacaccatcgacatcgcccccaaccagagagtgggcaccaagagatacatggcccccgaggtgctggacgagaccatcaacatgaagcacttcgacagcttcaagtgcgccgacatctacgccctgggcctggtgtactgggagatcgccagaagatgcaacagcggcggcgtgcacgaggagtaccagctgccctactacgacctggtgcccagcgaccccagcatcgaggagatgagaaaggtggtgtgcgaccagaagctgagacccaacatccccaactggtggcagagctacgaggtgagaagctggccccccgccgccttccccagcgcctag

SEQ ID NO: 71635 - DNA, 1641 bp, synthetic construct
  misc_feature 1..1641: note = Description of Artificial Sequence: Synthetic coding sequence
  source 1..1641: mol_type = other DNA
atggccgagagcgccggcgccagcagcttcttccccctggtggtgctgctgctggccggcagcggcggcagcggccccagaggcgtgcaggccctgctgtgcgcctgcaccagctgcctgcaggccaactacacctgcgagaccgacggcgcctgcatggtgagcatcttcaacctggacggcatggagcaccacgtgagaacctgcatccccaaggtggagctggtgcccgccggcaagcccttctactgcctgagcagcgaggacctgagaaacacccactgctgctacaccgactactgcaacagaatcgacctgagagtgcccagcggccacctgaaggagcccgagcaccccagcatgtggggccccgtggagctggtgggcatcatcgccggccccgtgttcctgctgttcctgatcatcatcatcgtgttcctggtgatcaactaccaccagagagtgtaccacaacagacagagactggacatggaggaccccagctgcgagatgtgcctgagcaaggacaagaccctgcaggacctggtgtacgacctgagcaccagcggcagcggcagcggcctgcccctgttcgtgcagagaaccgtggccagaaccatcgtgctgcaggagatcatcggcaagggcagattcggcgaggtgtggagaggcagatggagaggcggcgacgtggccgtgaagatcttcagcagcagagaggagagaagctggttcagagaggccgagatctaccagaccgtgatgctgagacacgagaacatcctgggcttcatcgccgccgacaacaaggccgactgcagcttcctgaccctgccctgggaggtggtgatggtgagcgccgcccccaagctgagaagcctgagactgcagtacaagggcggcagaggcagagccagattcctgttccccctgaacaacggcacctggacccagctgtggctggtgagcgactaccacgagcacggcagcctgttcgactacctgaacagatacaccgtgaccatcgagggcatgatcaagctggccctgagcgccgccagcggcctggcccacctgcacatggagatcgtgggcacccagggcaagcccggcatcgcccacagagacctgaagagcaagaacatcctggtgaagaagaacggcatgtgcgccatcgccgacctgggcctggccgtgagacacgacgccgtgaccgacaccatcgacatcgcccccaaccagagagtgggcaccaagagatacatggcccccgaggtgctggacgagaccatcaacatgaagcacttcgacagcttcaagtgcgccgacatctacgccctgggcctggtgtactgggagatcgccagaagatgcaacagcggcggcgtgcacgaggagtaccagctgccctactacgacctggtgcccagcgaccccagcatcgaggagatgagaaaggtggtgtgcgaccagaagctgagacccaacatccccaactggtggcagagctacgaggccctgagagtgatgggcaagatgatgagagagtgctggtacgccaacggcgccgccagactgaccgccctgagaatcaagaagaccctgagccagctgagcgtgcaggaggacgtgaagatctag

SEQ ID NO: 71636 - DNA, 1362 bp, synthetic construct
  misc_feature 1..1362: note = Description of Artificial Sequence: Synthetic coding sequence
  source 1..1362: mol_type = other DNA
atggtgagcatcttcaacctggacggcatggagcaccacgtgagaacctgcatccccaaggtggagctggtgcccgccggcaagcccttctactgcctgagcagcgaggacctgagaaacacccactgctgctacaccgactactgcaacagaatcgacctgagagtgcccagcggccacctgaaggagcccgagcaccccagcatgtggggccccgtggagctggtgggcatcatcgccggccccgtgttcctgctgttcctgatcatcatcatcgtgttcctggtgatcaactaccaccagagagtgtaccacaacagacagagactggacatggaggaccccagctgcgagatgtgcctgagcaaggacaagaccctgcaggacctggtgtacgacctgagcaccagcggcagcggcagcggcctgcccctgttcgtgcagagaaccgtggccagaaccatcgtgctgcaggagatcatcggcaagggcagattcggcgaggtgtggagaggcagatggagaggcggcgacgtggccgtgaagatcttcagcagcagagaggagagaagctggttcagagaggccgagatctaccagaccgtgatgctgagacacgagaacatcctgggcttcatcgccgccgacaacaaggacaacggcacctggacccagctgtggctggtgagcgactaccacgagcacggcagcctgttcgactacctgaacagatacaccgtgaccatcgagggcatgatcaagctggccctgagcgccgccagcggcctggcccacctgcacatggagatcgtgggcacccagggcaagcccggcatcgcccacagagacctgaagagcaagaacatcctggtgaagaagaacggcatgtgcgccatcgccgacctgggcctggccgtgagacacgacgccgtgaccgacaccatcgacatcgcccccaaccagagagtgggcaccaagagatacatggcccccgaggtgctggacgagaccatcaacatgaagcacttcgacagcttcaagtgcgccgacatctacgccctgggcctggtgtactgggagatcgccagaagatgcaacagcggcggcgtgcacgaggagtaccagctgccctactacgacctggtgcccagcgaccccagcatcgaggagatgagaaaggtggtgtgcgaccagaagctgagacccaacatccccaactggtggcagagctacgaggccctgagagtgatgggcaagatgatgagagagtgctggtacgccaacggcgccgccagactgaccgccctgagaatcaagaagaccctgagccagctgagcgtgcaggaggacgtgaagatctag

SEQ ID NO: 71637 - DNA, 1482 bp, synthetic construct
  misc_feature 1..1482: note = Description of Artificial Sequence: Synthetic coding sequence
  source 1..1482: mol_type = other DNA
atgaccagagccctgtgcagcgccctgagacaggccctgctgctgctggccgccgccgccgagctgagccccggcctgaagtgcgtgtgcctgctgtgcgacagcagcaacttcacctgccagaccgagggcgcctgctgggccagcgtgatgctgaccaacggcaaggagcaggtgatcaagagctgcgtgagcctgcccgagctgaacgcccaggtgttctgccacagcagcaacaacgtgaccaagaccgagtgctgcttcaccgacttctgcaacaacatcaccctgcacctgcccaccgccagccccaacgcccccaagctgggccccatggagctggccatcatcatcaccgtgcccgtgtgcctgctgagcatcgccgccatgctgaccgtgtgggcctgccagggcagacagtgcagctacagaaagaagaagagacccaacgtggaggagcccctgagcgagtgcaacctggtgaacgccggcaagaccctgaaggacctgatctacgacgtgaccgccagcggcagcggcagcggcctgcccctgctggtgcagagaaccatcgccagaaccatcgtgctgcaggagatcgtgggcaagggcagattcggcgaggtgtggcacggcagatggtgcggcgaggacgtggccgtgaagatcttcagcagcagagacgagagaagctggttcagagaggccgagatctaccagaccgtgatgctgagacacgagaacatcctgggcttcatcgccgccgacaacaaggacaacggcacctggacccagctgtggctggtgagcgagtaccacgagcagggcagcctgtacgactacctgaacagaaacatcgtgaccgtggccggcatgatcaagctggccctgagcatcgccagcggcctggcccacctgcacatggagatcgtgggcacccagggcaagcccgccatcgcccacagagacatcaagagcaagaacatcctggtgaagaagtgcgagacctgcgccatcgccgacctgggcctggccgtgaagcacgacagcatcctgaacaccatcgacatcccccagaaccccaaggtgggcaccaagagatacatggcccccgagatgctggacgacaccatgaacgtgaacatcttcgagagcttcaagagagccgacatctacagcgtgggcctggtgtactgggagatcgccagaagatgcagcgtgggcggcatcgtggaggagtaccagctgccctactacgacatggtgcccagcgaccccagcatcgaggagatgagaaaggtggtgtgcgaccagaagttcagacccagcatccccaaccagtggcagagctgcgaggccctgagagtgatgggcagaatcatgagagagtgctggtacgccaacggcgccgccagactgaccgccctgagaatcaagaagaccatcagccagctgtgcgtgaaggaggactgcaaggcctag

SEQ ID NO: 71638 - DNA, 1242 bp, synthetic construct
  misc_feature 1..1242: note = Description of Artificial Sequence: Synthetic coding sequence
  source 1..1242: mol_type = other DNA
atgaccagagccctgtgcagcgccctgagacaggccctgctgctgctggccgccgccgccgagctgagccccggcctgaagtgcgtgtgcctgctgtgcgacagcagcaacttcacctgccagaccgagggcgcctgctgggccagcgtgatgctgaccaacggcaaggagcaggtgatcaagagctgcgtgagcctgcccgagctgaacgcccaggtgttctgccacagcagcaacaacgtgaccaagaccgagtgctgcttcaccgacttctgcaacaacatcaccctgcacctgcccaccggcctgcccctgctggtgcagagaaccatcgccagaaccatcgtgctgcaggagatcgtgggcaagggcagattcggcgaggtgtggcacggcagatggtgcggcgaggacgtggccgtgaagatcttcagcagcagagacgagagaagctggttcagagaggccgagatctaccagaccgtgatgctgagacacgagaacatcctgggcttcatcgccgccgacaacaaggacaacggcacctggacccagctgtggctggtgagcgagtaccacgagcagggcagcctgtacgactacctgaacagaaacatcgtgaccgtggccggcatgatcaagctggccctgagcatcgccagcggcctggcccacctgcacatggagatcgtgggcacccagggcaagcccgccatcgcccacagagacatcaagagcaagaacatcctggtgaagaagtgcgagacctgcgccatcgccgacctgggcctggccgtgaagcacgacagcatcctgaacaccatcgacatcccccagaaccccaaggtgggcaccaagagatacatggcccccgagatgctggacgacaccatgaacgtgaacatcttcgagagcttcaagagagccgacatctacagcgtgggcctggtgtactgggagatcgccagaagatgcagcgtgggcggcatcgtggaggagtaccagctgccctactacgacatggtgcccagcgaccccagcatcgaggagatgagaaaggtggtgtgcgaccagaagttcagacccagcatccccaaccagtggcagagctgcgaggccctgagagtgatgggcagaatcatgagagagtgctggtacgccaacggcgccgccagactgaccgccctgagaatcaagaagaccatcagccagctgtgcgtgaaggaggactgcaaggcctag

SEQ ID NO: 71639 - DNA, 1011 bp, synthetic construct
  misc_feature 1..1011: note = Description of Artificial Sequence: Synthetic coding sequence
  source 1..1011: mol_type = other DNA
atgaccagagccctgtgcagcgccctgagacaggccctgctgctgctggccgccgccgccgagctgagccccggcctgaagtgcgtgtgcctgctgtgcgacagcagcaacttcacctgccagaccgagggcgcctgctgggccagcgtgatgctgaccaacggcaaggagcaggtgatcaagagctgcgtgagcctgcccgagctgaacgcccaggtgttctgccacagcagcaacaacgtgaccaagaccgagtgctgcttcaccgacttctgcaacaacatcaccctgcacctgcccaccgacaacggcacctggacccagctgtggctggtgagcgagtaccacgagcagggcagcctgtacgactacctgaacagaaacatcgtgaccgtggccggcatgatcaagctggccctgagcatcgccagcggcctggcccacctgcacatggagatcgtgggcacccagggcaagcccgccatcgcccacagagacatcaagagcaagaacatcctggtgaagaagtgcgagacctgcgccatcgccgacctgggcctggccgtgaagcacgacagcatcctgaacaccatcgacatcccccagaaccccaaggtgggcaccaagagatacatggcccccgagatgctggacgacaccatgaacgtgaacatcttcgagagcttcaagagagccgacatctacagcgtgggcctggtgtactgggagatcgccagaagatgcagcgtgggcggcatcgtggaggagtaccagctgccctactacgacatggtgcccagcgaccccagcatcgaggagatgagaaaggtggtgtgcgaccagaagttcagacccagcatccccaaccagtggcagagctgcgaggccctgagagtgatgggcagaatcatgagagagtgctggtacgccaacggcgccgccagactgaccgccctgagaatcaagaagaccatcagccagctgtgcgtgaaggaggactgcaaggcctag

SEQ ID NO: 71640 - DNA, 1542 bp, synthetic construct
  misc_feature 1..1542: note = Description of Artificial Sequence: Synthetic coding sequence
  source 1..1542: mol_type = other DNA
atgggcgccgccgccaagctggccttcgccgtgttcctgatcagctgcagcagcggcgccatcctgggcagaagcgagacccaggagtgcctgttcttcaacgccaactgggagaaggacagaaccaaccagaccggcgtggagccctgctacggcgacaaggacaagagaagacactgcttcgccacctggaagaacatcagcggcagcatcgagatcgtgaagcagggctgctggctggacgacatcaactgctacgacagaaccgactgcgtggagaagaaggacagccccgaggtgtacttctgctgctgcgagggcaacatgtgcaacgagaagttcagctacttccccgagatggaggtgacccagcccaccagcaaccccgtgacccccaagcccccctactacaacatcctgctgtacagcctggtgcccctgatgctgatcgccggcatcgtgatctgcgccttctgggtgtacagacaccacaagatggcctacccccccgtgctggtgcccacccaggaccccggcccccccccccccagccccctgctgggcctgaagcccctgcagctgctggaggtgaaggccagaggcagattcggctgcgtgtggaaggcccagctgctgaacgagtacgtggccgtgaagatcttccccatccaggacaagcagagctggcagaacgagtacgaggtgtacagcctgcccggcatgaagcacgagaacatcctgcagttcatcggcgccgagaagagaggcaccagcgtggacgtggacctgtggctgatcaccgccttccacgagaagggcagcctgagcgacttcctgaaggccaacgtggtgagctggaacgagctgtgccacatcgccgagaccatggccagaggcctggcctacctgcacgaggacatccccggcctgaaggacggccacaagcccgccatcagccacagagacatcaagagcaagaacgtgctgctgaagaacaacctgaccgcctgcatcgccgacttcggcctggccctgaagttcgaggccggcaagagcgccggcgacacccacggccaggtgggcaccagaagatacatggcccccgaggtgctggagggcgccatcaacttccagagagacgccttcctgagaatcgacatgtacgccatgggcctggtgctgtgggagctggccagcagatgcaccgccgccgacggccccgtggacgagtacatgctgcccttcgaggaggagatcggccagcaccccagcctggaggacatgcaggaggtggtggtgcacaagaagaagagacccgtgctgagagactactggcagaagcacgccggcatggccatgctgtgcgagaccatcgaggagtgctgggaccacgacgccgaggccagactgagcgccggctgcgtgggcgagagaatcacccagatgcagagactgaccaacatcatcaccaccgaggacatcgtgaccgtggtgaccatggtgaccaacgtggacttcccccccaaggagagcagcctgtag

SEQ ID NO: 71641 - DNA, 1542 bp, synthetic construct; identical to SEQ ID NO: 71640
  misc_feature 1..1542: note = Description of Artificial Sequence: Synthetic coding sequence
  source 1..1542: mol_type = other DNA

SEQ ID NO: 71642 - DNA, 1218 bp, synthetic construct
  misc_feature 1..1218: note = Description of Artificial Sequence: Synthetic coding sequence
  source 1..1218: mol_type = other DNA
atgtgcaacgagaagttcagctacttccccgagatggaggtgacccagcccaccagcaaccccgtgacccccaagcccccctactacaacatcctgctgtacagcctggtgcccctgatgctgatcgccggcatcgtgatctgcgccttctgggtgtacagacaccacaagatggcctacccccccgtgctggtgcccacccaggaccccggcccccccccccccagccccctgctgggcctgaagcccctgcagctgctggaggtgaaggccagaggcagattcggctgcgtgtggaaggcccagctgctgaacgagtacgtggccgtgaagatcttccccatccaggacaagcagagctggcagaacgagtacgaggtgtacagcctgcccggcatgaagcacgagaacatcctgcagttcatcggcgccgagaagagaggcaccagcgtggacgtggacctgtggctgatcaccgccttccacgagaagggcagcctgagcgacttcctgaaggccaacgtggtgagctggaacgagctgtgccacatcgccgagaccatggccagaggcctggcctacctgcacgaggacatccccggcctgaaggacggccacaagcccgccatcagccacagagacatcaagagcaagaacgtgctgctgaagaacaacctgaccgcctgcatcgccgacttcggcctggccctgaagttcgaggccggcaagagcgccggcgacacccacggccaggtgggcaccagaagatacatggcccccgaggtgctggagggcgccatcaacttccagagagacgccttcctgagaatcgacatgtacgccatgggcctggtgctgtgggagctggccagcagatgcaccgccgccgacggccccgtggacgagtacatgctgcccttcgaggaggagatcggccagcaccccagcctggaggacatgcaggaggtggtggtgcacaagaagaagagacccgtgctgagagactactggcagaagcacgccggcatggccatgctgtgcgagaccatcgaggagtgctgggaccacgacgccgaggccagactgagcgccggctgcgtgggcgagagaatcacccagatgcagagactgaccaacatcatcaccaccgaggacatcgtgaccgtggtgaccatggtgaccaacgtggacttcccccccaaggagagcagcctgtag

SEQ ID NO: 71643 - DNA, 1539 bp, synthetic construct
  misc_feature 1..1539: note = Description of Artificial Sequence: Synthetic coding sequence
  source 1..1539: mol_type = other DNA
atgaccgccccctgggtggccctggccctgctgtggggcagcctgtgcgccggcagcggcagaggcgaggccgagaccagagagtgcatctactacaacgccaactgggagctggagagaaccaaccagagcggcctggagagatgcgagggcgagcaggacaagagactgcactgctacgccagctggagaaacagcagcggcaccatcgagctggtgaagaagggctgctggctggacgacttcaactgctacgacagacaggagtgcgtggccaccgaggagaacccccaggtgtacttctgctgctgcgagggcaacttctgcaacgagagattcacccacctgcccgaggccggcggccccgaggtgacctacgagcccccccccaccgcccccaccctgctgaccgtgctggcctacagcctgctgcccatcggcggcctgagcctgatcgtgctgctggccttctggatgtacagacacagaaagcccccctacggccacgtggacatccacgaggaccccggcccccccccccccagccccctggtgggcctgaagcccctgcagctgctggagatcaaggccagaggcagattcggctgcgtgtggaaggcccagctgatgaacgacttcgtggccgtgaagatcttccccctgcaggacaagcagagctggcagagcgagagagagatcttcagcacccccggcatgaagcacgagaacctgctgcagttcatcgccgccgagaagagaggcagcaacctggaggtggagctgtggctgatcaccgccttccacgacaagggcagcctgaccgactacctgaagggcaacatcatcacctggaacgagctgtgccacgtggccgagaccatgagcagaggcctgagctacctgcacgaggacgtgccctggtgcagaggcgagggccacaagcccagcatcgcccacagagacttcaagagcaagaacgtgctgctgaagagcgacctgaccgccgtgctggccgacttcggcctggccgtgagattcgagcccggcaagccccccggcgacacccacggccaggtgggcaccagaagatacatggcccccgaggtgctggagggcgccatcaacttccagagagacgccttcctgagaatcgacatgtacgccatgggcctggtgctgtgggagctggtgagcagatgcaaggccgccgacggccccgtggacgagtacatgctgcccttcgaggaggagatcggccagcaccccagcctggaggagctgcaggaggtggtggtgcacaagaagatgagacccaccatcaaggaccactggctgaagcaccccggcctggcccagctgtgcgtgaccatcgaggagtgctgggaccacgacgccgaggccagactgagcgccggctgcgtggaggagagagtgagcctgatcagaagaagcgtgaacggcaccaccagcgactgcctggtgagcctggtgaccagcgtgaccaacgtggacctgccccccaaggagagcagcatctag

SEQ ID NO: 71644 - DNA, 1191 bp, synthetic construct
  misc_feature 1..1191: note = Description of Artificial Sequence: Synthetic coding sequence
  source 1..1191: mol_type = other DNA
atggagctggaccacagaaccagcggcggcctgcacgcctaccccggccccagaggcggccaggtggccaagcccaacgtgatcctgcagatcggcaagtgcagagccgagatgctggagcacgtgagaagaacccacagacacctgctggccgaggtgagcaagcaggtggagagagagctgaagggcctgcacagaagcgtgggcaagctggagagcaacctggacggctacgtgcccaccagcgacagccagagatggaagaagagcatcaaggcctgcctgtgcagatgccaggagaccatcgccaacctggagagatgggtgaagagagagatgcacgtgtggagagaggtgttctacagactggagagatgggccgacagactggagagcaccggcggcaagtaccccgtgggcagcgagagcgccagacacaccgtgagcgtgggcgtgggcggccccgagagctactgccacgaggccgacggctacgactacaccgtgagcccctacgccatcacccccccccccgccgccggcgagctgcccggccaggagcccgccgaggcccagcagtaccagccctgggtgcccggcgaggacggccagcccagccccggcgtggacacccagatcttcgaggaccccagagagttcctgagccacctggaggagtacctgagacaggtgggcggcagcgaggagtactggctgagccagatccagaaccacatgaacggccccgccaagaagtggtgggagttcaagcagggcagcgtgaagaactgggtggagttcaagaaggagttcctgcagtacagcgagggcaccctgagcagagaggccatccagagagagctggacctgccccagaagcagggcgagcccctggaccagttcctgtggagaaagagagacctgtaccagaccctgtacgtggacgccgacgaggaggagatcatccagtacgtggtgggcaccctgcagcccaagctgaagagattcctgagacaccccctgcccaagaccctggagcagctgatccagagaggcatggaggtgcaggacgacctggagcaggccgccgagcccgccggcccccacctgcccgtggaggacgaggccgagaccctgacccccgcccccaacagcgagagcgtggccagcgacagaacccagcccgagtag

SEQ ID NO: 71645 - DNA, 1587 bp, synthetic construct
  misc_feature 1..1587: note = Description of Artificial Sequence: Synthetic coding sequence
  source 1..1587: mol_type = other DNA
atggccgccgtgctgaacgccgagagactggaggtgagcgtggacggcctgaccctgagccccgaccccgaggagagacccggcgccgagggcgcccccctgctgcccccccccctgcccccccccagcccccccggcagcggcagaggccccggcgccagcggcgagcagcccgagcccggcgaggccgccgccggcggcgccgccgaggaggccagaagactggagcagagatggggcttcggcctggaggagctgtacggcctggccctgagattcttcaaggagaaggacggcaaggccttccaccccacctacgaggagaagctgaagctggtggccctgcacaagcaggtgctgatgggcccctacaaccccgacacctgccccgaggtgggcttcttcgacgtgctgggcaacgacagaagaagagagtgggccgccctgggcaacatgagcaaggaggacgccatggtggagttcgtgaagctgctgaacagatgctgccacctgttcagcacctacgtggccagccacaagatcgagaaggaggagcaggagaagaagagaaaggaggaggaggagagaagaagaagagaggaggaggagagagagagactgcagaaggaggaggagaagagaagaagagaggaggaggagagactgagaagagaggaggaggagagaagaagaatcgaggaggagagactgagactggagcagcagaagcagcagatcatggccgccctgaacagccagaccgccgtgcagttccagcagtacgccgcccagcagtaccccggcaactacgagcagcagcagatcctgatcagacagctgcaggagcagcactaccagcagtacatgcagcagctgtaccaggtgcagctggcccagcagcaggccgccctgcagaagcagcaggaggtggtggtggccggcagcagcctgcccaccagcagcaaggtgaacgccaccgtgcccagcaacatgatgagcgtgaacggccaggccaagacccacaccgacagcagcgagaaggagctggagcccgaggccgccgaggaggccctggagaacggccccaaggagagcctgcccgtgatcgccgcccccagcatgtggaccagaccccagatcaaggacttcaaggagaagatccagcaggacgccgacagcgtgatcaccgtgggcagaggcgaggtggtgaccgtgagagtgcccacccacgaggagggcagctacctgttctgggagttcgccaccgacaactacgacatcggcttcggcgtgtacttcgagtggaccgacagccccaacaccgccgtgagcgtgcacgtgagcgagagcagcgacgacgacgaggaggaggaggagaacatcggctgcgaggagaaggccaagaagaacgccaacaagcccctgctggacgagatcgtgcccgtgtacagaagagactgccacgaggaggtgtacgccggcagccaccagtaccccggcagaggcgtgtacctgctgaagttcgacaacagctacagcctgtggagaagcaagagcgtgtactacagagtgtactacaccagatag

SEQ ID NO: 71646 - DNA, 2343 bp, synthetic construct
  misc_feature 1..2343: note = Description of Artificial Sequence: Synthetic coding sequence
  source 1..2343: mol_type = other DNA
atgaagcccggcgccaccggcgagagcgacctggccgaggtgctgccccagcacaagttcgacagcaagagcctggaggcctacctgaaccagcacctgagcggcttcggcgccgagagagaggccaccctgaccatcgcccagtacagagccggcaagagcaaccccaccttctacctgcagaagggcttccagacctacgtgctgagaaagaagccccccggcagcctgctgcccaaggcccaccagatcgacagagagttcaaggtgcagaaggccctgttcagcatcggcttccccgtgcccaagcccatcctgtactgcagcgacaccagcgtgatcggcaccgagttctacgtgatggagcacgtgcagggcagaatcttcagagacctgaccatccccggcctgagccccgccgagagaagcgccatctacgtggccaccgtggagaccctggcccagctgagaagcctgaacatccagagcctgcagctggagggctacggcatcggcgccggctactgcaagagacaggtgagcacctggaccaagcagtaccaggccgccgcccaccaggacatccccgccatgcagcagctgagcgagtggctgatgaagaacctgcccgacaacgacaacgaggagaacctgatccacggcgacttcagactggacaacatcgtgttccaccccaaggagtgcagagtgatcgccgtgctggactgggagctgagcaccatcggccaccccctgagcgacctggcccacttcagcctgttctacttctggcccagaaccgtgcccatgatcaaccagggcagctacagcgagaacagcggcatccccagcatggaggagctgatcagcatctactgcagatgcagaggcatcaacagcatcctgcccaactggaacttcttcctggccctgagctacttcaagatggccggcatcgcccagggcgtgtacagcagatacctgctgggcaacaacagcagcgaggacagcttcctgttcgccaacatcgtgcagcccctggccgagaccggcctgcagctgagcaagagaaccttcagcaccgtgctgccccagatcgacaccaccggccagctgttcgtgcagaccagaaagggccaggaggtgctgatcaaggtgaagcacttcatgaagcagcacatcctgcccgccgagaaggaggtgaccgagttctacgtgcagaacgagaacagcgtggacaagtggggcaagcccctggtgatcgacaagctgaaggagatggccaaggtggagggcctgtggaacctgttcctgcccgccgtgagcggcctgagccacgtggactacgccctgatcgccgaggagaccggcaagtgcttcttcgcccccgacgtgttcaactgccaggcccccgacaccggcaacatggaggtgctgcacctgtacggcagcgaggagcagaagaagcagtggctggagcccctgctgcagggcaacatcaccagctgcttctgcatgaccgagcccgacgtggccagcagcgacgccaccaacatcgagtgcagcatccagagagacgaggacagctacgtgatcaacggcaagaagtggtggagcagcggcgccggcaaccccaagtgcaagatcgccatcgtgctgggcagaacccagaacaccagcctgagcagacacaagcagcacagcatgatcctggtgcccatgaacacccccggcgtgaagatcatcagacccctgagcgtgttcggctacaccgacaacttccacggcggccacttcgagatccacttcaaccaggtgagagtgcccgccaccaacctgatcctgggcgagggcagaggcttcgagatcagccagggcagactgggccccggcagaatccaccactgcatgagaaccgtgggcctggccgagagagccctgcagatcatgtgcgagagagccacccagagaatcgccttcaagaagaagctgtacgcccacgaggtggtggcccactggatcgccgagagcagaatcgccatcgagaagatcagactgctgaccctgaaggccgcccacagcatggacaccctgggcagcgccggcgccaagaaggagatcgccatgatcaaggtggccgcccccagagccgtgagcaagatcgtggactgggccatccaggtgtgcggcggcgccggcgtgagccaggactaccccctggccaacatgtacgccatcaccagagtgctgagactggccgacggccccgacgaggtgcacctgagcgccatcgccaccatggagctgagagaccaggccaagagactgaccgccaagatctag

SEQ ID NO: 71647 - DNA, 2031 bp, synthetic construct
  misc_feature 1..2031: note = Description of Artificial Sequence: Synthetic coding sequence
  source 1..2031: mol_type = other DNA
atgaagcccggcgccaccggcgagagcgacctggccgaggtgctgccccagcacaagttcgacagcaagagcctggaggcctacctgaaccagcacctgagcggcttcggcgccgagagagaggccaccctgaccatcgcccagtacagagccggcaagagcaaccccaccttctacctgcagaagggcttccagacctacgtgctgagaaagaagccccccggcagcctgctgcccaaggcccaccagatcgacagagagttcaaggtgcagaaggccctgttcagcatcggcttccccgtgcccaagcccatcctgtactgcagcgacaccagcgtgatcggcaccgagttctacgtgatggagcacgtgcagggcagaatcttcagagacctgaccatccccggcctgagccccgccgagagaagcgccatctacgtggccaccgtggagaccctggcccagctgagaagcctgaacatccagagcctgcagctggagggctacggcatcggcgccggctactgcaagagacaggtgagcacctggaccaagcagtaccaggccgccgcccaccaggacatccccgccatgcagcagctgagcgagtggctgatgaagaacctgcccgacaacgacaacgaggagaacctgatccacggcgacttcagactggacaacatcgtgttccaccccaaggagtgcagagtgatcgccgtgctggactgggagctgagcaccatcggccaccccctgagcgacctggcccacttcagcctgttctacttctggcccagaaccgtgcccatgatcaaccagggcagctacagcgagaacagcggcatccccagcatggaggagctgatcagcatctactgcagatgcagaggcatcaacagcatcctgcccaactggaacttcttcctggccctgagctacttcaagatggccggcatcgcccagggcgtgtacagcagatacctgctgggcaacaacagcagcgaggacagcttcctgttcgccaacatcgtgcagcccctggccgagaccggcctgcagctgagcaagagaaccttcagcaccgtgctgccccagatcgacaccaccggccagctgttcgtgcagaccagaaagggccaggaggtgctgatcaaggtgaagcacttcatgaagcagcacatcctgcccgccgagaaggaggtgaccgagttctacgtgcagaacgagaacagcgtggacaagtggggcaagcccctggtgatcgacaagctgaaggagatggccaaggtggagggcctgtggaacctgttcctgcccgccgtgagcggcctgagccacgtggactacgccctgatcgccgaggagaccggcaagtgcttcttcgcccccgacgtgttcaactgccaggcccccgacaccggcaacatggaggtgctgcacctgtacggcagcgaggagcagaagaagcagtggctggagcccctgctgcagggcaacatcaccagctgcttctgcatgaccgagcccgacgtggccagcagcgacgccaccaacatcgagtgcagcatccagagagacgaggacagctacgtgatcaacggcaagaagtggtggagcagcggcgccggcaaccccaagtgcaagatcgccatcgtgctgggcagaacccagaacaccagcctgagcagagaggtggtggcccactggatcgccgagagcagaatcgccatcgagaagatcagactgctgaccctgaaggccgcccacagcatggacaccctgggcagcgccggcgccaagaaggagatcgccatgatcaaggtggccgcccccagagccgtgagcaagatcgtggactgggccatccaggtgtgcggcggcgccggcgtgagccaggactaccccctggccaacatgtacgccatcaccagagtgctgagactggccgacggccccgacgaggtgcacctgagcgccatcgccaccatggagctgagagaccaggccaagagactgaccgccaagatctag

SEQ ID NO: 71648 - DNA, 918 bp, synthetic construct
  misc_feature 1..918: note = Description of Artificial Sequence: Synthetic coding sequence
  source 1..918: mol_type = other DNA
atggaggtgctgcacctgtacggcagcgaggagcagaagaagcagtggctggagcccctgctgcagggcaacatcaccagctgcttctgcatgaccgagcccgacgtggccagcagcgacgccaccaacatcgagtgcagcatccagagagacgaggacagctacgtgatcaacggcaagaagtggtggagcagcggcgccggcaaccccaagtgcaagatcgccatcgtgctgggcagaacccagaacaccagcctgagcagacacaagcagcacagcatgatcctggtgcccatgaacacccccggcgtgaagatcatcagacccctgagcgtgttcggctacaccgacaacttccacggcggccacttcgagatccacttcaaccaggtgagagtgcccgccaccaacctgatcctgggcgagggcagaggcttcgagatcagccagggcagactgggccccggcagaatccaccactgcatgagaaccgtgggcctggccgagagagccctgcagatcatgtgcgagagagccacccagagaatcgccttcaagaagaagctgtacgcccacgaggtggtggcccactggatcgccgagagcagaatcgccatcgagaagatcagactgctgaccctgaaggccgcccacagcatggacaccctgggcagcgccggcgccaagaaggagatcgccatgatcaaggtggccgcccccagagccgtgagcaagatcgtggactgggccatccaggtgtgcggcggcgccggcgtgagccaggactaccccctggccaacatgtacgccatcaccagagtgctgagactggccgacggccccgacgaggtgcacctgagcgccatcgccaccatggagctgagagaccaggccaagagactgaccgccaagatctag

SEQ ID NO: 71649 - DNA, 1248 bp, synthetic construct
  misc_feature 1..1248: note = Description of Artificial Sequence: Synthetic coding sequence
  source 1..1248: mol_type = other DNA
atgctgtggagcggctgcagaagattcggcgccagactgggctgcctgcccggcggcctgagagtgctggtgcagaccggccacagaagcctgaccagctgcatcgaccccagcatgggcctgaacgaggagcagaaggagttccagaaggtggccttcgacttcgccgccagagagatggcccccaacatggccgagtgggaccagaaggagctgttccccgtggacgtgatgagaaaggccgcccagctgggcttcggcggcgtgtacatccagaccgacgtgggcggcagcggcctgagcagactggacaccagcgtgatcttcgaggccctggccaccggctgcaccagcaccaccgcctacatcagcatccacaacatgtgcgcctggatgatcgacagcttcggcaacgaggagcagagacacaagttctgcccccccctgtgcaccatggagaagttcgccagctactgcctgaccgagcccggcagcggcagcgacgccgccagcctgctgaccagcgccaagaagcagggcgaccactacatcctgaacggcagcaaggccttcatcagcggcgccggcgagagcgacatctacgtggtgatgtgcagaaccggcggccccggccccaagggcatcagctgcatcgtggtggagaagggcacccccggcctgagcttcggcaagaaggagaagaaggtgggctggaacagccagcccaccagagccgtgatcttcgaggactgcgccgtgcccgtggccaacagaatcggcagcgagggccagggcttcctgatcgccgtgagaggcctgaacggcggcagaatcaacatcgccagctgcagcctgggcgccgcccacgccagcgtgatcctgaccagagaccacctgaacgtgagaaagcagttcggcgagcccctggccagcaaccagtacctgcagttcaccctggccgacatggccaccagactggtggccgccagactgatggtgagaaacgccgccgtggccctgcaggaggagagaaaggacgccgtggccctgtgcagcatggccaagctgttcgccaccgacgagtgcttcgccatctgcaaccaggccctgcagatgcacggcggctacggctacctgaaggactacgccgtgcagcagtacgtgagagacagcagagtgcaccagatcctggagggcagcaacgaggtgatgagaatcctgatcagcagaagcctgctgcaggagtag

SEQ ID NO: 71650 - DNA, 1074 bp, synthetic construct
  misc_feature 1..1074: note = Description of Artificial Sequence: Synthetic coding sequence
  source 1..1074: mol_type = other DNA
atgagaaaggccgcccagctgggcttcggcggcgtgtacatccagaccgacgtgggcggcagcggcctgagcagactggacaccagcgtgatcttcgaggccctggccaccggctgcaccagcaccaccgcctacatcagcatccacaacatgtgcgcctggatgatcgacagcttcggcaacgaggagcagagacacaagttctgcccccccctgtgcaccatggagaagttcgccagctactgcctgaccgagcccggcagcggcagcgacgccgccagcctgctgaccagcgccaagaagcagggcgaccactacatcctgaacggcagcaaggccttcatcagcggcgccggcgagagcgacatctacgtggtgatgtgcagaaccggcggccccggccccaagggcatcagctgcatcgtggtggagaagggcacccccggcctgagcttcggcaagaaggagaagaaggtgggctggaacagccagcccaccagagccgtgatcttcgaggactgcgccgtgcccgtggccaacagaatcggcagcgagggccagggcttcctgatcgccgtgagaggcctgaacggcggcagaatcaacatcgccagctgcagcctgggcgccgcccacgccagcgtgatcctgaccagagaccacctgaacgtgagaaagcagttcggcgagcccctggccagcaaccagtacctgcagttcaccctggccgacatggccaccagactggtggccgccagactgatggtgagaaacgccgccgtggccctgcaggaggagagaaaggacgccgtggccctgtgcagcatggccaagctgttcgccaccgacgagtgcttcgccatctgcaaccaggccctgcagatgcacggcggctacggctacctgaaggactacgccgtgcagcagtacgtgagagacagcagagtgcaccagatcctggaggagctgttctggcagggccccggcgtgcagagcagaagcttcgtgcccttcggcggcccccagatcgccctgctgctgcccttcagcagcggcgacctgagagagggctag

SEQ ID NO: 71651 - DNA, 819 bp, synthetic construct
  misc_feature 1..819: note = Description of Artificial Sequence: Synthetic coding sequence
  source 1..819: mol_type = other DNA
atgggcctgaacgaggagcagaaggagttccagaaggtggccttcgacttcgccgccagagagatggcccccaacatggccgagtgggaccagaaggagctgttccccgtggacgtgatgagaaaggccgcccagctgggcttcggcggcgtgtacatccagaccgacgtgggcggcagcggcctgagcagactggacaccagcgtgatcttcgaggccctggccaccggctgcaccagcaccaccgcctacatcagcatccacaacatgtgcgcctggatgatcgacagcttcggcaacgaggagcagagacacaagttctgcccccccctgtgcaccatggagaagttcgccagctactgcctgaccgagcccggcagcggcagcgacgccgccagcctgctgaccagcgccaagaagcagggcgaccactacatcctgaacggcagcaaggccttcatcagcggcgccggcgagagcgacatctacgtggtgatgtgcagaaccggcggccccggccccaagggcatcagctgcatcgtggtggagaagggcacccccggcctgagcttcggcaagaaggagaagaaggtgggctggaacagccagcccaccagagccgtgatcttcgaggactgcgccgtgcccgtggccaacagaatcggcagcgagggccagggcttcctgatcgccgtgagaggcctgaacggcggcagaatcaacatcgccagctgcagcctgggctgccccagactgtgccacccccaccccagacccccccagtgccccgaggccgtgtggagagccagcggccagtag

SEQ ID NO: 71652 - DNA, 681 bp, synthetic construct
  misc_feature 1..681: note = Description of Artificial Sequence: Synthetic coding sequence
  source 1..681: mol_type = other DNA
atgaagagcagaaagaacttcaagaagtggcccctgaccctgctgcccgagagatggctgcagatctggcagagcggcaccagaagcatgtgcgcctggatgatcgacagcttcggcaacgaggagcagagacacaagttctgcccccccctgtgcaccatggagaagttcgccagctactgcctgaccgagcccggcagcggcagcgacgccgccagcctgctgaccagcgccaagaagcagggcgaccactacatcctgaacggcagcaaggccttcatcagcggcgccggcgagagcgacatctacgtggtgatgtgcagaaccggcggccccggccccaagggcatcagctgcatcgtggtggagaagggcacccccggcctgagcttcggcaagaaggagaagaaggtgggctggaacagccagcccaccagagccgtgatcttcgaggactgcgccgtgcccgtggccaacagaatcggcagcgagggccagggcttcctgatcgccgtgagaggcctgaacggcggcagaatcaacatcgccagctgcagcctgggcgccgcccacgccagcgtgatcctgaccagagaccacctgaacgtgagaaagcagttcggcgagcccctggccagcaaccagaagaagcaggagaccctgaagctgtggatcacctag

SEQ ID NO: 71653 - DNA, 1866 bp, synthetic construct
  misc_feature 1..1866: note = Description of Artificial Sequence: Synthetic coding sequence
  source 1..1866: mol_type = other DNA
atgagcggctgcggcctgttcctgagaaccaccgccgccgccagagcctgcagaggcctggtggtgagcaccgccaacagaagactgctgagaaccagcccccccgtgagagccttcgccaaggagctgttcctgggcaagatcaagaagaaggaggtgttccccttccccgaggtgagccaggacgagctgaacgagatcaaccagttcctgggccccgtggagaagttcttcaccgaggaggtggacagcagaaagatcgaccaggagggcaagatccccgacgagaccctggagaagctgaagagcctgggcctgttcggcctgcaggtgcccgaggagtacggcggcctgggcttcagcaacaccatgtacagcagactgggcgagatcatcagcatggacggcagcatcaccgtgaccctggccgcccaccaggccatcggcctgaagggcatcatcctggccggcaccgaggagcagaaggccaagtacctgcccaagctggccagcggcgagcacatcgccgccttctgcctgaccgagcccgccagcggcagcgacgccgccagcatcagaagcagagccaccctgagcgaggacaagaagcactacatcctgaacggcagcaaggtgtggatcaccaacggcggcctggccaacatcttcaccgtgttcgccaagaccgaggtggtggacagcgacggcagcgtgaaggacaagatcaccgccttcatcgtggagagagacttcggcggcgtgaccaacggcaagcccgaggacaagctgggcatcagaggcagcaacacctgcgaggtgcacttcgagaacaccaagatccccgtggagaacatcctgggcgaggtgggcgacggcttcaaggtggccatgaacatcctgaacagcggcagattcagcatgggcagcgtggtggccggcctgctgaagagactgatcgagatgaccgccgagtacgcctgcaccagaaagcagttcaacaagagactgagcgagttcggcctgatccaggagaagttcgccctgatggcccagaaggcctacgtgatggagagcatgacctacctgaccgccggcatgctggaccagcccggcttccccgactgcagcatcgaggccgccatggtgaaggtgttcagcagcgaggccgcctggcagtgcgtgagcgaggccctgcagatcctgggcggcctgggctacaccagagactacccctacgagagaatcctgagagacaccagaatcctgctgatcttcgagggcaccaacgagatcctgagaatgtacatcgccctgaccggcctgcagcacgccggcagaatcctgaccaccagaatccacgagctgaagcaggccaaggtgagcaccgtgatggacaccgtgggcagaagactgagagacagcctgggcagaaccgtggacctgggcctgaccggcaaccacggcgtggtgcaccccagcctggccgacagcgccaacaagttcgaggagaacacctactgcttcggcagaaccgtggagaccctgctgctgagattcggcaagaccatcatggaggagcagctggtgctgaagagagtggccaacatcctgatcaacctgtacggcatgaccgccgtgctgagcagagccagcagaagcatcagaatcggcctgagaaaccacgaccacgaggtgctgctggccaacaccttctgcgtggaggcctacctgcagaacctgttcagcctgagccagctggacaagtacgcccccgagaacctggacgagcagatcaagaaggtgagccagcagatcctggagaagagagcctacatctgcgcccaccccctggacagaacctgctag

SEQ ID NO: 71654 - DNA, 1467 bp, synthetic construct
  misc_feature 1..1467: note = Description of Artificial Sequence: Synthetic coding sequence
  source 1..1467: mol_type = other DNA
atggacggcagcatcaccgtgaccctggccgcccaccaggccatcggcctgaagggcatcatcctggccggcaccgaggagcagaaggccaagtacctgcccaagctggccagcggcgagcacatcgccgccttctgcctgaccgagcccgccagcggcagcgacgccgccagcatcagaagcagagccaccctgagcgaggacaagaagcactacatcctgaacggcagcaaggtgtggatcaccaacggcggcctggccaacatcttcaccgtgttcgccaagaccgaggtggtggacagcgacggcagcgtgaaggacaagatcaccgccttcatcgtggagagagacttcggcggcgtgaccaacggcaagcccgaggacaagctgggcatcagaggcagcaacacctgcgaggtgcacttcgagaacaccaagatccccgtggagaacatcctgggcgaggtgggcgacggcttcaaggtggccatgaacatcctgaacagcggcagattcagcatgggcagcgtggtggccggcctgctgaagagactgatcgagatgaccgccgagtacgcctgcaccagaaagcagttcaacaagagactgagcgagttcggcctgatccaggagaagttcgccctgatggcccagaaggcctacgtgatggagagcatgacctacctgaccgccggcatgctggaccagcccggcttccccgactgcagcatcgaggccgccatggtgaaggtgttcagcagcgaggccgcctggcagtgcgtgagcgaggccctgcagatcctgggcggcctgggctacaccagagactacccctacgagagaatcctgagagacaccagaatcctgctgatcttcgagggcaccaacgagatcctgagaatgtacatcgccctgaccggcctgcagcacgccggcagaatcctgaccaccagaatccacgagctgaagcaggccaaggtgagcaccgtgatggacaccgtgggcagaagactgagagacagcctgggcagaaccgtggacctgggcctgaccggcaaccacggcgtggtgcaccccagcctggccgacagcgccaacaagttcgaggagaacacctactgcttcggcagaaccgtggagaccctgctgctgagattcggcaagaccatcatggaggagcagctggtgctgaagagagtggccaacatcctgatcaacctgtacggcatgaccgccgtgctgagcagagccagcagaagcatcagaatcggcctgagaaaccacgaccacgaggtgctgctggccaacaccttctgcgtggaggcctacctgcagaacctgttcagcctgagccagctggacaagtacgcccccgagaacctggacgagcagatcaagaaggtgagccagcagatcctggagaagagagcctacatctgcgcccaccccctggacagaacctgctag

SEQ ID NO: 71655 - DNA, 507 bp, synthetic construct
  misc_feature 1..507: note = Description of Artificial Sequence: Synthetic coding sequence
  source 1..507: mol_type = other DNA
atggaggagcagctggtgctgaagggcggccagcacccccaccagcccgtgtggcacgacggcagagccgtggccggccagcccctgcacccccactgggccccccagcccagacccagaggcagcctgggccagcacctgctgagaggcagcctgctggccgagagcctgcagcccctgagcgccggccaggtgtgcagcagaaagcccagaagcagactgagaaagtgccccagcagaagcctgagaagcgagcccatcagcgtgcccaccctgtggaccggccacgccgagagaggccagtgccccctgctgccccccgcccccacccacggccccctgctggacgactgctacagcttcttcagaagactgggcctgagccaggtgaagcccttcgtgcccagactgcacctgaagggctgcagactggcctgggagagcctgttccaggtgctgacctgcagacagtgcagcctgaccggccccagccagctgctgaactag

SEQ ID NO: 71656 - DNA, 1239 bp, synthetic construct
  misc_feature 1..1239: note = Description of Artificial Sequence: Synthetic coding sequence
  source 1..1239: mol_type = other DNA
atggccgccgccctgctggccagagccagcggccccgccagaagagccctgtgccccagagcctggagacagctgcacaccatctaccagagcgtggagctgcccgagacccaccagatgctgctgcagacctgcagagacttcgccgagaaggagctgttccccatcgccgcccaggtggacaaggagcacctgttccccgccgcccaggtgaagaagatgggcggcctgggcctgctggccatggacgtgcccgaggagctgggcggcgccggcctggactacctggcctacgccatcgccatggaggagatcagcagaggctgcgccagcaccggcgtgatcatgagcgtgaacaacagcctgtacctgggccccatcctgaagttcggcagcaaggagcagaagcaggcctgggtgacccccttcaccagcggcgacaagatcggctgcttcgccctgagcgagcccggcaacggcagcgacgccggcgccgccagcaccaccgccagagccgagggcgacagctgggtgctgaacggcaccaaggcctggatcaccaacgcctgggaggccagcgccgccgtggtgttcgccagcaccgacagagccctgcagaacaagggcatcagcgccttcctggtgcccatgcccacccccggcctgaccctgggcaagaaggaggacaagctgggcatcagaggcagcagcaccgccaacctgatcttcgaggactgcagaatccccaaggacagcatcctgggcgagcccggcatgggcttcaagatcgccatgcagaccctggacatgggcagaatcggcatcgccagccaggccctgggcatcgcccagaccgccctggactgcgccgtgaactacgccgagaacagaatggccttcggcgcccccctgaccaagctgcaggtgatccagttcaagctggccgacatggccctggccctggagagcgccagactgctgacctggagagccgccatgctgaaggacaacaagaagcccttcatcaaggaggccgccatggccaagctggccgccagcgaggccgccaccgccatcagccaccaggccatccagatcctgggcggcatgggctacgtgaccgagatgcccgccgagagacactacagagacgccagaatcaccgagatctacgagggcaccagcgagatccagagactggtgatcgccggccacctgctgagaagctacagaagctag

SEQ ID NO: 71657 - DNA, 1365 bp, synthetic construct
  misc_feature 1..1365: note = Description of Artificial Sequence: Synthetic coding sequence
  source 1..1365: mol_type = other DNA
atggccgccggcttcggcagatgctgcagagtgctgagaagcatcagcagattccactggagaagccagcacaccaaggccaacagacagagagagcccggcctgggcttcagcttcgagttcaccgagcagcagaaggagttccaggccaccgccagaaagttcgccagagaggagatcatccccgtggccgccgagtacgacaagaccggcgagtaccccgtgcccctgatcagaagagcctgggagctgggcctgatgaacacccacatccccgagaactgcgactacagcgtgtgccccctgctggaggcctgcaccctgtacctggacgccttcttcctgctgctgaccggcagcaacctgaacctgcacctgaacctgggcggcctgggcctgggcaccttcgacgcctgcctgatcagcgaggagctggcctacggctgcaccggcgtgcagaccgccatcgagggcaacagcctgggccagatgcccatcatcatcgccggcaacgaccagcagaagaagaagtacctgggcagaatgaccgaggagcccctgatgtgcgcctactgcgtgaccgagcccggcgccggcagcgacgtggccggcatcaagaccaaggccgagaagaagggcgacgagtacatcatcaacggccagaagatgtggatcaccaacggcggcaaggccaactggtacttcctgctggccagaagcgaccccgaccccaaggcccccgccaacaaggccttcaccggcttcatcgtggaggccgacacccccggcatccagatcggcagaaaggagctgaacatgggccagagatgcagcgacaccagaggcatcgtgttcgaggacgtgaaggtgcccaaggagaacgtgctgatcggcgacggcgccggcttcaaggtggccatgggcgccttcgacaagaccagacccgtggtggccgccggcgccgtgggcctggcccagagagccctggacgaggccaccaagtacgccctggagagaaagaccttcggcaagctgctggtggagcaccaggccatcagcttcatgctggccgagatggccatgaaggtggagctggccagaatgagctaccagagagccgcctgggaggtggacagcggcagaagaaacacctactacgccagcatcgccaaggccttcgccggcgacatcgccaaccagctggccaccgacgccgtgcagatcctgggcggcaacggcttcaacaccgagtaccccgtggagaagctgatgagagacgccaagatctaccagatctacgagggcaccagccagatccagagactgatcgtggccagagagcacatcgacaagtacaagaactag

SEQ ID NO: 71658 - DNA, 1266 bp, synthetic construct
  misc_feature 1..1266: note = Description of Artificial Sequence: Synthetic coding sequence
  source 1..1266: mol_type = other DNA
atggccgccggcttcggcagatgctgcagagtgctgagaagcatcagcagattccactggagaagccagcacaccaaggccaacagacagagagagcccggcctgggcttcagcttcgagttcaccgagcagcagaaggagttccaggccaccgccagaaagttcgccagagaggagatcatccccgtggccgccgagtacgacaagaccggcgagtaccccgtgcccctgatcagaagagcctgggagctgggcctgatgaacacccacatccccgagaactgcggcggcctgggcctgggcaccttcgacgcctgcctgatcagcgaggagctggcctacggctgcaccggcgtgcagaccgccatcgagggcaacagcctgggccagatgcccatcatcatcgccggcaacgaccagcagaagaagaagtacctgggcagaatgaccgaggagcccctgatgtgcgcctactgcgtgaccgagcccggcgccggcagcgacgtggccggcatcaagaccaaggccgagaagaagggcgacgagtacatcatcaacggccagaagatgtggatcaccaacggcggcaaggccaactggtacttcctgctggccagaagcgaccccgaccccaaggcccccgccaacaaggccttcaccggcttcatcgtggaggccgacacccccggcatccagatcggcagaaaggagctgaacatgggccagagatgcagcgacaccagaggcatcgtgttcgaggacgtgaaggtgcccaaggagaacgtgctgatcggcgacggcgccggcttcaaggtggccatgggcgccttcgacaagaccagacccgtggtggccgccggcgccgtgggcctggcccagagagccctggacgaggccaccaagtacgccctggagagaaagaccttcggcaagctgctggtggagcaccaggccatcagcttcatgctggccgagatggccatgaaggtggagctggccagaatgagctaccagagagccgcctgggaggtggacagcggcagaagaaacacctactacgccagcatcgccaaggccttcgccggcgacatcgccaaccagctggccaccgacgccgtgcagatcctgggcggcaacggcttcaacaccgagtaccccgtggagaagctgatgagagacgccaagatctaccagatctacgagggcaccagccagatccagagactgatcgtggccagagagcacatcgacaagtacaagaactag

SEQ ID NO: 71659 - DNA, 1278 bp, synthetic construct
  misc_feature 1..1278: note = Description of Artificial Sequence: Synthetic coding sequence
  source 1..1278: mol_type = other DNA
atggccgccggcttcggcagatgctgcagatgcagcctgcaggtgctgagaagcatcagcagattccactggagaagccagcacaccaaggccaacagacagagagagcccggcctgggcttcagcttcgagttcaccgagcagcagaaggagttccaggccaccgccagaaagttcgccagagaggagatcatccccgtggccgccgagtacgacaagaccggcgagtaccccgtgcccctgatcagaagagcctgggagctgggcctgatgaacacccacatccccgagaactgcggcggcctgggcctgggcaccttcgacgcctgcctgatcagcgaggagctggcctacggctgcaccggcgtgcagaccgccatcgagggcaacagcctgggccagatgcccatcatcatcgccggcaacgaccagcagaagaagaagtacctgggcagaatgaccgaggagcccctgatgtgcgcctactgcgtgaccgagcccggcgccggcagcgacgtggccggcatcaagaccaaggccgagaagaagggcgacgagtacatcatcaacggccagaagatgtggatcaccaacggcggcaaggccaactggtacttcctgctggccagaagcgaccccgaccccaaggcccccgccaacaaggccttcaccggcttcatcgtggaggccgacacccccggcatccagatcggcagaaaggagctgaacatgggccagagatgcagcgacaccagaggcatcgtgttcgaggacgtgaaggtgcccaaggagaacgtgctgatcggcgacggcgccggcttcaaggtggccatgggcgccttcgacaagaccagacccgtggtggccgccggcgccgtgggcctggcccagagagccctggacgaggccaccaagtacgccctggagagaaagaccttcggcaagctgctggtggagcaccaggccatcagcttcatgctggccgagatggccatgaaggtggagctggccagaatgagctaccagagagccgcctgggaggtggacagcggcagaagaaacacctactacgccagcatcgccaaggccttcgccggcgacatcgccaaccagctggccaccgacgccgtgcagatcctgggcggcaacggcttcaacaccgagtaccccgtggagaagctgatgagagacgccaagatctaccagatctacgagggcaccagccagatccagagactgatcgtggccagagagcacatcgacaagtacaagaactag

SEQ ID NO: 71660 - DNA, 1158 bp, synthetic construct
  misc_feature 1..1158: note = Description of Artificial Sequence: Synthetic coding sequence
  source 1..1158: mol_type = other DNA
atgctgcaggagttcaccgagcagcagaaggagttccaggccaccgccagaaagttcgccagagaggagatcatccccgtggccgccgagtacgacaagaccggcgagtaccccgtgcccctgatcagaagagcctgggagctgggcctgatgaacacccacatccccgagaactgcggcggcctgggcctgggcaccttcgacgcctgcctgatcagcgaggagctggcctacggctgcaccggcgtgcagaccgccatcgagggcaacagcctgggccagatgcccatcatcatcgccggcaacgaccagcagaagaagaagtacctgggcagaatgaccgaggagcccctgatgtgcgcctactgcgtgaccgagcccggcgccggcagcgacgtggccggcatcaagaccaaggccgagaagaagggcgacgagtacatcatcaacggccagaagatgtggatcaccaacggcggcaaggccaactggtacttcctgctggccagaagcgaccccgaccccaaggcccccgccaacaaggccttcaccggcttcatcgtggaggccgacacccccggcatccagatcggcagaaaggagctgaacatgggccagagatgcagcgacaccagaggcatcgtgttcgaggacgtgaaggtgcccaaggagaacgtgctgatcggcgacggcgccggcttcaaggtggccatgggcgccttcgacaagaccagacccgtggtggccgccggcgccgtgggcctggcccagagagccctggacgaggccaccaagtacgccctggagagaaagaccttcggcaagctgctggtggagcaccaggccatcagcttcatgctggccgagatggccatgaaggtggagctggccagaatgagctaccagagagccgcctgggaggtggacagcggcagaagaaacacctactacgccagcatcgccaaggccttcgccggcgacatcgccaaccagctggccaccgacgccgtgcagatcctgggcggcaacggcttcaacaccgagtaccccgtggagaagctgatgagagacgccaagatctaccagatctacgagggcaccagccagatccagagactgatcgtggccagagagcacatcgacaagtacaagaactag

SEQ ID NO: 71661 - DNA, 699 bp, synthetic construct
  misc_feature 1..699: note = Description of Artificial Sequence: Synthetic coding sequence
  source 1..699: mol_type = other DNA
atgtggatcaccaacggcggcaaggccaactggtacttcctgctggccagaagcgaccccgaccccaaggcccccgccaacaaggccttcaccggcttcatcgtggaggccgacacccccggcatccagatcggcagaaaggagctgaacatgggccagagatgcagcgacaccagaggcatcgtgttcgaggacgtgaaggtgcccaaggagaacgtgctgatcggcgacggcgccggcttcaaggtggccatgggcgccttcgacaagaccagacccgtggtggccgccggcgccgtgggcctggcccagagagccctggacgaggccaccaagtacgccctggagagaaagaccttcggcaagctgctggtggagcaccaggccatcagcttcatgctggccgagatggccatgaaggtggagctggccagaatgagctaccagagagccgcctgggaggtggacagcggcagaagaaacacctactacgccagcatcgccaaggccttcgccggcgacatcgccaaccagctggccaccgacgccgtgcagatcctgggcggcaacggcttcaacaccgagtaccccgtggagaagctgatgagagacgccaagatctaccagatctacgagggcaccagccagatccagagactgatcgtggccagagagcacatcgacaagtacaagaactag

SEQ ID NO: 71662 - DNA, 1446 bp, synthetic construct
  misc_feature 1..1446: note = Description of Artificial Sequence: Synthetic coding sequence
  source 1..1446: mol_type = other DNA
atggacggcgccgtgatggagggccccctgttcctgcagagccagagattcggcaccaagagatggagaaagacctgggccgtgctgtaccccgccagcccccacggcgtggccagactggagttcttcgaccacaagggcagcagcagcggcggcggcagaggcagcagcagaagactggactgcaaggtgatcagactggccgagtgcgtgagcgtggcccccgtgaccgtggagaccccccccgagcccggcgccaccgccttcagactggacaccgcccagagaagccacctgctggccgccgacgcccccagcagcgccgcctgggtgcagaccctgtgcagaaacgccttccccaagggcagctggaccctggcccccaccgacaacccccccaagctgagcgccctggagatgctggagaacagcctgtacagccccacctgggagggcagccagttctgggtgaccgtgcagagaaccgaggccgccgagagatgcggcctgcacggcagctacgtgctgagagtggaggccgagagactgaccctgctgaccgtgggcgcccagagccagatcctggagcccctgctgagctggccctacaccctgctgagaagatacggcagagacaaggtgatgttcagcttcgaggccggcagaagatgccccagcggccccggcaccttcaccttccagaccgcccagggcaacgacatcttccaggccgtggagaccgccatccacagacagaaggcccagggcaaggccggccagggccacgacgtgctgagagccgacagccacgagggcgaggtggccgagggcaagctgcccagcccccccggcccccaggagctgctggacagcccccccgccctgtacgccgagcccctggacagcctgagaatcgccccctgccccagccaggacagcctgtacagcgaccccctggacagcaccagcgcccaggccggcgagggcgtgcagagaaagaagcccctgtactgggacctgtacgagcacgcccagcagcagctgctgaaggccaagctgaccgaccccaaggaggaccccatctacgacgagcccgagggcctggcccccgtgcccccccagggcctgtacgacctgcccagagagcccaaggacgcctggtggtgccaggccagagtgaaggaggagggctacgagctgccctacaaccccgccaccgacgactacgccgtgcccccccccagaagcaccaagcccctgctggcccccaagccccagggccccgccttccccgagcccggcaccgccaccggcagcggcatcaagagccacaacagcgccctgtacagccaggtgcagaagagcggcgccagcggcagctgggactgcggcctgagcagagtgggcaccgacaagaccggcgtgaagagcgagggcagcacctag

SEQ ID NO: 71663 - DNA, 1299 bp, synthetic construct
  misc_feature 1..1299: note = Description of Artificial Sequence: Synthetic coding sequence
  source 1..1299: mol_type = other DNA
atggagggcctggccgtgagactgctgagaggcagcagactgctgagaagaaacttcctgacctgcctgagcagctggaagatccccccccacgtgagcaagagcagccagagcgaggccctgctgaacatcaccaacaacggcatccacttcgcccccctgcagaccttcaccgacgaggagatgatgatcaagagcagcgtgaagaagttcgcccaggagcagatcgcccccctggtgagcaccatggacgagaacagcaagatggagaagagcgtgatccagggcctgttccagcagggcctgatgggcatcgaggtggaccccgagtacggcggcaccggcgccagcttcctgagcaccgtgctggtgatcgaggagctggccaaggtggacgccagcgtggccgtgttctgcgagatccagaacaccctgatcaacaccctgatcagaaagcacggcaccgaggagcagaaggccacctacctgccccagctgaccaccgagaaggtgggcagcttctgcctgagcgaggccggcgccggcagcgacagcttcgccctgaagaccagagccgacaaggagggcgactactacgtgctgaacggcagcaagatgtggatcagcagcgccgagcacgccggcctgttcctggtgatggccaacgtggaccccaccatcggctacaagggcatcaccagcttcctggtggacagagacacccccggcctgcacatcggcaagcccgagaacaagctgggcctgagagccagcagcacctgccccctgaccttcgagaacgtgaaggtgcccgaggccaacatcctgggccagatcggccacggctacaagtacgccatcggcagcctgaacgagggcagaatcggcatcgccgcccagatgctgggcctggcccagggctgcttcgactacaccatcccctacatcaaggagagaatccagttcggcaagagactgttcgacttccagggcctgcagcaccaggtggcccacgtggccacccagctggaggccgccagactgctgacctacaacgccgccagactgctggaggccggcaagcccttcatcaaggaggccagcatggccaagtactacgccagcgagatcgccggccagaccaccagcaagtgcatcgagtggatgggcggcgtgggctacaccaaggactaccccgtggagaagtacttcagagacgccaagatcggcaccatctacgagggcgccagcaacatccagctgaacaccatcgccaagcacatcgacgccgagtactag

SEQ ID NO: 71664 - DNA, 993 bp, synthetic construct
  misc_feature 1..993: note = Description of Artificial Sequence: Synthetic coding sequence
  source 1..993: mol_type = other DNA
atgggcatcgaggtggaccccgagtacggcggcaccggcgccagcttcctgagcaccgtgctggtgatcgaggagctggccaaggtggacgccagcgtggccgtgttctgcgagatccagaacaccctgatcaacaccctgatcagaaagcacggcaccgaggagcagaaggccacctacctgccccagctgaccaccgagaaggtgggcagcttctgcctgagcgaggccggcgccggcagcgacagcttcgccctgaagaccagagccgacaaggagggcgactactacgtgctgaacggcagcaagatgtggatcagcagcgccgagcacgccggcctgttcctggtgatggccaacgtggaccccaccatcggctacaagggcatcaccagcttcctggtggacagagacacccccggcctgcacatcggcaagcccgagaacaagctgggcctgagagccagcagcacctgccccctgaccttcgagaacgtgaaggtgcccgaggccaacatcctgggccagatcggccacggctacaagtacgccatcggcagcctgaacgagggcagaatcggcatcgccgcccagatgctgggcctggcccagggctgcttcgactacaccatcccctacatcaaggagagaatccagttcggcaagagactgttcgacttccagggcctgcagcaccaggtggcccacgtggccacccagctggaggccgccagactgctgacctacaacgccgccagactgctggaggccggcaagcccttcatcaaggaggccagcatggccaagtactacgccagcgagatcgccggccagaccaccagcaagtgcatcgagtggatgggcggcgtgggctacaccaaggactaccccgtggagaagtacttcagagacgccaagatcggcaccatctacgagggcgccagcaacatccagctgaacaccatcgccaagcacatcgacgccgagtactag

SEQ ID NO: 71665 - DNA, 1968 bp, synthetic construct
  misc_feature 1..1968: note = Description of Artificial Sequence: Synthetic coding sequence
  source 1..1968: mol_type = other DNA
atgcaggccgccagaatggccgccagcctgggcagacagctgctgagactgggcggcggcagcagcagactgaccgccctgctgggccagcccagacccggccccgccagaagaccctacgccggcggcgccgcccagctggccctggacaagagcgacagccaccccagcgacgccctgaccagaaagaagcccgccaaggccgagagcaagagcttcgccgtgggcatgttcaagggccagctgaccaccgaccaggtgttcccctaccccagcgtgctgaacgaggagcagacccagttcctgaaggagctggtggagcccgtgagcagattcttcgaggaggtgaacgaccccgccaagaacgacgccctggagatggtggaggagaccacctggcagggcctgaaggagctgggcgccttcggcctgcaggtgcccagcgagctgggcggcgtgggcctgtgcaacacccagtacgccagactggtggagatcgtgggcatgcacgacctgggcgtgggcatcaccctgggcgcccaccagagcatcggcttcaagggcatcctgctgttcggcaccaaggcccagaaggagaagtacctgcccaagctggccagcggcgagaccgtggccgccttctgcctgaccgagcccagcagcggcagcgacgccgccagcatcagaaccagcgccgtgcccagcccctgcggcaagtactacaccctgaacggcagcaagctgtggatcagcaacggcggcctggccgacatcttcaccgtgttcgccaagacccccgtgaccgaccccgccaccggcgccgtgaaggagaagatcaccgccttcgtggtggagagaggcttcggcggcatcacccacggcccccccgagaagaagatgggcatcaaggccagcaacaccgccgaggtgttcttcgacggcgtgagagtgcccagcgagaacgtgctgggcgaggtgggcagcggcttcaaggtggccatgcacatcctgaacaacggcagattcggcatggccgccgccctggccggcaccatgagaggcatcatcgccaaggccgtggaccacgccaccaacagaacccagttcggcgagaagatccacaacttcggcctgatccaggagaagctggccagaatggtgatgctgcagtacgtgaccgagagcatggcctacatggtgagcgccaacatggaccagggcgccaccgacttccagatcgaggccgccatcagcaagatcttcggcagcgaggccgcctggaaggtgaccgacgagtgcatccagatcatgggcggcatgggcttcatgaaggagcccggcgtggagagagtgctgagagacctgagaatcttcagaatcttcgagggcaccaacgacatcctgagactgttcgtggccctgcagggctgcatggacaagggcaaggagctgagcggcctgggcagcgccctgaagaaccccttcggcaacgccggcctgctgctgggcgaggccggcaagcagctgagaagaagagccggcctgggcagcggcctgagcctgagcggcctggtgcaccccgagctgagcagaagcggcgagctggccgtgagagccctggagcagttcgccaccgtggtggaggccaagctgatcaagcacaagaagggcatcgtgaacgagcagttcctgctgcagagactggccgacggcgccatcgacctgtacgccatggtggtggtgctgagcagagccagcagaagcctgagcgagggccaccccaccgcccagcacgagaagatgctgtgcgacacctggtgcatcgaggccgccgccagaatcagagagggcatggccgccctgcagagcgacccctggcagcaggagctgtacagaaacttcaagagcatcagcaaggccctggtggagagaggcggcgtggtgaccagcaaccccctgggcttctag

SEQ ID NO: 71666 - DNA, 1902 bp, synthetic construct
  misc_feature 1..1902: note = Description of Artificial Sequence: Synthetic coding sequence
  source 1..1902: mol_type = other DNA
atgcaggccgccagaatggccgccagcctgggcagacagctgctgagactgggcggcggcagcagcagactgaccgccctgctgggccagcccagacccggccccgccagaagaccctacgccggcggcgccgcccaggagagcaagagcttcgccgtgggcatgttcaagggccagctgaccaccgaccaggtgttcccctaccccagcgtgctgaacgaggagcagacccagttcctgaaggagctggtggagcccgtgagcagattcttcgaggaggtgaacgaccccgccaagaacgacgccctggagatggtggaggagaccacctggcagggcctgaaggagctgggcgccttcggcctgcaggtgcccagcgagctgggcggcgtgggcctgtgcaacacccagtacgccagactggtggagatcgtgggcatgcacgacctgggcgtgggcatcaccctgggcgcccaccagagcatcggcttcaagggcatcctgctgttcggcaccaaggcccagaaggagaagtacctgcccaagctggccagcggcgagaccgtggccgccttctgcctgaccgagcccagcagcggcagcgacgccgccagcatcagaaccagcgccgtgcccagcccctgcggcaagtactacaccctgaacggcagcaagctgtggatcagcaacggcggcctggccgacatcttcaccgtgttcgccaagacccccgtgaccgaccccgccaccggcgccgtgaaggagaagatcaccgccttcgtggtggagagaggcttcggcggcatcacccacggcccccccgagaagaagatgggcatcaaggccagcaacaccgccgaggtgttcttcgacggcgtgagagtgcccagcgagaacgtgctgggcgaggtgggcagcggcttcaaggtggccatgcacatcctgaacaacggcagattcggcatggccgccgccctggccggcaccatgagaggcatcatcgccaaggccgtggaccacgccaccaacagaacccagttcggcgagaagatccacaacttcggcctgatccaggagaagctggccagaatggtgatgctgcagtacgtgaccgagagcatggcctacatggtgagcgccaacatggaccagggcgccaccgacttccagatcgaggccgccatcagcaagatcttcggcagcgaggccgcctggaaggtgaccgacgagtgcatccagatcatgggcggcatgggcttcatgaaggagcccggcgtggagagagtgctgagagacctgagaatcttcagaatcttcgagggcaccaacgacatcctgagactgttcgtggccctgcagggctgcatggacaagggcaaggagctgagcggcctgggcagcgccctgaagaaccccttcggcaacgccggcctgctgctgggcgaggccggcaagcagctgagaagaagagccggcctgggcagcggcctgagcctgagcggcctggtgcaccccgagctgagcagaagcggcgagctggccgtgagagccctggagcagttcgccaccgtggtggaggccaagctgatcaagcacaagaagggcatcgtgaacgagcagttcctgctgcagagactggccgacggcgccatcgacctgtacgccatggtggtggtgctgagcagagccagcagaagcctgagcgagggccaccccaccgcccagcacgagaagatgctgtgcgacacctggtgcatcgaggccgccgccagaatcagagagggcatggccgccctgcagagcgacccctggcagcaggagctgtacagaaacttcaagagcatcagcaaggccctggtggagagaggcggcgtggtgaccagcaaccccctgggcttctag

SEQ ID NO: 71667 - DNA, 2106 bp, synthetic construct
  misc_feature 1..2106: note = Description of Artificial Sequence: Synthetic coding sequence
  source 1..2106: mol_type = other DNA
atgcccagaggcccccagcccagcgccgccagatgcaccgtggacgacgagagcggcctgggcgcccccggcagaggcagagccggcagacagagctgggtgagagccagagccagcggcgccagaagagacagcgagatgcaggccgccagaatggccgccagcctgggcagacagctgctgagactgggcggcggcagcagcagactgaccgccctgctgggccagcccagacccggccccgccagaagaccctacgccggcggcgccgcccagctggccctggacaagagcgacagccaccccagcgacgccctgaccagaaagaagcccgccaaggccgagagcaagagcttcgccgtgggcatgttcaagggccagctgaccaccgaccaggtgttcccctaccccagcgtgctgaacgaggagcagacccagttcctgaaggagctggtggagcccgtgagcagattcttcgaggaggtgaacgaccccgccaagaacgacgccctggagatggtggaggagaccacctggcagggcctgaaggagctgggcgccttcggcctgcaggtgcccagcgagctgggcggcgtgggcctgtgcaacacccagtacgccagactggtggagatcgtgggcatgcacgacctgggcgtgggcatcaccctgggcgcccaccagagcatcggcttcaagggcatcctgctgttcggcaccaaggcccagaaggagaagtacctgcccaagctggccagcggcgagaccgtggccgccttctgcctgaccgagcccagcagcggcagcgacgccgccagcatcagaaccagcgccgtgcccagcccctgcggcaagtactacaccctgaacggcagcaagctgtggatcagcaacggcggcctggccgacatcttcaccgtgttcgccaagacccccgtgaccgaccccgccaccggcgccgtgaaggagaagatcaccgccttcgtggtggagagaggcttcggcggcatcacccacggcccccccgagaagaagatgggcatcaaggccagcaacaccgccgaggtgttcttcgacggcgtgagagtgcccagcgagaacgtgctgggcgaggtgggcagcggcttcaaggtggccatgcacatcctgaacaacggcagattcggcatggccgccgccctggccggcaccatgagaggcatcatcgccaaggccgtggaccacgccaccaacagaacccagttcggcgagaagatccacaacttcggcctgatccaggagaagctggccagaatggtgatgctgcagtacgtgaccgagagcatggcctacatggtgagcgccaacatggaccagggcgccaccgacttccagatcgaggccgccatcagcaagatcttcggcagcgaggccgcctggaaggtgaccgacgagtgcatccagatcatgggcggcatgggcttcatgaaggagcccggcgtggagagagtgctgagagacctgagaatcttcagaatcttcgagggcaccaacgacatcctgagactgttcgtggccctgcagggctgcatggacaagggcaaggagctgagcggcctgggcagcgccctgaagaaccccttcggcaacgccggcctgctgctgggcgaggccggcaagcagctgagaagaagagccggcctgggcagcggcctgagcctgagcggcctggtgcaccccgagctgagcagaagcggcgagctggccgtgagagccctggagcagttcgccaccgtggtggaggccaagctgatcaagcacaagaagggcatcgtgaacgagcagttcctgctgcagagactggccgacggcgccatcgacctgtacgccatggtggtggtgctgagcagagccagcagaagcctgagcgagggccaccccaccgcccagcacgagaagatgctgtgcgacacctggtgcatcgaggccgccgccagaatcagagagggcatggccgccctgcagagcgacccctggcagcaggagctgtacagaaacttcaagagcatcagcaaggccctggtggagagaggcggcgtggtgaccagcaaccccctgggcttctag

SEQ ID NO: 71668 - DNA, 2106 bp, synthetic construct; identical to SEQ ID NO: 71667
  misc_feature 1..2106: note = Description of Artificial Sequence: Synthetic coding sequence
  source 1..2106: mol_type = other DNA

SEQ ID NO: 71669 - DNA, 2037 bp, synthetic construct
  misc_feature 1..2037: note = Description of Artificial Sequence: Synthetic coding sequence
  source 1..2037: mol_type = other DNA
atgctgggcggcctggccgccgccgccggcaccagaatcatgggcaaggagatcgaggccgaggcccagagacccctgagacagacctggagacccggccagccccccgccatgaccgccaagaccatgagcagcagactgaccgccctgctgggccagcccagacccggccccgccagaagaccctacgccggcggcgccgcccagctggccctggacaagagcgacagccaccccagcgacgccctgaccagaaagaagcccgccaaggccgagagcaagagcttcgccgtgggcatgttcaagggccagctgaccaccgaccaggtgttcccctaccccagcgtgctgaacgaggagcagacccagttcctgaaggagctggtggagcccgtgagcagattcttcgaggaggtgaacgaccccgccaagaacgacgccctggagatggtggaggagaccacctggcagggcctgaaggagctgggcgccttcggcctgcaggtgcccagcgagctgggcggcgtgggcctgtgcaacacccagtacgccagactggtggagatcgtgggcatgcacgacctgggcgtgggcatcaccctgggcgcccaccagagcatcggcttcaagggcatcctgctgttcggcaccaaggcccagaaggagaagtacctgcccaagctggccagcggcgagaccgtggccgccttctgcctgaccgagcccagcagcggcagcgacgccgccagcatcagaaccagcgccgtgcccagcccctgcggcaagtactacaccctgaacggcagcaagctgtggatcagcaacggcggcctggccgacatcttcaccgtgttcgccaagacccccgtgaccgaccccgccaccggcgccgtgaaggagaagatcaccgccttcgtggtggagagaggcttcggcggcatcacccacggcccccccgagaagaagatgggcatcaaggccagcaacaccgccgaggtgttcttcgacggcgtgagagtgcccagcgagaacgtgctgggcgaggtgggcagcggcttcaaggtggccatgcacatcctgaacaacggcagattcggcatggccgccgccctggccggcaccatgagaggcatcatcgccaaggccgtggaccacgccaccaacagaacccagttcggcgagaagatccacaacttcggcctgatccaggagaagctggccagaatggtgatgctgcagtacgtgaccgagagcatggcctacatggtgagcgccaacatggaccagggcgccaccgacttccagatcgaggccgccatcagcaagatcttcggcagcgaggccgcctggaaggtgaccgacgagtgcatccagatcatgggcggcatgggcttcatgaaggagcccggcgtggagagagtgctgagagacctgagaatcttcagaatcttcgagggcaccaacgacatcctgagactgttcgtggccctgcagggctgcatggacaagggcaaggagctgagcggcctgggcagcgccctgaagaaccccttcggcaacgccggcctgctgctgggcgaggccggcaagcagctgagaagaagagccggcctgggcagcggcctgagcctgagcggcctggtgcaccccgagctgagcagaagcggcgagctggccgtgagagccctggagcagttcgccaccgtggtggaggccaagctgatcaagcacaagaagggcatcgtgaacgagcagttcctgctgcagagactggccgacggcgccatcgacctgtacgccatggtggtggtgctgagcagagccagcagaagcctgagcgagggccaccccaccgcccagcacgagaagatgctgtgcgacacctggtgcatcgaggccgccgccagaatcagagagggcatggccgccctgcagagcgacccctggcagcaggagctgtacagaaacttcaagagcatcagcaaggccctggtggagagaggcggcgtggtgaccagcaaccccctgggcttctag

SEQ ID NO: 71670 - DNA, 1983 bp, synthetic construct
  misc_feature 1..1983: note = Description of Artificial Sequence: Synthetic coding sequence
  source 1..1983: mol_type = other DNA
atgaaccccgacctgagaagagagagagacagcgccagcttcaaccccgagctgctgacccacatcctggacggcagccccgagaagaccagaagaagaagagagatcgagaacatgatcctgaacgaccccgacttccagcacgaggacctgaacttcctgaccagaagccagagatacgaggtggccgtgagaaagagcgccatcatggtgaagaagatgagagagttcggcatcgccgaccccgacgagatcatgtggttcaagaacttcgtgcacagaggcagacccgagcccctggacctgcacctgggcatgttcctgcccaccctgctgcaccaggccaccgccgagcagcaggagagattcttcatgcccgcctggaacctggagatcatcggcacctacgcccagaccgagatgggccacggcacccacctgagaggcctggagaccaccgccacctacgaccccgagacccaggagttcatcctgaacagccccaccgtgaccagcatcaagtggtggcccggcggcctgggcaagaccagcaaccacgccatcgtgctggcccagctgatcaccaagggcaagtgctacggcctgcacgccttcatcgtgcccatcagagagatcggcacccacaagcccctgcccggcatcaccgtgggcgacatcggccccaagttcggctacgacgagatcgacaacggctacctgaagatggacaaccacagaatccccagagagaacatgctgatgaagtacgcccaggtgaagcccgacggcacctacgtgaagcccctgagcaacaagctgacctacggcaccatggtgttcgtgagaagcttcctggtgggcgaggccgccagagccctgagcaaggcctgcaccatcgccatcagatacagcgccgtgagacaccagagcgagatcaagcccggcgagcccgagccccagatcctggacttccagacccagcagtacaagctgttccccctgctggccaccgcctacgccttccagttcgtgggcgcctacatgaaggagacctaccacagaatcaacgagggcatcggccagggcgacctgagcgagctgcccgagctgcacgccctgaccgccggcctgaaggccttcaccagctggaccgccaacaccggcatcgaggcctgcagaatggcctgcggcggccacggctacagccactgcagcggcctgcccaacatctacgtgaacttcacccccagctgcaccttcgagggcgagaacaccgtgatgatgctgcagaccgccagattcctgatgaagagctacgaccaggtgcacagcggcaagctggtgtgcggcatggtgagctacctgaacgacctgcccagccagagaatccagccccagcaggtggccgtgtggcccaccatggtggacatcaacagccccgagagcctgaccgaggcctacaagctgagagccgccagactggtggagatcgccgccaagaacctgcagaaggaggtgatccacagaaagagcaaggaggtggcctggaacctgaccagcgtggacctggtgagagccagcgaggcccactgccactacgtggtggtgaagctgttcagcgagaagctgctgaagatccaggacaaggccatccaggccgtgctgagaagcctgtgcctgctgtacagcctgtacggcatcagccagaacgccggcgacttcctgcagggcagcatcatgaccgagccccagatcacccaggtgaaccagagagtgaaggagctgctgaccctgatcagaagcgacgccgtggccctggtggacgccttcgacttccaggacgtgaccctgggcagcgtgctgggcagatacgacggcaacgtgtacgagaacctgttcgagtgggccaagaacagccccctgaacaaggccgaggtgcacgagagctacaagcacctgaagagcctgcagagcaagctgtag

SEQ ID NO: 71671 - DNA, 1983 bp, synthetic construct
  misc_feature 1..1983: note = Description of Artificial Sequence: Synthetic coding sequence
  source 1..1983: mol_type = other DNA
atgaaccccgacctgagaagagagagagacagcgccagcttcaaccccgagctgctgacccacatcctggacggcagccccgagaagaccagaagaagaagagagatcgagaacatgatcctgaacgaccccgacttccagcacgaggacctgaacttcctgaccagaagccagagatacgaggtggccgtgagaaagagcgccatcatggtgaagaagatgagagagttcggcatcgccgaccccgacgagatcatgtggttcaagaagctgcacctggtgaacttcgtggagcccgtgggcctgaactacagcatgttcatccccaccctgctgaaccagggcaccaccgcccagaaggagaagtggctgctgagcagcaagggcctgcagatcatcggcacctacgcccagaccgagatgggccacggcacccacctgagaggcctggagaccaccgccacctacgaccccgagacccaggagttcatcctgaacagccccaccgtgaccagcatcaagtggtggcccggcggcctgggcaagaccagcaaccacgccatcgtgctggcccagctgatcaccaagggcaagtgctacggcctgcacgccttcatcgtgcccatcagagagatcggcacccacaagcccctgcccggcatcaccgtgggcgacatcggccccaagttcggctacgacgagatcgacaacggctacctgaagatggacaaccacagaatccccagagagaacatgctgatgaagtacgcccaggtgaagcccgacggcacctacgtgaagcccctgagcaacaagctgacctacggcaccatggtgttcgtgagaagcttcctggtgggcgaggccgccagagccctgagcaaggcctgcaccatcgccatcagatacagcgccgtgagacaccagagcgagatcaagcccggcgagcccgagccccagatcctggacttccagacccagcagtacaagctgttccccctgctggccaccgcctacgccttccagttcgtgggcgcctacatgaaggagacctaccacagaatcaacgagggcatcggccagggcgacctgagcgagctgcccgagctgcacgccctgaccgccggcctgaaggccttcaccagctggaccgccaacaccggcatcgaggcctgcagaatggcctgcggcggccacggctacagccactgcagcggcctgcccaacatctacgtgaacttcacccccagctgcaccttcgagggcgagaacaccgtgatgatgctgcagaccgccagattcctgatgaagagctacgaccaggtgcacagcggcaagctggtgtgcggcatggtgagctacctgaacgacctgcccagccagagaatccagccccagcaggtggccgtgtggcccaccatggtggacatcaacagccccgagagcctgaccgaggcctacaagctgagagccgccagactggtggagatcgccgccaagaacctgcagaaggaggtgatccacagaaagagcaaggaggtggcctggaacctgaccagcgtggacctggtgagagccagcgaggcccactgccactacgtggtggtgaagctgttcagcgagaagctgctgaagatccaggacaaggccatccaggccgtgctgagaagcctgtgcctgctgtacagcctgtacggcatcagccagaacgccggcgacttcctgcagggcagcatcatgaccgagccccagatcacccaggtgaaccagagagtgaaggagctgctgaccctgatcagaagcgacgccgtggccctggtggacgccttcgacttccaggacgtgaccctgggcagcgtgctgggcagatacgacggcaacgtgtacgagaacctgttcgagtgggccaagaacagccccctgaacaaggccgaggtgcacgagagctacaagcacctgaagagcctgcagagcaagctgtag

SEQ ID NO: 71672 - DNA, 1869 bp, synthetic construct
  misc_feature 1..1869: note = Description of Artificial Sequence: Synthetic coding sequence
  source 1..1869: mol_type = other DNA
atgatcctgaacgaccccgacttccagcacgaggacctgaacttcctgaccagaagccagagatacgaggtggccgtgagaaagagcgccatcatggtgaagaagatgagagagttcggcatcgccgaccccgacgagatcatgtggttcaagaacttcgtgcacagaggcagacccgagcccctggacctgcacctgggcatgttcctgcccaccctgctgcaccaggccaccgccgagcagcaggagagattcttcatgcccgcctggaacctggagatcatcggcacctacgcccagaccgagatgggccacggcacccacctgagaggcctggagaccaccgccacctacgaccccgagacccaggagttcatcctgaacagccccaccgtgaccagcatcaagtggtggcccggcggcctgggcaagaccagcaaccacgccatcgtgctggcccagctgatcaccaagggcaagtgctacggcctgcacgccttcatcgtgcccatcagagagatcggcacccacaagcccctgcccggcatcaccgtgggcgacatcggccccaagttcggctacgacgagatcgacaacggctacctgaagatggacaaccacagaatccccagagagaacatgctgatgaagtacgcccaggtgaagcccgacggcacctacgtgaagcccctgagcaacaagctgacctacggcaccatggtgttcgtgagaagcttcctggtgggcgaggccgccagagccctgagcaaggcctgcaccatcgccatcagatacagcgccgtgagacaccagagcgagatcaagcccggcgagcccgagccccagatcctggacttccagacccagcagtacaagctgttccccctgctggccaccgcctacgccttccagttcgtgggcgcctacatgaaggagacctaccacagaatcaacgagggcatcggccagggcgacctgagcgagctgcccgagctgcacgccctgaccgccggcctgaaggccttcaccagctggaccgccaacaccggcatcgaggcctgcagaatggcctgcggcggccacggctacagccactgcagcggcctgcccaacatctacgtgaacttcacccccagctgcaccttcgagggcgagaacaccgtgatgatgctgcagaccgccagattcctgatgaagagctacgaccaggtgcacagcggcaagctggtgtgcggcatggtgagctacctgaacgacctgcccagccagagaatccagccccagcaggtggccgtgtggcccaccatggtggacatcaacagccccgagagcctgaccgaggcctacaagctgagagccgccagactggtggagatcgccgccaagaacctgcagaaggaggtgatccacagaaagagcaaggaggtggcctggaacctgaccagcgtggacctggtgagagccagcgaggcccactgccactacgtggtggtgaagctgttcagcgagaagctgctgaagatccaggacaaggccatccaggccgtgctgagaagcctgtgcctgctgtacagcctgtacggcatcagccagaacgccggcgacttcctgcagggcagcatcatgaccgagccccagatcacccaggtgaaccagagagtgaaggagctgctgaccctgatcagaagcgacgccgtggccctggtggacgccttcgacttccaggacgtgaccctgggcagcgtgctgggcagatacgacggcaacgtgtacgagaacctgttcgagtgggccaagaacagccccctgaacaaggccgaggtgcacgagagctacaagcacctgaagagcctgcagagcaagctgtag

SEQ ID NO: 71673 - DNA, 1779 bp, synthetic construct
  misc_feature 1..1779: note = Description of Artificial Sequence: Synthetic coding sequence
  source 1..1779: mol_type = other DNA
atggccgccttcatccagagaacccccgacaactggcacctgagacccgacggcaacggccccagattcgtgcacagaggcagacccgagcccctggacctgcacctgggcatgttcctgcccaccctgctgcaccaggccaccgccgagcagcaggagagattcttcatgcccgcctggaacctggagatcatcggcacctacgcccagaccgagatgggccacggcacccacctgagaggcctggagaccaccgccacctacgaccccgagacccaggagttcatcctgaacagccccaccgtgaccagcatcaagtggtggcccggcggcctgggcaagaccagcaaccacgccatcgtgctggcccagctgatcaccaagggcaagtgctacggcctgcacgccttcatcgtgcccatcagagagatcggcacccacaagcccctgcccggcatcaccgtgggcgacatcggccccaagttcggctacgacgagatcgacaacggctacctgaagatggacaaccacagaatccccagagagaacatgctgatgaagtacgcccaggtgaagcccgacggcacctacgtgaagcccctgagcaacaagctgacctacggcaccatggtgttcgtgagaagcttcctggtgggcgaggccgccagagccctgagcaaggcctgcaccatcgccatcagatacagcgccgtgagacaccagagcgagatcaagcccggcgagcccgagccccagatcctggacttccagacccagcagtacaagctgttccccctgctggccaccgcctacgccttccagttcgtgggcgcctacatgaaggagacctaccacagaatcaacgagggcatcggccagggcgacctgagcgagctgcccgagctgcacgccctgaccgccggcctgaaggccttcaccagctggaccgccaacaccggcatcgaggcctgcagaatggcctgcggcggccacggctacagccactgcagcggcctgcccaacatctacgtgaacttcacccccagctgcaccttcgagggcgagaacaccgtgatgatgctgcagaccgccagattcctgatgaagagctacgaccaggtgcacagcggcaagctggtgtgcggcatggtgagctacctgaacgacctgcccagccagagaatccagccccagcaggtggccgtgtggcccaccatggtggacatcaacagccccgagagcctgaccgaggcctacaagctgagagccgccagactggtggagatcgccgccaagaacctgcagaaggaggtgatccacagaaagagcaaggaggtggcctggaacctgaccagcgtggacctggtgagagccagcgaggcccactgccactacgtggtggtgaagctgttcagcgagaagctgctgaagatccaggacaaggccatccaggccgtgctgagaagcctgtgcctgctgtacagcctgtacggcatcagccagaacgccggcgacttcctgcagggcagcatcatgaccgagccccagatcacccaggtgaaccagagagtgaaggagctgctgaccctgatcagaagcgacgccgtggccctggtggacgccttcgacttccaggacgtgaccctgggcagcgtgctgggcagatacgacggcaacgtgtacgagaacctgttcgagtgggccaagaacagccccctgaacaaggccgaggtgcacgagagctacaagcacctgaagagcctgcagagcaagctgtag

SEQ ID NO: 71674 - DNA, 1983 bp, synthetic construct; identical to SEQ ID NO: 71670
  misc_feature 1..1983: note = Description of Artificial Sequence: Synthetic coding sequence
  source 1..1983: mol_type = other DNA

SEQ ID NO: 71675 - DNA, 2046 bp, synthetic construct
  misc_feature 1..2046: note = Description of Artificial Sequence: Synthetic coding sequence
  source 1..2046: mol_type = other DNA
atgggcagccccgtgcacagagtgagcctgggcgacacctggagcagacagatgcaccccgacatcgagagcgagagatacatgcagagcttcgacgtggagagactgaccaacatcctggacggcggcgcccagaacaccgccctgagaagaaaggtggagagcatcatccacagctaccccgagttcagctgcaaggacaactacttcatgacccagaacgagagatacaaggccgccatgagaagagccttccacatcagactgatcgccagaagactgggctggctggaggacggcagagagctgggctacgcctacagagccctgagcggcgacgtggccctgaacatccacagagtgttcgtgagagccctgagaagcctgggcagcgaggagcagatcgccaagtgggaccccctgtgcaagaacatccagatcatcgccacctacgcccagaccgagctgggccacggcacctacctgcagggcctggagaccgaggccacctacgacgccgccacccaggagttcgtgatccacagccccaccctgaccgccaccaagtggtggcccggcgacctgggcagaagcgccacccacgccctggtgcaggcccagctgatctgcagcggcgccagaagaggcatgcacgccttcatcgtgcccatcagaagcctgcaggaccacacccccctgcccggcatcatcatcggcgacatcggccccaagatggacttcgaccagaccgacaacggcttcctgcagctgaaccacgtgagagtgcccagagagaacatgctgagcagattcgcccaggtgctgcccgacggcacctacgtgaagctgggcaccgcccagagcaactacctgcccatggtggtggtgagagtggagctgctgagcggcgagatcctgcccatcctgcagaaggcctgcgtgatcgccatgagatacagcgtgatcagaagacagagcagactgagacccagcgaccccgaggccaaggtgctggactaccagacccagcagcagaagctgttcccccagctggccatcagctacgccttccacttcctggccgtgagcctgctggagttcttccagcacagctacaccgccatcctgaaccaggacttcagcttcctgcccgagctgcacgccctgagcaccggcatgaaggccatgatgagcgagttctgcacccagggcgccgagatgtgcagaagagcctgcggcggccacggctacagcaagctgagcggcctgcccagcctggtgaccaagctgagcgccagctgcacctacgagggcgagaacaccgtgctgtacctgcaggtggccagattcctggtgaagagctacctgcagacccagatgagccccggcagcaccccccagagaagcctgagccccagcgtggcctacctgaccgcccccgacctggccagatgccccgcccagagagccgccgacttcctgtgccccgagctgtacaccaccgcctgggcccacgtggccgtgagactgatcaaggacagcgtgcagcacctgcagaccctgacccagagcggcgccgaccagcacgaggcctggaaccagaccaccgtgatccacctgcaggccgccaaggtgcactgctactacgtgaccgtgaagggcttcaccgaggccctggagaagctggagaacgagcccgccatccagcaggtgctgaagagactgtgcgacctgcacgccatccacggcatcctgaccaacagcggcgacttcctgcacgacgccttcctgagcggcgcccaggtggacatggccagaaccgcctacctggacctgctgagactgatcagaaaggacgccatcctgctgaccgacgccttcgacttcaccgaccagtgcctgaacagcgccctgggctgctacgacggcaacgtgtacgagagactgttccagtgggcccagaagagccccaccaacacccaggagaaccccgcctacgaggagtacatcagacccctgctgcagagctggagaagcaagctgtag

SEQ ID NO: 71676 - DNA, 516 bp, synthetic construct
  misc_feature 1..516: note = Description of Artificial Sequence: Synthetic coding sequence
  source 1..516: mol_type = other DNA
atgggcagccccgtgcacagagtgagcctgggcgacacctggagcagacagatgcaccccgacatcgagagcgagagatacatgcagagcttcgacgtggagagactgaccaacatcctggacggcggcgcccagaacaccgccctgagaagaaaggtggagagcatcatccacagctaccccgagttcagctgcaaggacaactacttcatgacccagaacgagagatacaaggccgccatgagaagagccttccacatcagactgatcgccagaagactgggctggctggaggacggcagagagctgggctacgcctacagagccctgagcggcgacgtggccctgaacatccacagagtgttcgtgagagccctgagaagcctgggcagcgaggagcagatcgccaagtgggaccccctgtgcaagaacatccagatcatcgccacctacgcccagaccgagctgggccacggcacctacctgcagggcctggagaccgaggccacctactag

SEQ ID NO: 71677 - DNA, 2103 bp, synthetic construct
  misc_feature 1..2103: note = Description of Artificial Sequence: Synthetic coding sequence
  source 1..2103: mol_type = other DNA
atggccagcaccgtggagggcggcgacaccgccctgctgcccgagttccccagaggccccctggacgcctacagagccagagccagcttcagctggaaggagctggccctgttcaccgagggcgagggcatgctgagattcaagaagaccatcttcagcgccctggagaacgaccccctgttcgccagaagccccggcgccgacctgagcctggagaagtacagagagctgaacttcctgagatgcaagagaatcttcgagtacgacttcctgagcgtggaggacatgttcaagagccccctgaaggtgcccgccctgatccagtgcctgggcatgtacgacagcagcctggccgccaagtacctgctgcacagcctggtgttcggcagcgccgtgtacagcagcggcagcgagagacacctgacctacatccagaagatcttcagaatggagatcttcggctgcttcgccctgaccgagctgagccacggcagcaacaccaaggccatcagaaccaccgcccactacgaccccgccaccgaggagttcatcatccacagccccgacttcgaggccgccaagttctgggtgggcaacatgggcaagaccgccacccacgccgtggtgttcgccaagctgtgcgtgcccggcgaccagtgccacggcctgcaccccttcatcgtgcagatcagagaccccaagaccctgctgcccatgcccggcgtgatggtgggcgacatcggcaagaagctgggccagaacggcctggacaacggcttcgccatgttccacaaggtgagagtgcccagacagagcctgctgaacagaatgggcgacgtgacccccgagggcacctacgtgagccccttcaaggacgtgagacagagattcggcgccagcctgggcagcctgagcagcggcagagtgagcatcgtgagcctggccatcctgaacctgaagctggccgtggccatcgccctgagattcagcgccaccagaagacagttcggccccaccgaggaggaggagatccccgtgctggagtaccccatgcagcagtggagactgctgccctacctggccgccgtgtacgccctggaccacttcagcaagagcctgttcctggacctggtggagctgcagagaggcctggccagcggcgacagaagcgccagacaggccgagctgggcagagagatccacgccctggccagcgccagcaagcccctggccagctggaccacccagcagggcatccaggagtgcagagaggcctgcggcggccacggctacctggccatgaacagactgggcgtgctgagagacgacaacgaccccaactgcacctacgagggcgacaacaacatcctgctgcagcagaccagcaactacctgctgggcctgctggcccaccaggtgcacgacggcgcctgcttcagaagccccctgaagagcgtggacttcctggacgcctaccccggcatcctggaccagaagttcgaggtgagcagcgtggccgactgcctggacagcgccgtggccctggccgcctacaagtggctggtgtgctacctgctgagagagacctaccagaagctgaaccaggagaagagaagcggcagcagcgacttcgaggccagaaacaagtgccaggtgagccacggcagacccctggccctggccttcgtggagctgaccgtggtgcagagattccacgagcacgtgcaccagcccagcgtgccccccagcctgagagccgtgctgggcagactgagcgccctgtacgccctgtggagcctgagcagacacgccgccctgctgtacagaggcggctacttcagcggcgagcaggccggcgaggtgctggagagcgccgtgctggccctgtgcagccagctgaaggacgacgccgtggccctggtggacgtgatcgccccccccgacttcgtgctggacagccccatcggcagagccgacggcgagctgtacaagaacctgtggggcgccgtgctgcaggagagcaaggtgctggagagagccagctggtggcccgagttcagcgtgaacaagcccgtgatcggcagcctgaagagcaagctgtag

SEQ ID NO: 71678 - DNA, 1875 bp, synthetic construct
  misc_feature 1..1875: note = Description of Artificial Sequence: Synthetic coding sequence
  source 1..1875: mol_type = other DNA
atggccagcaccgtggagggcggcgacaccgccctgctgcccgagttccccagaggccccctggacgcctacagagccagagccagcttcagctggaaggagctggccctgttcaccgagggcgagggcatgctgagattcaagaagaccatcttcagcgccctggagaacgaccccctgttcgccagaagccccggcgccgacctgagcctggagaagtacagagagctgaacttcctgagatgcaagagaatcttcgagtacgacttcctgagcgtggaggacatgttcaagagccccctgaaggtgcccgccctgatccagtgcctgggcatgtacgacagcagcctggccgccaagtacctgctgcacagcctggtgttcggcagcgccgtgtacagcagcggcagcgagagacacctgacctacatccagaagatcttcagaatggagatcttcggctgcttcgccctgaccgagctgagccacggcagcaacaccaaggccatcagaaccaccgcccactacgaccccgccaccgaggagttcatcatccacagccccgacttcgaggccgccaagttctgggtgggcaacatgggcaagaccgccacccacgccgtggtgttcgccaagctgtgcgtgcccggcgaccagtgccacggcctgcaccccttcatcgtgcagatcagagaccccaagaccctgctgcccatgcccggcgtgatggtgggcgacatcggcaagaagctgggccagaacggcctggacaacggcttcgccatgttccacaaggtgagagtgcccagacagagcctgctgaacagaatgggcgacgtgacccccgagggcacctacgtgagccccttcaaggacgtgagacagagattcggcgccagcctgggcagcctgagcagcggcagagtgagcatcgtgagcctggccatcctgaacctgaagctggccgtggccatcgccctgagattcagcgccaccagaagacagttcggccccaccgaggaggaggagatccccgtgctggagtaccccatgcagcagtggagactgctgccctacctggccgccgtgtacgccctggaccacttcagcaagagcctgttcctggacctggtggagctgcagagaggcctggccagcggcgacagaagcgccagacaggccgagctgggcagagagatccacgccctggccagcgccagcaagcccctggccagctggaccacccagcagggcatccaggagtgcagagaggcctgcggcggccacggctacctggccatgaacagactgggcgtgctgagagacgacaacgaccccaactgcacctacgagggcgacaacaacatcctgctgcagcagaccagcaactacctgctgggcctgctggcccaccaggtgcacgacggcgcctgcttcagaagccccctgaagagcgtggacttcctggacgcctaccccggcatcctggaccagaagttcgaggtgagcagcgtggccgactgcctggacagcgccgtggccctggccgcctacaagtggctggtgtgctacctgctgagagagacctaccagaagctgaaccaggagaagagaagcggcagcagcgacttcgaggccagaaacaagtgccaggtgagccacggcagacccctggccctggccttcgtggagctgaccgtggtgcagagattccacgagcacgtgcaccagcccagcgtgccccccagcctgagagccgtgctgggcagactgagcgccctgtacgccctgtggagcctgagcagacacgccgccctgctgtacagagccgagagaagatgcagctgccccggcagaagagacagaagcagctag

SEQ ID NO: 71679 - DNA, 2103 bp, synthetic construct; identical to SEQ ID NO: 71677
  misc_feature 1..2103: note = Description of Artificial Sequence: Synthetic coding sequence
  source 1..2103: mol_type = other DNA

SEQ ID NO: 71680 - DNA, 2175 bp, synthetic construct
  misc_feature 1..2175: note = Description of Artificial Sequence: Synthetic coding sequence
  source 1..2175: mol_type = other DNA
atgcccagaaacagcggcgccggctacggctgcccccacggcgaccccagcatgctggacagcagagagaccccccaggagagcagacaggacatgatcgtgagaaccacccaggagaagctgaagaccagcagcctgaccgacagacagcccctgagcaaggagagcctgaaccacgccctggagctgagcgtgcccgagaaggtgaacaacgcccagtgggacgcccccgaggaggccctgtggaccaccagagccgacggcagagtgagactgagaatcgaccccagctgcccccagctgccctacaccgtgcacagaatgttctacgaggccctggacaagtacggcgacctgatcgccctgggcttcaagagacaggacaagtgggagcacatcagctacagccagtactacctgctggccagaagagccgccaagggcttcctgaagctgggcctgaagcaggcccacagcgtggccatcctgggcttcaacagccccgagtggttcttcagcgccgtgggcaccgtgttcgccggcggcatcgtgaccggcatctacaccaccagcagccccgaggcctgccagtacatcgcctacgactgctgcgccaacgtgatcatggtggacacccagaagcagctggagaagatcctgaagatctggaagcagctgccccacctgaaggccgtggtgatctacaaggagcccccccccaacaagatggccaacgtgtacaccatggaggagttcatggagctgggcaacgaggtgcccgaggaggccctggacgccatcatcgacacccagcagcccaaccagtgctgcgtgctggtgtacaccagcggcaccaccggcaaccccaagggcgtgatgctgagccaggacaacatcacctggaccgccagatacggcagccaggccggcgacatcagacccgccgaggtgcagcaggaggtggtggtgagctacctgcccctgagccacatcgccgcccagatctacgacctgtggaccggcatccagtggggcgcccaggtgtgcttcgccgagcccgacgccctgaagggcagcctggtgaacaccctgagagaggtggagcccaccagccacatgggcgtgcccagagtgtgggagaagatcatggagagaatccaggaggtggccgcccagagcggcttcatcagaagaaagatgctgctgtgggccatgagcgtgaccctggagcagaacctgacctgccccggcagcgacctgaagcccttcaccaccagactggccgactacctggtgctggccaaggtgagacaggccctgggcttcgccaagtgccagaagaacttctacggcgccgcccccatgatggccgagacccagcacttcttcctgggcctgaacatcagactgtacgccggctacggcctgagcgagaccagcggcccccacttcatgagcagcccctacaactacagactgtacagcagcggcaagctggtgcccggctgcagagtgaagctggtgaaccaggacgccgagggcatcggcgagatctgcctgtggggcagaaccatcttcatgggctacctgaacatggaggacaagacctgcgaggccatcgacgaggagggctggctgcacaccggcgacgccggcagactggacgccgacggcttcctgtacatcaccggcagactgaaggagctgatcatcaccgccggcggcgagaacgtgccccccgtgcccatcgaggaggccgtgaagatggagctgcccatcatcagcaacgccatgctgatcggcgaccagagaaagttcctgagcatgctgctgaccctgaagtgcaccctggaccccgacaccagcgaccagaccgacaacctgaccgagcaggccatggagttctgccagagagtgggcagcagagccaccaccgtgagcgagatcatcgagaagaaggacgaggccgtgtaccaggccatcgaggagggcatcagaagagtgaacatgaacgccgccgccagaccctaccacatccagaagtgggccatcctggagagagacttcagcatcagcggcggcgagctgggccccaccatgaagctgaagagactgaccgtgctggagaagtacaagggcatcatcgacagcttctaccaggagcagaagatgtag

SEQ ID NO: 71681 - DNA, 1449 bp, synthetic construct
  misc_feature 1..1449: note = Description of Artificial Sequence: Synthetic coding sequence
  source 1..1449: mol_type = other DNA
atggccaacgtgtacaccatggaggagttcatggagctgggcaacgaggtgcccgaggaggccctggacgccatcatcgacacccagcagcccaaccagtgctgcgtgctggtgtacaccagcggcaccaccggcaaccccaagggcgtgatgctgagccaggacaacatcacctggaccgccagatacggcagccaggccggcgacatcagacccgccgaggtgcagcaggaggtggtggtgagctacctgcccctgagccacatcgccgcccagatctacgacctgtggaccggcatccagtggggcgcccaggtgtgcttcgccgagcccgacgccctgaagggcagcctggtgaacaccctgagagaggtggagcccaccagccacatgggcgtgcccagagtgtgggagaagatcatggagagaatccaggaggtggccgcccagagcggcttcatcagaagaaagatgctgctgtgggccatgagcgtgaccctggagcagaacctgacctgccccggcagcgacctgaagcccttcaccaccagactggccgactacctggtgctggccaaggtgagacaggccctgggcttcgccaagtgccagaagaacttctacggcgccgcccccatgatggccgagacccagcacttcttcctgggcctgaacatcagactgtacgccggctacggcctgagcgagaccagcggcccccacttcatgagcagcccctacaactacagactgtacagcagcggcaagctggtgcccggctgcagagtgaagctggtgaaccaggacgccgagggcatcggcgagatctgcctgtggggcagaaccatcttcatgggctacctgaacatggaggacaagacctgcgaggccatcgacgaggagggctggctgcacaccggcgacgccggcagactggacgccgacggcttcctgtacatcaccggcagactgaaggagctgatcatcaccgccggcggcgagaacgtgccccccgtgcccatcgaggaggccgtgaagatggagctgcccatcatcagcaacgccatgctgatcggcgaccagagaaagttcctgagcatgctgctgaccctgaagtgcaccctggaccccgacaccagcgaccagaccgacaacctgaccgagcaggccatggagttctgccagagagtgggcagcagagccaccaccgtgagcgagatcatcgagaagaaggacgaggccgtgtaccaggccatcgaggagggcatcagaagagtgaacatgaacgccgccgccagaccctaccacatccagaagtgggccatcctggagagagacttcagcatcagcggcggcgagctgggccccaccatgaagctgaagagactgaccgtgctggagaagtacaagggcatcatcgacagcttctaccaggagcagaagatgtag

SEQ ID NO: 71682 - DNA, 2001 bp, synthetic construct
  misc_feature 1..2001: note = Description of Artificial Sequence: Synthetic coding sequence
  source 1..2001: mol_type = other DNA
atgaccggcacccccaagacccaggagggcgccaaggacctggaggtggacatgaacaagaccgaggtgacccccagactgtggaccacctgcagagacggcgaggtgctgctgagactgagcaagcacggccccggccacgagacccccatgaccatccccgagttcttcagagagagcgtgaacagattcggcacctaccccgccctggccagcaagaacggcaagaagtgggagatcctgaacttcaaccagtactacgaggcctgcagaaaggccgccaagagcctgatcaagctgggcctggagagattccacggcgtgggcatcctgggcttcaacagcgccgagtggttcatcaccgccgtgggcgccatcctggccggcggcctgtgcgtgggcatctacgccaccaacagcgccgaggtgtgccagtacgtgatcacccacgccaaggtgaacatcctgctggtggagaacgaccagcagctgcagaagatcctgagcatcccccagagcagcctggagcccctgaaggccatcatccagtacagactgcccatgaagaagaacaacaacctgtacagctgggacgacttcatggagctgggcagaagcatccccgacacccagctggagcaggtgatcgagagccagaaggccaaccagtgcgccgtgctgatctacaccagcggcaccaccggcatccccaagggcgtgatgctgagccacgacaacatcacctggatcgccggcgccgtgaccaaggacttcaagctgaccgacaagcacgagaccgtggtgagctacctgcccctgagccacatcgccgcccagatgatggacatctgggtgcccatcaagatcggcgccctgacctacttcgcccaggccgacgccctgaagggcaccctggtgagcaccctgaaggaggtgaagcccaccgtgttcatcggcgtgccccagatctgggagaagatccacgagatggtgaagaagaacagcgccaagagcatgggcctgaagaagaaggccttcgtgtgggccagaaacatcggcttcaaggtgaacagcaagaagatgctgggcaagtacaacacccccgtgagctacagaatggccaagaccctggtgttcagcaaggtgaagaccagcctgggcctggaccactgccacagcttcatcagcggcaccgcccccctgaaccaggagaccgccgagttcttcctgagcctggacatccccatcggcgagctgtacggcctgagcgagagcagcggcccccacaccatcagcaaccagaacaactacagactgctgagctgcggcaagatcctgaccggctgcaagaacatgctgttccagcagaacaaggacggcatcggcgagatctgcctgtggggcagacacatcttcatgggctacctggagagcgagaccgagaccaccgaggccatcgacgacgagggctggctgcacagcggcgacctgggccagctggacggcctgggcttcctgtacgtgaccggccacatcaaggagatcctgatcaccgccggcggcgagaacgtgccccccatccccgtggagaccctggtgaagaagaagatccccatcatcagcaacgccatgctggtgggcgacaagctgaagttcctgagcatgctgctgaccctgaagtgcgagatgaaccagatgagcggcgagcccctggacaagctgaacttcgaggccatcaacttctgcagaggcctgggcagccaggccagcaccgtgaccgagatcgtgaagcagcaggaccccctggtgtacaaggccatccagcagggcatcaacgccgtgaaccaggaggccatgaacaacgcccagagaatcgagaagtgggtgatcctggagaaggacttcagcatctacggcggcgagctgggccccatgatgaagctgaagagacacttcgtggcccagaagtacaagaagcagatcgaccacatgtaccactag

SEQ ID NO: 71683 - DNA, 1848 bp, synthetic construct
  misc_feature 1..1848: note = Description of Artificial Sequence: Synthetic coding sequence
  source 1..1848: mol_type = other DNA
atggccgtgtacgtgggcatgctgagactgggcagactgtgcgccggcagcagcggcgtgctgggcgccagagccgccctgagcagaagctggcaggaggccagactgcagggcgtgagattcctgagcagcagagaggtggacagaatggtgagcacccccatcggcggcctgagctacgtgcagggctgcaccaagaagcacctgaacagcaagaccgtgggccagtgcctggagaccaccgcccagagagtgcccgagagagaggccctggtggtgctgcacgaggacgtgagactgaccttcgcccagctgaaggaggaggtggacaaggccgccagcggcctgctgagcatcggcctgtgcaagggcgacagactgggcatgtggggccccaacagctacgcctgggtgctgatgcagctggccaccgcccaggccggcatcatcctggtgagcgtgaaccccgcctaccaggccatggagctggagtacgtgctgaagaaggtgggctgcaaggccctggtgttccccaagcagttcaagacccagcagtactacaacgtgctgaagcagatctgccccgaggtggagaacgcccagcccggcgccctgaagagccagagactgcccgacctgaccaccgtgatcagcgtggacgcccccctgcccggcaccctgctgctggacgaggtggtggccgccggcagcaccagacagcacctggaccagctgcagtacaaccagcagttcctgagctgccacgaccccatcaacatccagttcaccagcggcaccaccggcagccccaagggcgccaccctgagccactacaacatcgtgaacaacagcaacatcctgggcgagagactgaagctgcacgagaagacccccgagcagctgagaatgatcctgcccaaccccctgtaccactgcctgggcagcgtggccggcaccatgatgtgcctgatgtacggcgccaccctgatcctggccagccccatcttcaacggcaagaaggccctggaggccatcagcagagagagaggcaccttcctgtacggcacccccaccatgttcgtggacatcctgaaccagcccgacttcagcagctacgacatcagcaccatgtgcggcggcgtgatcgccggcagccccgccccccccgagctgatcagagccatcatcaacaagatcaacatgaaggacctggtggtggcctacggcaccaccgagaacagccccgtgaccttcgcccacttccccgaggacaccgtggagcagaaggccgagagcgtgggcagaatcatgccccacaccgaggccagaatcatgaacatggaggccggcaccctggccaagctgaacacccccggcgagctgtgcatcagaggctactgcgtgatgctgggctactggggcgagccccagaagaccgaggaggccgtggaccaggacaagtggtactggaccggcgacgtggccaccatgaacgagcagggcttctgcaagatcgtgggcagaagcaaggacatgatcatcagaggcggcgagaacatctaccccgccgagctggaggacttcttccacacccaccccaaggtgcaggaggtgcaggtggtgggcgtgaaggacgacagaatgggcgaggagatctgcgcctgcatcagactgaaggacggcgaggagaccaccgtggaggagatcaaggccttctgcaagggcaagatcagccacttcaagatccccaagtacatcgtgttcgtgaccaactaccccctgaccatcagcggcaagatccagaagttcaagctgagagagcagatggagagacacctgaacctgtag

SEQ ID NO: 71684 - DNA, 1923 bp, synthetic construct
  misc_feature 1..1923: note = Description of Artificial Sequence: Synthetic coding sequence
  source 1..1923: mol_type = other DNA
atggccgtgtacgtgggcatgctgagactgggcagactgtgcgccggcagcagcggcgtgctgggcgccagagccgccctgagcagaagctggcaggaggccagactgcagggcgtgagattcctgagcgccagaggcggcatggaggccggcagacagagaatcagcgtgcccagcagcttcaccgccagcgccgccgcccacagcagagaggtggacagaatggtgagcacccccatcggcggcctgagctacgtgcagggctgcaccaagaagcacctgaacagcaagaccgtgggccagtgcctggagaccaccgcccagagagtgcccgagagagaggccctggtggtgctgcacgaggacgtgagactgaccttcgcccagctgaaggaggaggtggacaaggccgccagcggcctgctgagcatcggcctgtgcaagggcgacagactgggcatgtggggccccaacagctacgcctgggtgctgatgcagctggccaccgcccaggccggcatcatcctggtgagcgtgaaccccgcctaccaggccatggagctggagtacgtgctgaagaaggtgggctgcaaggccctggtgttccccaagcagttcaagacccagcagtactacaacgtgctgaagcagatctgccccgaggtggagaacgcccagcccggcgccctgaagagccagagactgcccgacctgaccaccgtgatcagcgtggacgcccccctgcccggcaccctgctgctggacgaggtggtggccgccggcagcaccagacagcacctggaccagctgcagtacaaccagcagttcctgagctgccacgaccccatcaacatccagttcaccagcggcaccaccggcagccccaagggcgccaccctgagccactacaacatcgtgaacaacagcaacatcctgggcgagagactgaagctgcacgagaagacccccgagcagctgagaatgatcctgcccaaccccctgtaccactgcctgggcagcgtggccggcaccatgatgtgcctgatgtacggcgccaccctgatcctggccagccccatcttcaacggcaagaaggccctggaggccatcagcagagagagaggcaccttcctgtacggcacccccaccatgttcgtggacatcctgaaccagcccgacttcagcagctacgacatcagcaccatgtgcggcggcgtgatcgccggcagccccgccccccccgagctgatcagagccatcatcaacaagatcaacatgaaggacctggtggtggcctacggcaccaccgagaacagccccgtgaccttcgcccacttccccgaggacaccgtggagcagaaggccgagagcgtgggcagaatcatgccccacaccgaggccagaatcatgaacatggaggccggcaccctggccaagctgaacacccccggcgagctgtgcatcagaggctactgcgtgatgctgggctactggggcgagccccagaagaccgaggaggccgtggaccaggacaagtggtactggaccggcgacgtggccaccatgaacgagcagggcttctgcaagatcgtgggcagaagcaaggacatgatcatcagaggcggcgagaacatctaccccgccgagctggaggacttcttccacacccaccccaaggtgcaggaggtgcaggtggtgggcgtgaaggacgacagaatgggcgaggagatctgcgcctgcatcagactgaaggacggcgaggagaccaccgtggaggagatcaaggccttctgcaagggcaagatcagccacttcaagatccccaagtacatcgtgttcgtgaccaactaccccctgaccatcagcggcaagatccagaagttcaagctgagagagcagatggagagacacctgaacctgtag

SEQ ID NO: 71685 - DNA, 1809 bp, synthetic construct
  misc_feature 1..1809: note = Description of Artificial Sequence: Synthetic coding sequence
  source 1..1809: mol_type = other DNA
atggccgtgtacgtgggcatgctgagactgggcagactgtgcgccggcagcagcggcgtgctgggcgccagagccgccctgagcagaagctggcaggaggccagactgcagggcgtgagattcctgagcagcagagaggtggacagaatggtgagcacccccatcggcggcctgagctacgtgcagggctgcaccaagaagcacctgaacagcaagaccgtgggccagtgcctggagaccaccgcccagagagtgcccgagagagaggccctggtggtgctgcacgaggacgtgagactgaccttcgcccagctgaaggaggaggtggacaaggccgccagcggcctgctgagcatcggcctgtgcaagggcgacagactgggcatgtggggccccaacagctacgcctgggtgctgatgcagctggccaccgcccaggccatggagctggagtacgtgctgaagaaggtgggctgcaaggccctggtgttccccaagcagttcaagacccagcagtactacaacgtgctgaagcagatctgccccgaggtggagaacgcccagcccggcgccctgaagagccagagactgcccgacctgaccaccgtgatcagcgtggacgcccccctgcccggcaccctgctgctggacgaggtggtggccgccggcagcaccagacagcacctggaccagctgcagtacaaccagcagttcctgagctgccacgaccccatcaacatccagttcaccagcggcaccaccggcagccccaagggcgccaccctgagccactacaacatcgtgaacaacagcaacatcctgggcgagagactgaagctgcacgagaagacccccgagcagctgagaatgatcctgcccaaccccctgtaccactgcctgggcagcgtggccggcaccatgatgtgcctgatgtacggcgccaccctgatcctggccagccccatcttcaacggcaagaaggccctggaggccatcagcagagagagaggcaccttcctgtacggcacccccaccatgttcgtggacatcctgaaccagcccgacttcagcagctacgacatcagcaccatgtgcggcggcgtgatcgccggcagccccgccccccccgagctgatcagagccatcatcaacaagatcaacatgaaggacctggtggtggcctacggcaccaccgagaacagccccgtgaccttcgcccacttccccgaggacaccgtggagcagaaggccgagagcgtgggcagaatcatgccccacaccgaggccagaatcatgaacatggaggccggcaccctggccaagctgaacacccccggcgagctgtgcatcagaggctactgcgtgatgctgggctactggggcgagccccagaagaccgaggaggccgtggaccaggacaagtggtactggaccggcgacgtggccaccatgaacgagcagggcttctgcaagatcgtgggcagaagcaaggacatgatcatcagaggcggcgagaacatctaccccgccgagctggaggacttcttccacacccaccccaaggtgcaggaggtgcaggtggtgggcgtgaaggacgacagaatgggcgaggagatctgcgcctgcatcagactgaaggacggcgaggagaccaccgtggaggagatcaaggccttctgcaagggcaagatcagccacttcaagatccccaagtacatcgtgttcgtgaccaactaccccctgaccatcagcggcaagatccagaagttcaagctgagagagcagatggagagacacctgaacctgtag

SEQ ID NO: 71686 - DNA, 1719 bp, synthetic construct
  misc_feature 1..1719: note = Description of Artificial Sequence: Synthetic coding sequence
  source 1..1719: mol_type = other DNA
atggccgtgtacgtgggcatgctgagactgggcagactgtgcgccggcagcagcggcgtgctgggcgccagagccgccctgagcagaagctggcaggaggccagactgcagggcgtgagattcctgagcagcagagaggtggacagaatggtgagcacccccatcggcggcctgagctacgtgcagggctgcaccaagaagcacctgaacagcaagaccgtgggccagtgcctggagaccaccgcccagagagtgcccgagagagaggccctggtggtgctgcacgaggacgtgagactgaccttcgcccagctgaaggaggaggtgagcgtgaaccccgcctaccaggccatggagctggagtacgtgctgaagaaggtgggctgcaaggccctggtgttccccaagcagttcaagacccagcagtactacaacgtgctgaagcagatctgccccgaggtggagaacgcccagcccggcgccctgaagagccagagactgcccgacctgaccaccgtgatcagcgtggacgcccccctgcccggcaccctgctgctggacgaggtggtggccgccggcagcaccagacagcacctggaccagctgcagtacaaccagcagttcctgagctgccacgaccccatcaacatccagttcaccagcggcaccaccggcagccccaagggcgccaccctgagccactacaacatcgtgaacaacagcaacatcctgggcgagagactgaagctgcacgagaagacccccgagcagctgagaatgatcctgcccaaccccctgtaccactgcctgggcagcgtggccggcaccatgatgtgcctgatgtacggcgccaccctgatcctggccagccccatcttcaacggcaagaaggccctggaggccatcagcagagagagaggcaccttcctgtacggcacccccaccatgttcgtggacatcctgaaccagcccgacttcagcagctacgacatcagcaccatgtgcggcggcgtgatcgccggcagccccgccccccccgagctgatcagagccatcatcaacaagatcaacatgaaggacctggtggtggcctacggcaccaccgagaacagccccgtgaccttcgcccacttccccgaggacaccgtggagcagaaggccgagagcgtgggcagaatcatgccccacaccgaggccagaatcatgaacatggaggccggcaccctggccaagctgaacacccccggcgagctgtgcatcagaggctactgcgtgatgctgggctactggggcgagccccagaagaccgaggaggccgtggaccaggacaagtggtactggaccggcgacgtggccaccatgaacgagcagggcttctgcaagatcgtgggcagaagcaaggacatgatcatcagaggcggcgagaacatctaccccgccgagctggaggacttcttccacacccaccccaaggtgcaggaggtgcaggtggtgggcgtgaaggacgacagaatgggcgaggagatctgcgcctgcatcagactgaaggacggcgaggagaccaccgtggaggagatcaaggccttctgcaagggcaagatcagccacttcaagatccccaagtacatcgtgttcgtgaccaactaccccctgaccatcagcggcaagatccagaagttcaagctgagagagcagatggagagacacctgaacctgtag

SEQ ID NO: 71687 - DNA, 1368 bp, synthetic construct
  misc_feature 1..1368: note = Description of Artificial Sequence: Synthetic coding sequence
  source 1..1368: mol_type = other DNA
atggagctggagtacgtgctgaagaaggtgggctgcaaggccctggtgttccccaagcagttcaagacccagcagtactacaacgtgctgaagcagatctgccccgaggtggagaacgcccagcccggcgccctgaagagccagagactgcccgacctgaccaccgtgatcagcgtggacgcccccctgcccggcaccctgctgctggacgaggtggtggccgccggcagcaccagacagcacctggaccagctgcagtacaaccagcagttcctgagctgccacgaccccatcaacatccagttcaccagcggcaccaccggcagccccaagggcgccaccctgagccactacaacatcgtgaacaacagcaacatcctgggcgagagactgaagctgcacgagaagacccccgagcagctgagaatgatcctgcccaaccccctgtaccactgcctgggcagcgtggccggcaccatgatgtgcctgatgtacggcgccaccctgatcctggccagccccatcttcaacggcaagaaggccctggaggccatcagcagagagagaggcaccttcctgtacggcacccccaccatgttcgtggacatcctgaaccagcccgacttcagcagctacgacatcagcaccatgtgcggcggcgtgatcgccggcagccccgccccccccgagctgatcagagccatcatcaacaagatcaacatgaaggacctggtggtggcctacggcaccaccgagaacagccccgtgaccttcgcccacttccccgaggacaccgtggagcagaaggccgagagcgtgggcagaatcatgccccacaccgaggccagaatcatgaacatggaggccggcaccctggccaagctgaacacccccggcgagctgtgcatcagaggctactgcgtgatgctgggctactggggcgagccccagaagaccgaggaggccgtggaccaggacaagtggtactggaccggcgacgtggccaccatgaacgagcagggcttctgcaagatcgtgggcagaagcaaggacatgatcatcagaggcggcgagaacatctaccccgccgagctggaggacttcttccacacccaccccaaggtgcaggaggtgcaggtggtgggcgtgaaggacgacagaatgggcgaggagatctgcgcctgcatcagactgaaggacggcgaggagaccaccgtggaggagatcaaggccttctgcaagggcaagatcagccacttcaagatccccaagtacatcgtgttcgtgaccaactaccccctgaccatcagcggcaagatccagaagttcaagctgagagagcagatggagagacacctgaacctgtag

SEQ ID NO: 71688 - DNA, 1731 bp, synthetic construct
  misc_feature 1..1731: note = Description of Artificial Sequence: Synthetic coding sequence
  source 1..1731: mol_type = other DNA
atgctgccccacgtggtgctgaccttcagaagactgggctgcgccctggccagctgcagactggcccccgccagacacagaggcagcggcctgctgcacaccgcccccgtggccagaagcgacagaagcgcccccgtgttcaccagagccctggccttcggcgacagaatcgccctggtggaccagcacggcagacacacctacagagagctgtacagcagaagcctgagactgagccaggagatctgcagactgtgcggctgcgtgggcggcgacctgagagaggagagagtgagcttcctgtgcgccaacgacgccagctacgtggtggcccagtgggccagctggatgagcggcggcgtggccgtgcccctgtacagaaagcaccccgccgcccagctggagtacgtgatctgcgacagccagagcagcgtggtgctggccagccaggagtacctggagctgctgagccccgtggtgagaaagctgggcgtgcccctgctgcccctgacccccgccatctacaccggcgccgtggaggagcccgccgaggtgcccgtgcccgagcagggctggagaaacaagggcgccatgatcatctacaccagcggcaccaccggcagacccaagggcgtgctgagcacccaccagaacatcagagccgtggtgaccggcctggtgcacaagtgggcctggaccaaggacgacgtgatcctgcacgtgctgcccctgcaccacgtgcacggcgtggtgaacgccctgctgtgccccctgtgggtgggcgccacctgcgtgatgatgcccgagttcagcccccagcaggtgtgggagaagttcctgagcagcgagacccccagaatcaacgtgttcatggccgtgcccaccatctacaccaagctgatggagtactacgacagacacttcacccagccccacgcccaggacttcctgagagccgtgtgcgaggagaagatcagactgatggtgagcggcagcgccgccctgcccctgcccgtgctggagaagtggaagaacatcaccggccacaccctgctggagagatacggcatgaccgagatcggcatggccctgagcggccccctgaccaccgccgtgagactgcccggcagcgtgggcacccccctgcccggcgtgcaggtgagaatcgtgagcgagaacccccagagagaggcctgcagctacaccatccacgccgagggcgacgagagaggcaccaaggtgacccccggcttcgaggagaaggagggcgagctgctggtgagaggccccagcgtgttcagagagtactggaacaagcccgaggagaccaagagcgccttcaccctggacggctggttcaagaccggcgacaccgtggtgttcaaggacggccagtactggatcagaggcagaaccagcgtggacatcatcaagaccggcggctacaaggtgagcgccctggaggtggagtggcacctgctggcccaccccagcatcaccgacgtggccgtgatcggcgtgcccgacatgacctggggccagagagtgaccgccgtggtgaccctgagagagggccacagcctgagccacagagagctgaaggagtgggccagaaacgtgctggccccctacgccgtgcccagcgagctggtgctggtggaggagatccccagaaaccagatgggcaagatcgacaagaaggccctgatcagacacttccaccccagctag

SEQ ID NO: 71689 - DNA, 1731 bp, synthetic construct; identical to SEQ ID NO: 71688
  misc_feature 1..1731: note = Description of Artificial Sequence: Synthetic coding sequence
  source 1..1731: mol_type = other DNA

SEQ ID NO: 71690 - DNA, 714 bp, synthetic construct
  misc_feature 1..714: note = Description of Artificial Sequence: Synthetic coding sequence
  source 1..714: mol_type = other DNA
atgctgccccacgtggtgctgaccttcagaagactgggctgcgccctggccagctgcagactggcccccgccagacacagaggcagcggcctgctgcacaccgcccccgtggccagaagcgacagaagcgcccccgtgttcaccagagccctggccttcggcgacagaatcgccctggtggaccagcacggcagacacacctacagagagctgtacagcagaagcctgagactgagccaggagatctgcagactgtgcggctgcgtgggcggcgacctgagagaggagagagtgagcttcctgtgcgccaacgacgccagctacgtggtggcccagtgggccagctggatgagcggcggcgtggccgtgcccctgtacagaaagcaccccgccgcccagctggagtacgtgatctgcgacagccagagcagcgtggtgctggccagccaggagtacctggagctgctgagccccgtggtgagaaagctgggcgtgcccctgctgcccctgacccccgccatctacaccggcgccgtggaggagcccgccgaggtgcccgtgcccgagcagggctggagaaacaagggcgccatgatcatctacaccagcggcaccaccggcagacccaagggcgtgctgagcacccaccagaacatcagagccgtggtgaccggcctggtgcacaagtgggcctggaccaaggacgacgtgtag

SEQ ID NO: 71691 - DNA, 2097 bp, synthetic construct
  misc_feature 1..2097: note = Description of Artificial Sequence: Synthetic coding sequence
  source 1..2097: mol_type = other DNA
atgcaggcccacgagctgttcagatacttcagaatgcccgagctggtggacttcagacagtacgtgagaaccctgcccaccaacaccctgatgggcttcggcgccttcgccgccctgaccaccttctggtacgccaccagacccaagcccctgaagcccccctgcgacctgagcatgcagagcgtggaggtggccggcagcggcggcgccagaagaagcgccctgctggacagcgacgagcccctggtgtacttctacgacgacgtgaccaccctgtacgagggcttccagagaggcatccaggtgagcaacaacggcccctgcctgggcagcagaaagcccgaccagccctacgagtggctgagctacaagcaggtggccgagctgagcgagtgcatcggcagcgccctgatccagaagggcttcaagaccgcccccgaccagttcatcggcatcttcgcccagaacagacccgagtgggtgatcatcgagcagggctgcttcgcctacagcatggtgatcgtgcccctgtacgacaccctgggcaacgaggccatcacctacatcgtgaacaaggccgagctgagcctggtgttcgtggacaagcccgagaaggccaagctgctgctggagggcgtggagaacaagctgatccccggcctgaagatcatcgtggtgatggacgcctacggcagcgagctggtggagagaggccagagatgcggcgtggaggtgaccagcatgaaggccatggaggacctgggcagagccaacagaagaaagcccaagccccccgcccccgaggacctggccgtgatctgcttcaccagcggcaccaccggcaaccccaagggcgccatggtgacccacagaaacatcgtgagcgactgcagcgccttcgtgaaggccaccgagaacaccgtgaacccctgccccgacgacaccctgatcagcttcctgcccctggcccacatgttcgagagagtggtggagtgcgtgatgctgtgccacggcgccaagatcggcttcttccagggcgacatcagactgctgatggacgacctgaaggtgctgcagcccaccgtgttccccgtggtgcccagactgctgaacagaatgttcgacagaatcttcggccaggccaacaccaccctgaagagatggctgctggacttcgccagcaagagaaaggaggccgagctgagaagcggcatcatcagaaacaacagcctgtgggacagactgatcttccacaaggtgcagagcagcctgggcggcagagtgagactgatggtgaccggcgccgcccccgtgagcgccaccgtgctgaccttcctgagagccgccctgggctgccagttctacgagggctacggccagaccgagtgcaccgccggctgctgcctgaccatgcccggcgactggaccgccggccacgtgggcgcccccatgccctgcaacctgatcaagctggtggacgtggaggagatgaactacatggccgccgagggcgagggcgaggtgtgcgtgaagggccccaacgtgttccagggctacctgaaggaccccgccaagaccgccgaggccctggacaaggacggctggctgcacaccggcgacatcggcaagtggctgcccaacggcaccctgaagatcatcgacagaaagaagcacatcttcaagctggcccagggcgagtacatcgcccccgagaagatcgagaacatctacatgagaagcgagcccgtggcccaggtgttcgtgcacggcgagagcctgcaggccttcctgatcgccatcgtggtgcccgacgtggagaccctgtgcagctgggcccagaagagaggcttcgagggcagcttcgaggagctgtgcagaaacaaggacgtgaagaaggccatcctggaggacatggtgagactgggcaaggacagcggcctgaagcccttcgagcaggtgaagggcatcaccctgcaccccgagctgttcagcatcgacaacggcctgctgacccccaccatgaaggccaagagacccgagctgagaaactacttcagaagccagatcgacgacctgtacagcaccatcaaggtgtag

SEQ ID NO: 71692 - DNA, 1584 bp, synthetic construct
  misc_feature 1..1584: note = Description of Artificial Sequence: Synthetic coding sequence
  source 1..1584: mol_type = other DNA
atggtgatcgtgcccctgtacgacaccctgggcaacgaggccatcacctacatcgtgaacaaggccgagctgagcctggtgttcgtggacaagcccgagaaggccaagctgctgctggagggcgtggagaacaagctgatccccggcctgaagatcatcgtggtgatggacgcctacggcagcgagctggtggagagaggccagagatgcggcgtggaggtgaccagcatgaaggccatggaggacctgggcagagccaacagaagaaagcccaagccccccgcccccgaggacctggccgtgatctgcttcaccagcggcaccaccggcaaccccaagggcgccatggtgacccacagaaacatcgtgagcgactgcagcgccttcgtgaaggccaccgagaacaccgtgaacccctgccccgacgacaccctgatcagcttcctgcccctggcccacatgttcgagagagtggtggagtgcgtgatgctgtgccacggcgccaagatcggcttcttccagggcgacatcagactgctgatggacgacctgaaggtgctgcagcccaccgtgttccccgtggtgcccagactgctgaacagaatgttcgacagaatcttcggccaggccaacaccaccctgaagagatggctgctggacttcgccagcaagagaaaggaggccgagctgagaagcggcatcatcagaaacaacagcctgtgggacagactgatcttccacaaggtgcagagcagcctgggcggcagagtgagactgatggtgaccggcgccgcccccgtgagcgccaccgtgctgaccttcctgagagccgccctgggctgccagttctacgagggctacggccagaccgagtgcaccgccggctgctgcctgaccatgcccggcgactggaccgccggccacgtgggcgcccccatgccctgcaacctgatcaagctggtggacgtggaggagatgaactacatggccgccgagggcgagggcgaggtgtgcgtgaagggccccaacgtgttccagggctacctgaaggaccccgccaagaccgccgaggccctggacaaggacggctggctgcacaccggcgacatcggcaagtggctgcccaacggcaccctgaagatcatcgacagaaagaagcacatcttcaagctggcccagggcgagtacatcgcccccgagaagatcgagaacatctacatgagaagcgagcccgtggcccaggtgttcgtgcacggcgagagcctgcaggccttcctgatcgccatcgtggtgcccgacgtggagaccctgtgcagctgggcccagaagagaggcttcgagggcagcttcgaggagctgtgcagaaacaaggacgtgaagaaggccatcctggaggacatggtgagactgggcaaggacagcggcctgaagcccttcgagcaggtgaagggcatcaccctgcaccccgagctgttcagcatcgacaacggcctgctgacccccaccatgaaggccaagagacccgagctgagaaactacttcagaagccagatcgacgacctgtacagcaccatcaaggtgtag

SEQ ID NO: 71693 - DNA, 1584 bp, synthetic construct; identical to SEQ ID NO: 71692
  misc_feature 1..1584: note = Description of Artificial Sequence: Synthetic coding sequence
  source 1..1584: mol_type = other DNA

SEQ ID NO: 71694 - DNA, 2097 bp, synthetic construct; identical to SEQ ID NO: 71691
  misc_feature 1..2097: note = Description of Artificial Sequence: Synthetic coding sequence
  source 1..2097: mol_type = other DNA

SEQ ID NO: 71695 - DNA, 1995 bp, synthetic construct
  misc_feature 1..1995: note = Description of Artificial Sequence: Synthetic coding sequence
  source 1..1995: mol_type = other DNA
atgcaggcccacgagctgttcagatacttcagaatgcccgagctggtggacttcagacagtacgtgagaaccctgcccaccaacaccctgatgggcttcggcgccttcgccgccctgaccaccttctggtacgccaccagacccaagcccctgaagcccccctgcgacctgagcatgcagagcgtggaggtggccggcagcggcggcgccagaagaagcgccctgctggacagcgacgagcccctggtgtacttctacgacgacgtgaccaccctgtacgagggcttccagagaggcatccaggtgagcaacaacggcccctgcctgggcagcagaaagcccgaccagccctacgagtggctgagctacaagcagtgggtgatcatcgagcagggctgcttcgcctacagcatggtgatcgtgcccctgtacgacaccctgggcaacgaggccatcacctacatcgtgaacaaggccgagctgagcctggtgttcgtggacaagcccgagaaggccaagctgctgctggagggcgtggagaacaagctgatccccggcctgaagatcatcgtggtgatggacgcctacggcagcgagctggtggagagaggccagagatgcggcgtggaggtgaccagcatgaaggccatggaggacctgggcagagccaacagaagaaagcccaagccccccgcccccgaggacctggccgtgatctgcttcaccagcggcaccaccggcaaccccaagggcgccatggtgacccacagaaacatcgtgagcgactgcagcgccttcgtgaaggccaccgagaacaccgtgaacccctgccccgacgacaccctgatcagcttcctgcccctggcccacatgttcgagagagtggtggagtgcgtgatgctgtgccacggcgccaagatcggcttcttccagggcgacatcagactgctgatggacgacctgaaggtgctgcagcccaccgtgttccccgtggtgcccagactgctgaacagaatgttcgacagaatcttcggccaggccaacaccaccctgaagagatggctgctggacttcgccagcaagagaaaggaggccgagctgagaagcggcatcatcagaaacaacagcctgtgggacagactgatcttccacaaggtgcagagcagcctgggcggcagagtgagactgatggtgaccggcgccgcccccgtgagcgccaccgtgctgaccttcctgagagccgccctgggctgccagttctacgagggctacggccagaccgagtgcaccgccggctgctgcctgaccatgcccggcgactggaccgccggccacgtgggcgcccccatgccctgcaacctgatcaagctggtggacgtggaggagatgaactacatggccgccgagggcgagggcgaggtgtgcgtgaagggccccaacgtgttccagggctacctgaaggaccccgccaagaccgccgaggccctggacaaggacggctggctgcacaccggcgacatcggcaagtggctgcccaacggcaccctgaagatcatcgacagaaagaagcacatcttcaagctggcccagggcgagtacatcgcccccgagaagatcgagaacatctacatgagaagcgagcccgtggcccaggtgttcgtgcacggcgagagcctgcaggccttcctgatcgccatcgtggtgcccgacgtggagaccctgtgcagctgggcccagaagagaggcttcgagggcagcttcgaggagctgtgcagaaacaaggacgtgaagaaggccatcctggaggacatggtgagactgggcaaggacagcggcctgaagcccttcgagcaggtgaagggcatcaccctgcaccccgagctgttcagcatcgacaacggcctgctgacccccaccatgaaggccaagagacccgagctgagaaactacttcagaagccagatcgacgacctgtacagcaccatcaaggtgtag

SEQ ID NO: 71696 - DNA, 2097 bp, synthetic construct; identical to SEQ ID NO: 71691
  misc_feature 1..2097: note = Description of Artificial Sequence: Synthetic coding sequence
  source 1..2097: mol_type = other DNA

SEQ ID NO: 71697 - DNA, 2163 bp, synthetic construct
  misc_feature 1..2163: note = Description of Artificial Sequence: Synthetic coding sequence
  source 1..2163: mol_type = other DNA
atgaacaaccacgtgagcagcaagcccagcaccatgaagctgaagcacaccatcaaccccatcctgctgtacttcatccacttcctgatcagcctgtacaccatcctgacctacatccccttctacttcttcagcgagagcagacaggagaagagcaacagaatcaaggccaagcccgtgaacagcaagcccgacagcgcctacagaagcgtgaacagcctggacggcctggccagcgtgctgtaccccggctgcgacaccctggacaaggtgttcacctacgccaagaacaagttcaagaacaagagactgctgggcaccagagaggtgctgaacgaggaggacgaggtgcagcccaacggcaagatcttcaagaaggtgatcctgggccagtacaactggctgagctacgaggacgtgttcgtgagagccttcaacttcggcaacggcctgcagatgctgggccagaagcccaagaccaacatcgccatcttctgcgagaccagagccgagtggatgatcgccgcccaggcctgcttcatgtacaacttccagctggtgaccctgtacgccaccctgggcggccccgccatcgtgcacgccctgaacgagaccgaggtgaccaacatcatcaccagcaaggagctgctgcagaccaagctgaaggacatcgtgagcctggtgcccagactgagacacatcatcaccgtggacggcaagccccccacctggagcgagttccccaagggcatcatcgtgcacaccatggccgccgtggaggccctgggcgccaaggccagcatggagaaccagccccacagcaagcccctgcccagcgacatcgccgtgatcatgtacaccagcggcagcaccggcctgcccaagggcgtgatgatcagccacagcaacatcatcgccggcatcaccggcatggccgagagaatccccgagctgggcgaggaggacgtgtacatcggctacctgcccctggcccacgtgctggagctgagcgccgagctggtgtgcctgagccacggctgcagaatcggctacagcagcccccagaccctggccgaccagagcagcaagatcaagaagggcagcaagggcgacaccagcatgctgaagcccaccctgatggccgccgtgcccgagatcatggacagaatctacaagaacgtgatgaacaaggtgagcgagatgagcagcttccagagaaacctgttcatcctggcctacaactacaagatggagcagatcagcaagggcagaaacacccccctgtgcgacagcttcgtgttcagaaaggtgagaagcctgctgggcggcaacatcagactgctgctgtgcggcggcgcccccctgagcgccaccacccagagattcatgaacatctgcttctgctgccccgtgggccagggctacggcctgaccgagagcgccggcgccggcaccatcagcgaggtgtgggactacaacaccggcagagtgggcgcccccctggtgtgctgcgagatcaagctgaagaactgggaggagggcggctacttcaacaccgacaagccccaccccagaggcgagatcctgatcggcggccagagcgtgaccatgggctactacaagaacgaggccaagaccaaggccgacttcttcgaggacgagaacggccagagatggctgtgcaccggcgacatcggcgagttcgagcccgacggctgcctgaagatcatcgacagaaagaaggacctggtgaagctgcaggccggcgagtacgtgagcctgggcaaggtggaggccgccctgaagaacctgcccctggtggacaacatctgcgcctacgccaacagctaccacagctacgtgatcggcttcgtggtgcccaaccagaaggagctgaccgagctggccagaaagaagggcctgaagggcacctgggaggagctgtgcaacagctgcgagatggagaacgaggtgctgaaggtgctgagcgaggccgccatcagcgccagcctggagaagttcgagatccccgtgaagatcagactgagccccgagccctggacccccgagaccggcctggtgaccgacgccttcaagctgaagagaaaggagctgaagacccactaccaggccgacatcgagagaatgtacggcagaaagtag

SEQ ID NO: 71698 - DNA, 2163 bp, synthetic construct; identical to SEQ ID NO: 71697
  misc_feature 1..2163: note = Description of Artificial Sequence: Synthetic coding sequence
  source 1..2163: mol_type = other DNA

SEQ ID NO: 71699 - DNA, 267 bp, synthetic construct
  misc_feature 1..267: note = Description of Artificial Sequence: Synthetic coding sequence
  source 1..267: mol_type = other DNA
atgaacaaccacgtgagcagcaagcccagcaccatgaagctgaagcacaccatcaaccccatcctgctgtacttcatccacttcctgatcagcctgtacaccatcctgacctacatccccttctacttcttcagcgagagcagacaggagaagagcaacagaatcaaggccaagcccgtgaacagcaagcccgacagcgcctacagaagcgtgaacagcctggacggcctggccagcgtgctgtaccccggctgcgacaccctgtag

SEQ ID NO: 71700 - DNA, 288 bp, synthetic construct
  misc_feature 1..288: note = Description of Artificial Sequence: Synthetic coding sequence
  source 1..288: mol_type = other DNA
atgaacaaccacgtgagcagcaagcccagcaccatgaagctgaagcacaccatcaaccccatcctgctgtacttcatccacttcctgatcagcctgtacaccatcctgacctacatccccttctacttcttcagcgagagcagacaggagaagagcaacagaatcaaggccaagcccgtgaacagcaagcccgacagcgcctacagaagcgtgaacagcctggacggcctggccagcgtgctgtaccccggctgcgacaccctggacaaggtgttcacctacgcctag

SEQ ID NO: 71701 - DNA, 2052 bp, synthetic construct
  misc_feature 1..2052: note = Description of Artificial Sequence: Synthetic coding sequence
  source 1..2052: mol_type = other DNA
atgctgttcatcttcaacttcctgttcagccccctgcccacccccgccctgatctgcatcctgaccttcggcgccgccatcttcctgtggctgatcaccagaccccagcccgtgctgcccctgctggacctgaacaaccagagcgtgggcatcgagggcggcgccagaaagggcgtgagccagaagaacaacgacctgaccagctgctgcttcagcgacgccaagaccatgtacgaggtgttccagagaggcctggccgtgagcgacaacggcccctgcctgggctacagaaagcccaaccagccctacagatggctgagctacaagcaggtgagcgacagagccgagtacctgggcagctgcctgctgcacaagggctacaagagcagccccgaccagttcgtgggcatcttcgcccagaacagacccgagtggatcatcagcgagctggcctgctacacctacagcatggtggccgtgcccctgtacgacaccctgggccccgaggccatcgtgcacatcgtgaacaaggccgacatcgccatggtgatctgcgacaccccccagaaggccctggtgctgatcggcaacgtggagaagggcttcacccccagcctgaaggtgatcatcctgatggaccccttcgacgacgacctgaagcagagaggcgagaagagcggcatcgagatcctgagcctgtacgacgccgagaacctgggcaaggagcacttcagaaagcccgtgccccccagccccgaggacctgagcgtgatctgcttcaccagcggcaccaccggcgaccccaagggcgccatgatcacccaccagaacatcgtgagcaacgccgccgccttcctgaagtgcgtggagcacgcctacgagcccacccccgacgacgtggccatcagctacctgcccctggcccacatgttcgagagaatcgtgcaggccgtggtgtacagctgcggcgccagagtgggcttcttccagggcgacatcagactgctggccgacgacatgaagaccctgaagcccaccctgttccccgccgtgcccagactgctgaacagaatctacgacaaggtgcagaacgaggccaagacccccctgaagaagttcctgctgaagctggccgtgagcagcaagttcaaggagctgcagaagggcatcatcagacacgacagcttctgggacaagctgatcttcgccaagatccaggacagcctgggcggcagagtgagagtgatcgtgaccggcgccgcccccatgagcaccagcgtgatgaccttcttcagagccgccatgggctgccaggtgtacgaggcctacggccagaccgagtgcaccggcggctgcaccttcaccctgcccggcgactggaccagcggccacgtgggcgtgcccctggcctgcaactacgtgaagctggaggacgtggccgacatgaactacttcaccgtgaacaacgagggcgaggtgtgcatcaagggcaccaacgtgttcaagggctacctgaaggaccccgagaagacccaggaggccctggacagcgacggctggctgcacaccggcgacatcggcagatggctgcccaacggcaccctgaagatcatcgacagaaagaagaacatcttcaagctggcccagggcgagtacatcgcccccgagaagatcgagaacatctacaacagaagccagcccgtgctgcagatcttcgtgcacggcgagagcctgagaagcagcctggtgggcgtggtggtgcccgacaccgacgtgctgcccagcttcgccgccaagctgggcgtgaagggcagcttcgaggagctgtgccagaaccaggtggtgagagaggccatcctggaggacctgcagaagatcggcaaggagagcggcctgaagaccttcgagcaggtgaaggccatcttcctgcaccccgagcccttcagcatcgagaacggcctgctgacccccaccctgaaggccaagagaggcgagctgagcaagtacttcagaacccagatcgacagcctgtacgagcacatccaggactag

SEQ ID NO: 71702 - DNA, 2052 bp, synthetic construct; identical to SEQ ID NO: 71701
  misc_feature 1..2052: note = Description of Artificial Sequence: Synthetic coding sequence
  source 1..2052: mol_type = other DNA

SEQ ID NO: 71703 - DNA, 2220 bp, synthetic construct
  misc_feature 1..2220: note = Description of Artificial Sequence: Synthetic coding sequence
  source 1..2220: mol_type = other DNA
atggacgccctgaagcccccctgcctgtggagaaaccacgagagaggcaagaaggacagagacagctgcggcagaaagaacagcgagcccggcagcccccacagcctggaggccctgagagacgccgcccccagccagggcctgaacttcctgctgctgttcaccaagatgctgttcatcttcaacttcctgttcagccccctgcccacccccgccctgatctgcatcctgaccttcggcgccgccatcttcctgtggctgatcaccagaccccagcccgtgctgcccctgctggacctgaacaaccagagcgtgggcatcgagggcggcgccagaaagggcgtgagccagaagaacaacgacctgaccagctgctgcttcagcgacgccaagaccatgtacgaggtgttccagagaggcctggccgtgagcgacaacggcccctgcctgggctacagaaagcccaaccagccctacagatggctgagctacaagcaggtgagcgacagagccgagtacctgggcagctgcctgctgcacaagggctacaagagcagccccgaccagttcgtgggcatcttcgcccagaacagacccgagtggatcatcagcgagctggcctgctacacctacagcatggtggccgtgcccctgtacgacaccctgggccccgaggccatcgtgcacatcgtgaacaaggccgacatcgccatggtgatctgcgacaccccccagaaggccctggtgctgatcggcaacgtggagaagggcttcacccccagcctgaaggtgatcatcctgatggaccccttcgacgacgacctgaagcagagaggcgagaagagcggcatcgagatcctgagcctgtacgacgccgagaacctgggcaaggagcacttcagaaagcccgtgccccccagccccgaggacctgagcgtgatctgcttcaccagcggcaccaccggcgaccccaagggcgccatgatcacccaccagaacatcgtgagcaacgccgccgccttcctgaagtgcgtggagcacgcctacgagcccacccccgacgacgtggccatcagctacctgcccctggcccacatgttcgagagaatcgtgcaggccgtggtgtacagctgcggcgccagagtgggcttcttccagggcgacatcagactgctggccgacgacatgaagaccctgaagcccaccctgttccccgccgtgcccagactgctgaacagaatctacgacaaggtgcagaacgaggccaagacccccctgaagaagttcctgctgaagctggccgtgagcagcaagttcaaggagctgcagaagggcatcatcagacacgacagcttctgggacaagctgatcttcgccaagatccaggacagcctgggcggcagagtgagagtgatcgtgaccggcgccgcccccatgagcaccagcgtgatgaccttcttcagagccgccatgggctgccaggtgtacgaggcctacggccagaccgagtgcaccggcggctgcaccttcaccctgcccggcgactggaccagcggccacgtgggcgtgcccctggcctgcaactacgtgaagctggaggacgtggccgacatgaactacttcaccgtgaacaacgagggcgaggtgtgcatcaagggcaccaacgtgttcaagggctacctgaaggaccccgagaagacccaggaggccctggacagcgacggctggctgcacaccggcgacatcggcagatggctgcccaacggcaccctgaagatcatcgacagaaagaagaacatcttcaagctggcccagggcgagtacatcgcccccgagaagatcgagaacatctacaacagaagccagcccgtgctgcagatcttcgtgcacggcgagagcctgagaagcagcctggtgggcgtggtggtgcccgacaccgacgtgctgcccagcttcgccgccaagctgggcgtgaagggcagcttcgaggagctgtgccagaaccaggtggtgagagaggccatcctggaggacctgcagaagatcggcaaggagagcggcctgaagaccttcgagcaggtgaaggccatcttcctgcaccccgagcccttcagcatcgagaacggcctgctgacccccaccctgaaggccaagagaggcgagctgagcaagtacttcagaacccagatcgacagcctgtacgagcacatccaggactag

SEQ ID NO: 71704 - DNA, 1398 bp, synthetic construct
  misc_feature 1..1398: note = Description of Artificial Sequence: Synthetic coding sequence
  source 1..1398: mol_type = other DNA
atgctgttccccggcgccagcatcgtgcccgagtgctggctgctggtgctgatccagaacctgggcaaggagcacttcagaaagcccgtgccccccagccccgaggacctgagcgtgatctgcttcaccagcggcaccaccggcgaccccaagggcgccatgatcacccaccagaacatcgtgagcaacgccgccgccttcctgaagtgcgtggagcacgcctacgagcccacccccgacgacgtggccatcagctacctgcccctggcccacatgttcgagagaatcgtgcaggccgtggtgtacagctgcggcgccagagtgggcttcttccagggcgacatcagactgctggccgacgacatgaagaccctgaagcccaccctgttccccgccgtgcccagactgctgaacagaatctacgacaaggtgcagaacgaggccaagacccccctgaagaagttcctgctgaagctggccgtgagcagcaagttcaaggagctgcagaagggcatcatcagacacgacagcttctgggacaagctgatcttcgccaagatccaggacagcctgggcggcagagtgagagtgatcgtgaccggcgccgcccccatgagcaccagcgtgatgaccttcttcagagccgccatgggctgccaggtgtacgaggcctacggccagaccgagtgcaccggcggctgcaccttcaccctgcccggcgactggaccagcggccacgtgggcgtgcccctggcctgcaactacgtgaagctggaggacgtggccgacatgaactacttcaccgtgaacaacgagggcgaggtgtgcatcaagggcaccaacgtgttcaagggctacctgaaggaccccgagaagacccaggaggccctggacagcgacggctggctgcacaccggcgacatcggcagatggctgcccaacggcaccctgaagatcatcgacagaaagaagaacatcttcaagctggcccagggcgagtacatcgcccccgagaagatcgagaacatctacaacagaagccagcccgtgctgcagatcttcgtgcacggcgagagcctgagaagcagcctggtgggcgtggtggtgcccgacaccgacgtgctgcccagcttcgccgccaagctgggcgtgaagggcagcttcgaggagctgtgccagaaccaggtggtgagagaggccatcctggaggacctgcagaagatcggcaaggagagcggcctgaagaccttcgagcaggtgaaggccatcttcctgcaccccgagcccttcagcatcgagaacggcctgctgacccccaccctgaaggccaagagaggcgagctgagcaagtacttcagaacccagatcgacagcctgtacgagcacatccaggactag

SEQ ID NO: 71705 - DNA, 2052 bp, synthetic construct; identical to SEQ ID NO: 71701
  misc_feature 1..2052: note = Description of Artificial Sequence: Synthetic coding sequence
  source 1..2052: mol_type = other DNA

SEQ ID NO: 71706 - DNA, 1980 bp, synthetic construct
  misc_feature 1..1980: note = Description of Artificial Sequence: Synthetic coding sequence
  source 1..1980: mol_type = other DNA
atgctgttcatcttcaacttcctgttcagccccctgcccacccccgccctgatctgcatcctgaccttcggcgccgccatcttcctgtggctgatcaccagaccccagcccgtgctgcccctgctggacctgaacaaccagagcgtgggcatcgagggcggcgccagaaagggcgtgagccagaagaacaacgacctgaccagctgctgcttcagcgacgccaagaccatgtacgaggtgttccagagaggcctggccgtgagcgacaacggcccctgcctgggctacagaaagcccaaccagccctacagatggctgagctacaagcaggtgagcgacagagccgagtacctgggcagctgcctgctgcacaagggctacaagagcagccccgaccagttcgtgggcatcttcgcccagaacagacccgagtggatcatcagcgagctggcctgctacacctacagcatggtggccgtgcccctgtacgacaccctgggccccgaggccatcgtgcacatcgtgaacaaggccgacatcgccatggtgatctgcgacaccccccagaaggccctggtgctgatcggcaacgtggagaagggcttcacccccagcctgaaggtgatcatcctgatggaccccttcgacgacgacctgaagcagagaggcgagaagagcggcatcgagatcctgagcctgtacgacgccgagaacctgggcaaggagcacttcagaaagcccgtgccccccagccccgaggacctgagcgtgatctgcttcaccagcggcaccaccggcgaccccaagggcgccatgatcacccaccagaacatcgtgagcaacgccgccgccttcctgaagtgcgtggagcacgcctacgagcccacccccgacgacgtggccatcagctacctgcccctggcccacatgttcgagagaatcgtgcaggccgtggtgtacagctgcggcgccagagtgggcttcttccagggcgacatcagactgctggccgacgacatgaagaccctgaagcccaccctgttccccgccgtgcccagactgctgaacagaatctacgacaaggtgcagaacgaggccaagacccccctgaagaagttcctgctgaagctggccgtgagcagcaagttcaaggagctgcagaagggcatcatcagacacgacagcttctgggacaagctgatcttcgccaagatccaggacagcctgggcggcagagtgagagtgatcgtgaccggcgccgcccccatgagcaccagcgtgatgaccttcttcagagccgccatgggctgccaggtgtacgaggcctacggccagaccgagtgcaccggcggctgcaccttcaccctgcccggcgactggaccagcggccacgtgggcgtgcccctggcctgcaactacgtgaagctggaggacgtggccgacatgaactacttcaccgtgaacaacgagggcgaggtgtgcatcaagggcaccaacgtgttcaagggctacctgaaggaccccgagaagacccaggaggccctggacagcgacggctggctgcacaccggcgacatcggcagatggctgcccaacggcaccctgaagatcatcgacagaaagaagaacatcttcaagctggcccagggcgagtacatcgcccccgagaagatcgagaacatctacaacagaagccagcccgtgctgcagatcttcgtgcacggcgagagcctgagaagcagcctggtgggcgtggtggtgcccgacaccgacgtgctgcccagcttcgccgccaagctgggcgtgaagggcagcttcgaggagctgtgccagaaccaggtgaaggccatcttcctgcaccccgagcccttcagcatcgagaacggcctgctgacccccaccctgaaggccaagagaggcgagctgagcaagtacttcagaacccagatcgacagcctgtacgagcacatccaggactag

SEQ ID NO: 71707 - DNA, 2169 bp, synthetic construct
  misc_feature 1..2169: note = Description of Artificial Sequence: Synthetic coding sequence
  source 1..2169: mol_type = other DNA
atgctgaccttcttcctggtgagcggcggcagcctgtggctgttcgtggagttcgtgctgagcctgctggagaagatgcagacccaggagatcctgagaatcctgagactgcccgagctgggcgacctgggccagttcttcagaagcctgagcgccaccaccctggtgagcatgggcgccctggccgccatcctggcctactggttcacccacagacccaaggccctgcagcccccctgcaacctgctgatgcagagcgaggaggtggaggacagcggcggcgccagaagaagcgtgatcggcagcggcccccagctgctgacccactactacgacgacgccagaaccatgtaccaggtgttcagaagaggcctgagcatcagcggcaacggcccctgcctgggcttcagaaagcccaagcagccctaccagtggctgagctaccaggaggtggccgacagagccgagttcctgggcagcggcctgctgcagcacaactgcaaggcctgcaccgaccagttcatcggcgtgttcgcccagaacagacccgagtggatcatcgtggagctggcctgctacacctacagcatggtggtggtgcccctgtacgacaccctgggccccggcgccatcagatacatcatcaacaccgccgacatcagcaccgtgatcgtggacaagccccagaaggccgtgctgctgctggagcacgtggagagaaaggagacccccggcctgaagctgatcatcctgatggaccccttcgaggaggccctgaaggagagaggccagaagtgcggcgtggtgatcaagagcatgcaggccgtggaggactgcggccaggagaaccaccaggcccccgtgcccccccagcccgacgacctgagcatcgtgtgcttcaccagcggcaccaccggcaaccccaagggcgccatgctgacccacggcaacgtggtggccgacttcagcggcttcctgaaggtgaccgagagccagtgggcccccacctgcgccgacgtgcacatcagctacctgcccctggcccacatgttcgagagaatggtgcagagcgtggtgtactgccacggcggcagagtgggcttcttccagggcgacatcagactgctgagcgacgacatgaaggccctgtgccccaccatcttccccgtggtgcccagactgctgaacagaatgtacgacaagatcttcagccaggccaacacccccctgaagagatggctgctggagttcgccgccaagagaaagcaggccgaggtgagaagcggcatcatcagaaacgacagcatctgggacgagctgttcttcaacaagatccaggccagcctgggcggctgcgtgagaatgatcgtgaccggcgccgcccccgccagccccaccgtgctgggcttcctgagagccgccctgggctgccaggtgtacgagggctacggccagaccgagtgcaccgccggctgcaccttcaccacccccggcgactggaccagcggccacgtgggcgcccccctgccctgcaaccacatcaagctggtggacgtggaggagctgaactactgggcctgcaagggcgagggcgagatctgcgtgagaggccccaacgtgttcaagggctacctgaaggaccccgacagaaccaaggaggccctggacagcgacggctggctgcacaccggcgacatcggcaagtggctgcccgccggcaccctgaagatcatcgacagaaagaagcacatcttcaagctggcccagggcgagtacgtggcccccgagaagatcgagaacatctacatcagaagccagcccgtggcccagatctacgtgcacggcgacagcctgaaggccttcctggtgggcatcgtggtgcccgaccccgaggtgatgcccagctgggcccagaagagaggcatcgagggcacctacgccgacctgtgcaccaacaaggacctgaagaaggccatcctggaggacatggtgagactgggcaaggagagcggcctgcacagcttcgagcaggtgaaggccatccacatccacagcgacatgttcagcgtgcagaacggcctgctgacccccaccctgaaggccaagagacccgagctgagagagtacttcaagaagcagatcgaggagctgtacagcatcagcatgtag

SEQ ID NO: 71708 - DNA, 1869 bp, synthetic construct
  misc_feature 1..1869: note = Description of Artificial Sequence: Synthetic coding sequence
  source 1..1869: mol_type = other DNA
atgcagacccaggagatcctgagaatcctgagactgcccgagctgggcgacctgggccagttcttcagaagcctgagcgccaccaccctggacagcggcggcgccagaagaagcgtgatcggcagcggcccccagctgctgacccactactacgacgacgccagaaccatgtaccaggtgttcagaagaggcctgagcatcagcggcaacggcccctgcctgggcttcagaaagcccaagcagccctaccagtggctgagctaccaggaggtggccgacagagccgagttcctgggcagcggcctgctgcagcacaactgcaaggcctgcaccgaccagttcatcggcgtgttcgcccagaacagacccgagtggatcatcgtggagctggcctgctacacctacagcatggtggtggtgcccctgtacgacaccctgggccccggcgccatcagatacatcatcaacaccgccgacatcagcaccgtgatcgtggacaagccccagaaggccgtgctgctgctggagcacgtggagagaaaggagacccccggcctgaagctgatcatcctgatggaccccttcgaggaggccctgaaggagagaggccagaagtgcggcgtggtgatcaagagcatgcaggccgtggaggactgcggccaggagaaccaccaggcccccgtgcccccccagcccgacgacctgagcatcgtgtgcttcaccagcggcaccaccggcaaccccaagggcgccatgctgacccacggcaacgtggtggccgacttcagcggcttcctgaaggtgaccgagggcgacatcagactgctgagcgacgacatgaaggccctgtgccccaccatcttccccgtggtgcccagactgctgaacagaatgtacgacaagatcttcagccaggccaacacccccctgaagagatggctgctggagttcgccgccaagagaaagcaggccgaggtgagaagcggcatcatcagaaacgacagcatctgggacgagctgttcttcaacaagatccaggccagcctgggcggctgcgtgagaatgatcgtgaccggcgccgcccccgccagccccaccgtgctgggcttcctgagagccgccctgggctgccaggtgtacgagggctacggccagaccgagtgcaccgccggctgcaccttcaccacccccggcgactggaccagcggccacgtgggcgcccccctgccctgcaaccacatcaagctggtggacgtggaggagctgaactactgggcctgcaagggcgagggcgagatctgcgtgagaggccccaacgtgttcaagggctacctgaaggaccccgacagaaccaaggaggccctggacagcgacggctggctgcacaccggcgacatcggcaagtggctgcccgccggcaccctgaagatcatcgacagaaagaagcacatcttcaagctggcccagggcgagtacgtggcccccgagaagatcgagaacatctacatcagaagccagcccgtggcccagatctacgtgcacggcgacagcctgaaggccttcctggtgggcatcgtggtgcccgaccccgaggtgatgcccagctgggcccagaagagaggcatcgagggcacctacgccgacctgtgcaccaacaaggacctgaagaaggccatcctggaggacatggtgagactgggcaaggagagcggcctgcacagcttcgagcaggtgaaggccatccacatccacagcgacatgttcagcgtgcagaacggcctgctgacccccaccctgaaggccaagagacccgagctgagagagtacttcaagaagcagatcgaggagctgtacagcatcagcatgtag

SEQ ID NO: 71709 - DNA, 2094 bp, synthetic construct
  misc_feature 1..2094: note = Description of Artificial Sequence: Synthetic coding sequence
  source 1..2094: mol_type = other DNA
atgcagacccaggagatcctgagaatcctgagactgcccgagctgggcgacctgggccagttcttcagaagcctgagcgccaccaccctggtgagcatgggcgccctggccgccatcctggcctactggttcacccacagacccaaggccctgcagcccccctgcaacctgctgatgcagagcgaggaggtggaggacagcggcggcgccagaagaagcgtgatcggcagcggcccccagctgctgacccactactacgacgacgccagaaccatgtaccaggtgttcagaagaggcctgagcatcagcggcaacggcccctgcctgggcttcagaaagcccaagcagccctaccagtggctgagctaccaggaggtggccgacagagccgagttcctgggcagcggcctgctgcagcacaactgcaaggcctgcaccgaccagttcatcggcgtgttcgcccagaacagacccgagtggatcatcgtggagctggcctgctacacctacagcatggtggtggtgcccctgtacgacaccctgggccccggcgccatcagatacatcatcaacaccgccgacatcagcaccgtgatcgtggacaagccccagaaggccgtgctgctgctggagcacgtggagagaaaggagacccccggcctgaagctgatcatcctgatggaccccttcgaggaggccctgaaggagagaggccagaagtgcggcgtggtgatcaagagcatgcaggccgtggaggactgcggccaggagaaccaccaggcccccgtgcccccccagcccgacgacctgagcatcgtgtgcttcaccagcggcaccaccggcaaccccaagggcgccatgctgacccacggcaacgtggtggccgacttcagcggcttcctgaaggtgaccgagaaggtgatcttccccagacaggacgacgtgctgatcagcttcctgcccctggcccacatgttcgagagagtgatccagagcgtggtgtactgccacggcggcagagtgggcttcttccagggcgacatcagactgctgagcgacgacatgaaggccctgtgccccaccatcttccccgtggtgcccagactgctgaacagaatgtacgacaagatcttcagccaggccaacacccccctgaagagatggctgctggagttcgccgccaagagaaagcaggccgaggtgagaagcggcatcatcagaaacgacagcatctgggacgagctgttcttcaacaagatccaggccagcctgggcggctgcgtgagaatgatcgtgaccggcgccgcccccgccagccccaccgtgctgggcttcctgagagccgccctgggctgccaggtgtacgagggctacggccagaccgagtgcaccgccggctgcaccttcaccacccccggcgactggaccagcggccacgtgggcgcccccctgccctgcaaccacatcaagctggtggacgtggaggagctgaactactgggcctgcaagggcgagggcgagatctgcgtgagaggccccaacgtgttcaagggctacctgaaggaccccgacagaaccaaggaggccctggacagcgacggctggctgcacaccggcgacatcggcaagtggctgcccgccggcaccctgaagatcatcgacagaaagaagcacatcttcaagctggcccagggcgagtacgtggcccccgagaagatcgagaacatctacatcagaagccagcccgtggcccagatctacgtgcacggcgacagcctgaaggccttcctggtgggcatcgtggtgcccgaccccgaggtgatgcccagctgggcccagaagagaggcatcgagggcacctacgccgacctgtgcaccaacaaggacctgaagaaggccatcctggaggacatggtgagactgggcaaggagagcggcctgcacagcttcgagcaggtgaaggccatccacatccacagcgacatgttcagcgtgcagaacggcctgctgacccccaccctgaaggccaagagacccgagctgagagagtacttcaagaagcagatcgaggagctgtacagcatcagcatgtag

SEQ ID NO: 71710 - DNA, 2094 bp, synthetic construct
  misc_feature 1..2094: note = Description of Artificial Sequence: Synthetic coding sequence
  source 1..2094: mol_type = other DNA
atgcagacccaggagatcctgagaatcctgagactgcccgagctgggcgacctgggccagttcttcagaagcctgagcgccaccaccctggtgagcatgggcgccctggccgccatcctggcctactggttcacccacagacccaaggccctgcagcccccctgcaacctgctgatgcagagcgaggaggtggaggacagcggcggcgccagaagaagcgtgatcggcagcggcccccagctgctgacccactactacgacgacgccagaaccatgtaccaggtgttcagaagaggcctgagcatcagcggcaacggcccctgcctgggcttcagaaagcccaagcagccctaccagtggctgagctaccaggaggtggccgacagagccgagttcctgggcagcggcctgctgcagcacaactgcaaggcctgcaccgaccagttcatcggcgtgttcgcccagaacagacccgagtggatcatcgtggagctggcctgctacacctacagcatggtggtggtgcccctgtacgacaccctgggccccggcgccatcagatacatcatcaacaccgccgacatcagcaccgtgatcgtggacaagccccagaaggccgtgctgctgctggagcacgtggagagaaaggagacccccggcctgaagctgatcatcctgatggaccccttcgaggaggccctgaaggagagaggccagaagtgcggcgtggtgatcaagagcatgcaggccgtggaggactgcggccaggagaaccaccaggcccccgtgcccccccagcccgacgacctgagcatcgtgtgcttcaccagcggcaccaccggcaaccccaagggcgccatgctgacccacggcaacgtggtggccgacttcagcggcttcctgaaggtgaccgagagccagtgggcccccacctgcgccgacgtgcacatcagctacctgcccctggcccacatgttcgagagaatggtgcagagcgtggtgtactgccacggcggcagagtgggcttcttccagggcgacatcagactgctgagcgacgacatgaaggccctgtgccccaccatcttccccgtggtgcccagactgctgaacagaatgtacgacaagatcttcagccaggccaacacccccctgaagagatggctgctggagttcgccgccaagagaaagcaggccgaggtgagaagcggcatcatcagaaacgacagcatctgggacgagctgttcttcaacaagatccaggccagcctgggcggctgcgtgagaatgatcgtgaccggcgccgcccccgccagccccaccgtgctgggcttcctgagagccgccctgggctgccaggtgtacgagggctacggccagaccgagtgcaccgccggctgcaccttcaccacccccggcgactggaccagcggccacgtgggcgcccccctgccctgcaaccacatcaagctggtggacgtggaggagctgaactactgggcctgcaagggcgagggcgagatctgcgtgagaggccccaacgtgttcaagggctacctgaaggaccccgacagaaccaaggaggccctggacagcgacggctggctgcacaccggcgacatcggcaagtggctgcccgccggcaccctgaagatcatcgacagaaagaagcacatcttcaagctggcccagggcgagtacgtggcccccgagaagatcgagaacatctacatcagaagccagcccgtggcccagatctacgtgcacggcgacagcctgaaggccttcctggtgggcatcgtggtgcccgaccccgaggtgatgcccagctgggcccagaagagaggcatcgagggcacctacgccgacctgtgcaccaacaaggacctgaagaaggccatcctggaggacatggtgagactgggcaaggagagcggcctgcacagcttcgagcaggtgaaggccatccacatccacagcgacatgttcagcgtgcagaacggcctgctgacccccaccctgaaggccaagagacccgagctgagagagtacttcaagaagcagatcgaggagctgtacagcatcagcatgtag

SEQ ID NO: 71711 - DNA, 2127 bp, synthetic construct
  misc_feature 1..2127: note = Description of Artificial Sequence: Synthetic coding sequence
  source 1..2127: mol_type = other DNA
atgcccgagttcgtgctgagcctgctggagaagatgcagacccaggagatcctgagaatcctgagactgcccgagctgggcgacctgggccagttcttcagaagcctgagcgccaccaccctggtgagcatgggcgccctggccgccatcctggcctactggttcacccacagacccaaggccctgcagcccccctgcaacctgctgatgcagagcgaggaggtggaggacagcggcggcgccagaagaagcgtgatcggcagcggcccccagctgctgacccactactacgacgacgccagaaccatgtaccaggtgttcagaagaggcctgagcatcagcggcaacggcccctgcctgggcttcagaaagcccaagcagccctaccagtggctgagctaccaggaggtggccgacagagccgagttcctgggcagcggcctgctgcagcacaactgcaaggcctgcaccgaccagttcatcggcgtgttcgcccagaacagacccgagtggatcatcgtggagctggcctgctacacctacagcatggtggtggtgcccctgtacgacaccctgggccccggcgccatcagatacatcatcaacaccgccgacatcagcaccgtgatcgtggacaagccccagaaggccgtgctgctgctggagcacgtggagagaaaggagacccccggcctgaagctgatcatcctgatggaccccttcgaggaggccctgaaggagagaggccagaagtgcggcgtggtgatcaagagcatgcaggccgtggaggactgcggccaggagaaccaccaggcccccgtgcccccccagcccgacgacctgagcatcgtgtgcttcaccagcggcaccaccggcaaccccaagggcgccatgctgacccacggcaacgtggtggccgacttcagcggcttcctgaaggtgaccgagaaggtgatcttccccagacaggacgacgtgctgatcagcttcctgcccctggcccacatgttcgagagagtgatccagagcgtggtgtactgccacggcggcagagtgggcttcttccagggcgacatcagactgctgagcgacgacatgaaggccctgtgccccaccatcttccccgtggtgcccagactgctgaacagaatgtacgacaagatcttcagccaggccaacacccccctgaagagatggctgctggagttcgccgccaagagaaagcaggccgaggtgagaagcggcatcatcagaaacgacagcatctgggacgagctgttcttcaacaagatccaggccagcctgggcggctgcgtgagaatgatcgtgaccggcgccgcccccgccagccccaccgtgctgggcttcctgagagccgccctgggctgccaggtgtacgagggctacggccagaccgagtgcaccgccggctgcaccttcaccacccccggcgactggaccagcggccacgtgggcgcccccctgccctgcaaccacatcaagctggtggacgtggaggagctgaactactgggcctgcaagggcgagggcgagatctgcgtgagaggccccaacgtgttcaagggctacctgaaggaccccgacagaaccaaggaggccctggacagcgacggctggctgcacaccggcgacatcggcaagtggctgcccgccggcaccctgaagatcatcgacagaaagaagcacatcttcaagctggcccagggcgagtacgtggcccccgagaagatcgagaacatctacatcagaagccagcccgtggcccagatctacgtgcacggcgacagcctgaaggccttcctggtgggcatcgtggtgcccgaccccgaggtgatgcccagctgggcccagaagagaggcatcgagggcacctacgccgacctgtgcaccaacaaggacctgaagaaggccatcctggaggacatggtgagactgggcaaggagagcggcctgcacagcttcgagcaggtgaaggccatccacatccacagcgacatgttcagcgtgcagaacggcctgctgacccccaccctgaaggccaagagacccgagctgagagagtacttcaagaagcagatcgaggagctgtacagcatcagcatgtag

SEQ ID NO: 71712 - DNA, 2004 bp, synthetic construct
  misc_feature 1..2004: note = Description of Artificial Sequence: Synthetic coding sequence
  source 1..2004: mol_type = other DNA
atgcagacccaggagatcctgagaatcctgagactgcccgagctgggcgacctgggccagttcttcagaagcctgagcgccaccaccctggtgagcatgggcgccctggccgccatcctggcctactggttcacccacagacccaaggccctgcagcccccctgcaacctgctgatgcagagcgaggaggtggaggacagcggcggcgccagaagaagcgtgatcggcagcggcccccagctgctgacccactactacgacgacgccagaaccatgtaccaggtgttcagaagaggcctgagcatcagcggcaacggcccctgcctgggcttcagaaagcccaagcagccctaccagtggctgagctaccaggaggtggccgacagagccgagttcctgggcagcggcctgctgcagcacaactgcaaggcctgcaccgaccagttcatcggcgtgttcgcccagaacagacccgagtggatcatcgtggagctggcctgctacacctacagcatggtggtggtgcccctgtacgacaccctgggccccggcgccatcagatacatcatcaacaccgccgacatcagcaccgtgatcgtggacaagccccagaaggccgtgctgctgctggagcacgtggagagaaaggagacccccggcctgaagctgatcatcctgatggaccccttcgaggaggccctgaaggagagaggccagaagtgcggcgtggtgatcaagagcatgcaggccgtggaggactgcggccaggagaaccaccaggcccccgtgcccccccagcccgacgacctgagcatcgtgtgcttcaccagcggcaccaccggcaaccccaagggcgccatgctgacccacggcaacgtggtggccgacttcagcggcttcctgaaggtgaccgagagccagtgggcccccacctgcgccgacgtgcacatcagctacctgcccctggcccacatgttcgagagaatggtgcagagcgtggtgtactgccacggcggcagagtgggcttcttccagggcgacatcagactgctgagcgacgacatgaaggccctgtgccccaccatcttccccgtggtgcccagactgctgaacagaatgtacgacaagatcttcagccaggccaacacccccctgaagagatggctgctggagttcgccgccaagagaaagcaggccgaggtgagaagcggcatcatcagaaacgacagcatctgggacgagctgttcttcaacaagatccaggccagcctgggcggctgcgtgagaatgatcgtgaccggcgccgcccccgccagccccaccgtgctgggcttcctgagagccgccctgggctgccaggtgtacgagggctacggccagaccgagtgcaccgccggctgcaccttcaccacccccggcgactggaccagcggccacgtgggcgcccccctgccctgcaaccacatcaagctggtggacgtggaggagctgaactactgggcctgcaagggcgagggcgagatctgcgtgagaggccccaacgtgttcaagggctacctgaaggaccccgacagaaccaaggaggccctggacagcgacggctggctgcacaccggcgacatcggcaagtggctgcccgccggcaccctgaagatcatcgacagaaagaagcacatcttcaagctggcccagggcgagtacgtggcccccgagaagatcgagaacatctacatcagaagccagcccgtggcccagatctacgtgcacggcgacagcctgaaggccttcctggtgggcatcgtggtgcccgaccccgaggtgatgcccagctgggcccagaagagaggcatcgagggcacctacgccgacctgtgcaccaacaaggacctgaagaaggccatcctggaggacatggtgagactgggcaaggagagcggcctgcacagcttcgagcaggacctgccccagtgcctgatccagatcaaggtgttcagcaagtactag

SEQ ID NO: 71713 - DNA, 2169 bp, synthetic construct
  misc_feature 1..2169: note = Description of Artificial Sequence: Synthetic coding sequence
  source 1..2169: mol_type = other DNA
atgctgaccttcttcctggtgagcggcggcagcctgtggctgttcgtggagttcgtgctgagcctgctggagaagatgcagacccaggagatcctgagaatcctgagactgcccgagctgggcgacctgggccagttcttcagaagcctgagcgccaccaccctggtgagcatgggcgccctggccgccatcctggcctactggttcacccacagacccaaggccctgcagcccccctgcaacctgctgatgcagagcgaggaggtggaggacagcggcggcgccagaagaagcgtgatcggcagcggcccccagctgctgacccactactacgacgacgccagaaccatgtaccaggtgttcagaagaggcctgagcatcagcggcaacggcccctgcctgggcttcagaaagcccaagcagccctaccagtggctgagctaccaggaggtggccgacagagccgagttcctgggcagcggcctgctgcagcacaactgcaaggcctgcaccgaccagttcatcggcgtgttcgcccagaacagacccgagtggatcatcgtggagctggcctgctacacctacagcatggtggtggtgcccctgtacgacaccctgggccccggcgccatcagatacatcatcaacaccgccgacatcagcaccgtgatcgtggacaagccccagaaggccgtgctgctgctggagcacgtggagagaaaggagacccccggcctgaagctgatcatcctgatggaccccttcgaggaggccctgaaggagagaggccagaagtgcggcgtggtgatcaagagcatgcaggccgtggaggactgcggccaggagaaccaccaggcccccgtgcccccccagcccgacgacctgagcatcgtgtgcttcaccagcggcaccaccggcaaccccaagggcgccatgctgacccacggcaacgtggtggccgacttcagcggcttcctgaaggtgaccgagaaggtgatcttccccagacaggacgacgtgctgatcagcttcctgcccctggcccacatgttcgagagagtgatccagagcgtggtgtactgccacggcggcagagtgggcttcttccagggcgacatcagactgctgagcgacgacatgaaggccctgtgccccaccatcttccccgtggtgcccagactgctgaacagaatgtacgacaagatcttcagccaggccaacacccccctgaagagatggctgctggagttcgccgccaagagaaagcaggccgaggtgagaagcggcatcatcagaaacgacagcatctgggacgagctgttcttcaacaagatccaggccagcctgggcggctgcgtgagaatgatcgtgaccggcgccgcccccgccagccccaccgtgctgggcttcctgagagccgccctgggctgccaggtgtacgagggctacggccagaccgagtgcaccgccggctgcaccttcaccacccccggcgactggaccagcggccacgtgggcgcccccctgccctgcaaccacatcaagctggtggacgtggaggagctgaactactgggcctgcaagggcgagggcgagatctgcgtgagaggccccaacgtgttcaagggctacctgaaggaccccgacagaaccaaggaggccctggacagcgacggctggctgcacaccggcgacatcggcaagtggctgcccgccggcaccctgaagatcatcgacagaaagaagcacatcttcaagctggcccagggcgagtacgtggcccccgagaagatcgagaacatctacatcagaagccagcccgtggcccagatctacgtgcacggcgacagcctgaaggccttcctggtgggcatcgtggtgcccgaccccgaggtgatgcccagctgggcccagaagagaggcatcgagggcacctacgccgacctgtgcaccaacaaggacctgaagaaggccatcctggaggacatggtgagactgggcaaggagagcggcctgcacagcttcgagcaggtgaaggccatccacatccacagcgacatgttcagcgtgcagaacggcctgctgacccccaccctgaaggccaagagacccgagctgagagagtacttcaagaagcagatcgaggagctgtacagcatcagcatgtag

SEQ ID NO: 71714 - DNA, 2139 bp, synthetic construct
  misc_feature 1..2139: note = Description of Artificial Sequence: Synthetic coding sequence
  source 1..2139: mol_type = other DNA
atgcagacccaggagatcctgagaatcctgagactgcccgagctgggcgacctgggccagttcttcagaagcctgagcgccaccaccctggtgagcatgggcgccctggccgccatcctggcctactggttcacccacagacccaaggccctgcagcccccctgcaacctgctgatgcagagcgaggaggtggaggacagcggcggcgccagaagaagcgtgatcggcagcggcccccagctgctgacccactactacgacgacgccagaaccatgtaccaggtgttcagaagaggcctgagcatcagcggcaacggcccctgcctgggcttcagaaagcccaagcagccctaccagtggctgagctaccaggaggtggccgacagagccgagttcctgggcagcggcctgctgcagcacaactgcaaggcctgcaccgaccagttcatcggcgtgttcgcccagaacagacccgagtggatcatcgtggagctggcctgctacacctacagcatggtggtggtgcccctgtacgacaccctgggccccggcgccatcagatacatcatcaacaccggcctgagctgccaggagggcgccagcgccaccgccagcacccaggccgacatcagcaccgtgatcgtggacaagccccagaaggccgtgctgctgctggagcacgtggagagaaaggagacccccggcctgaagctgatcatcctgatggaccccttcgaggaggccctgaaggagagaggccagaagtgcggcgtggtgatcaagagcatgcaggccgtggaggactgcggccaggagaaccaccaggcccccgtgcccccccagcccgacgacctgagcatcgtgtgcttcaccagcggcaccaccggcaaccccaagggcgccatgctgacccacggcaacgtggtggccgacttcagcggcttcctgaaggtgaccgagaaggtgatcttccccagacaggacgacgtgctgatcagcttcctgcccctggcccacatgttcgagagagtgatccagagcgtggtgtactgccacggcggcagagtgggcttcttccagggcgacatcagactgctgagcgacgacatgaaggccctgtgccccaccatcttccccgtggtgcccagactgctgaacagaatgtacgacaagatcttcagccaggccaacacccccctgaagagatggctgctggagttcgccgccaagagaaagcaggccgaggtgagaagcggcatcatcagaaacgacagcatctgggacgagctgttcttcaacaagatccaggccagcctgggcggctgcgtgagaatgatcgtgaccggcgccgcccccgccagccccaccgtgctgggcttcctgagagccgccctgggctgccaggtgtacgagggctacggccagaccgagtgcaccgccggctgcaccttcaccacccccggcgactggaccagcggccacgtgggcgcccccctgccctgcaaccacatcaagctggtggacgtggaggagctgaactactgggcctgcaagggcgagggcgagatctgcgtgagaggccccaacgtgttcaagggctacctgaaggaccccgacagaaccaaggaggccctggacagcgacggctggctgcacaccggcgacatcggcaagtggctgcccgccggcaccctgaagatcatcgacagaaagaagcacatcttcaagctggcccagggcgagtacgtggcccccgagaagatcgagaacatctacatcagaagccagcccgtggcccagatctacgtgcacggcgacagcctgaaggccttcctggtgggcatcgtggtgcccgaccccgaggtgatgcccagctgggcccagaagagaggcatcgagggcacctacgccgacctgtgcaccaacaaggacctgaagaaggccatcctggaggacatggtgagactgggcaaggagagcggcctgcacagcttcgagcaggtgaaggccatccacatccacagcgacatgttcagcgtgcagaacggcctgctgacccccaccctgaaggccaagagacccgagctgagagagtacttcaagaagcagatcgaggagctgtacagcatcagcatgtag

SEQ ID NO: 71715 - DNA, 2094 bp, synthetic construct; identical to SEQ ID NO: 71710
  misc_feature 1..2094: note = Description of Artificial Sequence: Synthetic coding sequence
  source 1..2094: mol_type = other DNA

SEQ ID NO: 71716 - DNA, 1821 bp, synthetic construct
  misc_feature 1..1821: note = Description of Artificial Sequence: Synthetic coding sequence
  source 1..1821: mol_type = other DNA
atgtaccaggtgttcagaagaggcctgagcatcagcggcaacggcccctgcctgggcttcagaaagcccaagcagccctaccagtggctgagctaccaggaggtggccgacagagccgagttcctgggcagcggcctgctgcagcacaactgcaaggcctgcaccgaccagttcatcggcgtgttcgcccagaacagacccgagtggatcatcgtggagctggcctgctacacctacagcatggtggtggtgcccctgtacgacaccctgggccccggcgccatcagatacatcatcaacaccgccgacatcagcaccgtgatcgtggacaagccccagaaggccgtgctgctgctggagcacgtggagagaaaggagacccccggcctgaagctgatcatcctgatggaccccttcgaggaggccctgaaggagagaggccagaagtgcggcgtggtgatcaagagcatgcaggccgtggaggactgcggccaggagaaccaccaggcccccgtgcccccccagcccgacgacctgagcatcgtgtgcttcaccagcggcaccaccggcaaccccaagggcgccatgctgacccacggcaacgtggtggccgacttcagcggcttcctgaaggtgaccgagaaggtgatcttccccagacaggacgacgtgctgatcagcttcctgcccctggcccacatgttcgagagagtgatccagagcgtggtgtactgccacggcggcagagtgggcttcttccagggcgacatcagactgctgagcgacgacatgaaggccctgtgccccaccatcttccccgtggtgcccagactgctgaacagaatgtacgacaagatcttcagccaggccaacacccccctgaagagatggctgctggagttcgccgccaagagaaagcaggccgaggtgagaagcggcatcatcagaaacgacagcatctgggacgagctgttcttcaacaagatccaggccagcctgggcggctgcgtgagaatgatcgtgaccggcgccgcccccgccagccccaccgtgctgggcttcctgagagccgccctgggctgccaggtgtacgagggctacggccagaccgagtgcaccgccggctgcaccttcaccacccccggcgactggaccagcggccacgtgggcgcccccctgccctgcaaccacatcaagctggtggacgtggaggagctgaactactgggcctgcaagggcgagggcgagatctgcgtgagaggccccaacgtgttcaagggctacctgaaggaccccgacagaaccaaggaggccctggacagcgacggctggctgcacaccggcgacatcggcaagtggctgcccgccggcaccctgaagatcatcgacagaaagaagcacatcttcaagctggcccagggcgagtacgtggcccccgagaagatcgagaacatctacatcagaagccagcccgtggcccagatctacgtgcacggcgacagcctgaaggccttcctggtgggcatcgtggtgcccgaccccgaggtgatgcccagctgggcccagaagagaggcatcgagggcacctacgccgacctgtgcaccaacaaggacctgaagaaggccatcctggaggacatggtgagactgggcaaggagagcggcctgcacagcttcgagcaggtgaaggccatccacatccacagcgacatgttcagcgtgcagaacggcctgctgacccccaccctgaaggccaagagacccgagctgagagagtacttcaagaagcagatcgaggagctgtacagcatcagcatgtag

SEQ ID NO: 71717 - DNA, 1386 bp, synthetic construct
  misc_feature 1..1386: note = Description of Artificial Sequence: Synthetic coding sequence
  source 1..1386: mol_type = other DNA
atgagcagacaggtggtgagaagcagcaagttcagacacgtgttcggccagcccgccaaggccgaccagtgctacgaggacgtgagagtgagccagaccacctgggacagcggcttctgcgccgtgaaccccaagttcgtggccctgatctgcgaggccagcggcggcggcgccttcctggtgctgcccctgggcaagaccggcagagtggacaagaacgcccccaccgtgtgcggccacaccgcccccgtgctggacatcgcctggtgcccccacaacgacaacgtgatcgccagcggcagcgaggactgcaccgtgatggtgtgggagatccccgacggcggcctgatgctgcccctgagagagcccgtggtgaccctggagggccacaccaagagagtgggcatcgtggcctggcacaccaccgcccagaacgtgctgctgagcgccggctgcgacaacgtgatcatggtgtgggacgtgggcaccggcgccgccatgctgaccctgggccccgaggtgcaccccgacaccatctacagcgtggactggagcagagacggcggcctgatctgcaccagctgcagagacaagagagtgagaatcatcgagcccagaaagggcaccgtggtggccgagaaggacagaccccacgagggcaccagacccgtgagagccgtgttcgtgagcgagggcaagatcctgaccaccggcttcagcagaatgagcgagagacaggtggccctgtgggacaccaagcacctggaggagcccctgagcctgcaggagctggacaccagcagcggcgtgctgctgcccttcttcgaccccgacaccaacatcgtgtacctgtgcggcaagggcgacagcagcatcagatacttcgagatcaccagcgaggcccccttcctgcactacctgagcatgttcagcagcaaggagagccagagaggcatgggctacatgcccaagagaggcctggaggtgaacaagtgcgagatcgccagattctacaagctgcacgagagaagatgcgagcccatcgccatgaccgtgcccagaaagagcgacctgttccaggaggacctgtacccccccaccgccggccccgaccccgccctgaccgccgaggagtggctgggcggcagagacgccggccccctgctgatcagcctgaaggacggctacgtgccccccaagagcagagagctgagagtgaacagaggcctggacaccggcagaagaagagccgcccccgaggccagcggcacccccagcagcgacgccgtgagcagactggaggaggagatgagaaagctgcaggccaccgtgcaggagctgcagaagagactggacagactggaggagaccgtgcaggccaagtag

SEQ ID NO: 71718 - DNA, 1734 bp, synthetic construct
  misc_feature 1..1734: note = Description of Artificial Sequence: Synthetic coding sequence
  source 1..1734: mol_type = other DNA
atgcagtggctgatgagattcagaaccctgtggggcatccacaagagcttccacaacatccaccccgcccccagccagctgagatgcagaagcctgagcgagttcggcgcccccagatggaacgactacgaggtgcccgaggagttcaacttcgccagctacgtgctggactactgggcccagaaggagaaggagggcaagagaggccccaaccccgccttctggtgggtgaacggccagggcgacgaggtgaagtggagcttcagagagatgggcgacctgaccagaagagtggccaacgtgttcacccagacctgcggcctgcagcagggcgaccacctggccctgatgctgcccagagtgcccgagtggtggctggtggccgtgggctgcatgagaaccggcatcatcttcatccccgccaccatcctgctgaaggccaaggacatcctgtacagactgcagctgagcaaggccaagggcatcgtgaccatcgacgccctggccagcgaggtggacagcatcgccagccagtgccccagcctgaagaccaagctgctggtgagcgaccacagcagagagggctggctggacttcagaagcctggtgaagagcgccagccccgagcacacctgcgtgaagagcaagaccctggaccccatggtgatcttcttcaccagcggcaccaccggcttccccaagatggccaagcacagccacggcctggccctgcagcccagcttccccggcagcagaaagctgagaagcctgaagaccagcgacgtgagctggtgcctgagcgacagcggctggatcgtggccaccatctggaccctggtggagccctggaccgccggctgcaccgtgttcatccaccacctgccccagttcgacaccaaggtgatcatccagaccctgctgaagtaccccatcaaccacttctggggcgtgagcagcatctacagaatgatcctgcagcaggacttcaccagcatcagattccccgccctggagcactgctacaccggcggcgaggtggtgctgcccaaggaccaggaggagtggaagagaagaaccggcctgctgctgtacgagaactacggccagagcgagaccggcctgatctgcgccacctactggggcatgaagatcaagcccggcttcatgggcaaggccacccccccctacgacgtgcaggtgatcgacgacaagggcagcatcctgccccccaacaccgagggcaacatcggcatcagaatcaagcccgtgagacccgtgagcctgttcatgtgctacgagggcgaccccgagaagaccgccaaggtggagtgcggcgacttctacaacaccggcgacagaggcaagatggacgaggagggctacatctgcttcctgggcagaagcgacgacatcatcaacgccagcggctacagaatcggccccgccgaggtggagagcgccctggtggagcaccccgccgtggccgagagcgccgtggtgggcagccccgaccccatcagaggcgaggtggtgaaggccttcatcgtgctgaccccccagttcctgagccacgacaaggaccagctgaccaaggagctgcagcagcacgtgaagagcgtgaccgccccctacaagtaccccagaaaggtggagttcgtgagcgagctgcccaagaccatcaccggcaagatcgagagaaaggagctgagaaagaaggagaccggccagatgtag

SEQ ID NO: 71719 - DNA, 1734 bp, synthetic construct; identical to SEQ ID NO: 71718
  misc_feature 1..1734: note = Description of Artificial Sequence: Synthetic coding sequence
  source 1..1734: mol_type = other DNA

SEQ ID NO: 71720 - DNA, 465 bp, synthetic construct
  misc_feature 1..465: note = Description of Artificial Sequence: Synthetic coding sequence
  source 1..465: mol_type = other DNA
atgcagtggctgatgagattcagaaccctgtggggcatccacaagagcttccacaacatccaccccgcccccagccagctgagatgcagaagcctgagcgagttcggcgcccccagatggaacgactacgaggtgcccgaggagttcaacttcgccagctacgtgctggactactgggcccagaaggagaaggagggcaagagaggccccaaccccgccttctggtgggtgaacggccagggcgacgaggtgaagtggagcttcagagagatgggcgacctgaccagaagagtggccaacgtgttcacccagacctgcggcctgcagcagggcgaccacctggccctgatgctgcccagagtgcccgagtggtggctggtggccgtgggctgcatgagaaccggcatcatcttcatccccgccaccatcctgctgaaggccaaggacatcctgtacagactgtag

SEQ ID NO: 71721 - DNA, 1533 bp, synthetic construct
  misc_feature 1..1533: note = Description of Artificial Sequence: Synthetic coding sequence
  source 1..1533: mol_type = other DNA
atgagacccggcctgagcttcctgctggccctgctgttcttcctgggccaggccgccggcgacctgggcgacgtgggcccccccatccccagccccggcttcagcagcttccccggcgtggacagcagcagcagcttcagcagcagcagcagaagcggcagcagcagcagcagaagcctgggcagcggcggcagcgtgagccagctgttcagcaacttcaccggcagcgtggacgacagaggcacctgccagtgcagcgtgagcctgcccgacaccaccttccccgtggacagagtggagagactggagttcaccgcccacgtgctgagccagaagttcgagaaggagctgagcaaggtgagagagtacgtgcagctgatcagcgtgtacgagaagaagctgctgaacctgaccgtgagaatcgacatcatggagaaggacaccatcagctacaccgagctggacttcgagctgatcaaggtggaggtgaaggagatggagaagctggtgatccagctgaaggagagcttcggcggcagcagcgagatcgtggaccagctggaggtggagatcagaaacatgaccctgctggtggagaagctggagaccctggacaagaacaacgtgctggccatcagaagagagatcgtggccctgaagaccaagctgaaggagtgcgaggccagcaaggaccagaacacccccgtggtgcaccccccccccacccccggcagctgcggccacggcggcgtggtgaacatcagcaagcccagcgtggtgcagctgaactggagaggcttcagctacctgtacggcgcctggggcagagactacagcccccagcaccccaacaagggcctgtactgggtggcccccctgaacaccgacggcagactgctggagtactacagactgtacaacaccctggacgacctgctgctgtacatcaacgccagagagctgagaatcacctacggccagggcagcggcaccgccgtgtacaacaacaacatgtacgtgaacatgtacaacaccggcaacatcgccagagtgaacctgaccaccaacaccatcgccgtgacccagaccctgcccaacgccgcctacaacaacagattcagctacgccaacgtggcctggcaggacatcgacttcgccgtggacgagaacggcctgtgggtgatctacagcaccgaggccagcaccggcaacatggtgatcagcaagctgaacgacaccaccctgcaggtgctgaacacctggtacaccaagcagtacaagcccagcgccagcaacgccttcatggtgtgcggcgtgctgtacgccaccagaaccatgaacaccagaaccgaggagatcttctactactacgacaccaacaccggcaaggagggcaagctggacatcgtgatgcacaagatgcaggagaaggtgcagagcatcaactacaaccccttcgaccagaagctgtacgtgtacaacgacggctacctgctgaactacgacctgagcgtgctgcagaagccccagtag

SEQ ID NO: 71722 - DNA, 1734 bp, synthetic construct
  misc_feature 1..1734: note = Description of Artificial Sequence: Synthetic coding sequence
  source 1..1734: mol_type = other DNA
atgcactggctgagaaaggtgcagggcctgtgcaccctgtggggcacccagatgagcagcagaaccctgtacatcaacagcagacagctggtgagcctgcagtggggccaccaggaggtgcccgccaagttcaacttcgccagcgacgtgctggaccactgggccgacatggagaaggccggcaagagactgcccagccccgccctgtggtgggtgaacggcaagggcaaggagctgatgtggaacttcagagagctgagcgagaacagccagcaggccgccaacgtgctgagcggcgcctgcggcctgcagagaggcgacagagtggccgtggtgctgcccagagtgcccgagtggtggctggtgatcctgggctgcatcagagccggcctgatcttcatgcccggcaccatccagatgaagagcaccgacatcctgtacagactgcagatgagcaaggccaaggccatcgtggccggcgacgaggtgatccaggaggtggacaccgtggccagcgagtgccccagcctgagaatcaagctgctggtgagcgagaagagctgcgacggctggctgaacttcaagaagctgctgaacgaggccagcaccacccaccactgcgtggagaccggcagccaggaggccagcgccatctacttcaccagcggcaccagcggcctgcccaagatggccgagcacagctacagcagcctgggcctgaaggccaagatggacgccggctggaccggcctgcaggccagcgacatcatgtggaccatcagcgacaccggctggatcctgaacatcctgtgcagcctgatggagccctgggccctgggcgcctgcaccttcgtgcacctgctgcccaagttcgaccccctggtgatcctgaagaccctgagcagctaccccatcaagagcatgatgggcgcccccatcgtgtacagaatgctgctgcagcaggacctgagcagctacaagttcccccacctgcagaactgcgtgaccgtgggcgagagcctgctgcccgagaccctggagaactggagagcccagaccggcctggacatcagagagagctacggccagaccgagaccggcctgacctgcatggtgagcaagaccatgaagatcaagcccggctacatgggcaccgccgccagctgctacgacgtgcagatcatcgacgacaagggcaacgtgctgccccccggcaccgagggcgacatcggcatcagagtgaagcccatcagacccatcggcatcttcagcggctacgtggacaaccccgacaagaccgccgccaacatcagaggcgacttctggctgctgggcgacagaggcatcaaggacgaggacggctacttccagttcatgggcagagccaacgacatcatcaacagcagcggctacagaatcggccccagcgaggtggagaacgccctgatggagcaccccgccgtggtggagaccgccgtgatcagcagccccgaccccgtgagaggcgaggtggtgaaggccttcgtggtgctggccagccagttcctgagccacgaccccgagcagctgaccaaggagctgcagcagcacgtgaagagcgtgaccgccccctacaagtaccccagaaagatcgagttcgtgctgaacctgcccaagaccgtgaccggcaagatccagagagccaagctgagagacaaggagtggaagatgagcggcaaggccagagcccagtag

SEQ ID NO: 71723 - DNA, 1497 bp, synthetic construct
  misc_feature 1..1497: note = Description of Artificial Sequence: Synthetic coding sequence
  source 1..1497: mol_type = other DNA
atgtggaacttcagagagctgagcgagaacagccagcaggccgccaacgtgctgagcggcgcctgcggcctgcagagaggcgacagagtggccgtggtgctgcccagagtgcccgagtggtggctggtgatcctgggctgcatcagagccggcctgatcttcatgcccggcaccatccagatgaagagcaccgacatcctgtacagactgcagatgagcaaggccaaggccatcgtggccggcgacgaggtgatccaggaggtggacaccgtggccagcgagtgccccagcctgagaatcaagctgctggtgagcgagaagagctgcgacggctggctgaacttcaagaagctgctgaacgaggccagcaccacccaccactgcgtggagaccggcagccaggaggccagcgccatctacttcaccagcggcaccagcggcctgcccaagatggccgagcacagctacagcagcctgggcctgaaggccaagatggacgccggctggaccggcctgcaggccagcgacatcatgtggaccatcagcgacaccggctggatcctgaacatcctgtgcagcctgatggagccctgggccctgggcgcctgcaccttcgtgcacctgctgcccaagttcgaccccctggtgatcctgaagaccctgagcagctaccccatcaagagcatgatgggcgcccccatcgtgtacagaatgctgctgcagcaggacctgagcagctacaagttcccccacctgcagaactgcgtgaccgtgggcgagagcctgctgcccgagaccctggagaactggagagcccagaccggcctggacatcagagagagctacggccagaccgagaccggcctgacctgcatggtgagcaagaccatgaagatcaagcccggctacatgggcaccgccgccagctgctacgacgtgcagatcatcgacgacaagggcaacgtgctgccccccggcaccgagggcgacatcggcatcagagtgaagcccatcagacccatcggcatcttcagcggctacgtggacaaccccgacaagaccgccgccaacatcagaggcgacttctggctgctgggcgacagaggcatcaaggacgaggacggctacttccagttcatgggcagagccaacgacatcatcaacagcagcggctacagaatcggccccagcgaggtggagaacgccctgatggagcaccccgccgtggtggagaccgccgtgatcagcagccccgaccccgtgagaggcgaggtggtgaaggccttcgtggtgctggccagccagttcctgagccacgaccccgagcagctgaccaaggagctgcagcagcacgtgaagagcgtgaccgccccctacaagtaccccagaaagatcgagttcgtgctgaacctgcccaagaccgtgaccggcaagatccagagagccaagctgagagacaaggagtggaagatgagcggcaaggccagagcccagtag

SEQ ID NO: 71724 - DNA, 627 bp, synthetic construct
  misc_feature 1..627: note = Description of Artificial Sequence: Synthetic coding sequence
  source 1..627: mol_type = other DNA
atgcactggctgagaaaggtgcagggcctgtgcaccctgtggggcacccagatgagcagcagaaccctgtacatcaacagcagacagctggtgagcctgcagtggggccaccaggaggtgcccgccaagttcaacttcgccagcgacgtgctggaccactgggccgacatggagaaggccggcaagagactgcccagccccgccctgtggtgggtgaacggcaagggcaaggagctgatgtggaacttcagagagctgagcgagaacagccagcaggccgccaacgtgctgagcggcgcctgcggcctgcagagaggcgacagagtggccgtggtgctgcccagagtgcccgagtggtggctggtgatcctgggctgcatcagagccggcctgatcttcatgcccggcaccatccagatgaagagcaccgacatcctgtacagactgcagatgagcaaggccaaggccatcgtggccggcgacgaggtgatccaggaggtggacaccgtggccagcgagtgccccagcctgagaatcaagctgctggtgagcgagaagagctgcgacggctggctgaacttcaagaagctgctgaagtacaaggtgagacacagagacgtgaagtag

SEQ ID NO: 71725 - DNA, 1050 bp, synthetic construct
  misc_feature 1..1050: note = Description of Artificial Sequence: Synthetic coding sequence
  source 1..1050: mol_type = other DNA
atgagacacccccccctgatcaccgtgtggagactggaggccaagatggacgccggctggaccggcctgcaggccagcgacatcatgtggaccatcagcgacaccggctggatcctgaacatcctgtgcagcctgatggagccctgggccctgggcgcctgcaccttcgtgcacctgctgcccaagttcgaccccctggtgatcctgaagaccctgagcagctaccccatcaagagcatgatgggcgcccccatcgtgtacagaatgctgctgcagcaggacctgagcagctacaagttcccccacctgcagaactgcgtgaccgtgggcgagagcctgctgcccgagaccctggagaactggagagcccagaccggcctggacatcagagagagctacggccagaccgagaccggcctgacctgcatggtgagcaagaccatgaagatcaagcccggctacatgggcaccgccgccagctgctacgacgtgcagatcatcgacgacaagggcaacgtgctgccccccggcaccgagggcgacatcggcatcagagtgaagcccatcagacccatcggcatcttcagcggctacgtggacaaccccgacaagaccgccgccaacatcagaggcgacttctggctgctgggcgacagaggcatcaaggacgaggacggctacttccagttcatgggcagagccaacgacatcatcaacagcagcggctacagaatcggccccagcgaggtggagaacgccctgatggagcaccccgccgtggtggagaccgccgtgatcagcagccccgaccccgtgagaggcgaggtggtgaaggccttcgtggtgctggccagccagttcctgagccacgaccccgagcagctgaccaaggagctgcagcagcacgtgaagagcgtgaccgccccctacaagtaccccagaaagatcgagttcgtgctgaacctgcccaagaccgtgaccggcaagatccagagagccaagctgagagacaaggagtggaagatgagcggcaaggccagagcccagtag

SEQ ID NO: 71726 - DNA, 1734 bp, synthetic construct; identical to SEQ ID NO: 71722
  misc_feature 1..1734: note = Description of Artificial Sequence: Synthetic coding sequence
  source 1..1734: mol_type = other DNA

SEQ ID NO: 71727 - DNA, 1734 bp, synthetic construct
  misc_feature 1..1734: note = Description of Artificial Sequence: Synthetic coding sequence
  source 1..1734: mol_type = other DNA
atgcactggctgagaaaggtgcagggcctgtgcaccctgtggggcacccagatgagcagcagaaccctgtacatcaacagcagacagctggtgagcctgcagtggggccaccaggaggtgcccgccaagttcaacttcgccagcgacgtgctggaccactgggccgacatggagaaggccggcaagagactgcccagccccgccctgtggtgggtgaacggcaagggcaaggagctgatgtggaacttcagagagctgagcgagaacagccagcaggccgccaacatcctgagcggcgcctgcggcctgcagagaggcgacagagtggccgtgatgctgcccagagtgcccgagtggtggctggtgatcctgggctgcatcagagccggcctgatcttcatgcccggcaccatccagatgaagagcaccgacatcctgtacagactgcagatgagcaaggccaaggccatcgtggccggcgacgaggtgatccaggaggtggacaccgtggccagcgagtgccccagcctgagaatcaagctgctggtgagcgagaagagctgcgacggctggctgaacttcaagaagctgctgaacgaggccagcaccacccaccactgcgtggagaccggcagccaggaggccagcgccatctacttcaccagcggcaccagcggcctgcccaagatggccgagcacagctacagcagcctgggcctgaaggccaagatggacgccggctggaccggcctgcaggccagcgacatcatgtggaccatcagcgacaccggctggatcctgaacatcctgggcagcctgctggagagctggaccctgggcgcctgcaccttcgtgcacctgctgcccaagttcgaccccctggtgatcctgaagaccctgagcagctaccccatcaagagcatgatgggcgcccccatcgtgtacagaatgctgctgcagcaggacctgagcagctacaagttcccccacctgcagaactgcctggccggcggcgagagcctgctgcccgagaccctggagaactggagagcccagaccggcctggacatcagagagttctacggccagaccgagaccggcctgacctgcatggtgagcaagaccatgaagatcaagcccggctacatgggcaccgccgccagctgctacgacgtgcaggtgatcgacgacaagggcaacgtgctgccccccggcaccgagggcgacatcggcatcagagtgaagcccatcagacccatcggcatcttcagcggctacgtggagaaccccgacaagaccgccgccaacatcagaggcgacttctggctgctgggcgacagaggcatcaaggacgaggacggctacttccagttcatgggcagagccgacgacatcatcaacagcagcggctacagaatcggccccagcgaggtggagaacgccctgatgaagcaccccgccgtggtggagaccgccgtgatcagcagccccgaccccgtgagaggcgaggtggtgaaggccttcgtgatcctggccagccagttcctgagccacgaccccgagcagctgaccaaggagctgcagcagcacgtgaagagcgtgaccgccccctacaagtaccccagaaagatcgagttcgtgctgaacctgcccaagaccgtgaccggcaagatccagagaaccaagctgagagacaaggagtggaagatgagcggcaaggccagagcccagtag

SEQ ID NO: 71728 - DNA, 627 bp, synthetic construct
  misc_feature 1..627: note = Description of Artificial Sequence: Synthetic coding sequence
  source 1..627: mol_type = other DNA
atgcactggctgagaaaggtgcagggcctgtgcaccctgtggggcacccagatgagcagcagaaccctgtacatcaacagcagacagctggtgagcctgcagtggggccaccaggaggtgcccgccaagttcaacttcgccagcgacgtgctggaccactgggccgacatggagaaggccggcaagagactgcccagccccgccctgtggtgggtgaacggcaagggcaaggagctgatgtggaacttcagagagctgagcgagaacagccagcaggccgccaacatcctgagcggcgcctgcggcctgcagagaggcgacagagtggccgtgatgctgcccagagtgcccgagtggtggctggtgatcctgggctgcatcagagccggcctgatcttcatgcccggcaccatccagatgaagagcaccgacatcctgtacagactgcagatgagcaaggccaaggccatcgtggccggcgacgaggtgatccaggaggtggacaccgtggccagcgagtgccccagcctgagaatcaagctgctggtgagcgagaagagctgcgacggctggctgaacttcaagaagctgctgaagtacaaggtgagacacagagaggtgaagtag

SEQ ID NO: 71729 - DNA, 1761 bp, synthetic construct
  misc_feature 1..1761: note = Description of Artificial Sequence: Synthetic coding sequence
  source 1..1761: mol_type = other DNA
atgctggccagagtgaccagaaagatgctgagacacgccaagtgcttccagagactggccatcttcggcagcgtgagagccctgcacaaggacaacagaaccgccaccccccagaacttcagcaactacgagagcatgaagcaggacttcaagctgggcatccccgagtacttcaacttcgccaaggacgtgctggaccagtggaccgacaaggagaaggccggcaagaagcccagcaaccccgccttctggtggatcaacagaaacggcgaggagatgagatggagcttcgaggagctgggcagcctgagcagaaagttcgccaacatcctgagcgaggcctgcagcctgcagagaggcgacagagtgatcctgatcctgcccagagtgcccgagtggtggctggccaacgtggcctgcctgagaaccggcaccgtgctgatccccggcaccacccagctgacccagaaggacatcctgtacagactgcagagcagcaaggccaactgcatcatcaccaacgacgtgctggcccccgccgtggacgccgtggccagcaagtgcgagaacctgcacagcaagctgatcgtgagcgagaacagcagagagggctggggcaacctgaaggagctgatgaagcacgccagcgacagccacacctgcgtgaagaccaagcacaacgagatcatggccatcttcttcaccagcggcaccagcggctaccccaagatgaccgcccacacccacagcagcttcggcctgggcctgagcgtgaacggcagattctggctggacctgacccccagcgacgtgatgtggaacaccagcgacaccggctgggccaagagcgcctggagcagcgtgttcagcccctggatccagggcgcctgcgtgttcacccaccacctgcccagattcgagcccaccagcatcctgcagaccctgagcaagtaccccatcaccgtgttctgcagcgcccccaccgtgtacagaatgctggtgcagaacgacatcaccagctacaagttcaagagcctgaagcactgcgtgagcgccggcgagcccatcacccccgacgtgaccgagaagtggagaaacaagaccggcctggacatctacgagggctacggccagaccgagaccgtgctgatctgcggcaacttcaagggcatgaagatcaagcccggcagcatgggcaagcccagccccgccttcgacgtgaagatcgtggacgtgaacggcaacgtgctgccccccggccaggagggcgacatcggcatccaggtgctgcccaacagacccttcggcctgttcacccactacgtggacaaccccagcaagaccgccagcaccctgagaggcaacttctacatcaccggcgacagaggctacatggacaaggacggctacttctggttcgtggccagagccgacgacgtgatcctgagcagcggctacagaatcggccccttcgaggtggagaacgccctgaacgagcaccccagcgtggccgagagcgccgtggtgagcagccccgaccccatcagaggcgaggtggtgaaggccttcgtggtgctgaaccccgactacaagagccacgaccaggagcagctgatcaaggagatccaggagcacgtgaagaagaccaccgccccctacaagtaccccagaaaggtggagttcatccaggagctgcccaagaccatcagcggcaagaccaagagaaacgagctgagaaagaaggagtggaagaccatctag

SEQ ID NO: 71730 - DNA, 1317 bp, synthetic construct
  misc_feature 1..1317: note = Description of Artificial Sequence: Synthetic coding sequence
  source 1..1317: mol_type = other DNA
atgctggccagagtgaccagaaagatgctgagacacgccaagtgcttccagagactggccatcttcggcagcgtgagagccctgcacaaggacaacagaaccgccaccccccagaacttcagcaactacgagagcatgaagcaggacttcaagctgggcatccccgagtacttcaacttcgccaaggacgtgctggaccagtggaccgacaaggagaaggccggcaagaagcccagcaaccccgccttctggtggatcaacagaaacggcgaggagatgagatggagcttcgaggagctgggcagcctgagcagaaagttcgccaacatcctgagcgaggcctgcagcctgcagagaggcgacagagtgatcctgatcctgcccagagtgcccgagtggtggctggccaacgtggcctgcctgagaaccggcaccgtgctgatccccggcaccacccagctgacccagaaggacatcctgtacagactgcagagcagcaaggccaactgcatcatcaccaacgacgtgctggcccccgccgtggacgccgtggccagcaagtgcgagaacctgcacagcaagctgatcgtgagcgagaacagcagagagggctggggcaacctgaaggagctgatgaagcacgccagcgacagccacacctgcgtgaagaccaagcacaacgagatcatggccatcttcttcaccagcggcaccagcggctaccccaagatgaccgcccacacccacagcagcttcggcctgggcctgagcgtgaacggcagattctggctggacctgacccccagcgacgtgatgtggaacaccagcgacaccggctgggccaagagcgcctggagcagcgtgttcagcccctggatccagggcgcctgcgtgttcacccaccacctgcccagattcgagcccaccagcatcctgcagaccctgagcaagtaccccatcaccgtgttctgcagcgcccccaccgtgtacagaatgctggtgcagaacgacatcaccagctacaagttcaagagcctgaagcactgcgtgagcgccggcgagcccatcacccccgacgtgaccgagaagtggagaaacaagaccggcctggacatctacgagggctacggccagaccgagaccgtgctgatctgcggcaacttcaagggcatgaagatcaagcccggcagcatgggcaagcccagccccgccttcgacgtgaaggtgtgcaccagccccagcagaagaatgttcaacaaccccatctgcaccctgcccacctacagactgcccccctacaagctgagcctgctgtag

SEQ ID NO: 71731 - DNA, 1737 bp, synthetic construct
  misc_feature 1..1737: note = Description of Artificial Sequence: Synthetic coding sequence
  source 1..1737: mol_type = other DNA
atgaagcaggacttcaagctgggcatccccgagtacttcaacttcgccaaggacgtgctggaccagtggaccgacaaggagaaggccggcaagaagcccagcaaccccgccttctggtggatcaacagaaacggcgaggagatgagatggagcttcgaggagctgggcagcctgagcagaaagttcgccaacatcctgagcgaggcctgcagcctgcagagaggcgacagagtgatcctgatcctgcccagagtgcccgagtggtggctggccaacgtggcctgcctgagaaccggcaccgtgctgatccccggcaccacccagctgacccagaaggacatcctgtacagactgcagagcagcaaggccaactgcatcatcaccaacgacgtgctggcccccgccgtggacgccgtggccagcaagtgcgagaacctgcacagcaagctgatcgtgagcgagaacagcagagagggctggggcaacctgaaggagctgatgaaggtgttcctgtgccaccccggctggagcaccgtggccagaagctggctgaccgccaccagcaccagcctggtgcaggccatcctgagcctgctgagcagctgggactacagacacgccagcgacagccacacctgcgtgaagaccaagcacaacgagatcatggccatcttcttcaccagcggcaccagcggctaccccaagatgaccgcccacacccacagcagcttcggcctgggcctgagcgtgaacggcagattctggctggacctgacccccagcgacgtgatgtggaacaccagcgacaccggctgggccaagagcgcctggagcagcgtgttcagcccctggatccagggcgcctgcgtgttcacccaccacctgcccagattcgagcccaccagcatcctgcagaccctgagcaagtaccccatcaccgtgttctgcagcgcccccaccgtgtacagaatgctggtgcagaacgacatcaccagctacaagttcaagagcctgaagcactgcgtgagcgccggcgagcccatcacccccgacgtgaccgagaagtggagaaacaagaccggcctggacatctacgagggctacggccagaccgagaccgtgctgatctgcggcaacttcaagggcatgaagatcaagcccggcagcatgggcaagcccagccccgccttcgacgtgaagatcgtggacgtgaacggcaacgtgctgccccccggccaggagggcgacatcggcatccaggtgctgcccaacagacccttcggcctgttcacccactacgtggacaaccccagcaagaccgccagcaccctgagaggcaacttctacatcaccggcgacagaggctacatggacaaggacggctacttctggttcgtggccagagccgacgacgtgatcctgagcagcggctacagaatcggccccttcgaggtggagaacgccctgaacgagcaccccagcgtggccgagagcgccgtggtgagcagccccgaccccatcagaggcgaggtggtgaaggccttcgtggtgctgaaccccgactacaagagccacgaccaggagcagctgatcaaggagatccaggagcacgtgaagaagaccaccgccccctacaagtaccccagaaaggtggagttcatccaggagctgcccaagaccatcagcggcaagaccaagagaaacgagctgagaaagaaggagtggaagaccatctag

SEQ ID NO: 71732 - DNA, 1740 bp, synthetic construct
  misc_feature 1..1740: note = Description of Artificial Sequence: Synthetic coding sequence
  source 1..1740: mol_type = other DNA
atgagaccctggctgagacacctggtgctgcaggccctgagaaacagcagagccttctgcggcagccacggcaagcccgcccccctgcccgtgccccagaagatcgtggccacctgggaggccatcagcctgggcagacagctggtgcccgagtacttcaacttcgcccacgacgtgctggacgtgtggagcagactggaggaggccggccacagaccccccaaccccgccttctggtgggtgaacggcaccggcgccgagatcaagtggagcttcgaggagctgggcaagcagagcagaaaggccgccaacgtgctgggcggcgcctgcggcctgcagcccggcgacagaatgatgctggtgctgcccagactgcccgagtggtggctggtgagcgtggcctgcatgagaaccggcaccgtgatgatccccggcgtgacccagctgaccgagaaggacctgaagtacagactgcaggccagcagagccaagagcatcatcaccagcgacagcctggcccccagagtggacgccatcagcgccgagtgccccagcctgcagaccaagctgctggtgagcgacagcagcagacccggctggctgaacttcagagagctgctgagagaggccagcaccgagcacaactgcatgagaaccaagagcagagaccccctggccatctacttcaccagcggcaccaccggcgcccccaagatggtggagcacagccagagcagctacggcctgggcttcgtggccagcggcagaagatgggtggccctgaccgagagcgacatcttctggaacaccaccgacaccggctgggtgaaggccgcctggaccctgttcagcgcctggcccaacggcagctgcatcttcgtgcacgagctgcccagagtggacgccaaggtgatcctgaacaccctgagcaagttccccatcaccaccctgtgctgcgtgcccaccatcttcagactgctggtgcaggaggacctgaccagataccagttccagagcctgagacactgcctgaccggcggcgaggccctgaaccccgacgtgagagagaagtggaagcaccagaccggcgtggagctgtacgagggctacggccagagcgagaccgtggtgatctgcgccaaccccaagggcatgaagatcaagagcggcagcatgggcaaggccagccccccctacgacgtgcagatcgtggacgacgagggcaacgtgctgccccccggcgaggagggcaacgtggccgtgagaatcagacccaccagacccttctgcttcttcaactgctacctggacaaccccgagaagaccgccgccagcgagcagggcgacttctacatcaccggcgacagagccagaatggacaaggacggctacttctggttcatgggcagaaacgacgacgtgatcaacagcagcagctacagaatcggccccgtggaggtggagagcgccctggccgagcaccccgccgtgctggagagcgccgtggtgagcagccccgaccccatcagaggcgaggtggtgaaggccttcatcgtgctgacccccgcctacagcagccacgaccccgaggccctgaccagagagctgcaggagcacgtgaagagagtgaccgccccctacaagtaccccagaaaggtggccttcgtgagcgagctgcccaagaccgtgagcggcaagatccagagaagcaagctgagaagccaggagtggggcaagtag

SEQ ID NO: 71733 - DNA, 2070 bp, synthetic construct
  misc_feature 1..2070: note = Description of Artificial Sequence: Synthetic coding sequence
  source 1..2070: mol_type = other DNA
atggccgccagaaccctgggcagaggcgtgggcagactgctgggcagcctgagaggcctgagcggccagcccgccagacccccctgcggcgtgagcgcccccagaagagccgccagcggccccagcggcagcgcccccgccgtggccgccgccgccgcccagcccggcagctaccccgccctgagcgcccaggccgccagagagcccgccgccttctggggccccctggccagagacaccctggtgtgggacaccccctaccacaccgtgtgggactgcgacttcagcaccggcaagatcggctggttcctgggcggccagctgaacgtgagcgtgaactgcctggaccagcacgtgagaaagagccccgagagcgtggccctgatctgggagagagacgagcccggcaccgaggtgagaatcacctacagagagctgctggagaccacctgcagactggccaacaccctgaagagacacggcgtgcacagaggcgacagagtggccatctacatgcccgtgagccccctggccgtggccgccatgctggcctgcgccagaatcggcgccgtgcacaccgtgatcttcgccggcttcagcgccgagagcctggccggcagaatcaacgacgccaagtgcaaggtggtgatcaccttcaaccagggcctgagaggcggcagagtggtggagctgaagaagatcgtggacgaggccgtgaagcactgccccaccgtgcagcacgtgctggtggcccacagaaccgacaacaaggtgcacatgggcgacctggacgtgcccctggagcaggagatggccaaggaggaccccgtgtgcgcccccgagagcatgggcagcgaggacatgctgttcatgctgtacaccagcggcagcaccggcatgcccaagggcatcgtgcacacccaggccggctacctgctgtacgccgccctgacccacaagctggtgttcgaccaccagcccggcgacatcttcggctgcgtggccgacatcggctggatcaccggccacagctacgtggtgtacggccccctgtgcaacggcgccaccagcgtgctgttcgagagcacccccgtgtaccccaacgccggcagatactgggagaccgtggagagactgaagatcaaccagttctacggcgcccccaccgccgtgagactgctgctgaagtacggcgacgcctgggtgaagaagtacgacagaagcagcctgagaaccctgggcagcgtgggcgagcccatcaactgcgaggcctgggagtggctgcacagagtggtgggcgacagcagatgcaccctggtggacacctggtggcagaccgagaccggcggcatctgcatcgcccccagacccagcgaggagggcgccgagatcctgcccgccatggccatgagacccttcttcggcatcgtgcccgtgctgatggacgagaagggcagcgtggtggagggcagcaacgtgagcggcgccctgtgcatcagccaggcctggcccggcatggccagaaccatctacggcgaccaccagagattcgtggacgcctacttcaaggcctaccccggctactacttcaccggcgacggcgcctacagaaccgagggcggctactaccagatcaccggcagaatggacgacgtgatcaacatcagcggccacagactgggcaccgccgagatcgaggacgccatcgccgaccaccccgccgtgcccgagagcgccgtgatcggctacccccacgacatcaagggcgaggccgccttcgccttcatcgtggtgaaggacagcgccggcgacagcgacgtggtggtgcaggagctgaagagcatggtggccaccaagatcgccaagtacgccgtgcccgacgagatcctggtggtgaagagactgcccaagaccagaagcggcaaggtgatgagaagactgctgagaaagatcatcaccagcgaggcccaggagctgggcgacaccaccaccctggaggaccccagcatcatcgccgagatcctgagcgtgtaccagaagtgcaaggacaagcaggccgccgccaagtag

SEQ ID NO: 71734 - DNA, 462 bp, synthetic construct
  misc_feature 1..462: note = Description of Artificial Sequence: Synthetic coding sequence
  source 1..462: mol_type = other DNA
atggccgccagaaccctgggcagaggcgtgggcagactgctgggcagcctgagaggcctgagcggccagcccgccagacccccctgcggcgtgagcgcccccagaagagccgccagcggccccagcggcagcgcccccgccgtggccgccgccgccgcccagcccggcagctaccccgccctgagcgcccaggccgccagagagcccgccgccttctggggccccctggccagagacaccctggtgtgggacaccccctaccacaccgtgtgggactgcgacttcagcaccggcaagatcggctggttcctgggcggccagctgaacgtgagcgtgaactgcctggaccagcacgtgagaaagagccccgagagcgtggccctgatctgggagagagacgagcccggcaccgaggtgagaatcacctacagcccctggctgcagatgccctgcggcccctag

SEQ ID NO: 71735 - DNA, 1455 bp, synthetic construct
  misc_feature 1..1455: note = Description of Artificial Sequence: Synthetic coding sequence
  source 1..1455: mol_type = other DNA
atggccgccagaaccctgggcagaggcgtgggcagactgctgggcagcctgagaggcctgagcggccagcccgccagacccccctgcggcgtgagcgcccccagaagagccgccagcggccccagcggcagcgcccccgccgtggccgccgccgccgcccagcccggcagctaccccgccctgagcgcccaggccgccagagagcccgccgccttctggggccccctggccagagacaccctggtgtgggacaccccctaccacaccgtgtgggactgcgacttcagcaccggcaagatcggctggttcctgggcggccagctgaacgtgagcgtgaactgcctggaccagcacgtgagaaagagccccgagagcgtggccctgatctgggagagagacgagcccggcaccgaggtgagaatcacctacagagagctgctggagaccacctgcagactggccaacaccctgaagagacacggcgtgcacagaggcgacagagtggccatctacatgcccgtgagccccctggccgtggccgccatgctggcctgcgccagaatcggcgccgtgcacaccgtgatcttcgccggcttcagcgccgagagcctggccggcagaatcaacgacgtgggcgagcccatcaactgcgaggcctgggagtggctgcacagagtggtgggcgacagcagatgcaccctggtggacacctggtggcagaccgagaccggcggcatctgcatcgcccccagacccagcgaggagggcgccgagatcctgcccgccatggccatgagacccttcttcggcatcgtgcccgtgctgatggacgagaagggcagcgtggtggagggcagcaacgtgagcggcgccctgtgcatcagccaggcctggcccggcatggccagaaccatctacggcgaccaccagagattcgtggacgcctacttcaaggcctaccccggctactacttcaccggcgacggcgcctacagaaccgagggcggctactaccagatcaccggcagaatggacgacgtgatcaacatcagcggccacagactgggcaccgccgagatcgaggacgccatcgccgaccaccccgccgtgcccgagagcgccgtgatcggctacccccacgacatcaagggcgaggccgccttcgccttcatcgtggtgaaggacagcgccggcgacagcgacgtggtggtgcaggagctgaagagcatggtggccaccaagatcgccaagtacgccgtgcccgacgagatcctggtggtgaagagactgcccaagaccagaagcggcaaggtgatgagaagactgctgagaaagatcatcaccagcgaggcccaggagctgggcgacaccaccaccctggaggaccccagcatcatcgccgagatcctgagcgtgtaccagaagtgcaaggacaagcaggccgccgccaagtag

SEQ ID NO: 71736 - DNA, 1728 bp, synthetic construct
  misc_feature 1..1728: note = Description of Artificial Sequence: Synthetic coding sequence
  source 1..1728: mol_type = other DNA
atggccgccagaaccctgggcagaggcgtgggcagactgctgggcagcctgagaggcctgagcggccagcccgccagacccccctgcggcgtgagcgcccccagaagagccgccagcggccccagcggcagcgcccccgccgtggccgccgccgccgcccagcccggcagctaccccgccctgagcgcccaggccgccagagagcccgccgccttctggggccccctggccagagacaccctggtgtgggacaccccctaccacaccgtgtgggactgcgacttcagcaccggcaagatcggctggttcctgggcggccagctgaacgtgagcgtgaactgcctggaccagcacgtgagaaagagccccgagagcgtggccctgatctgggagagagacgagcccggcaccgaggtgagaatcacctacagagagctgctggagaccacctgcagactggccaacaccctgaagagacacggcgtgcacagaggcgacagagtggccatctacatgcccgtgagccccctggccgtggccgccatgctggcctgcgccagaatcggcgccgtgcacaccgtgatcttcgccggcttcagcgccgagagcctggccggcagaatcaacgacgccaagtgcaaggtggtgatcaccttcaaccagggcctgagaggcggcagagtggtggagctgaagaagatcgtggacgaggccgtgaagcactgccccaccgtgcagcacgtgctggtggcccacagaaccgacaacaaggtgcacatgggcgacctggacgtgcccctggagcaggagatggccaaggaggaccccgtgtgcgcccccgagagcatgggcagcgaggacatgctgttcatgctgtacaccagcggcagcaccggcatgcccaagggcatcgtgcacacccaggccggctacctgctgtacgccgccctgacccacaagctggtgttcgaccaccagcccggcgacatcttcggctgcgtggccgacatcggctggatcaccggccacagctacgtggtgtacggccccctgtgcaacggcgccaccagcgtgctgttcgagagcacccccgtgtaccccaacgccggcagatactgggagaccgtggagagactgaagatcaaccagttctacggcgcccccaccgccgtgagactgctgctgaagtacggcgacgcctgggtgaagaagtacgacagaagcagcctgagaaccctgggcagcgtgggcgagcccatcaactgcgaggcctgggagtggctgcacagagtggtgggcgacagcagatgcaccctggtggacacctggtggcagaccgagaccggcggcatctgcatcgcccccagacccagcgaggagggcgccgagatcctgcccgccatggccatgagacccttcttcggcatcgtgcccgtgctgatggacgagaagggcagcgtggtggagggcagcaacgtgagcggcgccctgtgcatcagccaggcctggcccggcatggccagaaccatctacggcgaccaccagagattcgtggacgcctacttcaaggcctaccccggctactacttcaccggcgacggcgcctacagaaccgagggcggctactaccagatcaccggcagaatggacgacgtgatcaacatcctgcagatcgtgggcttcttcagagaggccatcagaaacagcggcgacctgctggagcactag

SEQ ID NO: 71737 - DNA, 1821 bp, synthetic construct
  misc_feature 1..1821: note = Description of Artificial Sequence: Synthetic coding sequence
  source 1..1821: mol_type = other DNA
atgctgaagaccttcctgttcctggagaagtacttcccctgcatcaagtacagcagcgcctgcttccccggcaccggcctggacgtgtacgacatcaagttcgccgtgctgctgcacccccagaccgccctgcacttcggccccccccccagcctgatggccttcagcagcctgtgctgcagagagctgctggagaccacctgcagactggccaacaccctgaagagacacggcgtgcacagaggcgacagagtggccatctacatgcccgtgagccccctggccgtggccgccatgctggcctgcgccagaatcggcgccgtgcacaccgtgatcttcgccggcttcagcgccgagagcctggccggcagaatcaacgacgccaagtgcaaggtggtgatcaccttcaaccagggcctgagaggcggcagagtggtggagctgaagaagatcgtggacgaggccgtgaagcactgccccaccgtgcagcacgtgctggtggcccacagaaccgacaacaaggtgcacatgggcgacctggacgtgcccctggagcaggagatggccaaggaggaccccgtgtgcgcccccgagagcatgggcagcgaggacatgctgttcatgctgtacaccagcggcagcaccggcatgcccaagggcatcgtgcacacccaggccggctacctgctgtacgccgccctgacccacaagctggtgttcgaccaccagcccggcgacatcttcggctgcgtggccgacatcggctggatcaccggccacagctacgtggtgtacggccccctgtgcaacggcgccaccagcgtgctgttcgagagcacccccgtgtaccccaacgccggcagatactgggagaccgtggagagactgaagatcaaccagttctacggcgcccccaccgccgtgagactgctgctgaagtacggcgacgcctgggtgaagaagtacgacagaagcagcctgagaaccctgggcagcgtgggcgagcccatcaactgcgaggcctgggagtggctgcacagagtggtgggcgacagcagatgcaccctggtggacacctggtggcagaccgagaccggcggcatctgcatcgcccccagacccagcgaggagggcgccgagatcctgcccgccatggccatgagacccttcttcggcatcgtgcccgtgctgatggacgagaagggcagcgtggtggagggcagcaacgtgagcggcgccctgtgcatcagccaggcctggcccggcatggccagaaccatctacggcgaccaccagagattcgtggacgcctacttcaaggcctaccccggctactacttcaccggcgacggcgcctacagaaccgagggcggctactaccagatcaccggcagaatggacgacgtgatcaacatcagcggccacagactgggcaccgccgagatcgaggacgccatcgccgaccaccccgccgtgcccgagagcgccgtgatcggctacccccacgacatcaagggcgaggccgccttcgccttcatcgtggtgaaggacagcgccggcgacagcgacgtggtggtgcaggagctgaagagcatggtggccaccaagatcgccaagtacgccgtgcccgacgagatcctggtggtgaagagactgcccaagaccagaagcggcaaggtgatgagaagactgctgagaaagatcatcaccagcgaggcccaggagctgggcgacaccaccaccctggaggaccccagcatcatcgccgagatcctgagcgtgtaccagaagtgcaaggacaagcaggccgccgccaagtag

SEQ ID NO: 71738 - DNA, 1707 bp, synthetic construct
  misc_feature 1..1707: note = Description of Artificial Sequence: Synthetic coding sequence
  source 1..1707: mol_type = other DNA
atgagaagaagaaaggagagacagccctgggacagattccacttcctgcacttcgccccccacggcagagagctgctggagaccacctgcagactggccaacaccctgaagagacacggcgtgcacagaggcgacagagtggccatctacatgcccgtgagccccctggccgtggccgccatgctggcctgcgccagaatcggcgccgtgcacaccgtgatcttcgccggcttcagcgccgagagcctggccggcagaatcaacgacgccaagtgcaaggtggtgatcaccttcaaccagggcctgagaggcggcagagtggtggagctgaagaagatcgtggacgaggccgtgaagcactgccccaccgtgcagcacgtgctggtggcccacagaaccgacaacaaggtgcacatgggcgacctggacgtgcccctggagcaggagatggccaaggaggaccccgtgtgcgcccccgagagcatgggcagcgaggacatgctgttcatgctgtacaccagcggcagcaccggcatgcccaagggcatcgtgcacacccaggccggctacctgctgtacgccgccctgacccacaagctggtgttcgaccaccagcccggcgacatcttcggctgcgtggccgacatcggctggatcaccggccacagctacgtggtgtacggccccctgtgcaacggcgccaccagcgtgctgttcgagagcacccccgtgtaccccaacgccggcagatactgggagaccgtggagagactgaagatcaaccagttctacggcgcccccaccgccgtgagactgctgctgaagtacggcgacgcctgggtgaagaagtacgacagaagcagcctgagaaccctgggcagcgtgggcgagcccatcaactgcgaggcctgggagtggctgcacagagtggtgggcgacagcagatgcaccctggtggacacctggtggcagaccgagaccggcggcatctgcatcgcccccagacccagcgaggagggcgccgagatcctgcccgccatggccatgagacccttcttcggcatcgtgcccgtgctgatggacgagaagggcagcgtggtggagggcagcaacgtgagcggcgccctgtgcatcagccaggcctggcccggcatggccagaaccatctacggcgaccaccagagattcgtggacgcctacttcaaggcctaccccggctactacttcaccggcgacggcgcctacagaaccgagggcggctactaccagatcaccggcagaatggacgacgtgatcaacatcagcggccacagactgggcaccgccgagatcgaggacgccatcgccgaccaccccgccgtgcccgagagcgccgtgatcggctacccccacgacatcaagggcgaggccgccttcgccttcatcgtggtgaaggacagcgccggcgacagcgacgtggtggtgcaggagctgaagagcatggtggccaccaagatcgccaagtacgccgtgcccgacgagatcctggtggtgaagagactgcccaagaccagaagcggcaaggtgatgagaagactgctgagaaagatcatcaccagcgaggcccaggagctgggcgacaccaccaccctggaggaccccagcatcatcgccgagatcctgagcgtgtaccagaagtgcaaggacaagcaggccgccgccaagtag

SEQ ID NO: 71739 - DNA, 2145 bp, synthetic construct
  misc_feature 1..2145: note = Description of Artificial Sequence: Synthetic coding sequence
  source 1..2145: mol_type = other DNA
atgggcctgcccgaggagagagtgagaagcggcagcggcagcagaggccaggaggaggccggcgccggcggcagagccagaagctggagccccccccccgaggtgagcagaagcgcccacgtgcccagcctgcagagatacagagagctgcacagaagaagcgtggaggagcccagagagttctggggcgacatcgccaaggagttctactggaagaccccctgccccggccccttcctgagatacaacttcgacgtgaccaagggcaagatcttcatcgagtggatgaagggcgccaccaccaacatctgctacaacgtgctggacagaaacgtgcacgagaagaagctgggcgacaaggtggccttctactgggagggcaacgagcccggcgagaccacccagatcacctaccaccagctgctggtgcaggtgtgccagttcagcaacgtgctgagaaagcagggcatccagaagggcgacagagtggccatctacatgcccatgatccccgagctggtggtggccatgctggcctgcgccagaatcggcgccctgcacagcatcgtgttcgccggcttcagcagcgagagcctgtgcgagagaatcctggacagcagctgcagcctgctgatcaccaccgacgccttctacagaggcgagaagctggtgaacctgaaggagctggccgacgaggccctgcagaagtgccaggagaagggcttccccgtgagatgctgcatcgtggtgaagcacctgggcagagccgagctgggcatgggcgacagcaccagccagagcccccccatcaagagaagctgccccgacgtgcagggcaagctgaaggagaagagcaagagagtgcagccccagatcagctggaaccagggcatcgacctgtggtggcacgagctgatgcaggaggccggcgacgagtgcgagcccgagtggtgcgacgccgaggaccccctgttcatcctgtacaccagcggcagcaccggcaagcccaagggcgtggtgcacaccgtgggcggctacatgctgtacgtggccaccaccttcaagtacgtgttcgacttccacgccgaggacgtgttctggtgcaccgccgacatcggctggatcaccggccacagctacgtgacctacggccccctggccaacggcgccaccagcgtgctgttcgagggcatccccacctaccccgacgtgaacagactgtggagcatcgtggacaagtacaaggtgaccaagttctacaccgcccccaccgccatcagactgctgatgaagttcggcgacgagcccgtgaccaagcacagcagagccagcctgcaggtgctgggcaccgtgggcgagcccatcaaccccgaggcctggctgtggtaccacagagtggtgggcgcccagagatgccccatcgtggacaccttctggcagaccgagaccggcggccacatgctgacccccctgcccggcgccacccccatgaagcccggcagcgccaccttccccttcttcggcgtggcccccgccatcctgaacgagagcggcgaggagctggagggcgaggccgagggctacctggtgttcaagcagccctggcccggcatcatgagaaccgtgtacggcaaccacgagagattcgagaccacctacttcaagaagttccccggctactacgtgaccggcgacggctgccagagagaccaggacggctactactggatcaccggcagaatcgacgacatgctgaacgtgagcggccacctgctgagcaccgccgaggtggagagcgccctggtggagcacgaggccgtggccgaggccgccgtggtgggccacccccaccccgtgaagggcgagtgcctgtactgcttcgtgaccctgtgcgacggccacaccttcagccccaagctgaccgaggagctgaagaagcagatcagagagaagatcggccccatcgccacccccgactacatccagaacgcccccggcctgcccaagaccagaagcggcaagatcatgagaagagtgctgagaaagatcgcccagaacgaccacgacctgggcgacatgagcaccgtggccgaccccagcgtgatcagccacctgttcagccacagatgcctgaccatccagtag

SEQ ID NO: 71740 - DNA, 1956 bp, synthetic construct
  misc_feature 1..1956: note = Description of Artificial Sequence: Synthetic coding sequence
  source 1..1956: mol_type = other DNA
atgatggtgagatgggccctgctgtgcgagttctggggcgacatcgccaaggagttctactggaagaccccctgccccggccccttcctgagatacaacttcgacgtgaccaagggcaagatcttcatcgagtggatgaagggcgccaccaccaacatctgctacaacgtgctggacagaaacgtgcacgagaagaagctgggcgacaaggtggccttctactgggagggcaacgagcccggcgagaccacccagatcacctaccaccagctgctggtgcaggtgtgccagttcagcaacgtgctgagaaagcagggcatccagaagggcgacagagtggccatctacatgcccatgatccccgagctggtggtggccatgctggcctgcgccagaatcggcgccctgcacagcatcgtgttcgccggcttcagcagcgagagcctgtgcgagagaatcctggacagcagctgcagcctgctgatcaccaccgacgccttctacagaggcgagaagctggtgaacctgaaggagctggccgacgaggccctgcagaagtgccaggagaagggcttccccgtgagatgctgcatcgtggtgaagcacctgggcagagccgagctgggcatgggcgacagcaccagccagagcccccccatcaagagaagctgccccgacgtgcagatcagctggaaccagggcatcgacctgtggtggcacgagctgatgcaggaggccggcgacgagtgcgagcccgagtggtgcgacgccgaggaccccctgttcatcctgtacaccagcggcagcaccggcaagcccaagggcgtggtgcacaccgtgggcggctacatgctgtacgtggccaccaccttcaagtacgtgttcgacttccacgccgaggacgtgttctggtgcaccgccgacatcggctggatcaccggccacagctacgtgacctacggccccctggccaacggcgccaccagcgtgctgttcgagggcatccccacctaccccgacgtgaacagactgtggagcatcgtggacaagtacaaggtgaccaagttctacaccgcccccaccgccatcagactgctgatgaagttcggcgacgagcccgtgaccaagcacagcagagccagcctgcaggtgctgggcaccgtgggcgagcccatcaaccccgaggcctggctgtggtaccacagagtggtgggcgcccagagatgccccatcgtggacaccttctggcagaccgagaccggcggccacatgctgacccccctgcccggcgccacccccatgaagcccggcagcgccaccttccccttcttcggcgtggcccccgccatcctgaacgagagcggcgaggagctggagggcgaggccgagggctacctggtgttcaagcagccctggcccggcatcatgagaaccgtgtacggcaaccacgagagattcgagaccacctacttcaagaagttccccggctactacgtgaccggcgacggctgccagagagaccaggacggctactactggatcaccggcagaatcgacgacatgctgaacgtgagcggccacctgctgagcaccgccgaggtggagagcgccctggtggagcacgaggccgtggccgaggccgccgtggtgggccacccccaccccgtgaagggcgagtgcctgtactgcttcgtgaccctgtgcgacggccacaccttcagccccaagctgaccgaggagctgaagaagcagatcagagagaagatcggccccatcgccacccccgactacatccagaacgcccccggcctgcccaagaccagaagcggcaagatcatgagaagagtgctgagaaagatcgcccagaacgaccacgacctgggcgacatgagcaccgtggccgaccccagcgtgatcagccacctgttcagccacagatgcctgaccatccagtag

SEQ ID NO: 71741 - DNA, 2106 bp, synthetic construct
  misc_feature 1..2106: note = Description of Artificial Sequence: Synthetic coding sequence
  source 1..2106: mol_type = other DNA
atgggcctgcccgaggagagagtgagaagcggcagcggcagcagaggccaggaggaggccggcgccggcggcagagccagaagctggagccccccccccgaggtgagcagaagcgcccacgtgcccagcctgcagagatacagagagctgcacagaagaagcgtggaggagcccagagagttctggggcgacatcgccaaggagttctactggaagaccccctgccccggccccttcctgagatacaacttcgacgtgaccaagggcaagatcttcatcgagtggatgaagggcgccaccaccaacatctgctacaacgtgctggacagaaacgtgcacgagaagaagctgggcgacaaggtggccttctactgggagggcaacgagcccggcgagaccacccagatcacctaccaccagctgctggtgcaggtgtgccagttcagcaacgtgctgagaaagcagggcatccagaagggcgacagagtggccatctacatgcccatgatccccgagctggtggtggccatgctggcctgcgccagaatcggcgccctgcacagcatcgtgttcgccggcttcagcagcgagagcctgtgcgagagaatcctggacagcagctgcagcctgctgatcaccaccgacgccttctacagaggcgagaagctggtgaacctgaaggagctggccgacgaggccctgcagaagtgccaggagaagggcttccccgtgagatgctgcatcgtggtgaagcacctgggcagagccgagctgggcatgggcgacagcaccagccagagcccccccatcaagagaagctgccccgacgtgcagatcagctggaaccagggcatcgacctgtggtggcacgagctgatgcaggaggccggcgacgagtgcgagcccgagtggtgcgacgccgaggaccccctgttcatcctgtacaccagcggcagcaccggcaagcccaagggcgtggtgcacaccgtgggcggctacatgctgtacgtggccaccaccttcaagtacgtgttcgacttccacgccgaggacgtgttctggtgcaccgccgacatcggctggatcaccggccacagctacgtgacctacggccccctggccaacggcgccaccagcgtgctgttcgagggcatccccacctaccccgacgtgaacagactgtggagcatcgtggacaagtacaaggtgaccaagttctacaccgcccccaccgccatcagactgctgatgaagttcggcgacgagcccgtgaccaagcacagcagagccagcctgcaggtgctgggcaccgtgggcgagcccatcaaccccgaggcctggctgtggtaccacagagtggtgggcgcccagagatgccccatcgtggacaccttctggcagaccgagaccggcggccacatgctgacccccctgcccggcgccacccccatgaagcccggcagcgccaccttccccttcttcggcgtggcccccgccatcctgaacgagagcggcgaggagctggagggcgaggccgagggctacctggtgttcaagcagccctggcccggcatcatgagaaccgtgtacggcaaccacgagagattcgagaccacctacttcaagaagttccccggctactacgtgaccggcgacggctgccagagagaccaggacggctactactggatcaccggcagaatcgacgacatgctgaacgtgagcggccacctgctgagcaccgccgaggtggagagcgccctggtggagcacgaggccgtggccgaggccgccgtggtgggccacccccaccccgtgaagggcgagtgcctgtactgcttcgtgaccctgtgcgacggccacaccttcagccccaagctgaccgaggagctgaagaagcagatcagagagaagatcggccccatcgccacccccgactacatccagaacgcccccggcctgcccaagaccagaagcggcaagatcatgagaagagtgctgagaaagatcgcccagaacgaccacgacctgggcgacatgagcaccgtggccgaccccagcgtgatcagccacctgttcagccacagatgcctgaccatccagtag

SEQ ID NO: 71742 - DNA, 2100 bp, synthetic construct
  misc_feature 1..2100: note = Description of Artificial Sequence: Synthetic coding sequence
  source 1..2100: mol_type = other DNA
atgggcctgcccgaggagagagtgagaagcggcagcggcagcagaggccaggaggaggccggcgccggcggcagagccagaagctggagccccccccccgaggtgagcagaagcgcccacgtgcccagcctgcagagatacagagagctgcacagaagaagcgtggaggagcccagagagttctggggcgacatcgccaaggagttctactggaagaccccctgccccggccccttcctgagatacaacttcgacgtgaccaagggcaagatcttcatcgagtggatgaagggcgccaccaccaacatctgctacaacgtgctggacagaaacgtgcacgagaagaagctgggcgacaaggtggccttctactgggagggcaacgagcccggcgagaccacccagatcacctaccaccagctgctggtgcaggtgtgccagttcagcaacgtgctgagaaagcagggcatccagaagggcgacagagtggccatctacatgcccatgatccccgagctggtggtggccatgctggcctgcgccagaatcggcgccctgcacagcatcgtgttcgccggcttcagcagcgagagcctgtgcgagagaatcctggacagcagctgcagcctgctgatcaccaccgacgccttctacagaggcgagaagctggtgaacctgaaggagctggccgacgaggccctgcagaagtgccaggagaagggcttccccgtgagatgctgcatcgtggtgaagcacctgggcagagccgagctgggcatgggcgacagcaccagccagagcccccccatcaagagaagctgccccgacgtgcagatcagctggaaccagggcatcgacctgtggtggcacgagctgatgcaggaggccggcgacgagtgcgagcccgagtggtgcgacgccgagcacagcagcagctgcacccccgtggccccccaggccaaccccagagtgtggttcacccagctgggcgccacctgctacgtggccaccaccttcaagtacgtgttcgacttccacgccgaggacgtgttctggtgcaccgccgacatcggctggatcaccggccacagctacgtgacctacggccccctggccaacggcgccaccagcgtgctgttcgagggcatccccacctaccccgacgtgaacagactgtggagcatcgtggacaagtacaaggtgaccaagttctacaccgcccccaccgccatcagactgctgatgaagttcggcgacgagcccgtgaccaagcacagcagagccagcctgcaggtgctgggcaccgtgggcgagcccatcaaccccgaggcctggctgtggtaccacagagtggtgggcgcccagagatgccccatcgtggacaccttctggcagaccgagaccggcggccacatgctgacccccctgcccggcgccacccccatgaagcccggcagcgccaccttccccttcttcggcgtggcccccgccatcctgaacgagagcggcgaggagctggagggcgaggccgagggctacctggtgttcaagcagccctggcccggcatcatgagaaccgtgtacggcaaccacgagagattcgagaccacctacttcaagaagttccccggctactacgtgaccggcgacggctgccagagagaccaggacggctactactggatcaccggcagaatcgacgacatgctgaacgtgagcggccacctgctgagcaccgccgaggtggagagcgccctggtggagcacgaggccgtggccgaggccgccgtggtgggccacccccaccccgtgaagggcgagtgcctgtactgcttcgtgaccctgtgcgacggccacaccttcagccccaagctgaccgaggagctgaagaagcagatcagagagaagatcggccccatcgccacccccgactacatccagaacgcccccggcctgcccaagaccagaagcggcaagatcatgagaagagtgctgagaaagatcgcccagaacgaccacgacctgggcgacatgagcaccgtggccgaccccagcgtgatcagccacctgttcagccacagatgcctgaccatccagtag

SEQ ID NO: 71743 - DNA, 1230 bp, synthetic construct
  misc_feature 1..1230: note = Description of Artificial Sequence: Synthetic coding sequence
  source 1..1230: mol_type = other DNA
atgcaggaggccggcgacgagtgcgagcccgagtggtgcgacgccgaggaccccctgttcatcctgtacaccagcggcagcaccggcaagcccaagggcgtggtgcacaccgtgggcggctacatgctgtacgtggccaccaccttcaagtacgtgttcgacttccacgccgaggacgtgttctggtgcaccgccgacatcggctggatcaccggccacagctacgtgacctacggccccctggccaacggcgccaccagcgtgctgttcgagggcatccccacctaccccgacgtgaacagactgtggagcatcgtggacaagtacaaggtgaccaagttctacaccgcccccaccgccatcagactgctgatgaagttcggcgacgagcccgtgaccaagcacagcagagccagcctgcaggtgctgggcaccgtgggcgagcccatcaaccccgaggcctggctgtggtaccacagagtggtgggcgcccagagatgccccatcgtggacaccttctggcagaccgagaccggcggccacatgctgacccccctgcccggcgccacccccatgaagcccggcagcgccaccttccccttcttcggcgtggcccccgccatcctgaacgagagcggcgaggagctggagggcgaggccgagggctacctggtgttcaagcagccctggcccggcatcatgagaaccgtgtacggcaaccacgagagattcgagaccacctacttcaagaagttccccggctactacgtgaccggcgacggctgccagagagaccaggacggctactactggatcaccggcagaatcgacgacatgctgaacgtgagcggccacctgctgagcaccgccgaggtggagagcgccctggtggagcacgaggccgtggccgaggccgccgtggtgggccacccccaccccgtgaagggcgagtgcctgtactgcttcgtgaccctgtgcgacggccacaccttcagccccaagctgaccgaggagctgaagaagcagatcagagagaagatcggccccatcgccacccccgactacatccagaacgcccccggcctgcccaagaccagaagcggcaagatcatgagaagagtgctgagaaagatcgcccagaacgaccacgacctgggcgacatgagcaccgtggccgaccccagcgtgatcagccacctgttcagccacagatgcctgaccatccagtag

SEQ ID NO: 71744 - DNA, 114 bp, synthetic construct
  misc_feature 1..114: note = Description of Artificial Sequence: Synthetic coding sequence
  source 1..114: mol_type = other DNA
atgatggtgagatgggccctgctgtgcggcgagtgcagaatcctgggcagacactgccagggcatcctgctggaggacagcatgccctggcccatccccagcgtgcagctgtag

SEQ ID NO: 71745 - DNA, 2061 bp, synthetic construct
  misc_feature 1..2061: note = Description of Artificial Sequence: Synthetic coding sequence
  source 1..2061: mol_type = other DNA
atgaagcccagctggctgcagtgcagaaaggtgaccagcgccggcggcctgggcggccccctgcccggcagcagccccgccagaggcgccggcgccgccctgagagccctggtggtgcccggccccagaggcggcctgggcggcagaggctgcagagccctgagcagcggcagcggcagcgagtacaagacccacttcgccgccagcgtgaccgaccccgagagattctggggcaaggccgccgagcagatcagctggtacaagccctggaccaagaccctggagaacaagcacagccccagcaccagatggttcgtggagggcatgctgaacatctgctacaacgccgtggacagacacatcgagaacggcaagggcgacaagatcgccatcatctacgacagccccgtgaccaacaccaaggccaccttcacctacaaggaggtgctggagcaggtgagcaagctggccggcgtgctggtgaagcacggcatcaagaagggcgacaccgtggtgatctacatgcccatgatcccccaggccatgtacaccatgctggcctgcgccagaatcggcgccatccacagcctgatcttcggcggcttcgccagcaaggagctgagcagcagaatcgaccacgtgaagcccaaggtggtggtgaccgccagcttcggcatcgagcccggcagaagagtggagtacgtgcccctggtggaggaggccctgaagatcggccagcacaagcccgacaagatcctgatctacaacagacccaacatggaggccgtgcccctggcccccggcagagacctggactgggacgaggagatggccaaggcccagagccacgactgcgtgcccgtgctgagcgagcaccccctgtacatcctgtacaccagcggcaccaccggcctgcccaagggcgtgatcagacccaccggcggctacgccgtgatgctgcactggagcatgagcagcatctacggcctgcagcccggcgaggtgtggtgggccgccagcgacctgggctgggtggtgggccacagctacatctgctacggccccctgctgcacggcaacaccaccgtgctgtacgagggcaagcccgtgggcacccccgacgccggcgcctacttcagagtgctggccgagcacggcgtggccgccctgttcaccgcccccaccgccatcagagccatcagacagcaggaccccggcgccgccctgggcaagcagtacagcctgaccagattcaagaccctgttcgtggccggcgagagatgcgacgtggagaccctggagtggagcaagaacgtgttcagagtgcccgtgctggaccactggtggcagaccgagaccggcagccccatcaccgccagctgcgtgggcctgggcaacagcaagacccccccccccggccaggccggcaagagcgtgcccggctacaacgtgatgatcctggacgacaacatgcagaagctgaaggccagatgcctgggcaacatcgtggtgaagctgcccctgccccccggcgccttcagcggcctgtggaagaaccaggaggccttcaagcacctgtacttcgagaagttccccggctactacgacaccatggacgccggctacatggacgaggagggctacctgtacgtgatgagcagagtggacgacgtgatcaacgtggccggccacagaatcagcgccggcgccatcgaggagagcatcctgagccacggcaccgtggccgactgcgccgtggtgggcaaggaggaccccctgaagggccacgtgcccctggccctgtgcgtgctgagaaaggacatcaacgccaccgaggagcaggtgctggaggagatcgtgaagcacgtgagacagaacatcggccccgtggccgccttcagaaacgccgtgttcgtgaagcagctgcccaagaccagaagcggcaagatccccagaagcgccctgagcgccatcgtgaacggcaagccctacaagatcaccagcaccatcgaggaccccagcatcttcggccacgtggaggagatgctgaagcaggcctag

SEQ ID NO: 71746 - DNA, 1107 bp, synthetic construct
  misc_feature 1..1107: note = Description of Artificial Sequence: Synthetic coding sequence
  source 1..1107: mol_type = other DNA
atgctgcactggagcatgagcagcatctacggcctgcagcccggcgaggtgtggtgggccgccagcgacctgggctgggtggtgggccacagctacatctgctacggccccctgctgcacggcaacaccaccgtgctgtacgagggcaagcccgtgggcacccccgacgccggcgcctacttcagagtgctggccgagcacggcgtggccgccctgttcaccgcccccaccgccatcagagccatcagacagcaggaccccggcgccgccctgggcaagcagtacagcctgaccagattcaagaccctgttcgtggccggcgagagatgcgacgtggagaccctggagtggagcaagaacgtgttcagagtgcccgtgctggaccactggtggcagaccgagaccggcagccccatcaccgccagctgcgtgggcctgggcaacagcaagacccccccccccggccaggccggcaagagcgtgcccggctacaacgtgatgatcctggacgacaacatgcagaagctgaaggccagatgcctgggcaacatcgtggtgaagctgcccctgccccccggcgccttcagcggcctgtggaagaaccaggaggccttcaagcacctgtacttcgagaagttccccggctactacgacaccatggacgccggctacatggacgaggagggctacctgtacgtgatgagcagagtggacgacgtgatcaacgtggccggccacagaatcagcgccggcgccatcgaggagagcatcctgagccacggcaccgtggccgactgcgccgtggtgggcaaggaggaccccctgaagggccacgtgcccctggccctgtgcgtgctgagaaaggacatcaacgccaccgaggagcaggtgctggaggagatcgtgaagcacgtgagacagaacatcggccccgtggccgccttcagaaacgccgtgttcgtgaagcagctgcccaagaccagaagcggcaagatccccagaagcgccctgagcgccatcgtgaacggcaagccctacaagatcaccagcaccatcgaggaccccagcatcttcggccacgtggaggagatgctgaagcaggcctag

SEQ ID NO: 71747 - DNA, 1266 bp, synthetic construct
  misc_feature 1..1266: note = Description of Artificial Sequence: Synthetic coding sequence
  source 1..1266: mol_type = other DNA
atggccgccaccctgatcctggagcccgccggcagatgctgctgggacgagcccgtgagaatcgccgtgagaggcctggcccccgagcagcccgtgaccctgagagccagcctgagagacgagaagggcgccctgttccaggcccacgccagatacagagccgacaccctgggcgagctggacctggagagagcccccgccctgggcggcagcttcgccggcctggagcccatgggcctgctgtgggccctggagcccgagaagcccctggtgagactggtgaagagagacgtgagaacccccctggccgtggagctggaggtgctggacggccacgaccccgaccccggcagactgctgtgcagagtgagacacgagagatacttcctgccccccggcgtgagaagagagcccgtgagagccggcagagtgagaggcaccctgttcctgccccccgagcccggccccttccccggcatcgtggacatgttcggcaccggcggcggcctgctggagtacagagccagcctgctggccggcaagggcttcgccgtgatggccctggcctactacaactacgaggacctgcccaagaccatggagaccctgcacctggagtacttcgaggaggccgtgaactacctgctgagccaccccgaggtgaagggccccggcgtgggcctgctgggcatcagcaagggcggcgagctgtgcctgagcatggccagcttcctgaagggcatcaccgccgccgtggtgatcaacggcagcgtggccaacgtgggcggcaccctgagatacaagggcgagaccctgccccccgtgggcgtgaacagaaacagaatcaaggtgaccaaggacggctacgccgacatcgtggacgtgctgaacagccccctggagggccccgaccagaagagcttcatccccgtggagagagccgagagcaccttcctgttcctggtgggccaggacgaccacaactggaagagcgagttctacgccaacgaggcctgcaagagactgcaggcccacggcagaagaaagccccagatcatctgctaccccgagaccggccactacatcgagcccccctacttccccctgtgcagagccagcctgcacgccctggtgggcagccccatcatctggggcggcgagcccagagcccacgccatggcccaggtggacgcctggaagcagctgcagaccttcttccacaagcacctgggcggccacgagggcaccatccccagcaaggtgtag

SEQ ID NO: 71748 - DNA, 1785 bp, synthetic construct
  misc_feature 1..1785: note = Description of Artificial Sequence: Synthetic coding sequence
  source 1..1785: mol_type = other DNA
atgatccagaacgtgggcaaccacctgagaagaggcctggccagcgtgttcagcaacagaaccagcagaaagagcgccctgagagccggcaacgacagcgccatggccgacggcgagggctacagaaaccccaccgaggtgcagatgagccagctggtgctgccctgccacaccaaccagagaggcgagctgagcgtgggccagctgctgaagtggatcgacaccaccgcctgcctgagcgccgagagacacgccggctgcccctgcgtgaccgccagcatggacgacatctacttcgagcacaccatcagcgtgggccaggtggtgaacatcaaggccaaggtgaacagagccttcaacagcagcatggaggtgggcatccaggtggccagcgaggacctgtgcagcgagaagcagtggaacgtgtgcaaggccctggccaccttcgtggccagaagagagatcaccaaggtgaagctgaagcagatcacccccagaaccgaggaggagaagatggagcacagcgtggccgccgagagaagaagaatgagactggtgtacgccgacaccatcaaggacctgctggccaactgcgccatccagggcgacctggagagcagagactgcagcagaatggtgcccgccgagaagaccagagtggagagcgtggagctggtgctgcccccccacgccaaccaccagggcaacaccttcggcggccagatcatggcctggatggagaacgtggccaccatcgccgccagcagactgtgcagagcccaccccaccctgaaggccatcgagatgttccacttcagaggccccagccaggtgggcgacagactggtgctgaaggccatcgtgaacaacgccttcaagcacagcatggaggtgggcgtgtgcgtggaggcctacagacaggaggccgagacccacagaagacacatcaacagcgccttcatgaccttcgtggtgctggacgccgacgaccagccccagctgctgccctggatcagaccccagcccggcgacggcgagagaagatacagagaggccagcgccagaaagaagatcagactggacagaaagtacatcgtgagctgcaagcagaccgaggtgcccctgagcgtgccctgggaccccagcaaccaggtgtacctgagctacaacaacgtgagcagcctgaagatgctggtggccaaggacaactgggtgctgagcagcgagatcagccaggtgagactgtacaccctggaggacgacaagttcctgagcttccacatggagatggtggtgcacgtggacgccgcccaggccttcctgctgctgagcgacctgagacagagacccgagtgggacaagcactacagaagcgtggagctggtgcagcaggtggacgaggacgacgccatctaccacgtgaccagccccgccctgggcggccacaccaagccccaggacttcgtgatcctggccagcagaagaaagccctgcgacaacggcgacccctacgtgatcgccctgagaagcgtgaccctgcccacccacagagagacccccgagtacagaagaggcgagaccctgtgcagcggcttctgcctgtggagagagggcgaccagctgaccaaggtgagctactacaaccaggccacccccggcgtgctgaactacgtgaccaccaacgtggccggcctgagcagcgagttctacaccaccttcaaggcctgcgagcagttcctgctggacaacagaaacgacctggcccccagcctgcagaccctgtag

SEQ ID NO: 71749 - DNA, 1824 bp, synthetic construct
  misc_feature 1..1824: note = Description of Artificial Sequence: Synthetic coding sequence
  source 1..1824: mol_type = other DNA
atgatccagaacgtgggcaaccacctgagaagaggcctggccagcgtgttcagcaacagaaccagcagaaagagcgccctgagagccggcaacgacagcgccatggccgacggcgagggctacagaaaccccaccgaggtgcagatgagccagctggtgctgccctgccacaccaaccagagaggcgagctgagcgtgggccagctgctgaagtggatcgacaccaccgcctgcctgagcgccgagagacacgccggctgcccctgcgtgaccgccagcatggacgacatctacttcgagcacaccatcagcgtgggccaggtggtgaacatcaaggccaaggtgaacagagccttcaacagcagcatggaggtgggcatccaggtggccagcgaggacctgtgcagcgagaagcagtggaacgtgtgcaaggccctggccaccttcgtggccagaagagagatcaccaaggtgaagctgaagcagatcacccccagaaccgaggaggagaagatggagcacagcgtggccgccgagagaagaagaatgagactggtgtacgccgacaccatcaaggacctgctggccaactgcgccatccagggcgacctggagagcagagactgcagcagaatggtgcccgccgagaagaccagagtggagagcgtggagctggtgctgcccccccacgccaaccaccagggcaacaccttcggcggccagatcatggcctggatggagaacgtggccaccatcgccgccagcagactgtgcagagcccaccccaccctgaaggccatcgagatgttccacttcagaggccccagccaggtgggcgacagactggtgctgaaggccatcgtgaacaacgccttcaagcacagcatggaggtgggcgtgtgcgtggaggcctacagacaggaggccgagacccacagaagacacatcaacagcgccttcatgaccttcgtggtgctggacgccgacgaccagccccagctgctgccctggatcagaccccagcccggcgacggcgagagaagatacagagaggccagcgccagaaagaagatcagactggacagaaagtacatcgtgagctgcaagcagaccgaggtgcccctgagcgtgccctgggaccccagcaaccaggtgtacctgagctacaacaacgtgagcagcctgaagatgctggtggccaaggacaactgggtgctgagcagcgagatcagccaggtgagactgtacaccctggaggacgacaagttcctgagcttccacatggagatggtggtgcacgtggacgccgcccaggccttcctgctgctgagcgacctgagacagagacccgagtgggacaagcactacagaagcgtggagctggtgcagcaggtggacgaggacgacgccatctaccacgtgaccagccccgccctgggcggccacaccaagccccaggacttcgtgatcctggccagcagaagaaagccctgcgacaacggcgacccctacgtgatcgccctgagaagcgtgaccctgcccacccacagagagacccccgagtacagaagaggcgagaccctgtgcagcggcttctgcctgtggagagagggcgaccagctgaccaagtgctgctgggtgagagtgagcctgaccgagctggtgagcgccagcggcttctacagctggggcctggagagcagaagcaagggcagaagaagcgacggctggaacggcaagctggccggcggccacctgagcaccctgaaggccatccccgtggccaagatcaacagcagattcggctacctgcaggacacctag

SEQ ID NO: 71750 - DNA, 1668 bp, synthetic construct
  misc_feature 1..1668: note = Description of Artificial Sequence: Synthetic coding sequence
  source 1..1668: mol_type = other DNA
atggagagacccgcccccggcgaggtggtgatgagccaggccatccagcccgcccacgccaccgccagaggcgagctgagcgccggccagctgctgaagtggatcgacaccaccgcctgcctggccgccgagaagcacgccggcgtgagctgcgtgaccgccagcgtggacgacatccagttcgaggagaccgccagagtgggccaggtgatcaccatcaaggccaaggtgaccagagccttcagcaccagcatggagatcagcatcaaggtgatggtgcaggacatgctgaccggcatcgagaagctggtgagcgtggccttcagcaccttcgtggccaagcccgtgggcaaggagaagatccacctgaagcccgtgaccctgctgaccgagcaggaccacgtggagcacaacctggccgccgagagaagaaaggtgagactgcagcacgaggacaccttcaacaacctgatgaaggagagcagcaagttcgacgacctgatcttcgacgaggaggagggcgccgtgagcaccagaggcaccagcgtgcagagcatcgagctggtgctgcccccccacgccaaccaccacggcaacaccttcggcggccagatcatggcctggatggagaccgtggccaccatcagcgccagcagactgtgctgggcccaccccttcctgaagagcgtggacatgttcaagttcagaggccccagcaccgtgggcgacagactggtgttcaccgccatcgtgaacaacaccttccagacctgcgtggaggtgggcgtgagagtggaggccttcgactgccaggagtgggccgagggcagaggcagacacatcaacagcgccttcctgatctacaacgccgccgacgacaaggagaacctgatcaccttccccagaatccagcccatcagcaaggacgacttcagaagatacagaggcgccatcgccagaaagagaatcagactgggcagaaagtacgtgatcagccacaaggaggaggtgcccctgtgcatccactgggacatcagcaagcaggccagcctgagcgacagcaacgtggaggccctgaagaagctggccgccaagagaggctgggaggtgaccagcaccgtggagaagatcaagatctacaccctggaggagcacgacgtgctgagcgtgtgggtggagaagcacgtgggcagccccgcccacctggcctacagactgctgagcgacttcaccaagagacccctgtgggacccccacttcgtgagctgcgaggtgatcgactgggtgagcgaggacgaccagctgtaccacatcacctgccccatcctgaacgacgacaagcccaaggacctggtggtgctggtgagcagaagaaagcccctgaaggacggcaacacctacaccgtggccgtgaagagcgtgatcctgcccagcgtgccccccagcccccagtacatcagaagcgagatcatctgcgccggcttcctgatccacgccatcgacagcaacagctgcatcgtgagctacttcaaccacatgagcgccagcatcctgccctacttcgccggcaacctgggcggctggagcaagagcatcgaggagaccgccgccagctgcatccagttcctggagaacccccccgacgacggcttcgtgagcaccttctag

SEQ ID NO: 71751 - DNA, 1452 bp, synthetic construct
  misc_feature 1..1452: note = Description of Artificial Sequence: Synthetic coding sequence
  source 1..1452: mol_type = other DNA
atgagcaacaagctgctgagcccccacccccacagcgtggtgctgagaagcgagttcaagatggccagcagccccgccgtgctgagagccagcagactgtaccagtggagcctgaagagcagcgcccagttcctgggcagcccccagctgagacaggtgggccagatcatcagagtgcccgccagaatggccgccaccctgatcctggagcccgccggcagatgctgctgggacgagcccgtgagaatcgccgtgagaggcctggcccccgagcagcccgtgaccctgagagccagcctgagagacgagaagggcgccctgttccaggcccacgccagatacagagccgacaccctgggcgagctggacctggagagagcccccgccctgggcggcagcttcgccggcctggagcccatgggcctgctgtgggccctggagcccgagaagcccctggtgagactggtgaagagagacgtgagaacccccctggccgtggagctggaggtgctggacggccacgaccccgaccccggcagactgctgtgccagaccagacacgagagatacttcctgccccccggcgtgagaagagagcccgtgagagtgggcagagtgagaggcaccctgttcctgccccccgagcccggccccttccccggcatcgtggacatgttcggcaccggcggcggcctgctggagtacagagccagcctgctggccggcaagggcttcgccgtgatggccctggcctactacaactacgaggacctgcccaagaccatggagaccctgcacctggagtacttcgaggaggccatgaactacctgctgagccaccccgaggtgaagggccccggcgtgggcctgctgggcatcagcaagggcggcgagctgtgcctgagcatggccagcttcctgaagggcatcaccgccgccgtggtgatcaacggcagcgtggccaacgtgggcggcaccctgcactacaagggcgagaccctgccccccgtgggcgtgaacagaaacagaatcaaggtgaccaaggacggctacgccgacatcgtggacgtgctgaacagccccctggagggccccgaccagaagagcttcatccccgtggagagagccgagagcaccttcctgttcctggtgggccaggacgaccacaactggaagagcgagttctacgccaacgaggcctgcaagagactgcaggcccacggcagaagaaagccccagatcatctgctaccccgagaccggccactacatcgagcccccctacttccccctgtgcagagccagcctgcacgccctggtgggcagccccatcatctggggcggcgagcccagagcccacgccatggcccaggtggacgcctggaagcagctgcagaccttcttccacaagcacctgggcggccacgagggcaccatccccagcaaggtgtag

SEQ ID NO: 71752 - DNA, 1266 bp, synthetic construct
  misc_feature 1..1266: note = Description of Artificial Sequence: Synthetic coding sequence
  source 1..1266: mol_type = other DNA
atgagcgccaccctgatcctggagccccccggcagatgctgctggaacgagcccgtgagaatcgccgtgagaggcctggcccccgagcagagagtgaccctgagagccagcctgagagacgagaagggcgccctgttcagagcccacgccagatactgcgccgacgccagaggcgagctggacctggagagagcccccgccctgggcggcagcttcgccggcctggagcccatgggcctgctgtgggccctggagcccgagaagcccttctggagattcctgaagagagacgtgcagatccccttcgtggtggagctggaggtgctggacggccacgaccccgagcccggcagactgctgtgccaggcccagcacgagagacacttcctgccccccggcgtgagaagacagagcgtgagagccggcagagtgagagccaccctgttcctgccccccggccccggccccttccccggcatcatcgacatcttcggcatcggcggcggcctgctggagtacagagccagcctgctggccggccacggcttcgccaccctggccctggcctactacaacttcgaggacctgcccaacaacatggacaacatcagcctggagtacttcgaggaggccgtgtgctacatgctgcagcacccccaggtgaagggccccggcatcggcctgctgggcatcagcctgggcgccgacatctgcctgagcatggccagcttcctgaagaacgtgagcgccaccgtgagcatcaacggcagcggcatcagcggcaacaccgccatcaactacaagcacagcagcatcccccccctgggctacgacctgagaagaatcaaggtggccttcagcggcctggtggacatcgtggacatcagaaacgccctggtgggcggctacaagaaccccagcatgatccccatcgagaaggcccagggccccatcctgctgatcgtgggccaggacgaccacaactggagaagcgagctgtacgcccagaccgtgagcgagagactgcaggcccacggcaaggagaagccccagatcatctgctaccccggcaccggccactacatcgagcccccctacttccccctgtgccccgccagcctgcacagactgctgaacaagcacgtgatctggggcggcgagcccagagcccacagcaaggcccaggaggacgcctggaagcagatcctggccttcttctgcaagcacctgggcggcacccagaagaccgccgtgcccaagctgtag

SEQ ID NO: 71753 - DNA, 624 bp, synthetic construct
  misc_feature 1..624: note = Description of Artificial Sequence: Synthetic coding sequence
  source 1..624: mol_type = other DNA
atgctgcagcaccccaaggtgaagggccccagcatcgccctgctgggcttcagcaagggcggcgacctgtgcctgagcatggccagcttcctgaagggcatcaccgccaccgtgctgatcaacgcctgcgtggccaacaccgtggcccccctgcactacaaggacatgatcatccccaagctggtggacgacctgggcaaggtgaagatcaccaagagcggcttcctgaccttcatggacacctggagcaaccccctggaggagcacaaccaccagagcctggtgcccctggagaaggcccaggtgcccttcctgttcatcgtgggcatggacgaccagagctggaagagcgagttctacgcccagatcgccagcgagagactgcaggcccacggcaaggagagaccccagatcatctgctaccccgagaccggccactgcatcgaccccccctacttcccccccagcagagccagcgtgcacgccgtgctgggcgaggccatcttctacggcggcgagcccaaggcccacagcaaggcccaggtggacgcctggcagcagatccagaccttcttccacaagcacctgaacggcaagaagagcgtgaagcacagcaagatctag

SEQ ID NO: 71754 - DNA, 507 bp, synthetic construct
  misc_feature 1..507: note = Description of Artificial Sequence: Synthetic coding sequence
  source 1..507: mol_type = other DNA
atgctgcagcaccccaaggtgaagggccccagcatcgccctgctgggcttcagcaagggcggcgacctgtgcctgagcatggccagcttcctgaagggcatcaccgccaccgtgctgatcaacgcctgcgtggccaacaccgtggcccccctgcactacaaggacatgatcatccccaagctggtggacgacctgggcaaggtgaagatcaccaagagcggcttcctgaccttcatggacacctggagcaaccccctggaggagcacaaccaccagagcctggtgcccctggagaaggcccaggtgcccttcctgttcatcgtgggcatggacgaccagagctggaagagcgagttctacgcccagatcgccagcgagagactgcaggcccacggcaaggagagaccccagatcatctgctaccccgagaccggccactgcatcgaccccccctacttcccccccagcagagccagcgtgcacgccgtgctgggcgaggccatctag

SEQ ID NO: 71755 - DNA, 1113 bp, synthetic construct
  misc_feature 1..1113: note = Description of Artificial Sequence: Synthetic coding sequence
  source 1..1113: mol_type = other DNA
atggccagacccggcctgatccacagcgcccccggcctgcccgacacctgcgccctgctgcagccccccgccgccagcgccgccgccgcccccagcatgagcggccccgacgtggagacccccagcgccatccagatctgcagaatcatgagacccgacgacgccaacgtggccggcaacgtgcacggcggcaccatcctgaagatgatcgaggaggccggcgccatcatcagcaccagacactgcaacagccagaacggcgagagatgcgtggccgccctggccagagtggagagaaccgacttcctgagccccatgtgcatcggcgaggtggcccacgtgagcgccgagatcacctacaccagcaagcacagcgtggaggtgcaggtgaacgtgatgagcgagaacatcctgaccggcgccaagaagctgaccaacaaggccaccctgtggtacgtgcccctgagcctgaagaacgtggacaaggtgctggaggtgccccccgtggtgtacagcagacaggagcaggaggaggagggcagaaagagatacgaggcccagaagctggagagaatggagaccaagtggagaaacggcgacatcgtgcagcccgtgctgaaccccgagcccaacaccgtgagctacagccagagcagcctgatccacctggtgggccccagcgactgcaccctgcacggcttcgtgcacggcggcgtgaccatgaagctgatggacgaggtggccggcatcgtggccgccagacactgcaagaccaacatcgtgaccgccagcgtggacgccatcaacttccacgacaagatcagaaagggctgcgtgatcaccatcagcggcagaatgaccttcaccagcaacaagagcatggagatcgaggtgctggtggacgccgaccccgtggtggacagcagccagaagagatacagagccgccagcgccttcttcacctacgtgagcctgagccaggagggcagaagcctgcccgtgccccagctggtgcccgagaccgaggacgagaagaagagattcgaggagggcaagggcagatacctgcagatgaaggccaagagacagggccacgccgagccccagccctag

SEQ ID NO: 71756 - DNA, 990 bp, synthetic construct
  misc_feature 1..990: note = Description of Artificial Sequence: Synthetic coding sequence
  source 1..990: mol_type = other DNA
atggccttccagctgagcagaatcatgagacccgacgacgccaacgtggccggcaacgtgcacggcggcaccatcctgaagatgatcgaggaggccggcgccatcatcagcaccagacactgcaacagccagaacggcgagagatgcgtggccgccctggccagagtggagagaaccgacttcctgagccccatgtgcatcggcgaggtggcccacgtgagcgccgagatcacctacaccagcaagcacagcgtggaggtgcaggtgaacgtgatgagcgagaacatcctgaccggcgccaagaagctgaccaacaaggccaccctgtggtacgtgcccctgagcctgaagaacgtggacaaggtgctggaggtgccccccgtggtgtacagcagacaggagcaggaggaggagggcagaaagagatacgaggcccagaagctggagagaatggagaccaagtggagaaacggcgacatcgtgcagcccgtgctgaaccccgagcccaacaccgtgagctacagccagagcagcctgatccacctggtgggccccagcgactgcaccctgcacggcttcgtgcacggcggcgtgaccatgaagctgatggacgaggtggccggcatcgtggccgccagacactgcaagaccaacatcgtgaccgccagcgtggacgccatcaacttccacgacaagatcagaaagggctgcgtgatcaccatcagcggcagaatgaccttcaccagcaacaagagcatggagatcgaggtgctggtggacgccgaccccgtggtggacagcagccagaagagatacagagccgccagcgccttcttcacctacgtgagcctgagccaggagggcagaagcctgcccgtgccccagctggtgcccgagaccgaggacgagaagaagagattcgaggagggcaagggcagatacctgcagatgaaggccaagagacagggccacgccgagccccagccctag

SEQ ID NO: 71757 - DNA, 1053 bp, synthetic construct
  misc_feature 1..1053: note = Description of Artificial Sequence: Synthetic coding sequence
  source 1..1053: mol_type = other DNA
atgctgctgctgagaagaagcctgagcctgaacgtgctgagaaaggaggtggacagagcctgcttcggcgagaaggccaagcagatcatgagacccgacgacgccaacgtggccggcaacgtgcacggcggcaccatcctgaagatgatcgaggaggccggcgccatcatcagcaccagacactgcaacagccagaacggcgagagatgcgtggccgccctggccagagtggagagaaccgacttcctgagccccatgtgcatcggcgaggtggcccacgtgagcgccgagatcacctacaccagcaagcacagcgtggaggtgcaggtgaacgtgatgagcgagaacatcctgaccggcgccaagaagctgaccaacaaggccaccctgtggtacgtgcccctgagcctgaagaacgtggacaaggtgctggaggtgccccccgtggtgtacagcagacaggagcaggaggaggagggcagaaagagatacgaggcccagaagctggagagaatggagaccaagtggagaaacggcgacatcgtgcagcccgtgctgaaccccgagcccaacaccgtgagctacagccagagcagcctgatccacctggtgggccccagcgactgcaccctgcacggcttcgtgcacggcggcgtgaccatgaagctgatggacgaggtggccggcatcgtggccgccagacactgcaagaccaacatcgtgaccgccagcgtggacgccatcaacttccacgacaagatcagaaagggctgcgtgatcaccatcagcggcagaatgaccttcaccagcaacaagagcatggagatcgaggtgctggtggacgccgaccccgtggtggacagcagccagaagagatacagagccgccagcgccttcttcacctacgtgagcctgagccaggagggcagaagcctgcccgtgccccagctggtgcccgagaccgaggacgagaagaagagattcgaggagggcaagggcagatacctgcagatgaaggccaagagacagggccacgccgagccccagccctag

SEQ ID NO: 71758 - DNA, 1143 bp, synthetic construct
  misc_feature 1..1143: note = Description of Artificial Sequence: Synthetic coding sequence
  source 1..1143: mol_type = other DNA
atgaagctgctggccagagccctgagactgtgcgagttcggcagacaggccagcagcagaagactggtggccggccagggctgcgtgggccccagaagaggctgctgcgcccccgtgcaggtggtgggccccagagccgacctgcccccctgcggcgcctgcatcaccggcagaatcatgagacccgacgacgccaacgtggccggcaacgtgcacggcggcaccatcctgaagatgatcgaggaggccggcgccatcatcagcaccagacactgcaacagccagaacggcgagagatgcgtggccgccctggccagagtggagagaaccgacttcctgagccccatgtgcatcggcgaggtggcccacgtgagcgccgagatcacctacaccagcaagcacagcgtggaggtgcaggtgaacgtgatgagcgagaacatcctgaccggcgccaagaagctgaccaacaaggccaccctgtggtacgtgcccctgagcctgaagaacgtggacaaggtgctggaggtgccccccgtggtgtacagcagacaggagcaggaggaggagggcagaaagagatacgaggcccagaagctggagagaatggagaccaagtggagaaacggcgacatcgtgcagcccgtgctgaaccccgagcccaacaccgtgagctacagccagagcagcctgatccacctggtgggccccagcgactgcaccctgcacggcttcgtgcacggcggcgtgaccatgaagctgatggacgaggtggccggcatcgtggccgccagacactgcaagaccaacatcgtgaccgccagcgtggacgccatcaacttccacgacaagatcagaaagggctgcgtgatcaccatcagcggcagaatgaccttcaccagcaacaagagcatggagatcgaggtgctggtggacgccgaccccgtggtggacagcagccagaagagatacagagccgccagcgccttcttcacctacgtgagcctgagccaggagggcagaagcctgcccgtgccccagctggtgcccgagaccgaggacgagaagaagagattcgaggagggcaagggcagatacctgcagatgaaggccaagagacagggccacgccgagccccagccctag

SEQ ID NO: 71759 - DNA, 672 bp, synthetic construct
  misc_feature 1..672: note = Description of Artificial Sequence: Synthetic coding sequence
  source 1..672: mol_type = other DNA
atgctgctgctgagaagaagcctgagcctgaacgtgctgagaaaggaggtggacagagcctgcttcggcgagaaggccaagcagatcatgagacccgacgacgccaacgtggccggcaacgtgcacggcggcaccatcctgaagatgatcgaggaggccggcgccatcatcagcaccagacactgcaacagccagaacggcgagagatgcgtggccgccctggccagagtggagagaaccgacttcctgagccccatgtgcatcggcgaggtggcccacgtgagcgccgagatcacctacaccagcaagcacagcgtggaggtgcaggtgaacgtgatgagcgagaacatcctgaccggcgccaagaagctgaccaacaaggccaccctgtggtacgtgcccctgagcctgaagaacgtggacaaggtgctggaggtgccccccgtggtgtacagcagacaggagcaggaggaggagggcagaaagagatacgaggcccagaagctggagagaatggagaccaagtggagaaacggcgacatcgtgcagcccgtgctgaaccccgagcccaacaccgtgagctacagccagagcagcctgatccacctggtgggccccagcgactgcaccctgcacggcttcgtgcacggcggcggcgtggacttccactag

SEQ ID NO: 71760 - DNA, 798 bp, synthetic construct
  misc_feature 1..798: note = Description of Artificial Sequence: Synthetic coding sequence
  source 1..798: mol_type = other DNA
atgtgcatcggcgaggtggcccacgtgagcgccgagatcacctacaccagcaagcacagcgtggaggtgcaggtgaacgtgatgagcgagaacatcctgaccggcgccaagaagctgaccaacaaggccaccctgtggtacgtgcccctgagcctgaagaacgtggacaaggtgctggaggtgccccccgtggtgtacagcagacaggagcaggaggaggagggcagaaagagatacgaggcccagaagctggagagaatggagaccaagtggagaaacggcgacatcgtgcagcccgtgctgaaccccgagcccaacaccgtgagctacagccagagcagcctgatccacctggtgggccccagcgactgcaccctgcacggcttcgtgcacggcggcgtgaccatgaagctgatggacgaggtggccggcatcgtggccgccagacactgcaagaccaacatcgtgaccgccagcgtggacgccatcaacttccacgacaagatcagaaagggctgcgtgatcaccatcagcggcagaatgaccttcaccagcaacaagagcatggagatcgaggtgctggtggacgccgaccccgtggtggacagcagccagaagagatacagagccgccagcgccttcttcacctacgtgagcctgagccaggagggcagaagcctgcccgtgccccagctggtgcccgagaccgaggacgagaagaagagattcgaggagggcaagggcagatacctgcagatgaaggccaagagacagggccacgccgagccccagccctag

SEQ ID NO: 71761 - DNA, 1308 bp, synthetic construct
  misc_feature 1..1308: note = Description of Artificial Sequence: Synthetic coding sequence
  source 1..1308: mol_type = other DNA
atggccgcccccctggtgctggtgctggtggtggccgtgaccgtgagagccgccctgttcagaagcagcctggccgagttcatcagcgagagagtggaggtggtgagccccctgagcagctggaagagagtggtggagggcctgagcctgctggacctgggcgtgagcccctacagcggcgccgtgttccacgagacccccctgatcatctacctgttccacttcctgatcgactacgccgagctggtgttcatgatcaccgacgccctgaccgccatcgccctgtacttcgccatccaggacttcaacaaggtggtgttcaagaagcagaagctgctgctggagctggaccagtacgcccccgacgtggccgagctgatcagaacccccatggagatgagatacatccccctgaaggtggccctgttctacctgctgaacccctacaccatcctgagctgcgtggccaagagcacctgcgccatcaacaacaccctgatcgccttcttcatcctgaccaccatcaagggcagcgccttcctgagcgccatcttcctggccctggccacctaccagagcctgtaccccctgaccctgttcgtgcccggcctgctgtacctgctgcagagacagtacatccccgtgaagatgaagagcaaggccttctggatcttcagctgggagtacgccatgatgtacgtgggcagcctggtggtgatcatctgcctgagcttcttcctgctgagcagctgggacttcatccccgccgtgtacggcttcatcctgagcgtgcccgacctgacccccaacatcggcctgttctggtacttcttcgccgagatgttcgagcacttcagcctgttcttcgtgtgcgtgttccagatcaacgtgttcttctacaccatccccctggccatcaagctgaaggagcaccccatcttcttcatgttcatccagatcgccgtgatcgccatcttcaagagctaccccaccgtgggcgacgtggccctgtacatggccttcttccccgtgtggaaccacctgtacagattcctgagaaacatcttcgtgctgacctgcatcatcatcgtgtgcagcctgctgttccccgtgctgtggcacctgtggatctacgccggcagcgccaacagcaacttcttctacgccatcaccctgaccttcaacgtgggccagatcctgctgatcagcgactacttctacgccttcctgagaagagagtactacctgacccacggcctgtacctgaccgccaaggacggcaccgaggccatgctggtgctgaagtag

SEQ ID NO: 71762 - DNA, 342 bp, synthetic construct
  misc_feature 1..342: note = Description of Artificial Sequence: Synthetic coding sequence
  source 1..342: mol_type = other DNA
atgagcagcccccaggcccccgaggacggccagggctgcggcgacagaggcgacccccccggcgacctgagaagcgtgctggtgaccaccgtgctgaacctggagcccctggacgaggacctgttcagaggcagacactactgggtgcccgccaagagactgttcggcggccagatcgtgggccaggccctggtggccgccgccaagagcgtgagcgaggacgtgcacgtgcacagcctgcactgctacttcgtgagagccgagcagatgcccagctgcgtgctgagaagaagccccgccgagaagagcctgtggaccttcaccgtgtgcgacctgtactag

SEQ ID NO: 71763 - DNA, 1320 bp, synthetic construct
  misc_feature 1..1320: note = Description of Artificial Sequence: Synthetic coding sequence
  source 1..1320: mol_type = other DNA
atgagaagagccgccctgagactgtgcgccctgggcaagggccagctgacccccggcagaggcctgacccagggcccccagaaccccaagaagcagggcatcttccacatccacgaggtgagagacaagctgagagagatcgtgggcgccagcaccaactggagagaccacgtgaaggccatggaggagagaaagctgctgcacagcttcctggccaagagccaggacggcctgccccccagaagaatgaaggacagctacatcgaggtgctgctgcccctgggcagcgagcccgagctgagagagaagtacctgaccgtgcagaacaccgtgagattcggcagaatcctggaggacctggacagcctgggcgtgctgatctgctacatgcacaacaagatccacagcgccaagatgagccccctgagcatcgtgaccgccctggtggacaagatcgacatgtgcaagaagagcctgagccccgagcaggacatcaagttcagcggccacgtgagctgggtgggcaagaccagcatggaggtgaagatgcagatgttccagctgcacggcgacgagttctgccccgtgctggacgccaccttcgtgatggtggccagagacagcgagaacaagggccccgccttcgtgaaccccctgatccccgagagccccgaggaggaggagctgttcagacagggcgagctgaacaagggcagaagaatcgccttcagcagcaccagcctgctgaagatggcccccagcgccgaggagagaaccaccatccacgagatgttcctgagcaccctggaccccaagaccatcagcttcagaagcagagtgctgcccagcaacgccgtgtggatggagaacagcaagctgaagagcctggagatctgccacccccaggagagaaacatcttcaacagaatcttcggcggcttcctgatgagaaaggcctacgagctggcctgggccaccgcctgcagcttcggcggcagcagacccttcgtggtggccgtggacgacatcatgttccagaagcccgtggaggtgggcagcctgctgttcctgagcagccaggtgtgcttcacccagaacaactacatccaggtgagagtgcacagcgaggtggccagcctgcaggagaagcagcacaccaccaccaacgtgttccacttcaccttcatgagcgagaaggaggtgcccctggtgttccccaagacctacggcgagagcatgctgtacctggacggccagagacacttcaacagcatgagcggccccgccaccctgagaaaggactacctggtggagccctag

SEQ ID NO: 71764 - DNA, 1140 bp, synthetic construct
  misc_feature 1..1140: note = Description of Artificial Sequence: Synthetic coding sequence
  source 1..1140: mol_type = other DNA
atggaggagagaaagctgctgcacagcttcctggccaagagccaggacggcctgccccccagaagaatgaaggacagctacatcgaggtgctgctgcccctgggcagcgagcccgagctgagagagaagtacctgaccgtgcagaacaccgtgagattcggcagaatcctggaggacctggacagcctgggcgtgctgatctgctacatgcacaacaagatccacagcgccaagatgagccccctgagcatcgtgaccgccctggtggacaagatcgacatgtgcaagaagagcctgagccccgagcaggacatcaagttcagcggccacgtgagctgggtgggcaagaccagcatggaggtgaagatgcagatgttccagctgcacggcgacgagttctgccccgtgctggacgccaccttcgtgatggtggccagagacagcgagaacaagggccccgccttcgtgaaccccctgatccccgagagccccgaggaggaggagctgttcagacagggcgagctgaacaagggcagaagaatcgccttcagcagcaccagcctgctgaagatggcccccagcgccgaggagagaaccaccatccacgagatgttcctgagcaccctggaccccaagaccatcagcttcagaagcagagtgctgcccagcaacgccgtgtggatggagaacagcaagctgaagagcctggagatctgccacccccaggagagaaacatcttcaacagaatcttcggcggcttcctgatgagaaaggcctacgagctggcctgggccaccgcctgcagcttcggcggcagcagacccttcgtggtggccgtggacgacatcatgttccagaagcccgtggaggtgggcagcctgctgttcctgagcagccaggtgtgcttcacccagaacaactacatccaggtgagagtgcacagcgaggtggccagcctgcaggagaagcagcacaccaccaccaacgtgttccacttcaccttcatgagcgagaaggaggtgcccctggtgttccccaagacctacggcgagagcatgctgtacctggacggccagagacacttcaacagcatgagcggccccgccaccctgagaaaggactacctggtggagccctag

SEQ ID NO: 71765 - DNA, 1347 bp, synthetic construct
  misc_feature 1..1347: note = Description of Artificial Sequence: Synthetic coding sequence
  source 1..1347: mol_type = other DNA
atgagaagagccgccctgagactgtgcgccctgggcaagggccagctgacccccggcagaggcctgacccagggcccccagaaccccaagaagcagggcatcttccacatccacgaggcctgcagcagcatccacgtgaaccacgtgagagacaagctgagagagatcgtgggcgccagcaccaactggagagaccacgtgaaggccatggaggagagaaagctgctgcacagcttcctggccaagagccaggacggcctgccccccagaagaatgaaggacagctacatcgaggtgctgctgcccctgggcagcgagcccgagctgagagagaagtacctgaccgtgcagaacaccgtgagattcggcagaatcctggaggacctggacagcctgggcgtgctgatctgctacatgcacaacaagatccacagcgccaagatgagccccctgagcatcgtgaccgccctggtggacaagatcgacatgtgcaagaagagcctgagccccgagcaggacatcaagttcagcggccacgtgagctgggtgggcaagaccagcatggaggtgaagatgcagatgttccagctgcacggcgacgagttctgccccgtgctggacgccaccttcgtgatggtggccagagacagcgagaacaagggccccgccttcgtgaaccccctgatccccgagagccccgaggaggaggagctgttcagacagggcgagctgaacaagggcagaagaatcgccttcagcagcaccagcctgctgaagatggcccccagcgccgaggagagaaccaccatccacgagatgttcctgagcaccctggaccccaagaccatcagcttcagaagcagagtgctgcccagcaacgccgtgtggatggagaacagcaagctgaagagcctggagatctgccacccccaggagagaaacatcttcaacagaatcttcggcggcttcctgatgagaaaggcctacgagctggcctgggccaccgcctgcagcttcggcggcagcagacccttcgtggtggccgtggacgacatcatgttccagaagcccgtggaggtgggcagcctgctgttcctgagcagccaggtgtgcttcacccagaacaactacatccaggtgagagtgcacagcgaggtggccagcctgcaggagaagcagcacaccaccaccaacgtgttccacttcaccttcatgagcgagaaggaggtgcccctggtgttccccaagacctacggcgagagcatgctgtacctggacggccagagacacttcaacagcatgagcggccccgccaccctgagaaaggactacctggtggagccctag

SEQ ID NO: 71766 - DNA, 1269 bp, synthetic construct
  misc_feature 1..1269: note = Description of Artificial Sequence: Synthetic coding sequence
  source 1..1269: mol_type = other DNA
atgaccgtgttcttcaagaccctgagaaaccactggaagaagaccaccgccggcctgtgcctgctgacctggggcggccactggctgtacggcaagcactgcgacaacctgctgagaagagccgcctgccaggaggcccaggtgttcggcaaccagctgatcccccccaacgcccaggtgaagaaggccaccgtgttcctgaaccccgccgcctgcaagggcaaggccagaaccctgttcgagaagaacgccgcccccatcctgcacctgagcggcatggacgtgaccatcgtgaagaccgactacgagggccaggccaagaagctgctggagctgatggagaacaccgacgtgatcatcgtggccggcggcgacggcaccctgcaggaggtggtgaccggcgtgctgagaagaaccgacgaggccaccttcagcaagatccccatcggcttcatccccctgggcgagaccagcagcctgagccacaccctgttcgccgagagcggcaacaaggtgcagcacatcaccgacgccaccctggccatcgtgaagggcgagaccgtgcccctggacgtgctgcagatcaagggcgagaaggagcagcccgtgttcgccatgaccggcctgagatggggcagcttcagagacgccggcgtgaaggtgagcaagtactggtacctgggccccctgaagatcaaggccgcccacttcttcagcaccctgaaggagtggccccagacccaccaggccagcatcagctacaccggccccaccgagagaccccccaacgagcccgaggagacccccgtgcagagacccagcctgtacagaagaatcctgagaagactggccagctactgggcccagccccaggacgccctgagccaggaggtgagccccgaggtgtggaaggacgtgcagctgagcaccatcgagctgagcatcaccaccagaaacaaccagctggaccccaccagcaaggaggacttcctgaacatctgcatcgagcccgacaccatcagcaagggcgacttcatcaccatcggcagcagaaaggtgagaaaccccaagctgcacgtggagggcaccgagtgcctgcaggccagccagtgcaccctgctgatccccgagggcgccggcggcagcttcagcatcgacagcgaggagtacgaggccatgcccgtggaggtgaagctgctgcccagaaagctgcagttcttctgcgaccccagaaagagagagcagatgctgaccagccccacccagtag

SEQ ID NO: 71767 - DNA, 198 bp, synthetic construct
  misc_feature 1..198: note = Description of Artificial Sequence: Synthetic coding sequence
  source 1..198: mol_type = other DNA
atgaccgtgttcttcaagaccctgagaaaccactggaagaagaccaccgccggcctgtgcctgctgacctggggcggccactggctgtacggcaagcactgcgacaacctgctgagaagagccgcctgccaggaggcccagcactaccaggacgagagcagatgggagcccaccctgagcagaacccccggcagctag

SEQ ID NO: 71768 - DNA, 198 bp, synthetic construct; identical to SEQ ID NO: 71767
  misc_feature 1..198: note = Description of Artificial Sequence: Synthetic coding sequence
  source 1..198: mol_type = other DNA

SEQ ID NO: 71769 - DNA, 735 bp, synthetic construct
  misc_feature 1..735: note = Description of Artificial Sequence: Synthetic coding sequence
  source 1..735: mol_type = other DNA
atgaccgtgttcttcaagaccctgagaaaccactggaagaagaccaccgccggcctgtgcctgctgacctggggcggccactggctgtacggcaagcactgcgacaacctgctgagaagagccgcctgccaggaggcccaggtgttcggcaaccagctgatcccccccaacgcccaggtgaagaaggccaccgtgttcctgaaccccgccgcctgcaagggcaccctgttcgagaagaacgccgcccccatcctgcacctgagcggcatggacgtgaccatcgtgaagaccgactacgagggccaggccaagaagctgctggagctgatggagaacaccgacgtgatcatcgtggccggcggcgacggcaccctgcaggaggtggtgaccggcgtgctgagaagaaccgacgaggccaccttcagcaagatccccatcggcttcatccccctgggcgagaccagcagcctgagccacaccctgttcgccgagagcggcaacaaggtgcagcacatcaccgacgccaccctggccatcgtgaagggcgagaccgtgcccctggacgtgctgcagatcaagggcgagaaggagcagcccgtgttcgccatgaccggcctgagatggggcagcttcagagacgccggcgtgaaggtgagcaagtactggtacctgggccccctgaagatcaaggccgcccacttcttcagcaccctgaagcccttccccaagagatag

SEQ ID NO: 71770 - DNA, 1728 bp, synthetic construct
  misc_feature 1..1728: note = Description of Artificial Sequence: Synthetic coding sequence
  source 1..1728: mol_type = other DNA
atgcagagcccctggaagatcctgaccgtggcccccctgttcctgctgctgagcctgcagagcagcgccagccccgccaacgacgaccagagcagacccagcctgagcaacggccacacctgcgtgggctgcgtgctggtggtgagcgtgatcgagcagctggcccaggtgcacaacagcaccgtgcaggccagcatggagagactgtgcagctacctgcccgagaagctgttcctgaagaccacctgctacctggtgatcgacaagttcggcagcgacatcatcaagctgctgagcgccgacatgaacgccgacgtggtgtgccacaccctggagttctgcaagcagaacaccggccagcccctgtgccacctgtaccccctgcccaaggagacctggaagttcaccctgcagaaggccagacagatcgtgaagaagagccccatcctgaagtacagcagaagcggcagcgacatctgcagcctgcccgtgctggccaagatctgccagaagatcaagctggccatggagcagagcgtgcccttcaaggacgtggacagcgacaagtacagcgtgttccccaccctgagaggctaccactggagaggcagagactgcaacgacagcgacgagagcgtgtaccccggcagaagacccaacaactgggacgtgcaccaggacagcaactgcaacggcatctggggcgtggaccccaaggacggcgtgccctacgagaagaagttctgcgagggcagccagcccagaggcatcatcctgctgggcgacagcgccggcgcccacttccacatcagccccgagtggatcaccgccagccagatgagcctgaacagcttcatcaacctgcccaccgccctgaccaacgagctggactggccccagctgagcggcgccaccggcttcctggacagcaccgtgggcatcaaggagaagagcatctacctgagactgtggaagagaaaccactgcaaccacagagactaccagaacatcagcagaaacggcgccagcagcagaaacctgaagaagttcatcgagagcctgagcagaaacaaggtgctggactaccccgccatcgtgatctacgccatgatcggcaacgacgtgtgcagcggcaagagcgaccccgtgcccgccatgaccacccccgagaagctgtacagcaacgtgatgcagaccctgaagcacctgaacagccacctgcccaacggcagccacgtgatcctgtacggcctgcccgacggcaccttcctgtgggacaacctgcacaacagataccaccccctgggccagctgaacaaggacatgacctacgcccagctgtacagcttcctgaactgcctgcaggtgagcccctgccacggctggatgagcagcaacaagaccctgagaaccctgaccagcgagagagccgagcagctgagcaacaccctgaagaagatcgccgccagcgagaagttcaccaacttcaacctgttctacatggacttcgccttccacgagatcatccaggagtggcagaagagaggcggccagccctggcagctgatcgagcccgtggacggcttccaccccaacgaggtggccctgctgctgctggccgaccacttctggaagaaggtgcagctgcagtggccccagatcctgggcaaggagaaccccttcaacccccagatcaagcaggtgttcggcgaccagggcggccactag

SEQ ID NO: 71771 - DNA, 1632 bp, synthetic construct
  misc_feature 1..1632: note = Description of Artificial Sequence: Synthetic coding sequence
  source 1..1632: mol_type = other DNA
atgcagagcccctggaagatcctgaccgtggcccccctgttcctgctgctgagcctgcagagcagcgccagccccgccaacgacgaccagagcagacccagcctgagcaacggccacacctgcgtggagaagctgttcctgaagaccacctgctacctggtgatcgacaagttcggcagcgacatcatcaagctgctgagcgccgacatgaacgccgacgtggtgtgccacaccctggagttctgcaagcagaacaccggccagcccctgtgccacctgtaccccctgcccaaggagacctggaagttcaccctgcagaaggccagacagatcgtgaagaagagccccatcctgaagtacagcagaagcggcagcgacatctgcagcctgcccgtgctggccaagatctgccagaagatcaagctggccatggagcagagcgtgcccttcaaggacgtggacagcgacaagtacagcgtgttccccaccctgagaggctaccactggagaggcagagactgcaacgacagcgacgagagcgtgtaccccggcagaagacccaacaactgggacgtgcaccaggacagcaactgcaacggcatctggggcgtggaccccaaggacggcgtgccctacgagaagaagttctgcgagggcagccagcccagaggcatcatcctgctgggcgacagcgccggcgcccacttccacatcagccccgagtggatcaccgccagccagatgagcctgaacagcttcatcaacctgcccaccgccctgaccaacgagctggactggccccagctgagcggcgccaccggcttcctggacagcaccgtgggcatcaaggagaagagcatctacctgagactgtggaagagaaaccactgcaaccacagagactaccagaacatcagcagaaacggcgccagcagcagaaacctgaagaagttcatcgagagcctgagcagaaacaaggtgctggactaccccgccatcgtgatctacgccatgatcggcaacgacgtgtgcagcggcaagagcgaccccgtgcccgccatgaccacccccgagaagctgtacagcaacgtgatgcagaccctgaagcacctgaacagccacctgcccaacggcagccacgtgatcctgtacggcctgcccgacggcaccttcctgtgggacaacctgcacaacagataccaccccctgggccagctgaacaaggacatgacctacgcccagctgtacagcttcctgaactgcctgcaggtgagcccctgccacggctggatgagcagcaacaagaccctgagaaccctgaccagcgagagagccgagcagctgagcaacaccctgaagaagatcgccgccagcgagaagttcaccaacttcaacctgttctacatggacttcgccttccacgagatcatccaggagtggcagaagagaggcggccagccctggcagctgatcgagcccgtggacggcttccaccccaacgaggtggccctgctgctgctggccgaccacttctggaagaaggtgcagctgcagtggccccagatcctgggcaaggagaaccccttcaacccccagatcaagcaggtgttcggcgaccagggcggccactag

SEQ ID NO: 71772 - DNA, 894 bp, synthetic construct
  misc_feature 1..894: note = Description of Artificial Sequence: Synthetic coding sequence
  source 1..894: mol_type = other DNA
atgaagctgaagaacagcttcatcaacctgcccaccgccctgaccaacgagctggactggccccagctgagcggcgccaccggcttcctggacagcaccgtgggcatcaaggagaagagcatctacctgagactgtggaagagaaaccactgcaaccacagagactaccagaacatcagcagaaacggcgccagcagcagaaacctgaagaagttcatcgagagcctgagcagaaacaaggtgctggactaccccgccatcgtgatctacgccatgatcggcaacgacgtgtgcagcggcaagagcgaccccgtgcccgccatgaccacccccgagaagctgtacagcaacgtgatgcagaccctgaagcacctgaacagccacctgcccaacggcagccacgtgatcctgtacggcctgcccgacggcaccttcctgtgggacaacctgcacaacagataccaccccctgggccagctgaacaaggacatgacctacgcccagctgtacagcttcctgaactgcctgcaggtgagcccctgccacggctggatgagcagcaacaagaccctgagaaccctgaccagcgagagagccgagcagctgagcaacaccctgaagaagatcgccgccagcgagaagttcaccaacttcaacctgttctacatggacttcgccttccacgagatcatccaggagtggcagaagagaggcggccagccctggcagctgatcgagcccgtggacggcttccaccccaacgaggtggccctgctgctgctggccgaccacttctggaagaaggtgcagctgcagtggccccagatcctgggcaaggagaaccccttcaacccccagatcaagcaggtgttcggcgaccagggcggccactag

SEQ ID NO: 71773 - DNA, 2061 bp, synthetic construct
  misc_feature 1..2061: note = Description of Artificial Sequence: Synthetic coding sequence
  source 1..2061: mol_type = other DNA
atgcagagcccctggaagatcctgaccgtggcccccctgttcctgctgctgagcctgcagagcagcgccagccccgccaacgacgaccagagcagacccagcctgagcaacggccacacctgcgtgggctgcgtgctggtggtgagcgtgatcgagcagctggcccaggtgcacaacagcaccgtgcaggccagcatggagagactgtgcagctacctgcccgagaagctgttcctgaagaccacctgctacctggtgatcgacaagttcggcagcgacatcatcaagctgctgagcgccgacatgaacgccgacgtggtgtgccacaccctggagttctgcaagcagaacaccggccagcccctgtgccacctgtaccccctgcccaaggagacctggaagttcaccctgcagaaggccagacagatcgtgaagaagagccccatcctgaagtacagcagaagcggcagcgacatctgcagcctgcccgtgctggccaagatctgccagaagatcaagctggccatggagcagagcgtgcccttcaaggacgtggacagcgacaagtacagcgtgttccccaccctgagaggctaccactggagaggcagagactgcaacgacagcgacgagagcgtgtaccccggcagaagacccaacaactgggacgtgcaccaggacagcaactgcaacggcatctggggcgtggaccccaaggacggcgtgccctacgagaagaagttctgcgagggcagccagcccagaggcatcatcctgctgggcgacagcgccggcgcccacttccacatcagccccgagtggatcaccgccagccagatgagcctgaacagcttcatcaacctgcccaccgccctgaccaacgagctggactggccccagctgagcggcgccaccggcttcctggacagcaccgtgggcatcaaggagaagagcatctacctgagactgtggaagagaaaccactgcaaccacagagactaccagaacatcagcagaaacggcgccagcagcagaaacctgaagaagttcatcgagagcctgagcagaaacaaggtgctggactaccccgccatcgtgatctacgccatgatcggcaacgacgtgtgcagcggcaagagcgaccccgtgcccgccatgaccacccccgagaagctgtacagcaacgtgatgcagaccctgaagcacctgaacagccacctgcccaacggcagccacgtgatcctgtacggcctgcccgacggcaccttcctgtgggacaacctgcacaacagataccaccccctgggccagctgaacaaggacatgacctacgcccagctgtacagcttcctgaactgcctgcaggtgagcccctgccacggctggatgagcagcaacaagaccctgagaaccctgaccagcgagagagccgagcagctgagcaacaccctgaagaagatcgccgccagcgagaagttcaccaacttcaacctgttctacatggacttcgccttccacgagatcatccaggagtggcagaagagaggcggccagccctggcagctgatcgagcccgtggacggcttccaccccaacgagagaaagagcatcctgctgaagggcatcctgatgaccagccagaccctggacaaccaggagtggacccagctgaccagctggatcaagggcaacctgacctgcgacagcagaaccagagagtggctgtgctgctgctggagaatcatcagcggcaagagatgcagcagcagcggccccaagagctgggagagaagaatcagaagcacccccagactgaacagatgcctggagaccaaggccggcaccgagcccctgagaagcatgcacccctggggcgcccagggcggcagaggcctgggcaagctgatcccccagctgtggggcctgcccagacacagacccaagggcctgttcttcagcagcatcttcaagtgcctgagcctgaacgaggagcacatctggaccaccgtgcagtgctgcgtgctgcccggcagcgtgaccctgcccctgttcctgaagtag

SEQ ID NO: 71774 - DNA, 1992 bp, synthetic construct
  misc_feature 1..1992: note = Description of Artificial Sequence: Synthetic coding sequence
  source 1..1992: mol_type = other DNA
atgcagagcccctggaagatcctgaccgtggcccccctgttcctgctgctgagcctgcagagcagcgccagccccgccaacgacgaccagagcagacccagcctgagcaacggccacacctgcgtgggctgcgtgctggtggtgagcgtgatcgagcagctggcccaggtgcacaacagcaccgtgcaggccagcatggagagactgtgcagctacctgcccgagaagctgttcctgaagaccacctgctacctggtgatcgacaagttcggcagcgacatcatcaagctgctgagcgccgacatgaacgccgacgtggtgtgccacaccctggagttctgcaagcagaacaccggccagcccctgtgccacctgtaccccctgcccaaggagacctggaagttcaccctgcagaaggccagacagatcgtgaagaagagccccatcctgaagtacagcagaagcggcagcgacatctgcagcctgcccgtgctggccaagatctgccagaagatcaagctggccatggagcagagcgtgcccttcaaggacgtggacagcgacaagtacagcgtgttccccaccctgagaggctaccactggagaggcagagactgcaacgacagcgacgagagcgtgtaccccggcagaagacccaacaactgggacgtgcaccaggacagcaactgcaacggcatctggggcgtggaccccaaggacggcgtgccctacgagaagaagttctgcgagggcagccagcccagaggcatcatcctgctgggcgacagcgccggcgcccacttccacatcagccccgagtggatcaccgccagccagatgagcctgaacagcttcatcaacctgcccaccgccctgaccaacgagctggactggccccagctgagcggcgccaccggcttcctggacagcaccgtgggcatcaaggagaagagcatctacctgagactgtggaagagaaaccactgcaaccacagagactaccagaacatcagcagaaacggcgccagcagcagaaacctgaagaagttcatcgagagcctgagcagaaacaaggtgctggactaccccgccatcgtgatctacgccatgatcggcaacgacgtgtgcagcggcaagagcgaccccgtgcccgccatgaccacccccgagaagctgtacagcaacgtgatgcagaccctgaagcacctgaacagccacctgcccaacggcagccacgtgatcctgtacggcctgcccgacggcaccttcctgtgggacaacctgcacaacagataccaccccctgggccagctgaacaaggacatgacctacgcccagctgtacagcttcctgaactgcctgcaggtgagcccctgccacggctggatgagcagcaacaagaccctgagaaccctgaccagcgagagagccgagcagctgagcaacaccctgaagaagatcgccgccagcgagaagttcaccaacttcaacctgttctacatggacttcgccttccacgagatcatccaggagtggcagaagagaggcggccagccctggcagctgatcgagcccgtggacggcttccaccccaacgagagaaagagcatcctgctgaagggcatcctgatgaccagccagaccctggacaaccaggagtggacccagctgaccagctggatcaagggcaacctgacctgcgacagcagaaccagagagtggctgtgctgctgctggagaatcatcagcggcaagagatgcagcagcagcggccccaagagctgggagagaagaatcagaagcacccccagactgaacagatgcctggagaccaaggccggcaccgagcccctgagaagcatgcacccctggggcgcccagggcggcagaggcctgggcaagctgatcccccagccctacggcggctgccacgtgaccggccccaaggacagcagcagcgccgccagcctgcagatgagcttcagccagtag

SEQ ID NO: 71775 - DNA, 300 bp, synthetic construct
  misc_feature 1..300: note = Description of Artificial Sequence: Synthetic coding sequence
  source 1..300: mol_type = other DNA
atggccgagggcaacaccctgatcagcgtggactacgagatcttcggcaaggtgcagggcgtgttcttcagaaagcacacccaggccgagggcaagaagctgggcctggtgggctgggtgcagaacaccgacagaggcaccgtgcagggccagctgcagggccccatcagcaaggtgagacacatgcaggagtggctggagaccagaggcagccccaagagccacatcgacaaggccaacttcaacaacgagaaggtgatcctgaagctggactacagcgacttccagatcgtgaagtag

SEQ ID NO: 71776 - DNA, 168 bp, synthetic construct
  misc_feature 1..168: note = Description of Artificial Sequence: Synthetic coding sequence
  source 1..168: mol_type = other DNA
atggccgagggcaacaccctgatcagcgtggactacgagatcttcggcaaggtgcagggcgtgttcttcagaaagcacacccaggagatgaccgtggagaacagaatcgccgagacccacagcaagagctgcgtgcccgtgagcttcgccaccagctacgccggctag

SEQ ID NO: 71777 - DNA, 300 bp, synthetic construct; identical to SEQ ID NO: 71775
  misc_feature 1..300: note = Description of Artificial Sequence: Synthetic coding sequence
  source 1..300: mol_type = other DNA

SEQ ID NO: 71778 - DNA, 300 bp, synthetic construct
  misc_feature 1..300: note = Description of Artificial Sequence: Synthetic coding sequence
  source 1..300: mol_type = other DNA
atgagcaccgcccagagcctgaagagcgtggactacgaggtgttcggcagagtgcagggcgtgtgcttcagaatgtacaccgaggacgaggccagaaagatcggcgtggtgggctgggtgaagaacaccagcaagggcaccgtgaccggccaggtgcagggccccgaggacaaggtgaacagcatgaagagctggctgagcaaggtgggcagccccagcagcagaatcgacagaaccaacttcagcaacgagaagaccatcagcaagctggagtacagcaacttcagcatcagatactag

SEQ ID NO: 71779 - DNA, 294 bp, synthetic construct
  misc_feature 1..294: note = Description of Artificial Sequence: Synthetic coding sequence
  source 1..294: mol_type = other DNA
atgtgccccctgcccctggccgccgccgccgtggccgcccccagagcccccctgagactgctgaacagaggcctggccgccgccatgagcaccgcccagagcctgaagagcgtggactacgaggtgttcggcagagtgcagggcgtgtgcttcagaatgtacaccgaggacgaggccagaaagatcggcgtggtgggctgggtgaagaacaccagcaagggcaccgtgaccggccaggtgcagggccccgaggacaaggtgaacagcatgctggagtgcagcggcctgatctag

SEQ ID NO: 71780 - DNA, 2247 bp, synthetic construct
  misc_feature 1..2247: note = Description of Artificial Sequence: Synthetic coding sequence
  source 1..2247: mol_type = other DNA
atggtgctgctgagagtgctgatcctgctgctgagctgggccgccggcatgggcggccagtacggcaaccccctgaacaagtacatcagacactacgagggcctgagctacaacgtggacagcctgcaccagaagcaccagagagccaagagagccgtgagccacgaggaccagttcctgagactggacttccacgcccacggcagacacttcaacctgagaatgaagagagacaccagcctgttcagcgacgagttcaaggtggagaccagcaacaaggtgctggactacgacaccagccacatctacaccggccacatctacggcgaggagggcagcttcagccacggcagcgtgatcgacggcagattcgagggcttcatccagaccagaggcggcaccttctacgtggagcccgccgagagatacatcaaggacagaaccctgcccttccacagcgtgatctaccacgaggacgacatcaactacccccacaagtacggcccccagggcggctgcgccgaccacagcgtgttcgagagaatgagaaagtaccagatgaccggcgtggaggaggtgacccagatcccccaggaggagcacgccgccaacggccccgagctgctgagaaagaagagaaccaccagcgccgagaagaacacctgccagctgtacatccagaccgaccacctgttcttcaagtactacggcaccagagaggccgtgatcgcccagatcagcagccacgtgaaggccatcgacaccatctaccagaccaccgacttcagcggcatcagaaacatcagcttcatggtgaagagaatcagaatcaacaccaccgccgacgagaaggaccccaccaaccccttcagattccccaacatcggcgtggagaagttcctggagctgaacagcgagcagaaccacgacgactactgcctggcctacgtgttcaccgacagagacttcgacgacggcgtgctgggcctggcctgggtgggcgcccccagcggcagcagcggcggcatctgcgagaagagcaagctgtacagcgacggcaagaagaagagcctgaacaccggcatcatcaccgtgcagaactacggcagccacgtgccccccaaggtgagccacatcaccttcgcccacgaggtgggccacaacttcggcagcccccacgacagcggcaccgagtgcacccccggcgagagcaagaacctgggccagaaggagaacggcaactacatcatgtacgccagagccaccagcggcgacaagctgaacaacaacaagttcagcctgtgcagcatcagaaacatcagccaggtgctggagaagaagagaaacaactgcttcgtggagagcggccagcccatctgcggcaacggcatggtggagcagggcgaggagtgcgactgcggctacagcgaccagtgcaaggacgagtgctgcttcgacgccaaccagcccgagggcagaaagtgcaagctgaagcccggcaagcagtgcagccccagccagggcccctgctgcaccgcccagtgcgccttcaagagcaagagcgagaagtgcagagacgacagcgactgcgccagagagggcatctgcaacggcttcaccgccctgtgccccgccagcgaccccaagcccaacttcaccgactgcaacagacacacccaggtgtgcatcaacggccagtgcgccggcagcatctgcgagaagtacggcctggaggagtgcacctgcgccagcagcgacggcaaggacgacaaggagctgtgccacgtgtgctgcatgaagaagatggaccccagcacctgcgccagcaccggcagcgtgcagtggagcagacacttcagcggcagaaccatcaccctgcagcccggcagcccctgcaacgacttcagaggctactgcgacgtgttcatgagatgcagactggtggacgccgacggccccctggccagactgaagaaggccatcttcagccccgagctgtacgagaacatcgccgagtggatcgtggcccactggtgggccgtgctgctgatgggcatcgccctgatcatgctgatggccggcttcatcaagatctgcagcgtgcacacccccagcagcaaccccaagctgcccccccccaagcccctgcccggcaccctgaagagaagaagacccccccagcccatccagcagccccagagacagagacccagagagagctaccagatgggccacatgagaagatag

SEQ ID NO: 71781 - DNA, 1344 bp, synthetic construct
  misc_feature 1..1344: note = Description of Artificial Sequence: Synthetic coding sequence
  source 1..1344: mol_type = other DNA
atggtgctgctgagagtgctgatcctgctgctgagctgggccgccggcatgggcgacagagacttcgacgacggcgtgctgggcctggcctgggtgggcgcccccagcggcagcagcggcggcatctgcgagaagagcaagctgtacagcgacggcaagaagaagagcctgaacaccggcatcatcaccgtgcagaactacggcagccacgtgccccccaaggtgagccacatcaccttcgcccacgaggtgggccacaacttcggcagcccccacgacagcggcaccgagtgcacccccggcgagagcaagaacctgggccagaaggagaacggcaactacatcatgtacgccagagccaccagcggcgacaagctgaacaacaacaagttcagcctgtgcagcatcagaaacatcagccaggtgctggagaagaagagaaacaactgcttcgtggagagcggccagcccatctgcggcaacggcatggtggagcagggcgaggagtgcgactgcggctacagcgaccagtgcaaggacgagtgctgcttcgacgccaaccagcccgagggcagaaagtgcaagctgaagcccggcaagcagtgcagccccagccagggcccctgctgcaccgcccagtgcgccttcaagagcaagagcgagaagtgcagagacgacagcgactgcgccagagagggcatctgcaacggcttcaccgccctgtgccccgccagcgaccccaagcccaacttcaccgactgcaacagacacacccaggtgtgcatcaacggccagtgcgccggcagcatctgcgagaagtacggcctggaggagtgcacctgcgccagcagcgacggcaaggacgacaaggagctgtgccacgtgtgctgcatgaagaagatggaccccagcacctgcgccagcaccggcagcgtgcagtggagcagacacttcagcggcagaaccatcaccctgcagcccggcagcccctgcaacgacttcagaggctactgcgacgtgttcatgagatgcagactggtggacgccgacggccccctggccagactgaagaaggccatcttcagccccgagctgtacgagaacatcgccgagtggatcgtggcccactggtgggccgtgctgctgatgggcatcgccctgatcatgctgatggccggcttcatcaagatctgcagcgtgcacacccccagcagcaaccccaagctgcccccccccaagcccctgcccggcaccctgaagagaagaagacccccccagcccatccagcagccccagagacagagacccagagagagctaccagatgggccacatgagaagatag

SEQ ID NO: 71782 - DNA, 2310 bp, synthetic construct
  misc_feature 1..2310: note = Description of Artificial Sequence: Synthetic coding sequence
  source 1..2310: mol_type = other DNA
atgagactgctgagaagatgggccttcgccgccctgctgctgagcctgctgcccacccccggcctgggcacccagggccccgccggcgccctgagatggggcggcctgccccagctgggcggccccggcgcccccgaggtgaccgagcccagcagactggtgagagagagcagcggcggcgaggtgagaaagcagcagctggacaccagagtgagacaggagccccccggcggcccccccgtgcacctggcccaggtgagcttcgtgatccccgccttcaacagcaacttcaccctggacctggagctgaaccaccacctgctgagcagccagtacgtggagagacacttcagcagagagggcaccacccagcacagcaccggcgccggcgaccactgctactaccagggcaagctgagaggcaacccccacagcttcgccgccctgagcacctgccagggcctgcacggcgtgttcagcgacggcaacctgacctacatcgtggagccccaggaggtggccggcccctggggcgccccccagggccccctgccccacctgatctacagaacccccctgctgcccgaccccctgggctgcagagagcccggctgcctgttcgccgtgcccgcccagagcgccccccccaacagacccagactgagaagaaagagacaggtgagaagaggccaccccaccgtgcacagcgagaccaagtacgtggagctgatcgtgatcaacgaccaccagctgttcgagcagatgagacagagcgtggtgctgaccagcaacttcgccaagagcgtggtgaacctggccgacgtgatctacaaggagcagctgaacaccagaatcgtgctggtggccatggagacctgggccgacggcgacaagatccaggtgcaggacgacctgctggagaccctggccagactgatggtgtacagaagagagggcctgcccgagcccagcgacgccacccacctgttcagcggcagaaccttccagagcaccagcagcggcgccgcctacgtgggcggcatctgcagcctgagccacggcggcggcgtgaacgagtacggcaacatgggcgccatggccgtgaccctggcccagaccctgggccagaacctgggcatgatgtggaacaagcacagaagcagcgccggcgactgcaagtgccccgacatctggctgggctgcatcatggaggacaccggcttctacctgcccagaaagttcagcagatgcagcatcgacgagtacaaccagttcctgcaggagggcggcggcagctgcctgttcaacaagcccctgaagctgctggacccccccgagtgcggcaacggcttcgtggaggccggcgaggagtgcgactgcggcagcgtgcaggagtgcagcagagccggcggcaactgctgcaagaagtgcaccctgacccacgacgccatgtgcagcgacggcctgtgctgcagaagatgcaagtacgagcccagaggcgtgagctgcagagaggccgtgaacgagtgcgacatcgccgagacctgcaccggcgacagcagccagtgcccccccaacctgcacaagctggacggctactactgcgaccacgagcagggcagatgctacggcggcagatgcaagaccagagacagacagtgccaggtgctgtggggccacgccgccgccgacagattctgctacgagaagctgaacgtggagggcaccgagagaggcagctgcggcagaaagggcagcggctgggtgcagtgcagcaagcaggacgtgctgtgcggcttcctgctgtgcgtgaacatcagcggcgcccccagactgggcgacctggtgggcgacatcagcagcgtgaccttctaccaccagggcaaggagctggactgcagaggcggccacgtgcagctggccgacggcagcgacctgagctacgtggaggacggcaccgcctgcggccccaacatgctgtgcctggaccacagatgcctgcccgccagcgccttcaacttcagcacctgccccggcagcggcgagagaagaatctgcagccaccacggcgtgtgcagcaacgagggcaagtgcatctgccagcccgactggaccggcaaggactgcagcatccacaaccccctgcccaccagcccccccaccggcgagaccgagagatacaagggccccagcggcaccaacatcatcatcggcagcatcgccggcgccgtgctggtggccgccatcgtgctgggcggcaccggctggggcttcaagaacatcagaagaggcagaagcggcggcgcctag

SEQ ID NO: 71783 - DNA, 1572 bp, synthetic construct
  misc_feature 1..1572: note = Description of Artificial Sequence: Synthetic coding sequence
  source 1..1572: mol_type = other DNA
tgctggggcagcggccacctgctgagcagccagtacgtggagagacacttcagcagagagggcaccacccagcacagcaccggcgccggcgaccactgctactaccagggcaagctgagaggcaacccccacagcttcgccgccctgagcacctgccagggcctgcacggcgtgttcagcgacggcaacctgacctacatcgtggagccccaggaggtggccggcccctggggcgccccccagggccccctgccccacctgatctacagaacccccctgctgcccgaccccctgggctgcagagagcccggctgcctgttcgccgtgcccgcccagagcgccccccccaacagacccagactgagaagaaagagacaggtgagaagaggccaccccaccgtgcacagcgagaccaagtacgtggagctgatcgtgatcaacgaccaccagctgttcgagcagatgagacagagcgtggtgctgaccagcaacttcgccaagagcgtggtgaacctggccgacgtgatctacaaggagcagctgaacaccagaatcgtgctggtggccatggagacctgggccgacggcgacaagatccaggtgcaggacgacctgctggagaccctggccagactgatggtgtacagaagagagggcctgcccgagcccagcgacgccacccacctgttcagcggcagaaccttccagagcaccagcagcggcgccgcctacgtgggcggcatctgcagcctgagccacggcggcggcgtgaacgagtacggcaacatgggcgccatggccgtgaccctggcccagaccctgggccagaacctgggcatgatgtggaacaagcacagaagcagcgccggcgactgcaagtgccccgacatctggctgggctgcatcatggaggacaccggcttctacctgcccagaaagttcagcagatgcagcatcgacgagtacaaccagttcctgcaggagggcggcggcagctgcctgttcaacaagcccctgaagctgctggacccccccgagtgcggcaacggcttcgtggaggccggcgaggagtgcgactgcggcagcgtgcaggagtgcagcagagccggcggcaactgctgcaagaagtgcaccctgacccacgacgccatgtgcagcgacggcctgtgctgcagaagatgcaagtacgagcccagaggcgtgagctgcagagaggccgtgaacgagtgcgacatcgccgagacctgcaccggcgacagcagccagtgcccccccaacctgcacaagctggacggctactactgcgaccacgagcagggcagatgctacggcggcagatgcaagaccagagacagacagtgccaggtgctgtggggccacgccgccgccgacagattctgctacgagaagctgaacgtggagggcaccgagagaggcagctgcggcagaaagggcagcggctgggtgcagtgcagcaagcagccccagcagggcagagccgtgtggctgccccccctgtgccagcacctgtggagcagcagcgccagaggccccggcggcagacaccagtag

SEQ ID NO: 71784 - DNA, 1710 bp, synthetic construct
  misc_feature 1..1710: note = Description of Artificial Sequence: Synthetic coding sequence
  source 1..1710: mol_type = other DNA
atgcagggcaccagactgcccgtgtgctgcgcctgccccgtgggcagcagcaagcccgccgaggccgagaaggagaaggtgagaagaggccaccccaccgtgcacagcgagaccaagtacgtggagctgatcgtgatcaacgaccaccagctgttcgagcagatgagacagagcgtggtgctgaccagcaacttcgccaagagcgtggtgaacctggccgacgtgatctacaaggagcagctgaacaccagaatcgtgctggtggccatggagacctgggccgacggcgacaagatccaggtgcaggacgacctgctggagaccctggccagactgatggtgtacagaagagagggcctgcccgagcccagcgacgccacccacctgttcagcggcagaaccttccagagcaccagcagcggcgccgcctacgtgggcggcatctgcagcctgagccacggcggcggcgtgaacgagtacggcaacatgggcgccatggccgtgaccctggcccagaccctgggccagaacctgggcatgatgtggaacaagcacagaagcagcgccggcgactgcaagtgccccgacatctggctgggctgcatcatggaggacaccggcttctacctgcccagaaagttcagcagatgcagcatcgacgagtacaaccagttcctgcaggagggcggcggcagctgcctgttcaacaagcccctgaagctgctggacccccccgagtgcggcaacggcttcgtggaggccggcgaggagtgcgactgcggcagcgtgcaggagtgcagcagagccggcggcaactgctgcaagaagtgcaccctgacccacgacgccatgtgcagcgacggcctgtgctgcagaagatgcaagtacgagcccagaggcgtgagctgcagagaggccgtgaacgagtgcgacatcgccgagacctgcaccggcgacagcagccagtgcccccccaacctgcacaagctggacggctactactgcgaccacgagcagggcagatgctacggcggcagatgcaagaccagagacagacagtgccaggtgctgtggggccacgccgccgccgacagattctgctacgagaagctgaacgtggagggcaccgagagaggcagctgcggcagaaagggcagcggctgggtgcagtgcagcaagcaggacgtgctgtgcggcttcctgctgtgcgtgaacatcagcggcgcccccagactgggcgacctggtgggcgacatcagcagcgtgaccttctaccaccagggcaaggagctggactgcagaggcggccacgtgcagctggccgacggcagcgacctgagctacgtggaggacggcaccgcctgcggccccaacatgctgtgcctggaccacagatgcctgcccgccagcgccttcaacttcagcacctgccccggcagcggcgagagaagaatctgcagccaccacggcgtgtgcagcaacgagggcaagtgcatctgccagcccgactggaccggcaaggactgcagcatccacaaccccctgcccaccagcccccccaccggcgagaccgagagatacaagggccccagcggcaccaacatcatcatcggcagcatcgccggcgccgtgctggtggccgccatcgtgctgggcggcaccggctggggcttcaagaacatcagaagaggcagaagcggcggcgcctag

SEQ ID NO: 71785 - DNA, 2217 bp, synthetic construct
  misc_feature 1..2217: note = Description of Artificial Sequence: Synthetic coding sequence
  source 1..2217: mol_type = other DNA
atggccgccagacccctgcccgtgagccccgccagagccctgctgctggccctggccggcgccctgctggccccctgcgaggccagaggcgtgagcctgtggaaccagggcagagccgacgaggtggtgagcgccagcgtgggcagcggcgacctgtggatccccgtgaagagcttcgacagcaagaaccaccccgaggtgctgaacatcagactgcagagagagagcaaggagctgatcatcaacctggagagaaacgagggcctgatcgccagcagcttcaccgagacccactacctgcaggacggcaccgacgtgagcctggccagaaactacaccgtgatcctgggccactgctactaccacggccacgtgagaggctacagcgacagcgccgtgagcctgagcacctgcagcggcctgagaggcctgatcgtgttcgagaacgagagctacgtgctggagcccatgaagagcgccaccaacagatacaagctgttccccgccaagaagctgaagagcgtgagaggcagctgcggcagccaccacaacacccccaacctggccgccaagaacgtgttccccccccccagccagacctgggccagaagacacaagagagagaccctgaaggccaccaagtacgtggagctggtgatcgtggccgacaacagagagttccagagacagggcaaggacctggagaaggtgaagcagagactgatcgagatcgccaaccacgtggacaagttctacagacccctgaacatcagaatcgtgctggtgggcgtggaggtgtggaacgacatggacaagtgcagcgtgagccaggaccccttcaccagcctgcacgagttcctggactggagaaagatgaagctgctgcccagaaagagccacgacaacgcccagctggtgagcggcgtgtacttccagggcaccaccatcggcatggcccccatcatgagcatgtgcaccgccgaccagagcggcggcatcgtgatggaccacagcgacaaccccctgggcgccgccgtgaccctggcccacgagctgggccacaacttcggcatgaaccacgacaccctggacagaggctgcagctgccagatggccgtggagaagggcggctgcatcatgaacgccagcaccggctaccccttccccatggtgttcagcagctgcagcagaaaggacctggagaccagcctggagaagggcatgggcgtgtgcctgttcaacctgcccgaggtgagagagagcttcggcggccagaagtgcggcaacagattcgtggaggagggcgaggagtgcgactgcggcgagcccgaggagtgcatgaacagatgctgcaacgccaccacctgcaccctgaagcccgacgccgtgtgcgcccacggcctgtgctgcgaggactgccagctgaagcccgccggcaccgcctgcagagacagcagcaacagctgcgacctgcccgagttctgcaccggcgccagcccccactgccccgccaacgtgtacctgcacgacggccacagctgccaggacgtggacggctactgctacaacggcatctgccagacccacgagcagcagtgcgtgaccctgtggggccccggcgccaagcccgcccccggcatctgcttcgagagagtgaacagcgccggcgacccctacggcaactgcggcaaggtgagcaagagcagcttcgccaagtgcgagatgagagacgccaagtgcggcaagatccagtgccagggcggcgccagcagacccgtgatcggcaccaacgccgtgagcatcgagaccaacatccccctgcagcagggcggcagaatcctgtgcagaggcacccacgtgtacctgggcgacgacatgcccgaccccggcctggtgctggccggcaccaagtgcgccgacggcaagatctgcctgaacagacagtgccagaacatcagcgtgttcggcgtgcacgagtgcgccatgcagtgccacggcagaggcgtgtgcaacaacagaaagaactgccactgcgaggcccactgggccccccccttctgcgacaagttcggcttcggcggcagcaccgacagcggccccatcagacaggccgaggccagacaggaggccgccgagagcaacagagagagaggccagggccaggagcccgtgggcagccaggagcacgccagcaccgccagcctgaccctgatctag

SEQ ID NO: 71786 - DNA, 2730 bp, synthetic construct
  misc_feature 1..2730: note = Description of Artificial Sequence: Synthetic coding sequence
  source 1..2730: mol_type = other DNA
atggccgccagacccctgcccgtgagccccgccagagccctgctgctggccctggccggcgccctgctggccccctgcgaggccagaggcgtgagcctgtggaaccagggcagagccgacgaggtggtgagcgccagcgtgggcagcggcgacctgtggatccccgtgaagagcttcgacagcaagaaccaccccgaggtgctgaacatcagactgcagagagagagcaaggagctgatcatcaacctggagagaaacgagggcctgatcgccagcagcttcaccgagacccactacctgcaggacggcaccgacgtgagcctggccagaaactacaccgtgatcctgggccactgctactaccacggccacgtgagaggctacagcgacagcgccgtgagcctgagcacctgcagcggcctgagaggcctgatcgtgttcgagaacgagagctacgtgctggagcccatgaagagcgccaccaacagatacaagctgttccccgccaagaagctgaagagcgtgagaggcagctgcggcagccaccacaacacccccaacctggccgccaagaacgtgttccccccccccagccagacctgggccagaagacacaagagagagaccctgaaggccaccaagtacgtggagctggtgatcgtggccgacaacagagagttccagagacagggcaaggacctggagaaggtgaagcagagactgatcgagatcgccaaccacgtggacaagttctacagacccctgaacatcagaatcgtgctggtgggcgtggaggtgtggaacgacatggacaagtgcagcgtgagccaggaccccttcaccagcctgcacgagttcctggactggagaaagatgaagctgctgcccagaaagagccacgacaacgcccagctggtgagcggcgtgtacttccagggcaccaccatcggcatggcccccatcatgagcatgtgcaccgccgaccagagcggcggcatcgtgatggaccacagcgacaaccccctgggcgccgccgtgaccctggcccacgagctgggccacaacttcggcatgaaccacgacaccctggacagaggctgcagctgccagatggccgtggagaagggcggctgcatcatgaacgccagcaccggctaccccttccccatggtgttcagcagctgcagcagaaaggacctggagaccagcctggagaagggcatgggcgtgtgcctgttcaacctgcccgaggtgagagagagcttcggcggccagaagtgcggcaacagattcgtggaggagggcgaggagtgcgactgcggcgagcccgaggagtgcatgaacagatgctgcaacgccaccacctgcaccctgaagcccgacgccgtgtgcgcccacggcctgtgctgcgaggactgccagctgaagcccgccggcaccgcctgcagagacagcagcaacagctgcgacctgcccgagttctgcaccggcgccagcccccactgccccgccaacgtgtacctgcacgacggccacagctgccaggacgtggacggctactgctacaacggcatctgccagacccacgagcagcagtgcgtgaccctgtggggccccggcgccaagcccgcccccggcatctgcttcgagagagtgaacagcgccggcgacccctacggcaactgcggcaaggtgagcaagagcagcttcgccaagtgcgagatgagagacgccaagtgcggcaagatccagtgccagggcggcgccagcagacccgtgatcggcaccaacgccgtgagcatcgagaccaacatccccctgcagcagggcggcagaatcctgtgcagaggcacccacgtgtacctgggcgacgacatgcccgaccccggcctggtgctggccggcaccaagtgcgccgacggcaagatctgcctgaacagacagtgccagaacatcagcgtgttcggcgtgcacgagtgcgccatgcagtgccacggcagaggcgtgtgcaacaacagaaagaactgccactgcgaggcccactgggccccccccttctgcgacaagttcggcttcggcggcagcaccgacagcggccccatcagacaggccgacaaccagggcctgaccatcggcatcctggtgaccatcctgtgcctgctggccgccggcttcgtggtgtacctgaagagaaagaccctgatcagactgctgttcaccaacaagaagaccaccatcgagaagctgagatgcgtgagacccagcagaccccccagaggcttccagccctgccaggcccacctgggccacctgggcaagggcctgatgagaaagccccccgacagctacccccccaaggacaaccccagaagactgctgcagtgccagaacgtggacatcagcagacccctgaacggcctgaacgtgccccagccccagagcacccagagagtgctgccccccctgcacagagcccccagagcccccagcgtgcccgccagacccctgcccgccaagcccgccctgagacaggcccagggcacctgcaagcccaaccccccccagaagcccctgcccgccgaccccctggccagaaccaccagactgacccacgccctggccagaacccccggccagtgggagaccggcctgagactggcccccctgagacccgccccccagtacccccaccaggtgcccagaagcacccacaccgcctacatcaagtag

SEQ ID NO: 71787 - DNA, 837 bp, synthetic construct
  misc_feature 1..837: note = Description of Artificial Sequence: Synthetic coding sequence
  source 1..837: mol_type = other DNA
atggccgccagacccctgcccgtgagccccgccagagccctgctgctggccctggccggcgccctgctggccccctgcgaggccagaggcgtgagcctgtggaaccagggcagagccgacgaggtggtgagcgccagcgtgggcagcggcgacctgtggatccccgtgaagagcttcgacagcaagaaccaccccgaggtgctgaacatcagactgcagagagagagcaaggagctgatcatcaacctggagagaaacgagggcctgatcgccagcagcttcaccgagacccactacctgcaggacggcaccgacgtgagcctggccagaaactacaccggccactgctactaccacggccacgtgagaggctacagcgacagcgccgtgagcctgagcacctgcagcggcctgagaggcctgatcgtgttcgagaacgagagctacgtgctggagcccatgaagagcgccaccaacagatacaagctgttccccgccaagaagctgaagagcgtgagaggcagctgcggcagccaccacaacacccccaacctggccgccaagaacgtgttccccccccccagccagacctgggccagaagacacaagagagagaccctgaaggccaccaagtacgtggagctggtgatcgtggccgacaacagagagttccagagacagggcaaggacctggagaaggtgaagcagagactgatcgagatcgccaaccacgtggacaagttctacagacccctgaacatcagaatcgtgctggtgggcgtggaggtgtggaacgacatggacaagtgcagcgtgagccaggaccccttcacctag

SEQ ID NO: 71788 - DNA, 2445 bp, synthetic construct
  misc_feature 1..2445: note = Description of Artificial Sequence: Synthetic coding sequence
  source 1..2445: mol_type = other DNA
atgagactggccctgctgtgggccctgggcctgctgggcgccggcagccccctgcccagctggcccctgcccaacatcggcggcaccgaggagcagcaggccgagagcgagaaggcccccagagagcccctggagccccaggtgctgcaggacgacctgcccatcagcctgaagaaggtgctgcagaccagcctgcccgagcccctgagaatcaagctggagctggacggcgacagccacatcctggagctgctgcagaacagagagctggtgcccggcagacccaccctggtgtggtaccagcccgacggcaccagagtggtgagcgagggccacaccctggagaactgctgctaccagggcagagtgagaggctacgccggcagctgggtgagcatctgcacctgcagcggcctgagaggcctggtggtgctgacccccgagagaagctacaccctggagcagggccccggcgacctgcagggcccccccatcatcagcagaatccaggacctgcacctgcccggccacacctgcgccctgagctggagagagagcgtgcacacccagaagccccccgagcaccccctgggccagagacacatcagaagaagaagagacgtggtgaccgagaccaagaccgtggagctggtgatcgtggccgaccacagcgaggcccagaagtacagagacttccagcacctgctgaacagaaccctggaggtggccctgctgctggacaccttcttcagacccctgaacgtgagagtggccctggtgggcctggaggcctggacccagagagacctggtggagatcagccccaaccccgccgtgaccctggagaacttcctgcactggagaagagcccacctgctgcccagactgccccacgacagcgcccagctggtgaccggcaccagcttcagcggccccaccgtgggcatggccatccagaacagcatctgcagccccgacttcagcggcggcgtgaacatggaccacagcaccagcatcctgggcgtggccagcagcatcgcccacgagctgggccacagcctgggcctggaccacgacctgcccggcaacagctgcccctgccccggccccgcccccgccaagacctgcatcatggaggccagcaccgacttcctgcccggcctgaacttcagcaactgcagcagaagagccctggagaaggccctgctggacggcatgggcagctgcctgttcgagagactgcccagcctgccccccatggccgccttctgcggcaacatgttcgtggagcccggcgagcagtgcgactgcggcttcctggacgactgcgtggacccctgctgcgacagcctgacctgccagctgagacccggcgcccagtgcgccagcgacggcccctgctgccagaactgccagctgagacccagcggctggcagtgcagacccaccagaggcgactgcgacctgcccgagttctgccccggcgacagcagccagtgcccccccgacgtgagcctgggcgacggcgagccctgcgccggcggccaggccgtgtgcatgcacggcagatgcgccagctacgcccagcagtgccagagcctgtggggccccggcgcccagcccgccgcccccctgtgcctgcagaccgccaacaccagaggcaacgccttcggcagctgcggcagaaaccccagcggcagctacgtgagctgcacccccagagacgccatctgcggccagctgcagtgccagaccggcagaacccagcccctgctgggcagcatcagagacctgctgtgggagaccatcgacgtgaacggcaccgagctgaactgcagctgggtgcacctggacctgggcagcgacgtggcccagcccctgctgaccctgcccggcaccgcctgcggccccggcctggtgtgcatcgaccacagatgccagagagtggacctgctgggcgcccaggagtgcagaagcaagtgccacggccacggcgtgtgcgacagcaacagacactgctactgcgaggagggctgggccccccccgactgcaccacccagctgaaggccaccagcagcctgaccaccggcctgctgctgagcctgctggtgctgctggtgctggtgatgctgggcgccagctactggtacagagccagactgcaccagagactgtgccagctgaagggccccacctgccagtacagagccgcccagagcggccccagcgagagacccggccccccccagagagccctgctggccagaggcaccaagagccagggccccgccaagccccccccccccagaaagcccctgcccgccgacccccagggcagatgccccagcggcgacctgcccggccccggcgccggcatcccccccctggtggtgcccagcagacccgccccccccccccccaccgtgagcagcctgtacctgtag

SEQ ID NO: 71789 - DNA, 2520 bp, synthetic construct
  misc_feature 1..2520: note = Description of Artificial Sequence: Synthetic coding sequence
  source 1..2520: mol_type = other DNA
atgagactggccctgctgtgggccctgggcctgctgggcgccggcagccccctgcccagctggcccctgcccaacatcggcggcaccgaggagcagcaggccgagagcgagaaggcccccagagagcccctggagccccaggtgctgcaggacgacctgcccatcagcctgaagaaggtgctgcagaccagcctgcccgagcccctgagaatcaagctggagctggacggcgacagccacatcctggagctgctgcagaacagagagctggtgcccggcagacccaccctggtgtggtaccagcccgacggcaccagagtggtgagcgagggccacaccctggagaactgctgctaccagggcagagtgagaggctacgccggcagctgggtgagcatctgcacctgcagcggcctgagaggcctggtggtgctgacccccgagagaagctacaccctggagcagggccccggcgacctgcagggcccccccatcatcagcagaatccaggacctgcacctgcccggccacacctgcgccctgagctggagagagagcgtgcacacccagaagccccccgagcaccccctgggccagagacacatcagaagaagaagagacgtggtgaccgagaccaagaccgtggagctggtgatcgtggccgaccacagcgaggcccagaagtacagagacttccagcacctgctgaacagaaccctggaggtggccctgctgctggacaccttcttcagacccctgaacgtgagagtggccctggtgggcctggaggcctggacccagagagacctggtggagatcagccccaaccccgccgtgaccctggagaacttcctgcactggagaagagcccacctgctgcccagactgccccacgacagcgcccagctggtgaccggcaccagcttcagcggccccaccgtgggcatggccatccagaacagcatctgcagccccgacttcagcggcggcgtgaacatggaccacagcaccagcatcctgggcgtggccagcagcatcgcccacgagctgggccacagcctgggcctggaccacgacctgcccggcaacagctgcccctgccccggccccgcccccgccaagacctgcatcatggaggccagcaccgacttcctgcccggcctgaacttcagcaactgcagcagaagagccctggagaaggccctgctggacggcatgggcagctgcctgttcgagagactgcccagcctgccccccatggccgccttctgcggcaacatgttcgtggagcccggcgagcagtgcgactgcggcttcctggacgactgcgtggacccctgctgcgacagcctgacctgccagctgagacccggcgcccagtgcgccagcgacggcccctgctgccagaactgccagctgagacccagcggctggcagtgcagacccaccagaggcgactgcgacctgcccgagttctgccccggcgacagcagccagtgcccccccgacgtgagcctgggcgacggcgagccctgcgccggcggccaggccgtgtgcatgcacggcagatgcgccagctacgcccagcagtgccagagcctgtggggccccggcgcccagcccgccgcccccctgtgcctgcagaccgccaacaccagaggcaacgccttcggcagctgcggcagaaaccccagcggcagctacgtgagctgcacccccagagacgccatctgcggccagctgcagtgccagaccggcagaacccagcccctgctgggcagcatcagagacctgctgtgggagaccatcgacgtgaacggcaccgagctgaactgcagctgggtgcacctggacctgggcagcgacgtggcccagcccctgctgaccctgcccggcaccgcctgcggccccggcctggtgtgcatcgaccacagatgccagagagtggacctgctgggcgcccaggagtgcagaagcaagtgccacggccacggcgtgtgcgacagcaacagacactgctactgcgaggagggctgggccccccccgactgcaccacccagctgaaggccaccagcagcctgaccaccggcctgctgctgagcctgctggtgctgctggtgctggtgatgctgggcgccagctactggtacagagccagactgcaccagagactgtgccagctgaagggccccacctgccagtacagagccgcccagagcggccccagcgagagacccggccccccccagagagccctgctggccagaggcaccaagcaggccagcgccctgagcttccccgccccccccagcagacccctgccccccgaccccgtgagcaagagactgcagagccagggccccgccaagccccccccccccagaaagcccctgcccgccgacccccagggcagatgccccagcggcgacctgcccggccccggcgccggcatcccccccctggtggtgcccagcagacccgccccccccccccccaccgtgagcagcctgtacctgtag

SEQ ID NO: 71790 - DNA, 2592 bp, synthetic construct
  misc_feature 1..2592: note = Description of Artificial Sequence: Synthetic coding sequence
  source 1..2592: mol_type = other DNA
atgagactggccctgctgtgggccctgggcctgctgggcgccggcagccccctgcccagctggcccctgcccaacatcggcggcaccgaggagcagcaggccgagagcgagaaggcccccagagagcccctggagccccaggtgctgcaggacgacctgcccatcagcctgaagaaggtgctgcagaccagcctgcccgagcccctgagaatcaagctggagctggacggcgacagccacatcctggagctgctgcagaacagagagctggtgcccggcagacccaccctggtgtggtaccagcccgacggcaccagagtggtgagcgagggccacaccctggagaactgctgctaccagggcagagtgagaggctacgccggcagctgggtgagcatctgcacctgcagcggcctgagaggcctggtggtgctgacccccgagagaagctacaccctggagcagggccccggcgacctgcagggcccccccatcatcagcagaatccaggacctgcacctgcccggccacacctgcgccctgagctggagagagagcgtgcacacccagaagccccccgagcaccccctgggccagagacacatcagaagaagaagagacgtggtgaccgagaccaagaccgtggagctggtgatcgtggccgaccacagcgaggcccagaagtacagagacttccagcacctgctgaacagaaccctggaggtggccctgctgctggacaccttcttcagacccctgaacgtgagagtggccctggtgggcctggaggcctggacccagagagacctggtggagatcagccccaaccccgccgtgaccctggagaacttcctgcactggagaagagcccacctgctgcccagactgccccacgacagcgcccagctggtgaccggcaccagcttcagcggccccaccgtgggcatggccatccagaacagcatctgcagccccgacttcagcggcggcgtgaacatggaccacagcaccagcatcctgggcgtggccagcagcatcgcccacgagctgggccacagcctgggcctggaccacgacctgcccggcaacagctgcccctgccccggccccgcccccgccaagacctgcatcatggaggccagcaccgacttcctgcccggcctgaacttcagcaactgcagcagaagagccctggagaaggccctgctggacggcatgggcagctgcctgttcgagagactgcccagcctgccccccatggccgccttctgcggcaacatgttcgtggagcccggcgagcagtgcgactgcggcttcctggacgactgcgtggacccctgctgcgacagcctgacctgccagctgagacccggcgcccagtgcgccagcgacggcccctgctgccagaactgccagctgagacccagcggctggcagtgcagacccaccagaggcgactgcgacctgcccgagttctgccccggcgacagcagccagtgcccccccgacgtgagcctgggcgacggcgagccctgcgccggcggccaggccgtgtgcatgcacggcagatgcgccagctacgcccagcagtgccagagcctgtggggccccggcgcccagcccgccgcccccctgtgcctgcagaccgccaacaccagaggcaacgccttcggcagctgcggcagaaaccccagcggcagctacgtgagctgcacccccagagacgccatctgcggccagctgcagtgccagaccggcagaacccagcccctgctgggcagcatcagagacctgctgtgggagaccatcgacgtgaacggcaccgagctgaactgcagctgggtgcacctggacctgggcagcgacgtggcccagcccctgctgaccctgcccggcaccgcctgcggccccggcctggtgtgcatcgaccacagatgccagagagtggacctgctgggcgcccaggagtgcagaagcaagtgccacggccacggcgtgtgcgacagcaacagacactgctactgcgaggagggctgggccccccccgactgcaccacccagctgaaggccaccagcagcctgaccaccggcctgctgctgagcctgctggtgctgctggtgctggtgatgctgggcgccagctactggtacagagccagactgcaccagagactgtgccagctgaagggccccacctgccagtacagagccgcccagagcggccccagcgagagacccggccccccccagagagccctgctggccagaggcaccaagcaggccagcgccctgagcttccccgccccccccagcagacccctgccccccgaccccgtgagcaagagactgcaggccgagctggccgacagacccaacccccccaccagacccctgcccgccgaccccgtggtgagaagccccaagagccagggccccgccaagccccccccccccagaaagcccctgcccgccgacccccagggcagatgccccagcggcgacctgcccggccccggcgccggcatcccccccctggtggtgcccagcagacccgccccccccccccccaccgtgagcagcctgtacctgtag

SEQ ID NO: 71791 - DNA, 2517 bp, synthetic construct
  misc_feature 1..2517: note = Description of Artificial Sequence: Synthetic coding sequence
  source 1..2517: mol_type = other DNA
atgagactggccctgctgtgggccctgggcctgctgggcgccggcagccccctgcccagctggcccctgcccaacatcggcggcaccgaggagcagcaggccgagagcgagaaggcccccagagagcccctggagccccaggtgctgcaggacgacctgcccatcagcctgaagaaggtgctgcagaccagcctgcccgagcccctgagaatcaagctggagctggacggcgacagccacatcctggagctgctgcagaacagagagctggtgcccggcagacccaccctggtgtggtaccagcccgacggcaccagagtggtgagcgagggccacaccctggagaactgctgctaccagggcagagtgagaggctacgccggcagctgggtgagcatctgcacctgcagcggcctgagaggcctggtggtgctgacccccgagagaagctacaccctggagcagggccccggcgacctgcagggcccccccatcatcagcagaatccaggacctgcacctgcccggccacacctgcgccctgagctggagagagagcgtgcacacccagaagccccccgagcaccccctgggccagagacacatcagaagaagaagagacgtggtgaccgagaccaagaccgtggagctggtgatcgtggccgaccacagcgaggcccagaagtacagagacttccagcacctgctgaacagaaccctggaggtggccctgctgctggacaccttcttcagacccctgaacgtgagagtggccctggtgggcctggaggcctggacccagagagacctggtggagatcagccccaaccccgccgtgaccctggagaacttcctgcactggagaagagcccacctgctgcccagactgccccacgacagcgcccagctggtgaccggcaccagcttcagcggccccaccgtgggcatggccatccagaacagcatctgcagccccgacttcagcggcggcgtgaacatggaccacagcaccagcatcctgggcgtggccagcagcatcgcccacgagctgggccacagcctgggcctggaccacgacctgcccggcaacagctgcccctgccccggccccgcccccgccaagacctgcatcatggaggccagcaccgacttcctgcccggcctgaacttcagcaactgcagcagaagagccctggagaaggccctgctggacggcatgggcagctgcctgttcgagagactgcccagcctgccccccatggccgccttctgcggcaacatgttcgtggagcccggcgagcagtgcgactgcggcttcctggacgactgcgtggacccctgctgcgacagcctgacctgccagctgagacccggcgcccagtgcgccagcgacggcccctgctgccagaactgccagctgagacccagcggctggcagtgcagacccaccagaggcgactgcgacctgcccgagttctgccccggcgacagcagccagtgcccccccgacgtgagcctgggcgacggcgagccctgcgccggcggccaggccgtgtgcatgcacggcagatgcgccagctacgcccagcagtgccagagcctgtggggccccggcgcccagcccgccgcccccctgtgcctgcagaccgccaacaccagaggcaacgccttcggcagctgcggcagaaaccccagcggcagctacgtgagctgcacccccagagacgccatctgcggccagctgcagtgccagaccggcagaacccagcccctgctgggcagcatcagagacctgctgtgggagaccatcgacgtgaacggcaccgagctgaactgcagctgggtgcacctggacctgggcagcgacgtggcccagcccctgctgaccctgcccggcaccgcctgcggccccggcctggtgtgcatcgaccacagatgccagagagtggacctgctgggcgcccaggagtgcagaagcaagtgccacggccacggcgtgtgcgacagcaacagacactgctactgcgaggagggctgggccccccccgactgcaccacccagctgaaggccaccagcagcctgaccaccggcctgctgctgagcctgctggtgctgctggtgctggtgatgctgggcgccagctactggtacagagccagactgcaccagagactgtgccagctgaagggccccacctgccagtacagagccgcccagagcggccccagcgagagacccggccccccccagagagccctgctggccagaggcaccaaggccgagctggccgacagacccaacccccccaccagacccctgcccgccgaccccgtggtgagaagccccaagagccagggccccgccaagccccccccccccagaaagcccctgcccgccgacccccagggcagatgccccagcggcgacctgcccggccccggcgccggcatcccccccctggtggtgcccagcagacccgccccccccccccccaccgtgagcagcctgtacctgtag

SEQ ID NO: 71792 - DNA, 2319 bp, synthetic construct
  misc_feature 1..2319: note = Description of Artificial Sequence: Synthetic coding sequence
  source 1..2319: mol_type = other DNA
atgagactggccctgctgtgggccctgggcctgctgggcgccggcagccccctgcccagctggcccctgcccaacatcggcggcaccgaggagcagcaggccgagagcgagaaggcccccagagagcccctggagccccaggtgctgcaggacgacctgcccatcagcctgaagaaggtgctgcagaccagcctgcccgagcccctgagaatcaagctggagctggacggcgacagccacatcctggagctgctgcagaacagagagctggtgcccggcagacccaccctggtgtggtaccagcccgacggcaccagagtggtgagcgagggccacaccctggagaactgctgctaccagggcagagtgagaggctacgccggcagctgggtgagcatctgcacctgcagcggcctgagaggcctggtggtgctgacccccgagagaagctacaccctggagcagggccccggcgacctgcagggcccccccatcatcagcagaatccaggacctgcacctgcccggccacacctgcgccctgagctggagagagagcgtgcacacccagaagccccccgagcaccccctgggccagagacacatcagaagaagaagagacgtggtgaccgagaccaagaccgtggagctggtgatcgtggccgaccacagcgaggcccagaagtacagagacttccagcacctgctgaacagaaccctggaggtggccctgctgctggacaccttcttcagacccctgaacgtgagagtggccctggtgggcctggaggcctggacccagagagacctggtggagatcagccccaaccccgccgtgaccctggagaacttcctgcactggagaagagcccacctgctgcccagactgccccacgacagcgcccagctggtgaccggcaccagcttcagcggccccaccgtgggcatggccatccagaacagcatctgcagccccgacttcagcggcggcgtgaacatggaccacagcaccagcatcctgggcgtggccagcagcatcgcccacgagctgggccacagcctgggcctggaccacgacctgcccggcaacagctgcccctgccccggccccgcccccgccaagacctgcatcatggaggccagcaccgacttcctgcccggcctgaacttcagcaactgcagcagaagagccctggagaaggccctgctggacggcatgggcagctgcctgttcgagagactgcccagcctgccccccatggccgccttctgcggcaacatgttcgtggagcccggcgagcagtgcgactgcggcttcctggacgactgcgtggacccctgctgcgacagcctgacctgccagctgagacccggcgcccagtgcgccagcgacggcccctgctgccagaactgccagctgagacccagcggctggcagtgcagacccaccagaggcgactgcgacctgcccgagttctgccccggcgacagcagccagtgcccccccgacgtgagcctgggcgacggcgagccctgcgccggcggccaggccgtgtgcatgcacggcagatgcgccagctacgcccagcagtgccagagcctgtggggccccggcgcccagcccgccgcccccctgtgcctgcagaccgccaacaccagaggcaacgccttcggcagctgcggcagaaaccccagcggcagctacgtgagctgcacccccagagacgccatctgcggccagctgcagtgccagaccggcagaacccagcccctgctgggcagcatcagagacctgctgtgggagaccatcgacgtgaacggcaccgagctgaactgcagctgggtgcacctggacctgggcagcgacgtggcccagcccctgctgaccctgcccggcaccgcctgcggccccggcctggtgtgcatcgaccacagatgccagagagtggacctgctgggcgcccaggagtgcagaagcaagtgccacggccacggcgtgtgcgacagcaacagacactgctactgcgaggagggctgggccccccccgactgcaccacccagctgaaggccaccagcagcctgaccaccggcctgctgctgagcctgctggtgctgctggtgctggtgatgctgggcgccagctactggtacagagccagactgcaccagagactgtgccagctgaagggccccacctgccagtacagcctgagaggccagcccagcccccacccccagggcagccactgcctgcccacccccagagccggcgcccacagagtgacctgccccgcccagggcctggagagcagaccctag

SEQ ID NO: 71793 - DNA, 1563 bp, synthetic construct
  misc_feature 1..1563: note = Description of Artificial Sequence: Synthetic coding sequence
  source 1..1563: mol_type = other DNA
atgagactggccctgctgtgggccctgggcctgctgggcgccggcagccccctgcccagctggcccctgcccaacatcggcggcaccgaggagcagcaggccgagagcgagaaggcccccagagagcccctggagccccaggtgctgcaggacgacctgcccatcagcctgaagaaggtgctgcagaccagcctgcccgagcccctgagaatcaagctggagctggacggcgacagccacatcctggagctgctgcagaacagaagcttcctgcccggcctgaacttcagcaactgcagcagaagagccctggagaaggccctgctggacggcatgggcagctgcctgttcgagagactgcccagcctgccccccatggccgccttctgcggcaacatgttcgtggagcccggcgagcagtgcgactgcggcttcctggacgactgcgtggacccctgctgcgacagcctgacctgccagctgagacccggcgcccagtgcgccagcgacggcccctgctgccagaactgccagctgagacccagcggctggcagtgcagacccaccagaggcgactgcgacctgcccgagttctgccccggcgacagcagccagtgcccccccgacgtgagcctgggcgacggcgagccctgcgccggcggccaggccgtgtgcatgcacggcagatgcgccagctacgcccagcagtgccagagcctgtggggccccggcgcccagcccgccgcccccctgtgcctgcagaccgccaacaccagaggcaacgccttcggcagctgcggcagaaaccccagcggcagctacgtgagctgcacccccagagacgccatctgcggccagctgcagtgccagaccggcagaacccagcccctgctgggcagcatcagagacctgctgtgggagaccatcgacgtgaacggcaccgagctgaactgcagctgggtgcacctggacctgggcagcgacgtggcccagcccctgctgaccctgcccggcaccgcctgcggccccggcctggtgtgcatcgaccacagatgccagagagtggacctgctgggcgcccaggagtgcagaagcaagtgccacggccacggcgtgtgcgacagcaacagacactgctactgcgaggagggctgggccccccccgactgcaccacccagctgaaggccaccagcagcctgaccaccggcctgctgctgagcctgctggtgctgctggtgctggtgatgctgggcgccagctactggtacagagccagactgcaccagagactgtgccagctgaagggccccacctgccagtacagagccgcccagagcggccccagcgagagacccggccccccccagagagccctgctggccagaggcaccaagagccagggccccgccaagccccccccccccagaaagcccctgcccgccgacccccagggcagatgccccagcggcgacctgcccggccccggcgccggcatcccccccctggtggtgcccagcagacccgccccccccccccccaccgtgagcagcctgtacctgtag

SEQ ID NO: 71794 - DNA, 2589 bp, synthetic construct
  misc_feature 1..2589: note = Description of Artificial Sequence: Synthetic coding sequence
  source 1..2589: mol_type = other DNA
atgagactggccctgctgtgggccctgggcctgctgggcgccggcagccccctgcccagctggcccctgcccaacatcggcggcaccgaggagcagcaggccgagagcgagaaggcccccagagagcccctggagccccaggtgctgcaggacgacctgcccatcagcctgaagaaggtgctgcagaccagcctgcccgagcccctgagaatcaagctggagctggacggcgacagccacatcctggagctgctgcagaacagagagctggtgcccggcagacccaccctggtgtggtaccagcccgacggcaccagagtggtgagcgagggccacaccctggagaactgctgctaccagggcagagtgagaggctacgccggcagctgggtgagcatctgcacctgcagcggcctgagaggcctggtggtgctgacccccgagagaagctacaccctggagcagggccccggcgacctgcagggcccccccatcatcagcagaatccaggacctgcacctgcccggccacacctgcgccctgagctggagagagagcgtgcacacccagaagccccccgagcaccccctgggccagagacacatcagaagaagaagagacgtggtgaccgagaccaagaccgtggagctggtgatcgtggccgaccacagcgaggcccagaagtacagagacttccagcacctgctgaacagaaccctggaggtggccctgctgctggacaccttcttcagacccctgaacgtgagagtggccctggtgggcctggaggcctggacccagagagacctggtggagatcagccccaaccccgccgtgaccctggagaacttcctgcactggagaagagcccacctgctgcccagactgccccacgacagcgcccagctggtgaccggcaccagcttcagcggccccaccgtgggcatggccatccagaacagcatctgcagccccgacttcagcggcggcgtgaacatggaccacagcaccagcatcctgggcgtggccagcagcatcgcccacgagctgggccacagcctgggcctggaccacgacctgcccggcaacagctgcccctgccccggccccgcccccgccaagacctgcatcatggaggccagcaccgacttcctgcccggcctgaacttcagcaactgcagcagaagagccctggagaaggccctgctggacggcatgggcagctgcctgttcgagagactgcccagcctgccccccatggccgccttctgcggcaacatgttcgtggagcccggcgagcagtgcgactgcggcttcctggacgactgcgtggacccctgctgcgacagcctgacctgccagctgagacccggcgcccagtgcgccagcgacggcccctgctgccagaactgccagctgagacccagcggctggcagtgcagacccaccagaggcgactgcgacctgcccgagttctgccccggcgacagcagccagtgcccccccgacgtgagcctgggcgacggcgagccctgcgccggcggccaggccgtgtgcatgcacggcagatgcgccagctacgcccagcagtgccagagcctgtggggccccggcgcccagcccgccgcccccctgtgcctgcagaccgccaacaccagaggcaacgccttcggcagctgcggcagaaaccccagcggcagctacgtgagctgcacccccagagacgccatctgcggccagctgcagtgccagaccggcagaacccagcccctgctgggcagcatcagagacctgctgtgggagaccatcgacgtgaacggcaccgagctgaactgcagctgggtgcacctggacctgggcagcgacgtggcccagcccctgctgaccctgcccggcaccgcctgcggccccggcctggtgtgcatcgaccacagatgccagagagtggacctgctgggcgcccaggagtgcagaagcaagtgccacggccacggcgtgtgcgacagcaacagacactgctactgcgaggagggctgggccccccccgactgcaccacccagctgaaggccaccagcagcctgaccaccggcctgctgctgagcctgctggtgctgctggtgctggtgatgctgggcgccagctactggtacagagccagactgcaccagagactgtgccagctgaagggccccacctgccagtacagagccgcccagagcggccccagcgagagacccggccccccccagagagccctgctggccagaggcaccaaggccagcgccctgagcttccccgccccccccagcagacccctgccccccgaccccgtgagcaagagactgcaggccgagctggccgacagacccaacccccccaccagacccctgcccgccgaccccgtggtgagaagccccaagagccagggccccgccaagccccccccccccagaaagcccctgcccgccgacccccagggcagatgccccagcggcgacctgcccggccccggcgccggcatcccccccctggtggtgcccagcagacccgccccccccccccccaccgtgagcagcctgtacctgtag

SEQ ID NO: 71795 - DNA, 2391 bp, synthetic construct
  misc_feature 1..2391: note = Description of Artificial Sequence: Synthetic coding sequence
  source 1..2391: mol_type = other DNA
atgagactggccctgctgtgggccctgggcctgctgggcgccggcagccccctgcccagctggcccctgcccaacatcggcggcaccgaggagcagcaggccgagagcgagaaggcccccagagagcccctggagccccaggtgctgcaggacgacctgcccatcagcctgaagaaggtgctgcagaccagcctgcccgagcccctgagaatcaagctggagctggacggcgacagccacatcctggagctgctgcagaacagagagctggtgcccggcagacccaccctggtgtggtaccagcccgacggcaccagagtggtgagcgagggccacaccctggagaactgctgctaccagggcagagtgagaggctacgccggcagctgggtgagcatctgcacctgcagcggcctgagaggcctggtggtgctgacccccgagagaagctacaccctggagcagggccccggcgacctgcagggcccccccatcatcagcagaatccaggacctgcacctgcccggccacacctgcgccctgagctggagagagagcgtgcacacccagaagccccccgagcaccccctgggccagagacacatcagaagaagaagagacgtggtgaccgagaccaagaccgtggagctggtgatcgtggccgaccacagcgaggcccagaagtacagagacttccagcacctgctgaacagaaccctggaggtggccctgctgctggacaccttcttcagacccctgaacgtgagagtggccctggtgggcctggaggcctggacccagagagacctggtggagatcagccccaaccccgccgtgaccctggagaacttcctgcactggagaagagcccacctgctgcccagactgccccacgacagcgcccagctggtgaccggcaccagcttcagcggccccaccgtgggcatggccatccagaacagcatctgcagccccgacttcagcggcggcgtgaacatggaccacagcaccagcatcctgggcgtggccagcagcatcgcccacgagctgggccacagcctgggcctggaccacgacctgcccggcaacagctgcccctgccccggccccgcccccgccaagacctgcatcatggaggccagcaccgacttcctgcccggcctgaacttcagcaactgcagcagaagagccctggagaaggccctgctggacggcatgggcagctgcctgttcgagagactgcccagcctgccccccatggccgccttctgcggcaacatgttcgtggagcccggcgagcagtgcgactgcggcttcctggacgactgcgtggacccctgctgcgacagcctgacctgccagctgagacccggcgcccagtgcgccagcgacggcccctgctgccagaactgccagctgagacccagcggctggcagtgcagacccaccagaggcgactgcgacctgcccgagttctgccccggcgacagcagccagtgcccccccgacgtgagcctgggcgacggcgagccctgcgccggcggccaggccgtgtgcatgcacggcagatgcgccagctacgcccagcagtgccagagcctgtggggccccggcgcccagcccgccgcccccctgtgcctgcagaccgccaacaccagaggcaacgccttcggcagctgcggcagaaaccccagcggcagctacgtgagctgcacccccagagacgccatctgcggccagctgcagtgccagaccggcagaacccagcccctgctgggcagcatcagagacctgctgtgggagaccatcgacgtgaacggcaccgagctgaactgcagctgggtgcacctggacctgggcagcgacgtggcccagcccctgctgaccctgcccggcaccgcctgcggccccggcctggtgtgcatcgaccacagatgccagagagtggacctgctgggcgcccaggagtgcagaagcaagtgccacggccacggcgtgtgcgacagcaacagacactgctactgcgaggagggctgggccccccccgactgcaccacccagctgaaggccaccagcagcctgaccaccggcctgctgctgagcctgctggtgctgctggtgctggtgatgctgggcgccagctactggtacagagccagactgcaccagagactgtgccagctgaagggccccacctgccagtacagactggtgctgagcgccagcagaccccccctgcccggcagatgcagactgaccctgtgccccagagacagcagcctgagaggccagcccagcccccacccccagggcagccactgcctgcccacccccagagccggcgcccacagagtgacctgccccgcccagggcctggagagcagaccctag

SEQ ID NO: 71796 - DNA, 2475 bp, synthetic construct
  misc_feature 1..2475: note = Description of Artificial Sequence: Synthetic coding sequence
  source 1..2475: mol_type = other DNA
atgagactggccctgctgtgggccctgggcctgctgggcgccggcagccccctgcccagctggcccctgcccaacatcgtgctgagctggggcgtgctgggccccgccggcggcaccgaggagcagcaggccgagagcgagaaggcccccagagagcccctggagccccaggtgctgcaggacgacctgcccatcagcctgaagaaggtgctgcagaccagcctgcccgagcccctgagaatcaagctggagctggacggcgacagccacatcctggagctgctgcagaacagagagctggtgcccggcagacccaccctggtgtggtaccagcccgacggcaccagagtggtgagcgagggccacaccctggagaactgctgctaccagggcagagtgagaggctacgccggcagctgggtgagcatctgcacctgcagcggcctgagaggcctggtggtgctgacccccgagagaagctacaccctggagcagggccccggcgacctgcagggcccccccatcatcagcagaatccaggacctgcacctgcccggccacacctgcgccctgagctggagagagagcgtgcacacccagaagccccccgagcaccccctgggccagagacacatcagaagaagaagagacgtggtgaccgagaccaagaccgtggagctggtgatcgtggccgaccacagcgaggcccagaagtacagagacttccagcacctgctgaacagaaccctggaggtggccctgctgctggacaccttcttcagacccctgaacgtgagagtggccctggtgggcctggaggcctggacccagagagacctggtggagatcagccccaaccccgccgtgaccctggagaacttcctgcactggagaagagcccacctgctgcccagactgccccacgacagcgcccagctggtgaccggcaccagcttcagcggccccaccgtgggcatggccatccagaacagcatctgcagccccgacttcagcggcggcgtgaacatggaccacagcaccagcatcctgggcgtggccagcagcatcgcccacgagctgggccacagcctgggcctggaccacgacctgcccggcaacagctgcccctgccccggccccgcccccgccaagacctgcatcatggaggccagcaccgacttcctgcccggcctgaacttcagcaactgcagcagaagagccctggagaaggccctgctggacggcatgggcagctgcctgttcgagagactgcccagcctgccccccatggccgccttctgcggcaacatgttcgtggagcccggcgagcagtgcgactgcggcttcctggacgactgcgtggacccctgctgcgacagcctgacctgccagctgagacccggcgcccagtgcgccagcgacggcccctgctgccagaactgccagctgagacccagcggctggcagtgcagacccaccagaggcgactgcgacctgcccgagttctgccccggcgacagcagccagtgcccccccgacgtgagcctgggcgacggcgagccctgcgccggcggccaggccgtgtgcatgcacggcagatgcgccagctacgcccagcagtgccagagcctgtggggccccggcgcccagcccgccgcccccctgtgcctgcagaccgccaacaccagaggcaacgccttcggcagctgcggcagaaaccccagcggcagctacgtgagctgcacccccagagacgccatctgcggccagctgcagtgccagaccggcagaacccagcccctgctgggcagcatcagagacctgctgtgggagaccatcgacgtgaacggcaccgagctgaactgcagctgggtgcacctggacctgggcagcgacgtggcccagcccctgctgaccctgcccggcaccgcctgcggccccggcctggtgtgcatcgaccacagatgccagagagtggacctgctgggcgcccaggagtgcagaagcaagtgccacggccacggcgtgtgcgacagcaacagacactgctactgcgaggagggctgggccccccccgactgcaccacccagctgaaggccaccagcagcctgaccaccggcctgctgctgagcctgctggtgctgctggtgctggtgatgctgggcgccagctactggtacagagccagactgcaccagagactgtgccagctgaagggccccacctgccagtacagagccgcccagagcggccccagcgagagacccggccccccccagagagccctgctggccagaggcaccaagagccagggccccgccaagccccccccccccagaaagcccctgcccgccgacccccagggcagatgccccagcggcgacctgcccggccccggcgccggcatcccccccctggtggtgcccagcagacccgccccccccccccccaccgtgagcagcctgtacctgtag

SEQ ID NO: 71797 - DNA, 2757 bp, synthetic construct
  misc_feature 1..2757: note = Description of Artificial Sequence: Synthetic coding sequence
  source 1..2757: mol_type = other DNA
atgcccggcggcgccggcgccgccagactgtgcctgctggccttcgccctgcagcccctgagacccagagccgccagagagcccggctggaccagaggcagcgaggagggcagccccaagctgcagcacgagctgatcatcccccagtggaagaccagcgagagccccgtgagagagaagcaccccctgaaggccgagctgagagtgatggccgagggcagagagctgatcctggacctggagaagaacgagcagctgttcgcccccagctacaccgagacccactacaccagcagcggcaacccccagaccaccaccagaaagctggaggaccactgcttctaccacggcaccgtgagagagaccgagctgagcagcgtgaccctgagcacctgcagaggcatcagaggcctgatcaccgtgagcagcaacctgagctacgtgatcgagcccctgcccgacagcaagggccagcacctgatctacagaagcgagcacctgaagcccccccccggcaactgcggcttcgagcacagcaagcccaccaccagagactgggccctgcagttcacccagcagaccaagaagagacccagaagaatgaagagagaggacctgaacagcatgaagtacgtggagctgtacctggtggccgactacctggagttccagaagaacagaagagaccaggacgccaccaagcacaagctgatcgagatcgccaactacgtggacaagttctacagaagcctgaacatcagaatcgccctggtgggcctggaggtgtggacccacggcaacatgtgcgaggtgagcgagaacccctacagcaccctgtggagcttcctgagctggagaagaaagctgctggcccagaagtaccacgacaacgcccagctgatcaccggcatgagcttccacggcaccaccatcggcctggcccccctgatggccatgtgcagcgtgtaccagagcggcggcgtgaacatggaccacagcgagaacgccatcggcgtggccgccaccatggcccacgagatgggccacaacttcggcatgacccacgacagcgccgactgctgcagcgccagcgccgccgacggcggctgcatcatggccgccgccaccggccaccccttccccaaggtgttcaacggctgcaacagaagagagctggacagatacctgcagagcggcggcggcatgtgcctgagcaacatgcccgacaccagaatgctgtacggcggcagaagatgcggcaacggctacctggaggacggcgaggagtgcgactgcggcgaggaggaggagtgcaacaacccctgctgcaacgccagcaactgcaccctgagacccggcgccgagtgcgcccacggcagctgctgccaccagtgcaagctgctggcccccggcaccctgtgcagagagcaggccagacagtgcgacctgcccgagttctgcaccggcaagagcccccactgccccaccaacttctaccagatggacggcaccccctgcgagggcggccaggcctactgctacaacggcatgtgcctgacctaccaggagcagtgccagcagctgtggggccccggcgccagacccgcccccgacctgtgcttcgagaaggtgaacgtggccggcgacaccttcggcaactgcggcaaggacatgaacggcgagcacagaaagtgcaacatgagagacgccaagtgcggcaagatccagtgccagagcagcgaggccagacccctggagagcaacgccgtgcccatcgacaccaccatcatcatgaacggcagacagatccagtgcagaggcacccacgtgtacagaggccccgaggaggagggcgacatgctggaccccggcctggtgatgaccggcaccaagtgcggctacaaccacatctgcttcgagggccagtgcagaaacaccagcttcttcgagaccgagggctgcggcaagaagtgcaacggccacggcgtgtgcaacaacaaccagaactgccactgcctgcccggctgggccccccccttctgcaacacccccggccacggcggcagcatcgacagcggccccatgccccccgagagcgtgggccccgtggtggccggcgtgctggtggccatcctggtgctggccgtgctgatgctgatgtactactgctgcagacagaacaacaagctgggccagctgaagcccagcgccctgcccagcaagctgagacagcagttcagctgccccttcagagtgagccagaacagcggcaccggccacgccaaccccaccttcaagctgcagaccccccagggcaagagaaaggtgatcaacacccccgagatcctgagaaagcccagccagcccccccccagacccccccccgactacctgagaggcggcagcccccccgcccccctgcccgcccacctgagcagagccgccagaaacagccccggccccggcagccagatcgagagaaccgagagcagcagaagacccccccccagcagacccatcccccccgcccccaactgcatcgtgagccaggacttcagcagacccagacccccccagaaggccctgcccgccaaccccgtgcccggcagaagaagcctgcccagacccggcggcgccagccccctgagaccccccggcgccggcccccagcagagcagacccctggccgccctggcccccaagttccccgagtacagaagccagagagccggcggcatgatcagcagcaagatctag

SEQ ID NO: 71798 - DNA, 2763 bp, synthetic construct
  misc_feature 1..2763: note = Description of Artificial Sequence: Synthetic coding sequence
  source 1..2763: mol_type = other DNA
atgcccggcggcgccggcgccgccagactgtgcctgctggccttcgccctgcagcccctgagacccagagccgccagagagcccggctggaccatcagcagaggcagcgaggagggcagccccaagctgcagcacgagctgatcatcccccagtggaagaccagcgagagccccgtgagagagaagcaccccctgaaggccgagctgagagtgatggccgagggcagagagctgatcctggacctggagaagaacgagcagctgttcgcccccagctacaccgagacccactacaccagcagcggcaacccccagaccaccaccagaaagctggaggaccactgcttctaccacggcaccgtgagagagaccgagctgagcagcgtgaccctgagcacctgcagaggcatcagaggcctgatcaccgtgagcagcaacctgagctacgtgatcgagcccctgcccgacagcaagggccagcacctgatctacagaagcgagcacctgaagcccccccccggcaactgcggcttcgagcacagcaagcccaccaccagagactgggccctgcagttcacccagcagaccaagaagagacccagaagaatgaagagagaggacctgaacagcatgaagtacgtggagctgtacctggtggccgactacctggagttccagaagaacagaagagaccaggacgccaccaagcacaagctgatcgagatcgccaactacgtggacaagttctacagaagcctgaacatcagaatcgccctggtgggcctggaggtgtggacccacggcaacatgtgcgaggtgagcgagaacccctacagcaccctgtggagcttcctgagctggagaagaaagctgctggcccagaagtaccacgacaacgcccagctgatcaccggcatgagcttccacggcaccaccatcggcctggcccccctgatggccatgtgcagcgtgtaccagagcggcggcgtgaacatggaccacagcgagaacgccatcggcgtggccgccaccatggcccacgagatgggccacaacttcggcatgacccacgacagcgccgactgctgcagcgccagcgccgccgacggcggctgcatcatggccgccgccaccggccaccccttccccaaggtgttcaacggctgcaacagaagagagctggacagatacctgcagagcggcggcggcatgtgcctgagcaacatgcccgacaccagaatgctgtacggcggcagaagatgcggcaacggctacctggaggacggcgaggagtgcgactgcggcgaggaggaggagtgcaacaacccctgctgcaacgccagcaactgcaccctgagacccggcgccgagtgcgcccacggcagctgctgccaccagtgcaagctgctggcccccggcaccctgtgcagagagcaggccagacagtgcgacctgcccgagttctgcaccggcaagagcccccactgccccaccaacttctaccagatggacggcaccccctgcgagggcggccaggcctactgctacaacggcatgtgcctgacctaccaggagcagtgccagcagctgtggggccccggcgccagacccgcccccgacctgtgcttcgagaaggtgaacgtggccggcgacaccttcggcaactgcggcaaggacatgaacggcgagcacagaaagtgcaacatgagagacgccaagtgcggcaagatccagtgccagagcagcgaggccagacccctggagagcaacgccgtgcccatcgacaccaccatcatcatgaacggcagacagatccagtgcagaggcacccacgtgtacagaggccccgaggaggagggcgacatgctggaccccggcctggtgatgaccggcaccaagtgcggctacaaccacatctgcttcgagggccagtgcagaaacaccagcttcttcgagaccgagggctgcggcaagaagtgcaacggccacggcgtgtgcaacaacaaccagaactgccactgcctgcccggctgggccccccccttctgcaacacccccggccacggcggcagcatcgacagcggccccatgccccccgagagcgtgggccccgtggtggccggcgtgctggtggccatcctggtgctggccgtgctgatgctgatgtactactgctgcagacagaacaacaagctgggccagctgaagcccagcgccctgcccagcaagctgagacagcagttcagctgccccttcagagtgagccagaacagcggcaccggccacgccaaccccaccttcaagctgcagaccccccagggcaagagaaaggtgatcaacacccccgagatcctgagaaagcccagccagcccccccccagacccccccccgactacctgagaggcggcagcccccccgcccccctgcccgcccacctgagcagagccgccagaaacagccccggccccggcagccagatcgagagaaccgagagcagcagaagacccccccccagcagacccatcccccccgcccccaactgcatcgtgagccaggacttcagcagacccagacccccccagaaggccctgcccgccaaccccgtgcccggcagaagaagcctgcccagacccggcggcgccagccccctgagaccccccggcgccggcccccagcagagcagacccctggccgccctggcccccaagttccccgagtacagaagccagagagccggcggcatgatcagcagcaagatctag

SEQ ID NO: 71799 - DNA, 1917 bp, synthetic construct
  misc_feature 1..1917: note = Description of Artificial Sequence: Synthetic coding sequence
  source 1..1917: mol_type = other DNA
atgtgcgaggtgagcgagaacccctacagcaccctgtggagcttcctgagctggagaagaaagctgctggcccagaagtaccacgacaacgcccagctgatcaccggcatgagcttccacggcaccaccatcggcctggcccccctgatggccatgtgcagcgtgtaccagagcggcggcgtgaacatggaccacagcgagaacgccatcggcgtggccgccaccatggcccacgagatgggccacaacttcggcatgacccacgacagcgccgactgctgcagcgccagcgccgccgacggcggctgcatcatggccgccgccaccggccaccccttccccaaggtgttcaacggctgcaacagaagagagctggacagatacctgcagagcggcggcggcatgtgcctgagcaacatgcccgacaccagaatgctgtacggcggcagaagatgcggcaacggctacctggaggacggcgaggagtgcgactgcggcgaggaggaggagtgcaacaacccctgctgcaacgccagcaactgcaccctgagacccggcgccgagtgcgcccacggcagctgctgccaccagtgcaagctgctggcccccggcaccctgtgcagagagcaggccagacagtgcgacctgcccgagttctgcaccggcaagagcccccactgccccaccaacttctaccagatggacggcaccccctgcgagggcggccaggcctactgctacaacggcatgtgcctgacctaccaggagcagtgccagcagctgtggggccccggcgccagacccgcccccgacctgtgcttcgagaaggtgaacgtggccggcgacaccttcggcaactgcggcaaggacatgaacggcgagcacagaaagtgcaacatgagagacgccaagtgcggcaagatccagtgccagagcagcgaggccagacccctggagagcaacgccgtgcccatcgacaccaccatcatcatgaacggcagacagatccagtgcagaggcacccacgtgtacagaggccccgaggaggagggcgacatgctggaccccggcctggtgatgaccggcaccaagtgcggctacaaccacatctgcttcgagggccagtgcagaaacaccagcttcttcgagaccgagggctgcggcaagaagtgcaacggccacggcgtgtgcaacaacaaccagaactgccactgcctgcccggctgggccccccccttctgcaacacccccggccacggcggcagcatcgacagcggccccatgccccccgagagcgtgggccccgtggtggccggcgtgctggtggccatcctggtgctggccgtgctgatgctgatgtactactgctgcagacagaacaacaagctgggccagctgaagcccagcgccctgcccagcaagctgagacagcagttcagctgccccttcagagtgagccagaacagcggcaccggccacgccaaccccaccttcaagctgcagaccccccagggcaagagaaaggtgatcaacacccccgagatcctgagaaagcccagccagcccccccccagacccccccccgactacctgagaggcggcagcccccccgcccccctgcccgcccacctgagcagagccgccagaaacagccccggccccggcagccagatcgagagaaccgagagcagcagaagacccccccccagcagacccatcccccccgcccccaactgcatcgtgagccagaagtgcctgctgccccccgccatgatcctgagagccccccagcccagcggcaccgtggtgtgcctggtgatcagcttcaacatggccttctacagaagcatgagaatcagaatcgagcccggcatcaagaccaagctgctggtgctgctggtgtggaagcagttctag

SEQ ID NO: 71800 - DNA, 2868 bp, synthetic construct
  misc_feature 1..2868: note = Description of Artificial Sequence: Synthetic coding sequence
  source 1..2868: mol_type = other DNA
atgcccggcggcgccggcgccgccagactgtgcctgctggccttcgccctgcagcccctgagacccagagccgccagagagcccggctggaccagaggcagcgaggagggcagccccaagctgcagcacgagctgatcatcccccagtggaagaccagcgagagccccgtgagagagaagcaccccctgaaggccgagctgagagtgatggccgagggcagagagctgatcctggacctggagaagaacgagcagctgttcgcccccagctacaccgagacccactacaccagcagcggcaacccccagaccaccaccagaaagctggaggaccactgcttctaccacggcaccgtgagagagaccgagctgagcagcgtgaccctgagcacctgcagaggcatcagaggcctgatcaccgtgagcagcaacctgagctacgtgatcgagcccctgcccgacagcaagggccagcacctgatctacagaagcgagcacctgaagcccccccccggcaactgcggcttcgagcacagcaagcccaccaccagagactgggccctgcagttcacccagcagaccaagaagagacccagaagaatgaagagagaggacctgaacagcatgaagtacgtggagctgtacctggtggccgactacctggagttccagaagaacagaagagaccaggacgccaccaagcacaagctgatcgagatcgccaactacgtggacaagttctacagaagcctgaacatcagaatcgccctggtgggcctggaggtgtggacccacggcaacatgtgcgaggtgagcgagaacccctacagcaccctgtggagcttcctgagctggagaagaaagctgctggcccagaagtaccacgacaacgcccagctgatcaccggcatgagcttccacggcaccaccatcggcctggcccccctgatggccatgtgcagcgtgtaccagagcggcggcgtgaacatggaccacagcgagaacgccatcggcgtggccgccaccatggcccacgagatgggccacaacttcggcatgacccacgacagcgccgactgctgcagcgccagcgccgccgacggcggctgcatcatggccgccgccaccggccaccccttccccaaggtgttcaacggctgcaacagaagagagctggacagatacctgcagagcggcggcggcatgtgcctgagcaacatgcccgacaccagaatgctgtacggcggcagaagatgcggcaacggctacctggaggacggcgaggagtgcgactgcggcgaggaggaggagtgcaacaacccctgctgcaacgccagcaactgcaccctgagacccggcgccgagtgcgcccacggcagctgctgccaccagtgcaagctgctggcccccggcaccctgtgcagagagcaggccagacagtgcgacctgcccgagttctgcaccggcaagagcccccactgccccaccaacttctaccagatggacggcaccccctgcgagggcggccaggcctactgctacaacggcatgtgcctgacctaccaggagcagtgccagcagctgtggggccccggcgccagacccgcccccgacctgtgcttcgagaaggtgaacgtggccggcgacaccttcggcaactgcggcaaggacatgaacggcgagcacagaaagtgcaacatgagagacgccaagtgcggcaagatccagtgccagagcagcgaggccagacccctggagagcaacgccgtgcccatcgacaccaccatcatcatgaacggcagacagatccagtgcagaggcacccacgtgtacagaggccccgaggaggagggcgacatgctggaccccggcctggtgatgaccggcaccaagtgcggctacaaccacatctgcttcgagggccagtgcagaaacaccagcttcttcgagaccgagggctgcggcaagaagtgcaacggccacggcgtgtgcaacaacaaccagaactgccactgcctgcccggctgggccccccccttctgcaacacccccggccacggcggcagcatcgacagcggccccatgccccccgagagcgtgggccccgtggtggccggcgtgctggtggccatcctggtgctggccgtgctgatgctgatgtactactgctgcagacagaacaacaagctgggccagctgaagcccagcgccctgcccagcaagctgagacagcagttcagctgccccttcagagtgagccagaacagcggcaccggccacgccaaccccaccttcaagctgcagaccccccagggcaagagaaaggtgatcaacacccccgagatcctgagaaagcccagccagcccccccccagacccccccccgactacctgagaggcggcagcccccccgcccccctgcccgcccacctgagcagagccgccagaaacagccccggccccggcagccagatcgagagaaccgagagcagcagaagacccccccccagcagacccatcccccccgcccccaactgcatcgtgagccaggacttcagcagacccagacccccccagaaggccctgcccgccaaccccgtgcccggcagaagaagcctgcccagacccggcggcgccagccccctgagaccccccggcgccggcccccagcagagcagacccctggccgccctggcccccaaggtgagccccagagaggccctgaaggtgaaggccggcaccagaggcctgcagggcggcagatgcagagtggagaagaccaagcagttcatgctgctggtggtgtggaccgagctgcccgagcagaagcccagagccaagcacagctgcttcctggtgcccgcctag

SEQ ID NO: 71801 - DNA, 2208 bp, synthetic construct
  misc_feature 1..2208: note = Description of Artificial Sequence: Synthetic coding sequence
  source 1..2208: mol_type = other DNA
atgtggagagtgctgttcctgctgagcggcctgggcggcctgagaatggacagcaacttcgacagcctgcccgtgcagatcaccgtgcccgagaagatcagaagcatcatcaaggagggcatcgagagccaggccagctacaagatcgtgatcgagggcaagccctacaccgtgaacctgatgcagaagaacttcctgccccacaacttcagagtgtacagctacagcggcaccggcatcatgaagcccctggaccaggacttccagaacttctgccactaccagggctacatcgagggctaccccaagagcgtggtgatggtgagcacctgcaccggcctgagaggcgtgctgcagttcgagaacgtgagctacggcatcgagcccctggagagcagcgtgggcttcgagcacgtgatctaccaggtgaagcacaagaaggccgacgtgagcctgtacaacgagaaggacatcgagagcagagacctgagcttcaagctgcagagcgtggagccccagcaggacttcgccaagtacatcgagatgcacgtgatcgtggagaagcagctgtacaaccacatgggcagcgacaccaccgtggtggcccagaaggtgttccagctgatcggcctgaccaacgccatcttcgtgagcttcaacatcaccatcatcctgagcagcctggagctgtggatcgacgagaacaagatcgccaccaccggcgaggccaacgagctgctgcacaccttcctgagatggaagaccagctacctggtgctgagaccccacgacgtggccttcctgctggtgtacagagagaagagcaactacgtgggcgccaccttccagggcaagatgtgcgacgccaactacgccggcggcgtggtgctgcaccccagaaccatcagcctggagagcctggccgtgatcctggcccagctgctgagcctgagcatgggcatcacctacgacgacatcaacaagtgccagtgcagcggcgccgtgtgcatcatgaaccccgaggccatccacttcagcggcgtgaagatcttcagcaactgcagcttcgaggacttcgcccacttcatcagcaagcagaagagccagtgcctgcacaaccagcccagactggaccccttcttcaagcagcaggccgtgtgcggcaacgccaagctggaggccggcgaggagtgcgactgcggcaccgagcaggactgcgccctgatcggcgagacctgctgcgacatcgccacctgcagattcaaggccggcagcaactgcgccgagggcccctgctgcgagaactgcctgttcatgagcaaggagagaatgtgcagacccagcttcgaggagtgcgacctgcccgagtactgcaacggcagcagcgccagctgccccgagaaccactacgtgcagaccggccacccctgcggcctgaaccagtggatctgcatcgacggcgtgtgcatgagcggcgacaagcagtgcaccgacaccttcggcaaggaggtggagttcggccccagcgagtgctacagccacctgaacagcaagaccgacgtgagcggcaactgcggcatcagcgacagcggctacacccagtgcgaggccgacaacctgcagtgcggcaagctgatctgcaagtacgtgggcaagttcctgctgcagatccccagagccaccatcatctacgccaacatcagcggccacctgtgcatcgccgtggagttcgccagcgaccacgccgacagccagaagatgtggatcaaggacggcaccagctgcggcagcaacaaggtgtgcagaaaccagagatgcgtgagcagcagctacctgggctacgactgcaccaccgacaagtgcaacgacagaggcgtgtgcaacaacaagaagcactgccactgcagcgccagctacctgccccccgactgcagcgtgcagagcgacctgtggcccggcggcagcatcgacagcggcaacttcccccccgtggccatccccgccagactgcccgagagaagatacatcgagaacatctaccacagcaagcccatgagatggcccttcttcctgttcatccccttcttcatcatcttctgcgtgctgatcgccatcatggtgaaggtgaacttccagagaaagaagtggagaaccgaggactacagcagcgacgagcagcccgagagcgagagcgagcccaagggctag

SEQ ID NO: 71802 - DNA, 2151 bp, synthetic construct
  misc_feature 1..2151: note = Description of Artificial Sequence: Synthetic coding sequence
  source 1..2151: mol_type = other DNA
atgtggagagtgctgttcctgctgagcggcctgggcggcctgagaatggacagcaacttcgacagcctgcccgtgcagatcaccgtgcccgagaagatcagaagcatcatcaaggagggcatcgagagccaggccagctacaagatcgtgatcgagggcaagccctacaccgtgaacctgatgcagaagaacttcctgccccacaacttcagagtgtacagctacagcggcaccggcatcatgaagcccctggaccaggacttccagaacttctgccactaccagggctacatcgagggctaccccaagagcgtggtgatggtgagcacctgcaccggcctgagaggcgtgctgcagttcgagaacgtgagctacggcatcgagcccctggagagcagcgtgggcttcgagcacgtgatctaccaggtgaagcacaagaaggccgacgtgagcctgtacaacgagaaggacatcgagagcagagacctgagcttcaagctgcagagcgtggagtacaaccacatgggcagcgacaccaccgtggtggcccagaaggtgttccagctgatcggcctgaccaacgccatcttcgtgagcttcaacatcaccatcatcctgagcagcctggagctgtggatcgacgagaacaagatcgccaccaccggcgaggccaacgagctgctgcacaccttcctgagatggaagaccagctacctggtgctgagaccccacgacgtggccttcctgctggtgtacagagagaagagcaactacgtgggcgccaccttccagggcaagatgtgcgacgccaactacgccggcggcgtggtgctgcaccccagaaccatcagcctggagagcctggccgtgatcctggcccagctgctgagcctgagcatgggcatcacctacgacgacatcaacaagtgccagtgcagcggcgccgtgtgcatcatgaaccccgaggccatccacttcagcggcgtgaagatcttcagcaactgcagcttcgaggacttcgcccacttcatcagcaagcagaagagccagtgcctgcacaaccagcccagactggaccccttcttcaagcagcaggccgtgtgcggcaacgccaagctggaggccggcgaggagtgcgactgcggcaccgagcaggactgcgccctgatcggcgagacctgctgcgacatcgccacctgcagattcaaggccggcagcaactgcgccgagggcccctgctgcgagaactgcctgttcatgagcaaggagagaatgtgcagacccagcttcgaggagtgcgacctgcccgagtactgcaacggcagcagcgccagctgccccgagaaccactacgtgcagaccggccacccctgcggcctgaaccagtggatctgcatcgacggcgtgtgcatgagcggcgacaagcagtgcaccgacaccttcggcaaggaggtggagttcggccccagcgagtgctacagccacctgaacagcaagaccgacgtgagcggcaactgcggcatcagcgacagcggctacacccagtgcgaggccgacaacctgcagtgcggcaagctgatctgcaagtacgtgggcaagttcctgctgcagatccccagagccaccatcatctacgccaacatcagcggccacctgtgcatcgccgtggagttcgccagcgaccacgccgacagccagaagatgtggatcaaggacggcaccagctgcggcagcaacaaggtgtgcagaaaccagagatgcgtgagcagcagctacctgggctacgactgcaccaccgacaagtgcaacgacagaggcgtgtgcaacaacaagaagcactgccactgcagcgccagctacctgccccccgactgcagcgtgcagagcgacctgtggcccggcggcagcatcgacagcggcaacttcccccccgtggccatccccgccagactgcccgagagaagatacatcgagaacatctaccacagcaagcccatgagatggcccttcttcctgttcatccccttcttcatcatcttctgcgtgctgatcgccatcatggtgaaggtgaacttccagagaaagaagtggagaaccgaggactacagcagcgacgagcagcccgagagcgagagcgagcccaagggctag

SEQ ID NO: 71803 - DNA, 2331 bp, synthetic construct
  misc_feature 1..2331: note = Description of Artificial Sequence: Synthetic coding sequence
  source 1..2331: mol_type = other DNA
atggtgcagctgcaccaggacaccgacccccagatccccaagggccagccctgcaccctgaacagcagcgagggcggcgccagacccgccgtgccccacaccctgttcagcagcgccctggacagatggctgcacaacgacagcttcatcatggccgtgggcgagcccctggtgcacatcagagtgaccctgctgctgctgtggttcggcatgttcctgagcatcagcggccacagccaggccagacccagccagtacttcaccagccccgaggtggtgatccccctgaaggtgatcagcagaggcagaggcgccaaggcccccggctggctgagctacagcctgagattcggcggccagagatacatcgtgcacatgagagtgaacaagctgctgttcgccgcccacctgcccgtgttcacctacaccgagcagcacgccctgctgcaggaccagcccttcatccaggacgactgctactaccacggctacgtggagggcgtgcccgagagcctggtggccctgagcacctgcagcggcggcttcctgggcatgctgcagatcaacgacctggtgtacgagatcaagcccatcagcgtgagcgccaccttcgagcacctggtgtacaagatcgacagcgacgacacccagttcccccccatgagatgcggcctgaccgaggagaagatcgcccaccagatggagctgcagctgagctacaacttcaccctgaagcagagcagcttcgtgggctggtggacccaccagagattcgtggagctggtggtggtggtggacaacatcagatacctgttcagccagagcaacgccaccaccgtgcagcacgaggtgttcaacgtggtgaacatcgtggacagcttctaccaccccctggaggtggacgtgatcctgaccggcatcgacatctggaccgccagcaaccccctgcccaccagcggcgacctggacaacgtgctggaggacttcagcatctggaagaactacaacctgaacaacagactgcagcacgacgtggcccacctgttcatcaaggacacccagggcatgaagctgggcgtggcctacgtgaagggcatctgccagaaccccttcaacaccggcgtggacgtgttcgaggacaacagactggtggtgttcgccatcaccctgggccacgagctgggccacaacctgggcatgcagcacgacacccagtggtgcgtgtgcgagctgcagtggtgcatcatgcacgcctacagaaaggtgaccaccaagttcagcaactgcagctacgcccagtactgggacagcaccatcagcagcggcctgtgcatccagccccccccctaccccggcaacatcttcagactgaagtactgcggcaacctggtggtggaggagggcgaggagtgcgactgcggcaccatcagacagtgcgccaaggacccctgctgcctgctgaactgcaccctgcaccccggcgccgcctgcgccttcggcatctgctgcaaggactgcaagttcctgcccagcggcaccctgtgcagacagcaggtgggcgagtgcgacctgcccgagtggtgcaacggcaccagccaccagtgccccgacgacgtgtacgtgcaggacggcatcagctgcaacgtgaacgccttctgctacgagaagacctgcaacaaccacgacatccagtgcaaggagatcttcggccaggacgccagaagcgccagccagagctgctaccaggagatcaacacccagggcaacagattcggccactgcggcatcgtgggcaccacctacgtgaagtgctggacccccgacatcatgtgcggcagagtgcagtgcgagaacgtgggcgtgatccccaacctgatcgagcacagcaccgtgcagcagttccacctgaacgacaccacctgctggggcaccgactaccacctgggcatggccatccccgacatcggcgaggtgaaggacggcaccgtgtgcggccccgagaagatctgcatcagaaagaagtgcgccagcatggtgcacctgagccaggcctgccagcccaagacctgcaacatgagaggcatctgcaacaacaagcagcactgccactgcaaccacgagtgggcccccccctactgcaaggacaagggctacggcggcagcgccgacagcggccccccccccaagaacaacatggagggcctgaacgtgatgggcaagctgagatacctgagcctgctgtgcctgctgcccctggtggccttcctgctgttctgcctgcacgtgctgttcaagaagagaaccaagagcaaggaggacgaggagggctag

SEQ ID NO: 71804 - DNA, 2169 bp, synthetic construct
  misc_feature 1..2169: note = Description of Artificial Sequence: Synthetic coding sequence
  source 1..2169: mol_type = other DNA
atggccgtggacggcaccctggtgtacatcagagtgaccctgctgctgctgtggctgggcgtgttcctgagcatcagcggctactgccaggccggccccagccagcacttcaccagccccgaggtggtgatccccctgaaggtgatcagcagaggcagaagcgccaaggcccccggctggctgagctacagcctgagattcggcggccagaagcacgtggtgcacatgagagtgaagaagctgctggtgagcagacacctgcccgtgttcacctacaccgacgacagagccctgctggaggaccagctgttcatccccgacgactgctactaccacggctacgtggaggccgcccccgagagcctggtggtgttcagcgcctgcttcggcggcttcagaggcgtgctgaagatcagcggcctgacctacgagatcgagcccatcagacacagcgccaccttcgagcacctggtgtacaagatcaacagcaacgagacccagttccccgccatgagatgcggcctgaccgagaaggaggtggccagacagcagctggagttcgaggaggccgagaacagcgccctggagcccaagagcgccggcgactggtggacccacgcctggttcctggagctggtggtggtggtgaaccacgacttcttcatctacagccagagcaacatcagcaaggtgcaggaggacgtgttcctggtggtgaacatcgtggacagcatgtacaagcagctgggcacctacatcatcctgatcggcatcgagatctggaaccagggcaacgtgttccccatgaccagcatcgagcaggtgctgaacgacttcagccagtggaagcagatcagcctgagccagctgcagcacgacgccgcccacatgttcatcaagaacagcctgatcagcatcctgggcctggcctacgtggccggcatctgcagaccccccatcgactgcggcgtggacaacttccagggcgacacctggagcctgttcgccaacaccgtggcccacgagctgggccacaccctgggcatgcagcacgacgaggagttctgcttctgcggcgagagaggctgcatcatgaacaccttcagagtgcccgccgagaagttcaccaactgcagctacgccgacttcatgaagaccaccctgaaccagggcagctgcctgcacaacccccccagactgggcgagatcttcatgctgaagagatgcggcaacggcgtggtggagagagaggagcagtgcgactgcggcagcgtgcagcagtgcgagcaggacgcctgctgcctgctgaactgcaccctgagacccggcgccgcctgcgccttcggcctgtgctgcaaggactgcaagttcatgcccagcggcgagctgtgcagacaggaggtgaacgagtgcgacctgcccgagtggtgcaacggcaccagccaccagtgccccgaggacagatacgtgcaggacggcatcccctgcagcgacagcgcctactgctaccagaagagatgcaacaaccacgaccagcactgcagagagatcttcggcaaggacgccaagagcgccagccagaactgctacaaggagatcaacagccagggcaacagattcggccactgcggcatcaacggcaccacctacctgaagtgccacatcagcgacgtgttctgcggcagagtgcagtgcgagaacgtgagagacatccccctgctgcaggaccacttcaccctgcagcacacccacatcaacggcgtgacctgctggggcatcgactaccacctgagaatgaacatcagcgacatcggcgaggtgaaggacggcaccgtgtgcggccccggcaagatctgcatccacaagaagtgcgtgagcctgagcgtgctgagccacgtgtgcctgcccgagacctgcaacatgaagggcatctgcaacaacaagcaccactgccactgcggctacggctggagccccccctactgccagcacagaggctacggcggcagcatcgacagcggccccgccagcgccaagagaggcgtgttcctgcccctgatcgtgatccccagcctgagcgtgctgaccttcctgttcaccgtgggcctgctgatgtacctgagacagtgcagcggccccaaggagaccaaggcccacagcagcggctag

SEQ ID NO: 71805 - DNA, 2721 bp, synthetic construct
  misc_feature 1..2721: note = Description of Artificial Sequence: Synthetic coding sequence
  source 1..2721: mol_type = other DNA
atgcaggccgccgtggccgtgagcgtgcccttcctgctgctgtgcgtgctgggcacctgcccccccgccagatgcggccaggccggcgacgccagcctgatggagctggagaagagaaaggagaacagattcgtggagagacagagcatcgtgcccctgagactgatctacagaagcggcggcgaggacgagagcagacacgacgccctggacaccagagtgagaggcgacctgggcggcccccagctgacccacgtggaccaggccagcttccaggtggacgccttcggcaccagcttcatcctggacgtggtgctgaaccacgacctgctgagcagcgagtacatcgagagacacatcgagcacggcggcaagaccgtggaggtgaagggcggcgagcactgctactaccagggccacatcagaggcaaccccgacagcttcgtggccctgagcacctgccacggcctgcacggcatgttctacgacggcaaccacacctacctgatcgagcccgaggagaacgacaccacccaggaggacttccacttccacagcgtgtacaagagcagactgttcgagttcagcctggacgacctgcccagcgagttccagcaggtgaacatcacccccagcaagttcatcctgaagcccagacccaagagaagcaagagacagctgagaagataccccagaaacgtggaggaggagaccaagtacatcgagctgatgatcgtgaacgaccacctgatgttcaagaagcacagactgagcgtggtgcacaccaacacctacgccaagagcgtggtgaacatggccgacctgatctacaaggaccagctgaagaccagaatcgtgctggtggccatggagacctgggccaccgacaacaagttcgccatcagcgagaaccccctgatcaccctgagagagttcatgaagtacagaagagacttcatcaaggagaagagcgacgccgtgcacctgttcagcggcagccagttcgagagcagcagaagcggcgccgcctacatcggcggcatctgcagcctgctgaagggcggcggcgtgaacgagttcggcaagaccgacctgatggccgtgaccctggcccagagcctggcccacaacatcggcatcatcagcgacaagagaaagctggccagcggcgagtgcaagtgcgaggacacctggagcggctgcatcatgggcgacaccggctactacctgcccaagaagttcacccagtgcaacatcgaggagtaccacgacttcctgaacagcggcggcggcgcctgcctgttcaacaagcccagcaagctgctggacccccccgagtgcggcaacggcttcatcgagaccggcgaggagtgcgactgcggcacccccgccgagtgcgtgctggagggcgccgagtgctgcaagaagtgcaccctgacccaggacagccagtgcagcgacggcctgtgctgcaagaagtgcaagttccagcccatgggcaccgtgtgcagagaggccgtgaacgactgcgacatcagagagacctgcagcggcaacagcagccagtgcgcccccaacatccacaagatggacggctacagctgcgacggcgtgcagggcatctgcttcggcggcagatgcaagaccagagacagacagtgcaagtacatctggggccagaaggtgaccgccagcgacaagtactgctacgagaagctgaacatcgagggcaccgagaagggcaactgcggcaaggacaaggacacctggatccagtgcaacaagagagacgtgctgtgcggctacctgctgtgcaccaacatcggcaacatccccagactgggcgagctggacggcgagatcaccagcaccctggtggtgcagcagggcagaaccctgaactgcagcggcggccacgtgaagctggaggaggacgtggacctgggctacgtggaggacggcaccccctgcggcccccagatgatgtgcctggagcacagatgcctgcccgtggccagcttcaacttcagcacctgcctgagcagcaaggagggcaccatctgcagcggcaacggcgtgtgcagcaacgagctgaagtgcgtgtgcaacagacactggatcggcagcgactgcaacacctacttcccccacaacgacgacgccaagaccggcatcaccctgagcggcaacggcgtggccggcaccaacatcatcatcggcatcatcgccggcaccatcctggtgctggccctgatcctgggcatcaccgcctggggctacaagaactacagagagcagagacagctgccccagggcgactacgtgaagaagcccggcgacggcgacagcttctacagcgacatcccccccggcgtgagcaccaacagcgccagcagcagcaagaagagaagcaacggcctgagccacagctggagcgagagaatccccgacaccaagcacatcagcgacatctgcgagaacggcagacccagaagcaacagctggcagggcaacctgggcggcaacaagaagaagatcagaggcaagagattcagacccagaagcaacagcaccgagaccctgagccccgccaagagccccagcagcagcaccggcagcatcgccagcagcagaaagtacccctaccccatgccccccctgcccgacgaggacaagaaggtgaacagacagagcgccagactgtgggagaccagcatctag

SEQ ID NO: 71806 - DNA, 2700 bp, synthetic construct
  misc_feature 1..2700: note = Description of Artificial Sequence: Synthetic coding sequence
  source 1..2700: mol_type = other DNA
atgcaggccgccgtggccgtgagcgtgcccttcctgctgctgtgcgtgctgggcacctgcccccccgccagatgcggccaggccggcgacgccagcctgatggagctggagaagagaaaggagaacagattcgtggagagacagagcatcgtgcccctgagactgatctacagaagcggcggcgaggacgagagcagacacgacgccctggacaccagagtgagaggcgacctgggcggcccccagctgacccacgtggaccaggccagcttccaggtggacgccttcggcaccagcttcatcctggacgtggtgctgaaccacgacctgctgagcagcgagtacatcgagagacacatcgagcacggcggcaagaccgtggaggtgaagggcggcgagcactgctactaccagggccacatcagaggcaaccccgacagcttcgtggccctgagcacctgccacggcctgcacggcatgttctacgacggcaaccacacctacctgatcgagcccgaggagaacgacaccacccaggaggacttccacttccacagcgtgtacaagagcagactgttcgagttcagcctggacgacctgcccagcgagttccagcaggtgaacatcacccccagcaagttcatcctgaagcccagacccaagagaagcaagagacagctgagaagataccccagaaacgtggaggaggagaccaagtacatcgagctgatgatcgtgaacgaccacctgatgttcaagaagcacagactgagcgtggtgcacaccaacacctacgccaagagcgtggtgaacatggccgacctgatctacaaggaccagctgaagaccagaatcgtgctggtggccatggagacctgggccaccgacaacaagttcgccatcagcgagaaccccctgatcaccctgagagagttcatgaagtacagaagagacttcatcaaggagaagagcgacgccgtgcacctgttcagcggcagccagttcgagagcagcagaagcggcgccgcctacatcggcggcatctgcagcctgctgaagggcggcggcgtgaacgagttcggcaagaccgacctgatggccgtgaccctggcccagagcctggcccacaacatcggcatcatcagcgacaagagaaagctggccagcggcgagtgcaagtgcgaggacacctggagcggctgcatcatgggcgacaccggctactacctgcccaagaagttcacccagtgcaacatcgaggagtaccacgacttcctgaacagcggcggcggcgcctgcctgttcaacaagcccagcaagctgctggacccccccgagtgcggcaacggcttcatcgagaccggcgaggagtgcgactgcggcacccccgccgagtgcgtgctggagggcgccgagtgctgcaagaagtgcaccctgacccaggacagccagtgcagcgacggcctgtgctgcaagaagtgcaagttccagcccatgggcaccgtgtgcagagaggccgtgaacgactgcgacatcagagagacctgcagcggcaacagcagccagtgcgcccccaacatccacaagatggacggctacagctgcgacggcgtgcagggcatctgcttcggcggcagatgcaagaccagagacagacagtgcaagtacatctggggccagaaggtgaccgccagcgacaagtactgctacgagaagctgaacatcgagggcaccgagaagggcaactgcggcaaggacaaggacacctggatccagtgcaacaagagagacgtgctgtgcggctacctgctgtgcaccaacatcggcaacatccccagactgggcgagctggacggcgagatcaccagcaccctggtggtgcagcagggcagaaccctgaactgcagcggcggccacgtgaagctggaggaggacgtggacctgggctacgtggaggacggcaccccctgcggcccccagatgatgtgcctggagcacagatgcctgcccgtggccagcttcaacttcagcacctgcctgagcagcaaggagggcaccatctgcagcggcaacggcgtgtgcagcaacgagctgaagtgcgtgtgcaacagacactggatcggcagcgactgcaacacctacttcccccacaacgacgacgccaagaccggcatcaccctgagcggcaacggcgtggccggcaccaacatcatcatcggcatcatcgccggcaccatcctggtgctggccctgatcctgggcatcaccgcctggggctacaacaacatcttcaacttcagaagcaacggcctgagccacagctggagcgagagaatccccgacaccaagcacatcagcgacatctgcgagaacggcagacccagaagcaacagctggcagggcaacctgggcggcaacaagaagaagatcagaggcaagagattcagacccagaagcaacagcaccgagtacctgaacccctggttcaagagagactacaacgtggccaagtgggtggaggacgtgaacaagaacaccgagggcccctacttcagaaccctgagccccgccaagagccccagcagcagcaccggcagcatcgccagcagcagaaagtacccctaccccatgccccccctgcccgacgaggacaagaaggtgaacagacagagcgccagactgtgggagaccagcatctag

SEQ ID NO: 71807 - DNA, 2580 bp, synthetic construct
  misc_feature 1..2580: note = Description of Artificial Sequence: Synthetic coding sequence
  source 1..2580: mol_type = other DNA
atgcaggccgccgtggccgtgagcgtgcccttcctgctgctgtgcgtgctgggcacctgcccccccgccagatgcggccaggccggcgacgccagcctgatggagctggagaagagaaaggagaacagattcgtggagagacagagcatcgtgcccctgagactgatctacagaagcggcggcgaggacgagagcagacacgacgccctggacaccagagtgagaggcgacctgggcggcccccagctgacccacgtggaccaggccagcttccaggtggacgccttcggcaccagcttcatcctggacgtggtgctgaaccacgacctgctgagcagcgagtacatcgagagacacatcgagcacggcggcaagaccgtggaggtgaagggcggcgagcactgctactaccagggccacatcagaggcaaccccgacagcttcgtggccctgagcacctgccacggcctgcacggcatgttctacgacggcaaccacacctacctgatcgagcccgaggagaacgacaccacccaggaggacttccacttccacagcgtgtacaagagcagactgttcgagttcagcctggacgacctgcccagcgagttccagcaggtgaacatcacccccagcaagttcatcctgaagcccagacccaagagaagcaagagacagctgagaagataccccagaaacgtggaggaggagaccaagtacatcgagctgatgatcgtgaacgaccacctgatgttcaagaagcacagactgagcgtggtgcacaccaacacctacgccaagagcgtggtgaacatggccgacctgatctacaaggaccagctgaagaccagaatcgtgctggtggccatggagacctgggccaccgacaacaagttcgccatcagcgagaaccccctgatcaccctgagagagttcatgaagtacagaagagacttcatcaaggagaagagcgacgccgtgcacctgttcagcggcagccagttcgagagcagcagaagcggcgccgcctacatcggcggcatctgcagcctgctgaagggcggcggcgtgaacgagttcggcaagaccgacctgatggccgtgaccctggcccagagcctggcccacaacatcggcatcatcagcgacaagagaaagctggccagcggcgagtgcaagtgcgaggacacctggagcggctgcatcatgggcgacaccggctactacctgcccaagaagttcacccagtgcaacatcgaggagtaccacgacttcctgaacagcggcggcggcgcctgcctgttcaacaagcccagcaagctgctggacccccccgagtgcggcaacggcttcatcgagaccggcgaggagtgcgactgcggcacccccgccgagtgcgtgctggagggcgccgagtgctgcaagaagtgcaccctgacccaggacagccagtgcagcgacggcctgtgctgcaagaagtgcaagttccagcccatgggcaccgtgtgcagagaggccgtgaacgactgcgacatcagagagacctgcagcggcaacagcagccagtgcgcccccaacatccacaagatggacggctacagctgcgacggcgtgcagggcatctgcttcggcggcagatgcaagaccagagacagacagtgcaagtacatctggggccagaaggtgaccgccagcgacaagtactgctacgagaagctgaacatcgagggcaccgagaagggcaactgcggcaaggacaaggacacctggatccagtgcaacaagagagacgtgctgtgcggctacctgctgtgcaccaacatcggcaacatccccagactgggcgagctggacggcgagatcaccagcaccctggtggtgcagcagggcagaaccctgaactgcagcggcggccacgtgaagctggaggaggacgtggacctgggctacgtggaggacggcaccccctgcggcccccagatgatgtgcctggagcacagatgcctgcccgtggccagcttcaacttcagcacctgcctgagcagcaaggagggcaccatctgcagcggcaacggcgtgtgcagcaacgagctgaagtgcgtgtgcaacagacactggatcggcagcgactgcaacacctacttcccccacaacgacgacgccaagaccggcatcaccctgagcggcaacggcgtggccggcaccaacatcatcatcggcatcatcgccggcaccatcctggtgctggccctgatcctgggcatcaccgcctggggctacaagaactacagagagcagagacagctgccccagggcgactacgtgaagaagcccggcgacggcgacagcttctacagcgacatcccccccggcgtgagcaccaacagcgccagcagcagcaagaagagaagcaacggcctgagccacagctggagcgagagaatccccgacaccaagcacatcagcgacatctgcgagaacggcagacccagaagcaacagctggcagggcaacctgggcggcaacaagaagaagatcagaggcaagagattcagacccagaagcaacagcaccgagtag

SEQ ID NO: 71808 - DNA, 2613 bp, synthetic construct
  misc_feature 1..2613: note = Description of Artificial Sequence: Synthetic coding sequence
  source 1..2613: mol_type = other DNA
atgcaggccgccgtggccgtgagcgtgcccttcctgctgctgtgcgtgctgggcacctgcccccccgccagatgcggccaggccggcgacgccagcctgatggagctggagaagagaaaggagaacagattcgtggagagacagagcatcgtgcccctgagactgatctacagaagcggcggcgaggacgagagcagacacgacgccctggacaccagagtgagaggcgacctgggcggcccccagctgacccacgtggaccaggccagcttccaggtggacgccttcggcaccagcttcatcctggacgtggtgctgaaccacgacctgctgagcagcgagtacatcgagagacacatcgagcacggcggcaagaccgtggaggtgaagggcggcgagcactgctactaccagggccacatcagaggcaaccccgacagcttcgtggccctgagcacctgccacggcctgcacggcatgttctacgacggcaaccacacctacctgatcgagcccgaggagaacgacaccacccaggaggacttccacttccacagcgtgtacaagagcagactgttcgagttcagcctggacgacctgcccagcgagttccagcaggtgaacatcacccccagcaagttcatcctgaagcccagacccaagagaagcaagagacagctgagaagataccccagaaacgtggaggaggagaccaagtacatcgagctgatgatcgtgaacgaccacctgatgttcaagaagcacagactgagcgtggtgcacaccaacacctacgccaagagcgtggtgaacatggccgacctgatctacaaggaccagctgaagaccagaatcgtgctggtggccatggagacctgggccaccgacaacaagttcgccatcagcgagaaccccctgatcaccctgagagagttcatgaagtacagaagagacttcatcaaggagaagagcgacgccgtgcacctgttcagcggcagccagttcgagagcagcagaagcggcgccgcctacatcggcggcatctgcagcctgctgaagggcggcggcgtgaacgagttcggcaagaccgacctgatggccgtgaccctggcccagagcctggcccacaacatcggcatcatcagcgacaagagaaagctggccagcggcgagtgcaagtgcgaggacacctggagcggctgcatcatgggcgacaccggctactacctgcccaagaagttcacccagtgcaacatcgaggagtaccacgacttcctgaacagcggcggcggcgcctgcctgttcaacaagcccagcaagctgctggacccccccgagtgcggcaacggcttcatcgagaccggcgaggagtgcgactgcggcacccccgccgagtgcgtgctggagggcgccgagtgctgcaagaagtgcaccctgacccaggacagccagtgcagcgacggcctgtgctgcaagaagtgcaagttccagcccatgggcaccgtgtgcagagaggccgtgaacgactgcgacatcagagagacctgcagcggcaacagcagccagtgcgcccccaacatccacaagatggacggctacagctgcgacggcgtgcagggcatctgcttcggcggcagatgcaagaccagagacagacagtgcaagtacatctggggccagaaggtgaccgccagcgacaagtactgctacgagaagctgaacatcgagggcaccgagaagggcaactgcggcaaggacaaggacacctggatccagtgcaacaagagagacgtgctgtgcggctacctgctgtgcaccaacatcggcaacatccccagactgggcgagctggacggcgagatcaccagcaccctggtggtgcagcagggcagaaccctgaactgcagcggcggccacgtgaagctggaggaggacgtggacctgggctacgtggaggacggcaccccctgcggcccccagatgatgtgcctggagcacagatgcctgcccgtggccagcttcaacttcagcacctgcctgagcagcaaggagggcaccatctgcagcggcaacggcgtgtgcagcaacgagctgaagtgcgtgtgcaacagacactggatcggcagcgactgcaacacctacttcccccacaacgacgacgccaagaccggcatcaccctgagcggcaacggcgtggccggcaccaacatcatcatcggcatcatcgccggcaccatcctggtgctggccctgatcctgggcatcaccgcctggggctacaagaactacagagagcagagaagcaacggcctgagccacagctggagcgagagaatccccgacaccaagcacatcagcgacatctgcgagaacggcagacccagaagcaacagctggcagggcaacctgggcggcaacaagaagaagatcagaggcaagagattcagacccagaagcaacagcaccgagaccctgagccccgccaagagccccagcagcagcaccggcagcatcgccagcagcagaaagtacccctaccccatgccccccctgcccgacgaggacaagaaggtgaacagacagagcgccagactgtgggagaccagcatctag

SEQ ID NO: 71809 - DNA, 2700 bp, synthetic construct
  misc_feature 1..2700: note = Description of Artificial Sequence: Synthetic coding sequence
  source 1..2700: mol_type = other DNA
atgcaggccgccgtggccgtgagcgtgcccttcctgctgctgtgcgtgctgggcacctgcccccccgccagatgcggccaggccggcgacgccagcctgatggagctggagaagagaaaggagaacagattcgtggagagacagagcatcgtgcccctgagactgatctacagaagcggcggcgaggacgagagcagacacgacgccctggacaccagagtgagaggcgacctgggcggcccccagctgacccacgtggaccaggccagcttccaggtggacgccttcggcaccagcttcatcctggacgtggtgctgaaccacgacctgctgagcagcgagtacatcgagagacacatcgagcacggcggcaagaccgtggaggtgaagggcggcgagcactgctactaccagggccacatcagaggcaaccccgacagcttcgtggccctgagcacctgccacggcctgcacggcatgttctacgacggcaaccacacctacctgatcgagcccgaggagaacgacaccacccaggaggacttccacttccacagcgtgtacaagagcagactgttcgagttcagcctggacgacctgcccagcgagttccagcaggtgaacatcacccccagcaagttcatcctgaagcccagacccaagagaagcaagagacagctgagaagataccccagaaacgtggaggaggagaccaagtacatcgagctgatgatcgtgaacgaccacctgatgttcaagaagcacagactgagcgtggtgcacaccaacacctacgccaagagcgtggtgaacatggccgacctgatctacaaggaccagctgaagaccagaatcgtgctggtggccatggagacctgggccaccgacaacaagttcgccatcagcgagaaccccctgatcaccctgagagagttcatgaagtacagaagagacttcatcaaggagaagagcgacgccgtgcacctgttcagcggcagccagttcgagagcagcagaagcggcgccgcctacatcggcggcatctgcagcctgctgaagggcggcggcgtgaacgagttcggcaagaccgacctgatggccgtgaccctggcccagagcctggcccacaacatcggcatcatcagcgacaagagaaagctggccagcggcgagtgcaagtgcgaggacacctggagcggctgcatcatgggcgacaccggctactacctgcccaagaagttcacccagtgcaacatcgaggagtaccacgacttcctgaacagcggcggcggcgcctgcctgttcaacaagcccagcaagctgctggacccccccgagtgcggcaacggcttcatcgagaccggcgaggagtgcgactgcggcacccccgccgagtgcgtgctggagggcgccgagtgctgcaagaagtgcaccctgacccaggacagccagtgcagcgacggcctgtgctgcaagaagtgcaagttccagcccatgggcaccgtgtgcagagaggccgtgaacgactgcgacatcagagagacctgcagcggcaacagcagccagtgcgcccccaacatccacaagatggacggctacagctgcgacggcgtgcagggcatctgcttcggcggcagatgcaagaccagagacagacagtgcaagtacatctggggccagaaggtgaccgccagcgacaagtactgctacgagaagctgaacatcgagggcaccgagaagggcaactgcggcaaggacaaggacacctggatccagtgcaacaagagagacgtgctgtgcggctacctgctgtgcaccaacatcggcaacatccccagactgggcgagctggacggcgagatcaccagcaccctggtggtgcagcagggcagaaccctgaactgcagcggcggccacgtgaagctggaggaggacgtggacctgggctacgtggaggacggcaccccctgcggcccccagatgatgtgcctggagcacagatgcctgcccgtggccagcttcaacttcagcacctgcctgagcagcaaggagggcaccatctgcagcggcaacggcgtgtgcagcaacgagctgaagtgcgtgtgcaacagacactggatcggcagcgactgcaacacctacttcccccacaacgacgacgccaagaccggcatcaccctgagcggcaacggcgtggccggcaccaacatcatcatcggcatcatcgccggcaccatcctggtgctggccctgatcctgggcatcaccgcctggggctacaagaactacagagagcagagaagcaacggcctgagccacagctggagcgagagaatccccgacaccaagcacatcagcgacatctgcgagaacggcagacccagaagcaacagctggcagggcaacctgggcggcaacaagaagaagatcagaggcaagagattcagacccagaagcaacagcaccgagtacctgaacccctggttcaagagagactacaacgtggccaagtgggtggaggacgtgaacaagaacaccgagggcccctacttcagaaccctgagccccgccaagagccccagcagcagcaccggcagcatcgccagcagcagaaagtacccctaccccatgccccccctgcccgacgaggacaagaaggtgaacagacagagcgccagactgtgggagaccagcatctag

SEQ ID NO: 71810 - DNA, 2328 bp, synthetic construct
  misc_feature 1..2328: note = Description of Artificial Sequence: Synthetic coding sequence
  source 1..2328: mol_type = other DNA
atgctgcagggcctgctgcccgtgagcctgctgctgagcgtggccgtgagcgccatcaaggagctgcccggcgtgaagaagtacgaggtggtgtaccccatcagactgcaccccctgcacaagagagaggccaaggagcccgagcagcaggagcagttcgagaccgagctgaagtacaagatgaccatcaacggcaagatcgccgtgctgtacctgaagaagaacaagaacctgctggcccccggctacaccgagacctactacaacagcaccggcaaggagatcaccaccagcccccagatcatggacgactgctactaccagggccacatcctgaacgagaaggtgagcgacgccagcatcagcacctgcagaggcctgagaggctacttcagccagggcgaccagagatacttcatcgagcccctgagccccatccacagagacggccaggagcacgccctgttcaagtacaaccccgacgagaagaactacgacagcacctgcggcatggacggcgtgctgtgggcccacgacctgcagcagaacatcgccctgcccgccaccaagctggtgaagctgaaggacagaaaggtgcaggagcacgagaagtacatcgagtactacctggtgctggacaacggcgagttcaagagatacaacgagaaccaggacgagatcagaaagagagtgttcgagatggccaactacgtgaacatgctgtacaagaagctgaacacccacgtggccctggtgggcatggagatctggaccgacaaggacaagatcaagatcacccccaacgccagcttcaccctggagaacttcagcaagtggagaggcagcgtgctgagcagaagaaagagacacgacatcgcccagctgatcaccgccaccgagctggccggcaccaccgtgggcctggccttcatgagcaccatgtgcagcccctacagcgtgggcgtggtgcaggaccacagcgacaacctgctgagagtggccggcaccatggcccacgagatgggccacaacttcggcatgttccacgacgactacagctgcaagtgccccagcaccatctgcgtgatggacaaggccctgagcttctacatccccaccgacttcagcagctgcagcagactgagctacgacaagttcttcgaggacaagctgagcaactgcctgttcaacgcccccctgcccaccgacatcatcagcacccccatctgcggcaaccagctggtggagatgggcgaggactgcgactgcggcaccagcgaggagtgcaccaacatctgctgcgacgccaagacctgcaagatcaaggccaccttccagtgcgccctgggcgagtgctgcgagaagtgccagttcaagaaggccggcatggtgtgcagacccgccaaggacgagtgcgacctgcccgagatgtgcaacggcaagagcggcaactgccccgacgacagattccaggtgaacggcttcccctgccaccacggcaagggccactgcctgatgggcacctgccccaccctgcaggagcagtgcaccgagctgtggggccccggcaccgaggtggccgacaagagctgctacaacagaaacgagggcggcagcaagtacggctactgcagaagagtggacgacaccctgatcccctgcaaggccaacgacaccatgtgcggcaagctgttctgccagggcggcagcgacaacctgccctggaagggcagaatcgtgaccttcctgacctgcaagaccttcgaccccgaggacaccagccaggagatcggcatggtggccaacggcaccaagtgcggcgacaacaaggtgtgcatcaacgccgagtgcgtggacatcgagaaggcctacaagagcaccaactgcagcagcaagtgcaagggccacgccgtgtgcgaccacgagctgcagtgccagtgcgaggagggctggatcccccccgactgcgacgacagcagcgtggtgttccacttcagcatcgtggtgggcgtgctgttccccatggccgtgatcttcgtggtggtggccatggtgatcagacaccagagcagcagagagaagcagaagaaggaccagagacccctgagcaccaccggcaccagaccccacaagcagaagagaaagccccagatggtgaaggccgtgcagccccaggagatgagccagatgaagccccacgtgtacgacctgcccgtggagggcaacgagccccccgccagcttccacaaggacaccaacgccctgccccccaccgtgttcaaggacaaccccgtgagcacccccaaggacagcaaccccaaggcctag

SEQ ID NO: 71811 - DNA, 1452 bp, synthetic construct
  misc_feature 1..1452: note = Description of Artificial Sequence: Synthetic coding sequence
  source 1..1452: mol_type = other DNA
atggagatctggaccgacaaggacaagatcaagatcacccccaacgccagcttcaccctggagaacttcagcaagtggagaggcagcgtgctgagcagaagaaagagacacgacatcgcccagctgatcaccgccaccgagctggccggcaccaccgtgggcctggccttcatgagcaccatgtgcagcccctacagcgtgggcgtggtgcaggaccacagcgacaacctgctgagagtggccggcaccatggcccacgagatgggccacaacttcggcatgttccacgacgactacagctgcaagtgccccagcaccatctgcgtgatggacaaggccctgagcttctacatccccaccgacttcagcagctgcagcagactgagctacgacaagttcttcgaggacaagctgagcaactgcctgttcaacgcccccctgcccaccgacatcatcagcacccccatctgcggcaaccagctggtggagatgggcgaggactgcgactgcggcaccagcgaggagtgcaccaacatctgctgcgacgccaagacctgcaagatcaaggccaccttccagtgcgccctgggcgagtgctgcgagaagtgccagttcaagaaggccggcatggtgtgcagacccgccaaggacgagtgcgacctgcccgagatgtgcaacggcaagagcggcaactgccccgacgacagattccaggtgaacggcttcccctgccaccacggcaagggccactgcctgatgggcacctgccccaccctgcaggagcagtgcaccgagctgtggggccccggcaccgaggtggccgacaagagctgctacaacagaaacgagggcggcagcaagtacggctactgcagaagagtggacgacaccctgatcccctgcaaggccaacgacaccatgtgcggcaagctgttctgccagggcggcagcgacaacctgccctggaagggcagaatcgtgaccttcctgacctgcaagaccttcgaccccgaggacaccagccaggagatcggcatggtggccaacggcaccaagtgcggcgacaacaaggtgtgcatcaacgccgagtgcgtggacatcgagaaggcctacaagagcaccaactgcagcagcaagtgcaagggccacgccgtgtgcgaccacgagctgcagtgccagtgcgaggagggctggatcccccccgactgcgacgacagcagcgtggtgttcagaagactgctgcactgcggctggggcgccgtgcccaacggcggccacttctgcggcggctgctacggcaaccccgcccccgagctgcagagaaaggccgaggagagaagcgaggccaccatctaccactggcaccaggccacccagaccgaggaggagacccccgacggcaagggctgcagcacccccagagacgagagcgacgaggccccctgcgtgtag

SEQ ID NO: 71812 - DNA, 1623 bp, synthetic construct
  misc_feature 1..1623: note = Description of Artificial Sequence: Synthetic coding sequence
  source 1..1623: mol_type = other DNA
atgctgcagggcctgctgcccgtgagcctgctgctgagcgtggccgtgagcgccatcaaggagctgcccggcgtgaagaagtacgaggtggtgtaccccatcagactgcaccccctgcacaagagagaggccaaggagcccgagcagcaggagcagttcgagaccgagctgaagtacaagatgaccatcaacggcaagatcgccgtgctgtacctgaagaagaacaagaacctgctggcccccggctacaccgagacctactacaacagcaccggcaaggagatcaccaccagcccccagatcatggacgactgctactaccagggccacatcctgaacgagaaggtgagcgacgccagcatcagcacctgcagaggcctgagaggctacttcagccagggcgaccagagatacttcatcgagcccctgagccccatccacagagacggccaggagcacgccctgttcaagtacaaccccgacgagaagaactacgacagcacctgcggcatggacggcgtgctgtgggcccacgacctgcagcagaacatcgccctgcccgccaccaagctggtgaagctgaaggacagaaaggtgcaggagcacgagaagtacatcgagtactacctggtgctggacaacggcgagttcaagagatacaacgagaaccaggacgagatcagaaagagagtgttcgagatggccaactacgtgaacatgctgtacaagaagctgaacacccacgtggccctggtgggcatggagatctggaccgacaaggacaagatcaagatcacccccaacgccagcttcaccctggagaacttcagcaagtggagaggcagcgtgctgagcagaagaaagagacacgacatcgcccagctgatcaccgccaccgagctggccggcaccaccgtgggcctggccttcatgagcaccatgtgcagcccctacagcgtgggcgtggtgcaggaccacagcgacaacctgctgagagtggccggcaccatggcccacgagatgggccacaacttcggcatgttccacgacgactacagctgcaagtgccccagcaccatctgcgtgatggacaaggccctgagcttctacatccccaccgacttcagcagctgcagcagactgagctacgacaagttcttcgaggacaagctgagcaactgcctgttcaacgcccccctgcccaccgacatcatcagcacccccatctgcggcaaccagctggtggagatgggcgaggactgcgactgcggcaccagcgaggagtgcaccaacatctgctgcgacgccaagacctgcaagatcaaggccaccttccagtgcgccctgggcgagtgctgcgagaagtgccagttcaagaaggccggcatggtgtgcagacccgccaaggacgagtgcgacctgcccgagatgtgcaacggcaagagcggcaactgccccgacgacagattccaggtgaacggcttcccctgccaccacggcaagggccactgcctgatgggcacctgccccaccctgcaggagcagtgcaccgagctgtggggccccggcagaagaaccaaccccttcccctgcgcctgcgccaaggagaaccacttcagatag

SEQ ID NO: 71813 - DNA, 924 bp, synthetic construct
  misc_feature 1..924: note = Description of Artificial Sequence: Synthetic coding sequence
  source 1..924: mol_type = other DNA
atggccaactacgtgaacatgctgtacaagaagctgaacacccacgtggccctggtgggcatggagatctggaccgacaaggacaagatcaagatcacccccaacgccagcttcaccctggagaacttcagcaagtggagaggcagcgtgctgagcagaagaaagagacacgacatcgcccagctgatcaccgccaccgagctggccggcaccaccgtgggcctggccttcatgagcaccatgtgcagcccctacagcgtgggcgtggtgcaggaccacagcgacaacctgctgagagtggccggcaccatggcccacgagatgggccacaacttcggcatgttccacgacgactacagctgcaagtgccccagcaccatctgcgtgatggacaaggccctgagcttctacatccccaccgacttcagcagctgcagcagactgagctacgacaagttcttcgaggacaagctgagcaactgcctgttcaacgcccccctgcccaccgacatcatcagcacccccatctgcggcaaccagctggtggagatgggcgaggactgcgactgcggcaccagcgaggagtgcaccaacatctgctgcgacgccaagacctgcaagatcaaggccaccttccagtgcgccctgggcgagtgctgcgagaagtgccagttcaagaaggccggcatggtgtgcagacccgccaaggacgagtgcgacctgcccgagatgtgcaacggcaagagcggcaactgccccgacgacagattccaggtgaacggcttcccctgccaccacggcaagggccactgcctgatgggcacctgccccaccctgcaggagcagtgcaccgagctgtggggccccggcagaagaaccaaccccttcccctgcgcctgcgccaaggagaaccacttcagatag

SEQ ID NO: 71814 - DNA, 2463 bp, synthetic construct
  misc_feature 1..2463: note = Description of Artificial Sequence: Synthetic coding sequence
  source 1..2463: mol_type = other DNA
atgaagatgctgctgctgctgcactgcctgggcgtgttcctgagctgcagcggccacatccaggacgagcacccccagtaccacagcccccccgacgtggtgatccccgtgagaatcaccggcaccaccagaggcatgaccccccccggctggctgagctacatcctgcccttcggcggccagaagcacatcatccacatcaaggtgaagaagctgctgttcagcaagcacctgcccgtgttcacctacaccgaccagggcgccatcctggaggaccagcccttcgtgcagaacaactgctactaccacggctacgtggagggcgaccccgagagcctggtgagcctgagcacctgcttcggcggcttccagggcatcctgcagatcaacgacttcgcctacgagatcaagcccctggccttcagcaccaccttcgagcacctggtgtacaagatggacagcgaggagaagcagttcagcaccatgagaagcggcttcatgcagaacgagatcacctgcagaatggagttcgaggagatcgacaacagcacccagaagcagagcagctacgtgggctggtggatccacttcagaatcgtggagatcgtggtggtgatcgacaactacctgtacatcagatacgagagaaacgacagcaagctgctggaggacctgtacgtgatcgtgaacatcgtggacagcatcctggacgtgatcggcgtgaaggtgctgctgttcggcctggagatctggaccaacaagaacctgatcgtggtggacgacgtgagaaagagcgtgcacctgtactgcaagtggaagagcgagaacatcacccccagaatgcagcacgacaccagccacctgttcaccaccctgggcctgagaggcctgagcggcatcggcgccttcagaggcatgtgcaccccccacagaagctgcgccatcgtgaccttcatgaacaagaccctgggcaccttcagcatcgccgtggcccaccacctgggccacaacctgggcatgaaccacgacgaggacacctgcagatgcagccagcccagatgcatcatgcacgagggcaacccccccatcaccaagttcagcaactgcagctacggcgacttctgggagtacaccgtggagagaaccaagtgcctgctggagaccgtgcacaccaaggacatcttcaacgtgaagagatgcggcaacggcgtggtggaggagggcgaggagtgcgactgcggccccctgaagcactgcgccaaggacccctgctgcctgagcaactgcaccctgaccgacggcagcacctgcgccttcggcctgtgctgcaaggactgcaagttcctgcccagcggcaaggtgtgcagaaaggaggtgaacgagtgcgacctgcccgagtggtgcaacggcaccagccacaagtgccccgacgacttctacgtggaggacggcatcccctgcaaggagagaggctactgctacgagaagagctgccacgacagaaacgagcagtgcagaagaatcttcggcgccggcgccaacaccgccagcgagacctgctacaaggagctgaacaccctgggcgacagagtgggccactgcggcatcaagaacgccacctacatcaagtgcaacatcagcgacgtgcagtgcggcagaatccagtgcgagaacgtgaccgagatccccaacatgagcgaccacaccaccgtgcactgggccagattcaacgacatcatgtgctggagcaccgactaccacctgggcatgaagggccccgacatcggcgaggtgaaggacggcaccgagtgcggcatcgaccacatctgcatccacagacactgcgtgcacatcaccatcctgaacagcaactgcagccccgccttctgcaacaagagaggcatctgcaacaacaagcaccactgccactgcaactacctgtgggacccccccaactgcctgatcaagggctacggcggcagcgtggacagcggccccccccccaagagaaagaagaagaagaagttctgctacctgtgcatcctgctgctgatcgtgctgttcatcctgctgtgctgcctgtacagactgtgcaagaagagcaagcccatcaagaagcagcaggacgtgcagacccccagcgccaaggaggaggagaagatccagagaagaccccacgagctgcccccccagagccagccctgggtgatgcccagccagagccagccccccgtgacccccagccagagccacccccaggtgatgcccagccagagccagccccccgtgacccccagccagagccagcccagagtgatgcccagccagagccagccccccgtgatgcccagccagagccacccccagctgacccccagccagagccagccccccgtgacccccagccagagacagccccagctgatgcccagccagagccagccccccgtgacccccagctag

SEQ ID NO: 71815 - DNA, 2463 bp, synthetic construct; identical to SEQ ID NO: 71814
  misc_feature 1..2463: note = Description of Artificial Sequence: Synthetic coding sequence
  source 1..2463: mol_type = other DNA

SEQ ID NO: 71816 - DNA, 2463 bp, synthetic construct; identical to SEQ ID NO: 71814
  misc_feature 1..2463: note = Description of Artificial Sequence: Synthetic coding sequence
  source 1..2463: mol_type = other DNA

SEQ ID NO: 71817 - DNA, 135 bp, synthetic construct
  misc_feature 1..135: note = Description of Artificial Sequence: Synthetic coding sequence
  source 1..135: mol_type = other DNA
atgaagatgctgctgctgctgcactgcctgggcgtgttcctgagctgcagcggccacatccaggacgagcacccccagtaccacagcccccccgacgtggtgatccccgtgagaatcaccggcaccaccagatag

SEQ ID NO: 71818 - DNA, 273 bp, synthetic construct
  misc_feature 1..273: note = Description of Artificial Sequence: Synthetic coding sequence
  source 1..273: mol_type = other DNA
atgaagatgctgctgctgctgcactgcctgggcgtgttcctgagctgcagcggccacatccaggacgagcacccccagtaccacagcccccccgacgtggtgatccccgtgagaatcaccggcaccaccagaggcatgaccccccccggctggctgagctacatcctgcccttcggcggccagaagcacatcatccacatcaaggtgaagaagctgctgttcagcaagcacctgcccgtgttcacctacaccgaccagggcgccatcctgtag

SEQ ID NO: 71819 - DNA, 45 bp, synthetic construct
  misc_feature 1..45: note = Description of Artificial Sequence: Synthetic coding sequence
  source 1..45: mol_type = other DNA
atgaagatgctgctgctgctgcactgcctgggcgtgttcctgtag

SEQ ID NO: 71820 - DNA, 2463 bp, synthetic construct; identical to SEQ ID NO: 71814
  misc_feature 1..2463: note = Description of Artificial Sequence: Synthetic coding sequence
  source 1..2463: mol_type = other DNA

SEQ ID NO: 71821 - DNA, 2373 bp, synthetic construct
  misc_feature 1..2373: note = Description of Artificial Sequence: Synthetic coding sequence
  source 1..2373: mol_type = other DNA
atgagaagcgtgcagatcttcctgagccagtgcagactgctgctgctgctggtgcccaccatgctgctgaagagcctgggcgaggacgtgatcttccaccccgagggcgagttcgacagctacgaggtgaccatccccgagaagctgagcttcagaggcgaggtgcagggcgtggtgagccccgtgagctacctgctgcagctgaagggcaagaagcacgtgctgcacctgtggcccaagagactgctgctgcccagacacctgagagtgttcagcttcaccgagcacggcgagctgctggaggaccacccctacatccccaaggactgcaactacatgggcagcgtgaaggagagcctggacagcaaggccaccatcagcacctgcatgggcggcctgagaggcgtgttcaacatcgacgccaagcactaccagatcgagcccctgaaggccagccccagcttcgagcacgtggtgtacctgctgaagaaggagcagttcggcaaccaggtgtgcggcctgagcgacgacgagatcgagtggcagatggccccctacgagaacaaggccagactgagagacttccccggcagctacaagcaccccaagtacctggagctgatcctgctgttcgaccagagcagatacagattcgtgaacaacaacctgagccaggtgatccacgacgccatcctgctgaccggcatcatggacacctacttccaggacgtgagaatgagaatccacctgaaggccctggaggtgtggaccgacttcaacaagatcagagtgggctaccccgagctggccgaggtgctgggcagattcgtgatctacaagaagagcgtgctgaacgccagactgagcagcgactgggcccacctgtacctgcagagaaagtacaacgacgccctggcctggagcttcggcaaggtgtgcagcctggagtacgccggcagcgtgagcaccctgctggacaccaacatcctggcccccgccacctggagcgcccacgagctgggccacgccgtgggcatgagccacgacgagcagtactgccagtgcagaggcagactgaactgcatcatgggcagcggcagaaccggcttcagcaactgcagctacatcagcttcttcaagcacatcagcagcggcgccacctgcctgaacaacatccccggcctgggctacgtgctgaagagatgcggcaacaagatcgtggaggacaacgaggagtgcgactgcggcagcaccgaggagtgccagaaggacagatgctgccagagcaactgcaagctgcagcccggcgccaactgcagcatcggcctgtgctgccacgactgcagattcagacccagcggctacgtgtgcagacaggagggcaacgagtgcgacctggccgagtactgcgacggcaacagcagcagctgccccaacgacgtgtacaagcaggacggcaccccctgcaagtacgagggcagatgcttcagaaagggctgcagaagcagatacatgcagtgccagagcatcttcggccccgacgccatggaggcccccagcgagtgctacgacgccgtgaacctgatcggcgaccagttcggcaactgcgagatcaccggcatcagaaacttcaagaagtgcgagagcgccaacagcatctgcggcagactgcagtgcatcaacgtggagaccatccccgacctgcccgagcacaccaccatcatcagcacccacctgcaggccgagaacctgatgtgctggggcaccggctaccacctgagcatgaagcccatgggcatccccgacctgggcatgatcaacgacggcaccagctgcggcgagggcagagtgtgcttcaagaagaactgcgtgaacagcagcgtgctgcagttcgactgcctgcccgagaagtgcaacaccagaggcgtgtgcaacaacagaaagaactgccactgcatgtacggctgggccccccccttctgcgaggaggtgggctacggcggcagcatcgacagcggcccccccggcctgctgagaggcgccatccccagcagcatctgggtggtgagcatcatcatgttcagactgatcctgctgatcctgagcgtggtgttcgtgttcttcagacaggtgatcggcaaccacctgaagcccaagcaggagaagatgcccctgagcaaggccaagaccgagcaggaggagagcaagaccaagaccgtgcaggaggagagcaagaccaagaccggccaggaggagagcgaggccaagaccggccaggaggagagcaaggccaagaccggccaggaggagagcaaggccaacatcgagagcaagagacccaaggccaagagcgtgaagaagcagaagaagtag

SEQ ID NO: 71822 - DNA, 2346 bp, synthetic construct
  misc_feature 1..2346: note = Description of Artificial Sequence: Synthetic coding sequence
  source 1..2346: mol_type = other DNA
atgagaagcgtgcagatcttcctgagccagtgcagactgctgctgctgctggtgcccaccatgctgctgaagagcctgggcgaggacgtgatcttccaccccgagggcgagttcgacagctacgaggtgaccatccccgagaagctgagcttcagaggcgaggtgcagggcgtggtgagccccgtgagctacctgctgcagctgaagggcaagaagcacgtgctgcacctgtggcccaagagactgctgctgcccagacacctgagagtgttcagcttcaccgagcacggcgagctgctggaggaccacccctacatccccaaggactgcaactacatgggcagcgtgaaggagagcctggacagcaaggccaccatcagcacctgcatgggcggcctgagaggcgtgttcaacatcgacgccaagcactaccagatcgagcccctgaaggccagccccagcttcgagcacgtggtgtacctgctgaagaaggagcagttcggcaaccaggtgtgcggcctgagcgacgacgagatcgagtggcagatggccccctacgagaacaaggccagactgagagacttccccggcagctacaagcaccccaagtacctggagctgatcctgctgttcgaccagagcagatacagattcgtgaacaacaacctgagccaggtgatccacgacgccatcctgctgaccggcatcatggacacctacttccaggacgtgagaatgagaatccacctgaaggccctggaggtgtggaccgacttcaacaagatcagagtgggctaccccgagctggccgaggtgctgggcagattcgtgatctacaagaagagcgtgctgaacgccagactgagcagcgactgggcccacctgtacctgcagagaaagtacaacgacgccctggcctggagcttcggcaaggtgtgcagcctggagtacgccggcagcgtgagcaccctgctggacaccaacatcctggcccccgccacctggagcgcccacgagctgggccacgccgtgggcatgagccacgacgagcagtactgccagtgcagaggcagactgaactgcatcatgggcagcggcagaaccggcttcagcaactgcagctacatcagcttcttcaagcacatcagcagcggcgccacctgcctgaacaacatccccggcctgggctacgtgctgaagagatgcggcaacaagatcgtggaggacaacgaggagtgcgactgcggcagcaccgaggagtgccagaaggacagatgctgccagagcaactgcaagctgcagcccggcgccaactgcagcatcggcctgtgctgccacgactgcagattcagacccagcggctacgtgtgcagacaggagggcaacgagtgcgacctggccgagtactgcgacggcaacagcagcagctgccccaacgacgtgtacaagcaggacggcaccccctgcaagtacgagggcagatgcttcagaaagggctgcagaagcagatacatgcagtgccagagcatcttcggccccgacgccatggaggcccccagcgagtgctacgacgccgtgaacctgatcggcgaccagttcggcaactgcgagatcaccggcatcagaaacttcaagaagtgcgagagcgccaacagcatctgcggcagactgcagtgcatcaacgtggagaccatccccgacctgcccgagcacaccaccatcatcagcacccacctgcaggccgagaacctgatgtgctggggcaccggctaccacctgagcatgaagcccatgggcatccccgacctgggcatgatcaacgacggcaccagctgcggcgagggcagagtgtgcttcaagaagaactgcgtgaacagcagcgtgctgcagttcgactgcctgcccgagaagtgcaacaccagaggcgtgtgcaacaacagaaagaactgccactgcatgtacggctgggccccccccttctgcgaggaggtgggctacggcggcagcatcgacagcggcccccccggcctgctgagaggcgccatccccagcagcatctgggtggtgagcatcatcatgttcagactgatcctgctgatcctgagcgtggtgttcgtgttcttcagacaggtgatcggcaaccacctgaagcccaagcaggagaagatgcccctgagcaaggccaagaccgagcaggaggagagcaagaccaagaccgtgcaggaggagagcaagaccaagaccggccaggaggagagcgaggccaagaccggccaggaggagagcaaggccaacatcgagagcaagagacccaaggccaagagcgtgaagaagcagaagaagtag

SEQ ID NO: 71823 - DNA, 540 bp, synthetic construct
  misc_feature 1..540: note = Description of Artificial Sequence: Synthetic coding sequence
  source 1..540: mol_type = other DNA
atgggctggagacccagaagagccagaggcacccccctgctgctgctgctgctgctgctgctgctgtggcccgtgcccggcgccggcgtgctgcagggccacatccccggccagcccgtgaccccccactgggtgctggacggccagccctggagaaccgtgagcctggaggagcccgtgagcaagcccgacatgggcctggtggccctggaggccgagggccaggagctgctgctggagctggagaagaaccagctgctggcccccggctacatcgagacccactacggccccgacggccagcccgtggtgctggcccccaaccacaccgtgagatgcttccacggcctgtgggacgccccccccgagggcagaagagaggccagaagaaccagaaagtacctggagctgtacatcgtggccgaccacaccctgttcctgaccagacacagaaacctgaaccacaccaagcagagactgctggaggtggccaactacgtggaccaggtggtgaacagcgccggcgacgcccacggctag

SEQ ID NO: 71824 - DNA, 336 bp, synthetic construct
  misc_feature 1..336: note = Description of Artificial Sequence: Synthetic coding sequence
  source 1..336: mol_type = other DNA
atgggctggagacccagaagagccagaggcacccccctgctgctgctgctgctgctgctgctgctgtggcccgtgcccggcgccggcgtgctgcagggccacatccccggccagcccgtgaccccccactgggtgctggacggccagccctggagaaccgtgagcctggaggagcccgtgagcaagcccgacatgggcctggtggccctggaggccgagggccaggagctgctgctggagctggagaagaaccagctgctggcccccggctacatcgagacccactacggccccgcccaggagtgcagagacctgtgctgcttcgcccacaactag

SEQ ID NO: 71825 - DNA, 2364 bp, synthetic construct
  misc_feature 1..2364: note = Description of Artificial Sequence: Synthetic coding sequence
  source 1..2364: mol_type = other DNA
atgggctggagacccagaagagccagaggcacccccctgctgctgctgctgctgctgctgctgctgtggcccgtgcccggcgccggcgtgctgcagggccacatccccggccagcccgtgaccccccactgggtgctggacggccagccctggagaaccgtgagcctggaggagcccgtgagcaagcccgacatgggcctggtggccctggaggccgagggccaggagctgctgctggagctggagaagaaccacagactgctggcccccggctacatcgagacccactacggccccgacggccagcccgtggtgctggcccccaaccacaccgaccactgccactaccagggcagagtgagaggcttccccgacagctgggtggtgctgtgcacctgcagcggcatgagcggcctgatcaccctgagcagaaacgccagctactacctgagaccctggccccccagaggcagcaaggacttcagcacccacgagatcttcagaatggagcagctgctgacctggaagggcacctgcggccacagagaccccggcaacaaggccggcatgaccagcctgcccggcggcccccagagcagaggcagaagagaggccagaagaaccagaaagtacctggagctgtacatcgtggccgaccacaccctgttcctgaccagacacagaaacctgaaccacaccaagcagagactgctggaggtggccaactacgtggaccagctgctgagaaccctggacatccaggtggccctgaccggcctggaggtgtggaccgagagagacagaagcagagtgacccaggacgccaacgccaccctgtgggccttcctgcagtggagaagaggcctgtgggcccagagaccccacgacagcgcccagctgctgaccggcagagccttccagggcgccaccgtgggcctggcccccgtggagggcatgtgcagagccgagagcagcggcggcgtgagcaccgaccacagcgagctgcccatcggcgccgccgccaccatggcccacgagatcggccacagcctgggcctgagccacgaccccgacggctgctgcgtggaggccgccgccgagagcggcggctgcgtgatggccgccgccaccggccaccccttccccagagtgttcagcgcctgcagcagaagacagctgagagccttcttcagaaagggcggcggcgcctgcctgagcaacgcccccgaccccggcctgcccgtgccccccgccctgtgcggcaacggcttcgtggaggccggcgaggagtgcgactgcggccccggccaggagtgcagagacctgtgctgcttcgcccacaactgcagcctgagacccggcgcccagtgcgcccacggcgactgctgcgtgagatgcctgctgaagcccgccggcgccctgtgcagacaggccatgggcgactgcgacctgcccgagttctgcaccggcaccagcagccactgcccccccgacgtgtacctgctggacggcagcccctgcgccagaggcagcggctactgctgggacggcgcctgccccaccctggagcagcagtgccagcagctgtggggccccggcagccaccccgcccccgaggcctgcttccaggtggtgaacagcgccggcgacgcccacggcaactgcggccaggacagcgagggccacttcctgccctgcgccggcagagacgccctgtgcggcaagctgcagtgccagggcggcaagcccagcctgctggccccccacatggtgcccgtggacagcaccgtgcacctggacggccaggaggtgacctgcagaggcgccctggccctgcccagcgcccagctggacctgctgggcctgggcctggtggagcccggcacccagtgcggccccagaatggtgtgcaacagcaaccacaactgccactgcgcccccggctgggccccccccttctgcgacaagcccggcttcggcggcagcatggacagcggccccgtgcaggccgagaaccacgacaccttcctgctggccatgctgctgagcgtgctgctgcccctgctgcccggcgccggcctggcctggtgctgctacagactgcccggcgcccacctgcagagatgcagctggggctgcagaagagaccccgcctgcagcggccccaaggacggcccccacagagaccaccccctgggcggcgtgcaccccatggagctgggccccaccgccaccggccagccctggcccctggaccccgagaacagccacgagcccagcagccaccccgagaagcccctgcccgccgtgagccccgacccccaggccgaccaggtgcagatgcccagaagctgcctgtggtag

SEQ ID NO: 71826 - DNA, 2442 bp, synthetic construct
  misc_feature 1..2442: note = Description of Artificial Sequence: Synthetic coding sequence
  source 1..2442: mol_type = other DNA
atgggctggagacccagaagagccagaggcacccccctgctgctgctgctgctgctgctgctgctgtggcccgtgcccggcgccggcgtgctgcagggccacatccccggccagcccgtgaccccccactgggtgctggacggccagccctggagaaccgtgagcctggaggagcccgtgagcaagcccgacatgggcctggtggccctggaggccgagggccaggagctgctgctggagctggagaagaaccacagactgctggcccccggctacatcgagacccactacggccccgacggccagcccgtggtgctggcccccaaccacaccgaccactgccactaccagggcagagtgagaggcttccccgacagctgggtggtgctgtgcacctgcagcggcatgagcggcctgatcaccctgagcagaaacgccagctactacctgagaccctggccccccagaggcagcaaggacttcagcacccacgagatcttcagaatggagcagctgctgacctggaagggcacctgcggccacagagaccccggcaacaaggccggcatgaccagcctgcccggcggcccccagagcagaggcagaagagaggccagaagaaccagaaagtacctggagctgtacatcgtggccgaccacaccctgttcctgaccagacacagaaacctgaaccacaccaagcagagactgctggaggtggccaactacgtggaccagctgctgagaaccctggacatccaggtggccctgaccggcctggaggtgtggaccgagagagacagaagcagagtgacccaggacgccaacgccaccctgtgggccttcctgcagtggagaagaggcctgtgggcccagagaccccacgacagcgcccagctgctgaccggcagagccttccagggcgccaccgtgggcctggcccccgtggagggcatgtgcagagccgagagcagcggcggcgtgagcaccgaccacagcgagctgcccatcggcgccgccgccaccatggcccacgagatcggccacagcctgggcctgagccacgaccccgacggctgctgcgtggaggccgccgccgagagcggcggctgcgtgatggccgccgccaccggccaccccttccccagagtgttcagcgcctgcagcagaagacagctgagagccttcttcagaaagggcggcggcgcctgcctgagcaacgcccccgaccccggcctgcccgtgccccccgccctgtgcggcaacggcttcgtggaggccggcgaggagtgcgactgcggccccggccaggagtgcagagacctgtgctgcttcgcccacaactgcagcctgagacccggcgcccagtgcgcccacggcgactgctgcgtgagatgcctgctgaagcccgccggcgccctgtgcagacaggccatgggcgactgcgacctgcccgagttctgcaccggcaccagcagccactgcccccccgacgtgtacctgctggacggcagcccctgcgccagaggcagcggctactgctgggacggcgcctgccccaccctggagcagcagtgccagcagctgtggggccccggcagccaccccgcccccgaggcctgcttccaggtggtgaacagcgccggcgacgcccacggcaactgcggccaggacagcgagggccacttcctgccctgcgccggcagagacgccctgtgcggcaagctgcagtgccagggcggcaagcccagcctgctggccccccacatggtgcccgtggacagcaccgtgcacctggacggccaggaggtgacctgcagaggcgccctggccctgcccagcgcccagctggacctgctgggcctgggcctggtggagcccggcacccagtgcggccccagaatggtgtgccagagcagaagatgcagaaagaacgccttccaggagctgcagagatgcctgaccgcctgccacagccacggcgtgtgcaacagcaaccacaactgccactgcgcccccggctgggccccccccttctgcgacaagcccggcttcggcggcagcatggacagcggccccgtgcaggccgagaaccacgacaccttcctgctggccatgctgctgagcgtgctgctgcccctgctgcccggcgccggcctggcctggtgctgctacagactgcccggcgcccacctgcagagatgcagctggggctgcagaagagaccccgcctgcagcggccccaaggacggcccccacagagaccaccccctgggcggcgtgcaccccatggagctgggccccaccgccaccggccagccctggcccctggaccccgagaacagccacgagcccagcagccaccccgagaagcccctgcccgccgtgagccccgacccccaggccgaccaggtgcagatgcccagaagctgcctgtggtag

SEQ ID NO: 71827 - DNA, 417 bp, synthetic construct
  misc_feature 1..417: note = Description of Artificial Sequence: Synthetic coding sequence
  source 1..417: mol_type = other DNA
atgggctggagacccagaagagccagaggcacccccctgctgctgctgctgctgctgctgctgctgtggcccgtgcccggcgccggcgtgctgcagggccacatccccggccagcccgtgaccccccactgggtgctggacggccagccctggagaaccgtgagcctggaggagcccgtgagcaagcccgacatgggcctggtggccctggaggccgagggccaggagctgctgctggagctggagaagaaccacagactgctggcccccggctacatcgagacccactacggccccgacggccagcccgtggtgctggcccccaaccacaccgtgagatgcttccacggcctgtgggacgccccccccgaggtgcccccccaccacagctacccctacagcagcctgcacagctag

SEQ ID NO: 71828 - DNA, 543 bp, synthetic construct
  misc_feature 1..543: note = Description of Artificial Sequence: Synthetic coding sequence
  source 1..543: mol_type = other DNA
atgggctggagacccagaagagccagaggcacccccctgctgctgctgctgctgctgctgctgctgtggcccgtgcccggcgccggcgtgctgcagggccacatccccggccagcccgtgaccccccactgggtgctggacggccagccctggagaaccgtgagcctggaggagcccgtgagcaagcccgacatgggcctggtggccctggaggccgagggccaggagctgctgctggagctggagaagaaccagctgctggcccccggctacatcgagacccactacggccccgacggccagcccgtggtgctggcccccaaccacaccgtgagatgcttccacggcctgtgggacgccccccccgagggcagaagagaggccagaagaaccagaaagtacctggagctgtacatcgtggccgaccacaccctgttcctgaccagacacagaaacctgaaccacaccaagcagagactgctggaggtggccaactacgtggaccaggagtgcagagacctgtgctgcttcgcccacaactag

SEQ ID NO: 71829 - DNA, 2439 bp, synthetic construct
  misc_feature 1..2439: note = Description of Artificial Sequence: Synthetic coding sequence
  source 1..2439: mol_type = other DNA
atgggctggagacccagaagagccagaggcacccccctgctgctgctgctgctgctgctgctgctgtggcccgtgcccggcgccggcgtgctgcagggccacatccccggccagcccgtgaccccccactgggtgctggacggccagccctggagaaccgtgagcctggaggagcccgtgagcaagcccgacatgggcctggtggccctggaggccgagggccaggagctgctgctggagctggagaagaaccacagactgctggcccccggctacatcgagacccactacggccccgacggccagcccgtggtgctggcccccaaccacaccgaccactgccactaccagggcagagtgagaggcttccccgacagctgggtggtgctgtgcacctgcagcggcatgagcggcctgatcaccctgagcagaaacgccagctactacctgagaccctggccccccagaggcagcaaggacttcagcacccacgagatcttcagaatggagcagctgctgacctggaagggcacctgcggccacagagaccccggcaacaaggccggcatgaccagcctgcccggcggcccccagagcagaggcagaagagaggccagaagaaccagaaagtacctggagctgtacatcgtggccgaccacaccctgttcctgaccagacacagaaacctgaaccacaccaagcagagactgctggaggtggccaactacgtggaccagctgctgagaaccctggacatccaggtggccctgaccggcctggaggtgtggaccgagagagacagaagcagagtgacccaggacgccaacgccaccctgtgggccttcctgcagtggagaagaggcctgtgggcccagagaccccacgacagcgcccagctgctgaccggcagagccttccagggcgccaccgtgggcctggcccccgtggagggcatgtgcagagccgagagcagcggcggcgtgagcaccgaccacagcgagctgcccatcggcgccgccgccaccatggcccacgagatcggccacagcctgggcctgagccacgaccccgacggctgctgcgtggaggccgccgccgagagcggcggctgcgtgatggccgccgccaccggccaccccttccccagagtgttcagcgcctgcagcagaagacagctgagagccttcttcagaaagggcggcggcgcctgcctgagcaacgcccccgaccccggcctgcccgtgccccccgccctgtgcggcaacggcttcgtggaggccggcgaggagtgcgactgcggccccggccaggagtgcagagacctgtgctgcttcgcccacaactgcagcctgagacccggcgcccagtgcgcccacggcgactgctgcgtgagatgcctgctgaagcccgccggcgccctgtgcagacaggccatgggcgactgcgacctgcccgagttctgcaccggcaccagcagccactgcccccccgacgtgtacctgctggacggcagcccctgcgccagaggcagcggctactgctgggacggcgcctgccccaccctggagcagcagtgccagcagctgtggggccccggcagccaccccgcccccgaggcctgcttccaggtggtgaacagcgccggcgacgcccacggcaactgcggccaggacagcgagggccacttcctgccctgcgccggcagagacgccctgtgcggcaagctgcagtgccagggcggcaagcccagcctgctggccccccacatggtgcccgtggacagcaccgtgcacctggacggccaggaggtgacctgcagaggcgccctggccctgcccagcgcccagctggacctgctgggcctgggcctggtggagcccggcacccagtgcggccccagaatggtgtgccagagcagaagatgcagaaagaacgccttccaggagctgcagagatgcctgaccgcctgccacagccacggcgtgtgcaacagcaaccacaactgccactgcgcccccggctgggccccccccttctgcgacaagcccggcttcggcggcagcatggacagcggccccgtgcaggccgagaaccacgacaccttcctgctggccatgctgctgagcgtgctgctgcccctgctgcccggcgccggcctggcctggtgctgctacagactgcccggcgcccacctgcagagatgcagctggggctgcagaagagaccccgcctgcagcggccccaaggacggcccccacagagaccaccccctgggcggcgtgcaccccatggagctgggccccaccgccaccggccagccctggcccctggaccccgagaacagccacgagcccagcagccaccccgagaagcccctgcccgccgtgagccccgacccccaggaccaggtgcagatgcccagaagctgcctgtggtag

SEQ ID NO: 71830 - DNA, 456 bp, synthetic construct
  misc_feature 1..456: note = Description of Artificial Sequence: Synthetic coding sequence
  source 1..456: mol_type = other DNA
atgggctggagacccagaagagccagaggcacccccctgctgctgctgctgctgctgctgctgctgtggcccgtgcccggcgccggcgtgctgcagggccacatccccggccagcccgtgaccccccactgggtgctggacggccagccctggagaaccgtgagcctggaggagcccgtgagcaagcccgacatgggcctggtggccctggaggccgagggccaggagctgctgctggagctggagaagaaccaggacgccctgtgcggcaagctgcagtgccagggcggcaagcccagcctgctggccccccacatggtgcccgtggacagcaccgtgcacctggacggccaggaggtgacctgcagaggcgccctggccctgcccagcgcccagctggacctgctgggcctgggcctggtggagcccggcacccagtgcggccccagaatgtag

SEQ ID NO: 71831 - DNA, 2079 bp, synthetic construct
  misc_feature 1..2079: note = Description of Artificial Sequence: Synthetic coding sequence
  source 1..2079: mol_type = other DNA
atgggctggagacccagaagagccagaggcacccccctgctgctgctgctgctgctgctgctgctgtggcccgtgcccggcgccggcgtgctgcagggccacatccccggccagcccgtgaccccccactgggtgctggacggccagccctggagaaccgtgagcctggaggagcccgtgagcaagcccgacatgggcctggtggccctggaggccgagggccaggagctgctgctggagctggagaagaaccacagactgctggcccccggctacatcgagacccactacggccccgacggccagcccgtggtgctggcccccaaccacaccgaccactgccactaccagggcagagtgagaggcttccccgacagctgggtggtgctgtgcacctgcagcggcatgagcggcctgatcaccctgagcagaaacgccagctactacctgagaccctggccccccagaggcagcaaggacttcagcacccacgagatcttcagaatggagcagctgctgacctggaagggcacctgcggccacagagaccccggcaacaaggccggcatgaccagcctgcccggcggcccccagagcagaggcagaagagaggccagaagaaccagaaagtacctggagctgtacatcgtggccgaccacaccctgttcctgaccagacacagaaacctgaaccacaccaagcagagactgctggaggtggccaactacgtggaccagctgctgagaaccctggacatccaggtggccctgaccggcctggaggtgtggaccgagagagacagaagcagaagacagctgagagccttcttcagaaagggcggcggcgcctgcctgagcaacgcccccgaccccggcctgcccgtgccccccgccctgtgcggcaacggcttcgtggaggccggcgaggagtgcgactgcggccccggccaggagtgcagagacctgtgctgcttcgcccacaactgcagcctgagacccggcgcccagtgcgcccacggcgactgctgcgtgagatgcctgctgaagcccgccggcgccctgtgcagacaggccatgggcgactgcgacctgcccgagttctgcaccggcaccagcagccactgcccccccgacgtgtacctgctggacggcagcccctgcgccagaggcagcggctactgctgggacggcgcctgccccaccctggagcagcagtgccagcagctgtggggccccggcagccaccccgcccccgaggcctgcttccaggtggtgaacagcgccggcgacgcccacggcaactgcggccaggacagcgagggccacttcctgccctgcgccggcagagacgccctgtgcggcaagctgcagtgccagggcggcaagcccagcctgctggccccccacatggtgcccgtggacagcaccgtgcacctggacggccaggaggtgacctgcagaggcgccctggccctgcccagcgcccagctggacctgctgggcctgggcctggtggagcccggcacccagtgcggccccagaatggtgtgccagagcagaagatgcagaaagaacgccttccaggagctgcagagatgcctgaccgcctgccacagccacggcgtgtgcaacagcaaccacaactgccactgcgcccccggctgggccccccccttctgcgacaagcccggcttcggcggcagcatggacagcggccccgtgcaggccgagaaccacgacaccttcctgctggccatgctgctgagcgtgctgctgcccctgctgcccggcgccggcctggcctggtgctgctacagactgcccggcgcccacctgcagagatgcagctggggctgcagaagagaccccgcctgcagcggccccaaggacggcccccacagagaccaccccctgggcggcgtgcaccccatggagctgggccccaccgccaccggccagccctggcccctggaccccgagaacagccacgagcccagcagccaccccgagaagcccctgcccgccgtgagccccgacccccaggaccaggtgcagatgcccagaagctgcctgtggtag

SEQ ID NO: 71832 - DNA, 522 bp, synthetic construct
  misc_feature 1..522: note = Description of Artificial Sequence: Synthetic coding sequence
  source 1..522: mol_type = other DNA
atgggctggagacccagaagagccagaggcacccccctgctgctgctgctgctgctgctgctgctgtggcccgtgcccggcgccggcgtgctgcagggccacatccccggccagcccgtgaccccccactgggtgctggacggccagccctggagaaccgtgagcctggaggagcccgtgagcaagcccgacatgggcctggtggccctggaggccgagggccaggagctgctgctggagctggagaagaaccacagactgctggcccccggctacatcgagacccactacggccccgacggccagcccgtggtgctggcccccaaccacaccgtgagatgcttccacggcctgtgggacgccccccccgaggaccactgccactaccagggcagagtgagaggcttccccgacagctgggtggtgctgtgcacctgcagcggcatgagagccggcgagaagagagccggccccggcagcacctggaactgcaccctgtggcagaccaccccctgcagctag

SEQ ID NO: 71833 - DNA, 291 bp, synthetic construct
  misc_feature 1..291: note = Description of Artificial Sequence: Synthetic coding sequence
  source 1..291: mol_type = other DNA
atgggctggagacccagaagagccagaggcacccccctgctgctgctgctgctgctgctgctgctgtggcccgtgcccggcgccggcgtgctgcagggccacatccccggccagcccgtgaccccccactgggtgctggacggccagccctggagaaccgtgagcctggaggagcccgtgagcaagcccgacatgggcctggtggccctggaggccgagggccaggagctgctgctggagctggagaagaaccagttcgccatcgccaccatcaccgccaccgtgctgtag

SEQ ID NO: 71834 - DNA, 2265 bp, synthetic construct
  misc_feature 1..2265: note = Description of Artificial Sequence: Synthetic coding sequence
  source 1..2265: mol_type = other DNA
atgctgcccggctgcatcttcctgatgatcctgctgatcccccaggtgaaggagaagttcatcctgggcgtggagggccagcagctggtgagacccaagaagctgcccctgatccagaagagagacaccggccacacccacgacgacgacatcctgaagacctacgaggaggagctgctgtacgagatcaagctgaacagaaagaccctggtgctgcacctgctgagaagcagagagttcctgggcagcaactacagcgagaccttctacagcatgaagggcgaggccttcaccagacacccccagatcatggaccactgcttctaccagggcagcatcgtgcacgagtacgacagcgccgccagcatcagcacctgcaacggcctgagaggcttcttcagaatcaacgaccagagatacctgatcgagcccgtgaagtacagcgacgagggcgagcacctggtgttcaagtacaacctgagagtgccctacggcgccaactacagctgcaccgagctgaacttcaccagaaagaccgtgcccggcgacaacgagagcgaggaggacagcaagatcaagggcatccacgacgagaagtacgtggagctgttcatcgtggccgacgacaccgtgtacagaagaaacggccacccccacaacaagctgagaaacagaatctggggcatggtgaacttcgtgaacatgatctacaagaccctgaacatccacgtgaccctggtgggcatcgagatctggacccacgaggacaagatcgagctgtacagcaacatcgagaccaccctgctgagattcagcttctggcaggagaagatcctgaagaccagaaaggacttcgaccacgtggtgctgctgagcggcaagtggctgtacagccacgtgcagggcatcagctaccccggcggcatgtgcctgccctactacagcaccagcatcatcaaggacctgctgcccgacaccaacatcatcgccaacagaatggcccaccagctgggccacaacctgggcatgcagcacgacgagttcccctgcacctgccccagcggcaagtgcgtgatggacagcgacggcagcatccccgccctgaagttcagcaagtgcagccagaaccagtaccaccagtacctgaaggactacaagcccacctgcatgctgaacatccccttcccctacaacttccacgacttccagttctgcggcaacaagaagctggacgagggcgaggagtgcgactgcggccccgcccaggagtgcaccaacccctgctgcgacgcccacacctgcgtgctgaagcccggcttcacctgcgccgagggcgagtgctgcgagagctgccagatcaagaaggccggcagcatctgcagacccgccaaggacgagtgcgacttccccgagatgtgcaccggccacagccccgcctgccccaaggaccagttcagagtgaacggcttcccctgcaagaacagcgagggctactgcttcatgggcaagtgccccaccagagaggaccagtgcagcgagctgttcgacgacgaggccatcgagagccacgacatctgctacaagatgaacaccaagggcaacaagttcggctactgcaagaacaaggagaacagattcctgccctgcgaggagaaggacgtgagatgcggcaagatctactgcaccggcggcgagctgagcagcctgctgggcgaggacaagacctaccacctgaaggacccccagaagaacgccaccgtgaagtgcaagaccatcttcctgtaccacgacagcaccgacatcggcctggtggccagcggcaccaagtgcggcgagggcatggtgtgcaacaacggcgagtgcctgaacatggagaaggtgtacatcagcaccaactgccccagccagtgcaacgagaaccccgtggacggccacggcctgcagtgccactgcgaggagggccaggcccccgtggcctgcgaggagaccctgcacgtgaccaacatcaccatcctggtggtggtgctggtgctggtgatcgtgggcatcggcgtgctgatcctgctggtgagatacagaaagtgcatcaagctgaagcaggtgcagagcccccccaccgagaccctgggcgtggagaacaagggctacttcggcgacgagcagcagatcagaaccgagcccatcctgcccgagatccacttcctgaacaagcccgccagcaaggacagcagaggcatcgccgaccccaaccagagcgccaagtag

SEQ ID NO: 71835 - DNA, 1656 bp, synthetic construct
  misc_feature 1..1656: note = Description of Artificial Sequence: Synthetic coding sequence
  source 1..1656: mol_type = other DNA
gtgtgccccagaagctacttcctggagggcagaggcagctacagcttcctgagcctgttcagcaccagccccgccccctacagaagaaacggccacccccacaacaagctgagaaacagaatctggggcatggtgaacttcgtgaacatgatctacaagaccctgaacatccacgtgaccctggtgggcatcgagatctggacccacgaggacaagatcgagctgtacagcaacatcgagaccaccctgctgagattcagcttctggcaggagaagatcctgaagaccagaaaggacttcgaccacgtggtgctgctgagcggcaagtggctgtacagccacgtgcagggcatcagctaccccggcggcatgtgcctgccctactacagcaccagcatcatcaaggacctgctgcccgacaccaacatcatcgccaacagaatggcccaccagctgggccacaacctgggcatgcagcacgacgagttcccctgcacctgccccagcggcaagtgcgtgatggacagcgacggcagcatccccgccctgaagttcagcaagtgcagccagaaccagtaccaccagtacctgaaggactacaagcccacctgcatgctgaacatccccttcccctacaacttccacgacttccagttctgcggcaacaagaagctggacgagggcgaggagtgcgactgcggccccgcccaggagtgcaccaacccctgctgcgacgcccacacctgcgtgctgaagcccggcttcacctgcgccgagggcgagtgctgcgagagctgccagatcaagaaggccggcagcatctgcagacccgccaaggacgagtgcgacttccccgagatgtgcaccggccacagccccgcctgccccaaggaccagttcagagtgaacggcttcccctgcaagaacagcgagggctactgcttcatgggcaagtgccccaccagagaggaccagtgcagcgagctgttcgacgacgaggccatcgagagccacgacatctgctacaagatgaacaccaagggcaacaagttcggctactgcaagaacaaggagaacagattcctgccctgcgaggagaaggacgtgagatgcggcaagatctactgcaccggcggcgagctgagcagcctgctgggcgaggacaagacctaccacctgaaggacccccagaagaacgccaccgtgaagtgcaagaccatcttcctgtaccacgacagcaccgacatcggcctggtggccagcggcaccaagtgcggcgagggcatggtgtgcaacaacggcgagtgcctgaacatggagaaggtgtacatcagcaccaactgccccagccagtgcaacgagaaccccgtggacggccacggcctgcagtgccactgcgaggagggccaggcccccgtggcctgcgaggagaccctgcacgtgaccaacatcaccatcctggtggtggtgctggtgctggtgatcgtgggcatcggcgtgctgatcctgctggtgagatacagaaagtgcatcaagctgaagcaggtgcagagcccccccaccgagaccctgggcgtggagaacaagggctacttcggcgacgagcagcagatcagaaccgagcccatcctgcccgagatccacttcctgaactag

SEQ ID NO: 71836 - DNA, 2475 bp, synthetic construct
  misc_feature 1..2475: note = Description of Artificial Sequence: Synthetic coding sequence
  source 1..2475: mol_type = other DNA
atgagaggcctgggcctgtggctgctgggcgccatgatgctgcccgccatcgcccccagcagaccctgggccctgatggagcagtacgaggtggtgctgccctggagactgcccggccccagagtgagaagagccctgcccagccacctgggcctgcaccccgagagagtgagctacgtgctgggcgccaccggccacaacttcaccctgcacctgagaaagaacagagacctgctgggcagcggctacaccgagacctacaccgccgccaacggcagcgaggtgaccgagcagcccagaggccaggaccactgcttctaccagggccacgtggagggctaccccgacagcgccgccagcctgagcacctgcgccggcctgagaggcttcttccaggtgggcagcgacctgcacctgatcgagcccctggacgagggcggcgagggcggcagacacgccgtgtaccaggccgagcacctgctgcagaccgccggcacctgcggcgtgagcgacgacagcctgggcagcctgctgggccccagaaccgccgccgtgttcagacccagacccggcgacagcctgcccagcagagagaccagatacgtggagctgtacgtggtggtggacaacgccgagttccagatgctgggcagcgaggccgccgtgagacacagagtgctggaggtggtgaaccacgtggacaagctgtaccagaagctgaacttcagagtggtgctggtgggcctggagatctggaacagccaggacagattccacgtgagccccgaccccagcgtgaccctggagaacctgctgacctggcaggccagacagagaaccagaagacacctgcacgacaacgtgcagctgatcaccggcgtggacttcaccggcaccaccgtgggcttcgccagagtgagcgccatgtgcagccacagcagcggcgccgtgaaccaggaccacagcaagaaccccgtgggcgtggcctgcaccatggcccacgagatgggccacaacctgggcatggaccacgacgagaacgtgcagggctgcagatgccaggagagattcgaggccggcagatgcatcatggccggcagcatcggcagcagcttccccagaatgttcagcgactgcagccaggcctacctggagagcttcctggagagaccccagagcgtgtgcctggccaacgcccccgacctgagccacctggtgggcggccccgtgtgcggcaacctgttcgtggagagaggcgagcagtgcgactgcggcccccccgaggactgcagaaacagatgctgcaacagcaccacctgccagctggccgagggcgcccagtgcgcccacggcacctgctgccaggagtgcaaggtgaagcccgccggcgagctgtgcagacccaagaaggacatgtgcgacctggaggagttctgcgacggcagacaccccgagtgccccgaggacgccttccaggagaacggcaccccctgcagcggcggctactgctacaacggcgcctgccccaccctggcccagcagtgccaggccttctggggccccggcggccaggccgccgaggagagctgcttcagctacgacatcctgcccggctgcaaggccagcagatacagagccgacatgtgcggcgtgctgcagtgcaagggcggccagcagcccctgggcagagccatctgcatcgtggacgtgtgccacgccctgaccaccgaggacggcaccgcctacgagcccgtgcccgagggcaccagatgcggccccgagaaggtgtgctggaagggcagatgccaggacctgcacgtgtacagaagcagcaactgcagcgcccagtgccacaaccacggcgtgtgcaaccacaagcaggagtgccactgccacgccggctgggcccccccccactgcgccaagctgctgaccgaggtgcacgccgccagcggcagcctgcccgtgttcgtggtggtggtgctggtgctgctggccgtggtgctggtgaccctggccggcatcatcgtgtacagaaaggccagaagcagaatcctgagcagaaacgtggcccccaagaccaccatgggcagaagcaaccccctgttccaccaggccgccagcagagtgcccgccaagggcggcgcccccgcccccagcagaggcccccaggagctggtgcccaccacccaccccggccagcccgccagacaccccgccagcagcgtggccctgaagagacccccccccgccccccccgtgaccgtgagcagcccccccttccccgtgcccgtgtacaccagacaggcccccaagcaggtgatcaagcccaccttcgccccccccgtgccccccgtgaagcccggcgccggcgccgccaaccccggccccgccgagggcgccgtgggccccaaggtggccctgaagccccccatccagagaaagcagggcgccggcgcccccaccgccccctag

SEQ ID NO: 71837 - DNA, 2202 bp, synthetic construct
  misc_feature 1..2202: note = Description of Artificial Sequence: Synthetic coding sequence
  source 1..2202: mol_type = other DNA
atgagaggcctgggcctgtggctgctgggcgccatgatgctgcccggccccgcccccagagagggcgagctgagaccctggggccacagagcccagctgcaccccccccccgccgaggagcagggccccgccggcctgagactgcacagagacctgtacggctgccagtggctgagaggcgacggcgccgccagcagagccggccccctgctgctgcccggccccagaagaggcgtgcccggcctgagcagacagccccagcacctgtgcagaccccaggtgggcagcgacctgcacctgatcgagcccctggacgagggcggcgagggcggcagacacgccgtgtaccaggccgagcacctgctgcagaccgccggcacctgcggcgtgagcgacgacagcctgggcagcctgctgggccccagaaccgccgccgtgttcagacccagacccggcgacagcctgcccagcagagagaccagatacgtggagctgtacgtggtggtggacaacgccgagttccagatgctgggcagcgaggccgccgtgagacacagagtgctggaggtggtgaaccacgtggacaagctgtaccagaagctgaacttcagagtggtgctggtgggcctggagatctggaacagccaggacagattccacgtgagccccgaccccagcgtgaccctggagaacctgctgacctggcaggccagacagagaaccagaagacacctgcacgacaacgtgcagctgatcaccggcgtggacttcaccggcaccaccgtgggcttcgccagagtgagcgccatgtgcagccacagcagcggcgccgtgaaccaggaccacagcaagaaccccgtgggcgtggcctgcaccatggcccacgagatgggccacaacctgggcatggaccacgacgagaacgtgcagggctgcagatgccaggagagattcgaggccggcagatgcatcatggccggcagcatcggcagcagcttccccagaatgttcagcgactgcagccaggcctacctggagagcttcctggagagaccccagagcgtgtgcctggccaacgcccccgacctgagccacctggtgggcggccccgtgtgcggcaacctgttcgtggagagaggcgagcagtgcgactgcggcccccccgaggactgcagaaacagatgctgcaacagcaccacctgccagctggccgagggcgcccagtgcgcccacggcacctgctgccaggagtgcaaggtgaagcccgccggcgagctgtgcagacccaagaaggacatgtgcgacctggaggagttctgcgacggcagacaccccgagtgccccgaggacgccttccaggagaacggcaccccctgcagcggcggctactgctacaacggcgcctgccccaccctggcccagcagtgccaggccttctggggccccggcggccaggccgccgaggagagctgcttcagctacgacatcctgcccggctgcaaggccagcagatacagagccgacatgtgcggcgtgctgcagtgcaagggcggccagcagcccctgggcagagccatctgcatcgtggacgtgtgccacgccctgaccaccgaggacggcaccgcctacgagcccgtgcccgagggcaccagatgcggccccgagaaggtgtgcaaccacaagcaggagtgccactgccacgccggctgggcccccccccactgcgccaagctgctgaccgaggtgcacgccgccagcggcagcctgcccgtgttcgtggtggtggtgctggtgctgctggccgtggtgctggtgaccctggccggcatcatcgtgtacagaaaggccagaagcagaatcctgagcagaaacgtggcccccaagaccaccatgggcagaagcaaccccctgttccaccaggccgccagcagagtgcccgccaagggcggcgcccccgcccccagcagaggcccccaggagctggtgcccaccacccaccccggccagcccgccagacaccccgccagcagcgtggccctgaagagacccccccccgccccccccgtgaccgtgagcagcccccccttccccgtgcccgtgtacaccagacaggcccccaagcagggcgccgtgggccccaaggtggccctgaagccccccatccagagaaagcagggcgccggcgcccccaccgccccctag

SEQ ID NO: 71838 - DNA, 2229 bp, synthetic construct
  misc_feature 1..2229: note = Description of Artificial Sequence: Synthetic coding sequence
  source 1..2229: mol_type = other DNA
atgagaggcctgggcctgtggctgctgggcgccatgatgctgcccgccatcgcccccagcagaccctgggccctgatggagcagtacgaggtggtgctgccctggagactgcccggccccagagtgagaagagccctgcccagccacctgggcctgcaccccgagagagtgagctacgtgctgggcgccaccggccacaacttcaccctgcacctgagaaagaacagagacctgctgggcagcggctacaccgagacctacaccgccgccaacggcagcgaggtgaccgagcagcccagaggccaggaccactgcttctaccagggccacgtggagggctaccccgacagcgccgccagcctgagcacctgcgccggcctgagaggcttcttccaggtgggcagcgacctgcacctgatcgagcccctggacgagggcggcgagggcggcagacacgccgtgtaccaggccgagcacctgctgcagaccgccggcacctgcggcgtgagcgacgacagcctgggcagcctgctgggccccagaaccgccgccgtgttcagacccagacccggcgacagcctgcccagcagagagaccagatacgtggagctgtacgtggtggtggacaacgccgagttccagatgctgggcagcgaggccgccgtgagacacagagtgctggaggtggtgaaccacgtggacaagctgtaccagaagctgaacttcagagtggtgctggtgggcctggagatctggaacagccaggacagattccacgtgagccccgaccccagcgtgaccctggagaacctgctgacctggcaggccagacagagaaccagaagacacctgcacgacaacgtgcagctgatcaccggcgtggacttcaccggcaccaccgtgggcttcgccagagtgagcgccatgtgcagccacagcagcggcgccgtgaaccaggaccacagcaagaaccccgtgggcgtggcctgcaccatggcccacgagatgggccacaacctgggcatggaccacgacgagaacgtgcagggctgcagatgccaggagagattcgaggccggcagatgcatcatggccggcagcatcggcagcagcttccccagaatgttcagcgactgcagccaggcctacctggagagcttcctggagagaccccagagcgtgtgcctggccaacgcccccgacctgagccacctggtgggcggccccgtgtgcggcaacctgttcgtggagagaggcgagcagtgcgactgcggcccccccgaggactgcagaaacagatgctgcaacagcaccacctgccagctggccgagggcgcccagtgcgcccacggcacctgctgccaggagtgcaaggtgaagcccgccggcgagctgtgcagacccaagaaggacatgtgcgacctggaggagttctgcgacggcagacaccccgagtgccccgaggacgccttccaggagaacggcaccccctgcagcggcggctactgctacaacggcgcctgccccaccctggcccagcagtgccaggccttctggggccccggcggccaggccgccgaggagagctgcttcagctacgacatcctgcccggctgcaaggccagcagatacagagccgacatgtgcggcgtgctgcagtgcaagggcggccagcagcccctgggcagagccatctgcatcgtggacgtgtgccacgccctgaccaccgaggacggcaccgcctacgagcccgtgcccgagggcaccagatgcggccccgagaaggtgtgctggaagggcagatgccaggacctgcacgtgtacagaagcagcaactgcagcgcccagtgccacaaccacggcgtgtgcaaccacaagcaggagtgccactgccacgccggctgggcccccccccactgcgccaagctgctgaccgaggtgcacgccggctgccagcccagagccggccagggcagaggcagcagccccatccagggcccccccagagccggcccccaccacccccccggccccgccagacccacccccggcctgctgggcggcagcgaggaggccgccccctgcagcagcggccactgcgtgcagcccaccctgcccagcagctgcctgcaccccgccggcaccaaggccggccaccaggccaacgtgagaacccccagcgcccccagccagaccagaggctggtgcggccagccctggagcagctag

SEQ ID NO: 71839 - DNA, 2460 bp, synthetic construct
  misc_feature 1..2460: note = Description of Artificial Sequence: Synthetic coding sequence
  source 1..2460: mol_type = other DNA
atgggcagcggcgccagattccccagcggcaccctgagagtgagatggctgctgctgctgggcctggtgggccccgtgctgggcgccgccagacccggcttccagcagaccagccacctgagcagctacgagatcatcaccccctggagactgaccagagagagaagagaggcccccagaccctacagcaagcaggtgagctacgtgatccaggccgagggcaaggagcacatcatccacctggagagaaacaaggacctgctgcccgaggacttcgtggtgtacacctacaacaaggagggcaccctgatcaccgaccaccccaacatccagaaccactgccactacagaggctacgtggagggcgtgcacaacagcagcatcgccctgagcgactgcttcggcctgagaggcctgctgcacctggagaacgccagctacggcatcgagcccctgcagaacagcagccacttcgagcacatcatctacagaatggacgacgtgtacaaggagcccctgaagtgcggcgtgagcaacaaggacatcgagaaggagaccgccaaggacgaggaggaggagccccccagcatgacccagctgctgagaagaagaagagccgtgctgccccagaccagatacgtggagctgttcatcgtggtggacaaggagagatacgacatgatgggcagaaaccagaccgccgtgagagaggagatgatcctgctggccaactacctggacagcatgtacatcatgctgaacatcagaatcgtgctggtgggcctggagatctggaccaacggcaacctgatcaacatcgtgggcggcgccggcgacgtgctgggcaacttcgtgcagtggagagagaagttcctgatcaccagaagaagacacgacagcgcccagctggtgctgaagaagggcttcggcggcaccgccggcatggccttcgtgggcaccgtgtgcagcagaagccacgccggcggcatcaacgtgttcggccagatcaccgtggagaccttcgccagcatcgtggcccacgagctgggccacaacctgggcatgaaccacgacgacggcagagactgcagctgcggcgccaagagctgcatcatgaacagcggcgccagcggcagcagaaacttcagcagctgcagcgccgaggacttcgagaagctgaccctgaacaagggcggcaactgcctgctgaacatccccaagcccgacgaggcctacagcgcccccagctgcggcaacaagctggtggacgccggcgaggagtgcgactgcggcacccccaaggagtgcgagctggacccctgctgcgagggcagcacctgcaagctgaagagcttcgccgagtgcgcctacggcgactgctgcaaggactgcagattcctgcccggcggcaccctgtgcagaggcaagaccagcgagtgcgacgtgcccgagtactgcaacggcagcagccagttctgccagcccgacgtgttcatccagaacggctacccctgccagaacaacaaggcctactgctacaacggcatgtgccagtactacgacgcccagtgccaggtgatcttcggcagcaaggccaaggccgcccccaaggactgcttcatcgaggtgaacagcaagggcgacagattcggcaactgcggcttcagcggcaacgagtacaagaagtgcgccaccggcaacgccctgtgcggcaagctgcagtgcgagaacgtgcaggagatccccgtgttcggcatcgtgcccgccatcatccagacccccagcagaggcaccaagtgctggggcgtggacttccagctgggcagcgacgtgcccgaccccggcatggtgaacgagggcaccaagtgcggcgccggcaagatctgcagaaacttccagtgcgtggacgccagcgtgctgaactacgactgcgacgtgcagaagaagtgccacggccacggcgtgtgcaacagcaacaagaactgccactgcgagaacggctgggccccccccaactgcgagaccaagggctacggcggcagcgtggacagcggccccacctacaacgagatgaacaccgccctgagagacggcctgctggtgttcttcttcctgatcgtgcccctgatcgtgtgcgccatcttcatcttcatcaagagagaccagctgtggagaagctacttcagaaagaagagaagccagacctacgagagcgacggcaagaaccaggccaaccccagcagacagcccggcagcgtgcccagacacgtgagccccgtgaccccccccagagaggtgcccatctacgccaacagattcgccgtgcccacctacgccgccaagcagccccagcagttccccagcagacccccccccccccagcccaaggtgagcagccagggcaacctgatccccgccagacccgcccccgccccccccctgtacagcagcctgacctag

SEQ ID NO: 71840 - DNA, 2904 bp, synthetic construct
  misc_feature 1..2904: note = Description of Artificial Sequence: Synthetic coding sequence
  source 1..2904: mol_type = other DNA
atgcagagagccgtgcccgagggcttcggcagaagaaagctgggcagcgacatgggcaacgccgagagagcccccggcagcagaagcttcggccccgtgcccaccctgctgctgctggccgccgccctgctggccgtgagcgacgccctgggcagacccagcgaggaggacgaggagctggtggtgcccgagctggagagagcccccggccacggcaccaccagactgagactgcacgccttcgaccagcagctggacctggagctgagacccgacagcagcttcctggcccccggcttcaccctgcagaacgtgggcagaaagagcggcagcgagacccccctgcccgagaccgacctggcccactgcttctacagcggcaccgtgaacggcgaccccagcagcgccgccgccctgagcctgtgcgagggcgtgagaggcgccttctacctgctgggcgaggcctacttcatccagcccctgcccgccgccagcgagagactggccaccgccgcccccggcgagaagccccccgcccccctgcagttccacctgctgagaagaaacagacagggcgacgtgggcggcacctgcggcgtggtggacgacgagcccagacccaccggcaaggccgagaccgaggacgaggacgagggcaccgagggcgaggacgagggcgcccagtggagcccccaggaccccgccctgcagggcgtgggccagcccaccggcaccggcagcatcagaaagaagagattcgtgagcagccacagatacgtggagaccatgctggtggccgaccagagcatggccgagttccacggcagcggcctgaagcactacctgctgaccctgttcagcgtggccgccagactgtacaagcaccccagcatcagaaacagcgtgagcctggtggtggtgaagatcctggtgatccacgacgagcagaagggccccgaggtgaccagcaacgccgccctgaccctgagaaacttctgcaactggcagaagcagcacaacccccccagcgacagagacgccgagcactacgacaccgccatcctgttcaccagacaggacctgtgcggcagccagacctgcgacaccctgggcatggccgacgtgggcaccgtgtgcgaccccagcagaagctgcagcgtgatcgaggacgacggcctgcaggccgccttcaccaccgcccacgagctgggccacgtgttcaacatgccccacgacgacgccaagcagtgcgccagcctgaacggcgtgaaccaggacagccacatgatggccagcatgctgagcaacctggaccacagccagccctggagcccctgcagcgcctacatgatcaccagcttcctggacaacggccacggcgagtgcctgatggacaagccccagaaccccatccagctgcccggcgacctgcccggcaccagctacgacgccaacagacagtgccagttcaccttcggcgaggacagcaagcactgccccgacgccgccagcacctgcagcaccctgtggtgcaccggcaccagcggcggcgtgctggtgtgccagaccaagcacttcccctgggccgacggcaccagctgcggcgagggcaagtggtgcatcaacggcaagtgcgtgaacaagaccgacagaaagcacttcgacacccccttccacggcagctggggcatgtggggcccctggggcgactgcagcagaacctgcggcggcggcgtgcagtacaccatgagagagtgcgacaaccccgtgcccaagaacggcggcaagtactgcgagggcaagagagtgagatacagaagctgcaacctggaggactgccccgacaacaacggcaagaccttcagagaggagcagtgcgaggcccacaacgagttcagcaaggccagcttcggcagcggccccgccgtggagtggatccccaagtacgccggcgtgagccccaaggacagatgcaagctgatctgccaggccaagggcatcggctacttcttcgtgctgcagcccaaggtggtggacggcaccccctgcagccccgacagcaccagcgtgtgcgtgcagggccagtgcgtgaaggccggctgcgacagaatcatcgacagcaagaagaagttcgacaagtgcggcgtgtgcggcggcaacggcagcacctgcaagaagatcagcggcagcgtgaccagcgccaagcccggctaccacgacatcatcaccatccccaccggcgccaccaacatcgaggtgaagcagagaaaccagagaggcagcagaaacaacggcagcttcctggccatcaaggccgccgacggcacctacatcctgaacggcgactacaccctgagcaccctggagcaggacatcatgtacaagggcgtggtgctgagatacagcggcagcagcgccgccctggagagaatcagaagcttcagccccctgaaggagcccctgaccatccaggtgctgaccgtgggcaacgccctgagacccaagatcaagtacacctacttcgtgaagaagaagaaggagagcttcaacgccatccccaccttcagcgcctgggtgatcgaggagtggggcgagtgcagcaagagctgcgagctgggctggcagagaagactggtggagtgcagagacatcaacggccagcccgccagcgagtgcgccaaggaggtgaagcccgccagcaccagaccctgcgccgaccacccctgcccccagtggcagctgggcgagtggagcagctgcagcaagacctgcggcaagggctacaagaagagaagcctgaagtgcctgagccacgacggcggcgtgctgagccacgagagctgcgaccccctgaagaagcccaagcacttcatcgacttctgcaccatggccgagtgcagctag

SEQ ID NO: 71841 - DNA, 3312 bp, synthetic construct
  misc_feature 1..3312: note = Description of Artificial Sequence: Synthetic coding sequence
  source 1..3312: mol_type = other DNA
atggcccccgcctgccagatcctgagatgggccctggccctgggcctgggcctgatgttcgaggtgacccacgccttcagaagccaggacgagttcctgagcagcctggagagctacgagatcgccttccccaccagagtggaccacaacggcgccctgctggccttcagcccccccccccccagaagacagagaagaggcaccggcgccaccgccgagagcagactgttctacaaggtggccagccccagcacccacttcctgctgaacctgaccagaagcagcagactgctggccggccacgtgagcgtggagtactggaccagagagggcctggcctggcagagagccgccagaccccactgcctgtacgccggccacctgcagggccaggccagcaccagccacgtggccatcagcacctgcggcggcctgcacggcctgatcgtggccgacgaggaggagtacctgatcgagcccctgcacggcggccccaagggcagcagaagccccgaggagagcggcccccacgtggtgtacaagagaagcagcctgagacacccccacctggacaccgcctgcggcgtgagagacgagaagccctggaagggcagaccctggtggctgagaaccctgaagcccccccccgccagacccctgggcaacgagaccgagagaggccagcccggcctgaagagaagcgtgagcagagagagatacgtggagaccctggtggtggccgacaagatgatggtggcctaccacggcagaagagacgtggagcagtacgtgctggccatcatgaacatcgtggccaagctgttccaggacagcagcctgggcagcaccgtgaacatcctggtgaccagactgatcctgctgaccgaggaccagcccaccctggagatcacccaccacgccggcaagagcctggacagcttctgcaagtggcagaagagcatcgtgaaccacagcggccacggcaacgccatccccgagaacggcgtggccaaccacgacaccgccgtgctgatcaccagatacgacatctgcatctacaagaacaagccctgcggcaccctgggcctggcccccgtgggcggcatgtgcgagagagagagaagctgcagcgtgaacgaggacatcggcctggccaccgccttcaccatcgcccacgagatcggccacaccttcggcatgaaccacgacggcgtgggcaacagctgcggcgccagaggccaggaccccgccaagctgatggccgcccacatcaccatgaagaccaaccccttcgtgtggagcagctgcagcagagactacatcaccagcttcctggacagcggcctgggcctgtgcctgaacaacagaccccccagacaggacttcgtgtaccccaccgtggcccccggccaggcctacgacgccgacgagcagtgcagattccagcacggcgtgaagagcagacagtgcaagtacggcgaggtgtgcagcgagctgtggtgcctgagcaagagcaacagatgcatcaccaacagcatccccgccgccgagggcaccctgtgccagacccacaccatcgacaagggctggtgctacaagagagtgtgcgtgcccttcggcagcagacccgagggcgtggacggcgcctggggcccctggaccccctggggcgactgcagcagaacctgcggcggcggcgtgagcagcagcagcagacactgcgacagccccagacccaccatcggcggcaagtactgcctgggcgagagaagaagacacagaagctgcaacaccgacgactgcccccccggcagccaggacttcagagaggtgcagtgcagcgagttcgacagcatccccttcagaggcaagttctacaagtggaagacctacagaggcggcggcgtgaaggcctgcagcctgacctgcctggccgagggcttcaacttctacaccgagagagccgccgccgtggtggacggcaccccctgcagacccgacaccgtggacatctgcgtgagcggcgagtgcaagcacgtgggctgcgacagagtgctgggcagcgacctgagagaggacaagtgcagagtgtgcggcggcgacggcagcgcctgcgagaccatcgagggcgtgttcagccccgccagccccggcgccggctacgaggacgtggtgtggatccccaagggcagcgtgcacatcttcatccaggacctgaacctgagcctgagccacctggccctgaagggcgaccaggagagcctgctgctggagggcctgcccggcaccccccagccccacagactgcccctggccggcaccaccttccagctgagacagggccccgaccaggtgcagagcctggaggccctgggccccatcaacgccagcctgatcgtgatggtgctggccagaaccgagctgcccgccctgagatacagattcaacgcccccatcgccagagacagcctgcccccctacagctggcactacgccccctggaccaagtgcagcgcccagtgcgccggcggcagccaggtgcaggccgtggagtgcagaaaccagctggacagcagcgccgtggccccccactactgcagcgcccacagcaagctgcccaagagacagagagcctgcaacaccgagccctgcccccccgactgggtggtgggcaactggagcctgtgcagcagaagctgcgacgccggcgtgagaagcagaagcgtggtgtgccagagaagagtgagcgccgccgaggagaaggccctggacgacagcgcctgcccccagcccagaccccccgtgctggaggcctgccacggccccacctgcccccccgagtgggccgccctggactggagcgagtgcacccccagctgcggccccggcctgagacacagagtggtgctgtgcaagagcgccgaccacagagccaccctgccccccgcccactgcagccccgccgccaagccccccgccaccatgagatgcaacctgagaagatgcccccccgccagatgggtggccggcgagtggggcgagtgcagcgcccagtgcggcgtgggccagagacagagaagcgtgagatgcaccagccacaccggccaggccagccacgagtgcaccgaggccctgagaccccccaccacccagcagtgcgaggccaagtgcgacagccccacccccggcgacggccccgaggagtgcaaggacgtgaacaaggtggcctactgccccctggtgctgaagttccagttctgcagcagagcctacttcagacagatgtgctgcaagacctgccacggccactag

SEQ ID NO: 71842 - DNA, 2544 bp, synthetic construct
  misc_feature 1..2544: note = Description of Artificial Sequence: Synthetic coding sequence
  source 1..2544: mol_type = other DNA
caggacgacggcggcctgagcagagcccccggctgcggcgccgtgtgccccggccaccacgagcactgccaggtggccaagctgttccaggacagcagcctgggcagcaccgtgaacatcctggtgaccagactgatcctgctgaccgaggaccagcccaccctggagatcacccaccacgccggcaagagcctggacagcttctgcaagtggcagaagagcatcgtgaaccacagcggccacggcaacgccatccccgagaacggcgtggccaaccacgacaccgccgtgctgatcaccagatacgacatctgcatctacaagaacaagccctgcggcaccctgggcctggcccccgtgggcggcatgtgcgagagagagagaagctgcagcgtgaacgaggacatcggcctggccaccgccttcaccatcgcccacgagatcggccacaccttcggcatgaaccacgacggcgtgggcaacagctgcggcgccagaggccaggaccccgccaagctgatggccgcccacatcaccatgaagaccaaccccttcgtgtggagcagctgcagcagagactacatcaccagcttcctggacagcggcctgggcctgtgcctgaacaacagaccccccagacaggacttcgtgtaccccaccgtggcccccggccaggcctacgacgccgacgagcagtgcagattccagcacggcgtgaagagcagacagtgcaagtacggcgaggtgtgcagcgagctgtggtgcctgagcaagagcaacagatgcatcaccaacagcatccccgccgccgagggcaccctgtgccagacccacaccatcgacaagggctggtgctacaagagagtgtgcgtgcccttcggcagcagacccgagggcgtggacggcgcctggggcccctggaccccctggggcgactgcagcagaacctgcggcggcggcgtgagcagcagcagcagacactgcgacagccccagacccaccatcggcggcaagtactgcctgggcgagagaagaagacacagaagctgcaacaccgacgactgcccccccggcagccaggacttcagagaggtgcagtgcagcgagttcgacagcatccccttcagaggcaagttctacaagtggaagacctacagaggcggcggcgtgaaggcctgcagcctgacctgcctggccgagggcttcaacttctacaccgagagagccgccgccgtggtggacggcaccccctgcagacccgacaccgtggacatctgcgtgagcggcgagtgcaagcacgtgggctgcgacagagtgctgggcagcgacctgagagaggacaagtgcagagtgtgcggcggcgacggcagcgcctgcgagaccatcgagggcgtgttcagccccgccagccccggcgccggctacgaggacgtggtgtggatccccaagggcagcgtgcacatcttcatccaggacctgaacctgagcctgagccacctggccctgaagggcgaccaggagagcctgctgctggagggcctgcccggcaccccccagccccacagactgcccctggccggcaccaccttccagctgagacagggccccgaccaggtgcagagcctggaggccctgggccccatcaacgccagcctgatcgtgatggtgctggccagaaccgagctgcccgccctgagatacagattcaacgcccccatcgccagagacagcctgcccccctacagctggcactacgccccctggaccaagtgcagcgcccagtgcgccggcggcagccaggtgcaggccgtggagtgcagaaaccagctggacagcagcgccgtggccccccactactgcagcgcccacagcaagctgcccaagagacagagagcctgcaacaccgagccctgcccccccgactgggtggtgggcaactggagcctgtgcagcagaagctgcgacgccggcgtgagaagcagaagcgtggtgtgccagagaagagtgagcgccgccgaggagaaggccctggacgacagcgcctgcccccagcccagaccccccgtgctggaggcctgccacggccccacctgcccccccgagtgggccgccctggactggagcgaggtgagcagacccctgcccagcagacccctgggctgccccggcggcgtgagcaccgagacccccctgagaggcctgcaggtgagctgccccctgctgaccagccactggggcagcaccctgagcaccaagagacccttccagctgcagtgcacccccagctgcggccccggcctgagacacagagtggtgctgtgcaagagcgccgaccacagagccaccctgccccccgcccactgcagccccgccgccaagccccccgccaccatgagatgcaacctgagaagatgcccccccgccagatgggtggccggcgagtggggcgagtgcagcgcccagtgcggcgtgggccagagacagagaagcgtgagatgcaccagccacaccggccaggccagccacgagtgcaccgaggcctag

SEQ ID NO: 71843 - DNA, 4530 bp, synthetic construct
  misc_feature 1..4530: note = Description of Artificial Sequence: Synthetic coding sequence
  source 1..4530: mol_type = other DNA
atgccctgcgcccagagaagctggctggccaacctgagcgtggtggcccagctgctgaacttcggcgccctgtgctacggcagacagccccagcccggccccgtgagattccccgacagaagacaggagcacttcatcaagggcctgcccgagtaccacgtggtgggccccgtgagagtggacgccagcggccacttcctgagctacggcctgcactaccccatcaccagcagcagaagaaagagagacctggacggcagcgaggactgggtgtactacagaatcagccacgaggagaaggacctgttcttcaacctgaccgtgaaccagggcttcctgagcaacagctacatcatggagaagagatacggcaacctgagccacgtgaagatgatggccagcagcgcccccctgtgccacctgagcggcaccgtgctgcagcagggcaccagagtgggcaccgccgccctgagcgcctgccacggcctgaccggcttcttccagctgccccacggcgacttcttcatcgagcccgtgaagaagcaccccctggtggagggcggctaccacccccacatcgtgtacagaagacagaaggtgcccgagaccaaggagcccacctgcggcctgaaggacagcgtgaacatcagccagaagcaggagctgtggagagagaagtgggagagacacaacctgcccagcagaagcctgagcagaagaagcatcagcaaggagagatgggtggagaccctggtggtggccgacaccaagatgatcgagtaccacggcagcgagaacgtggagagctacatcctgaccatcatgaacatggtgaccggcctgttccacaaccccagcatcggcaacgccatccacatcgtggtggtgagactgatcctgctggaggaggaggagcagggcctgaagatcgtgcaccacgccgagaagaccctgagcagcttctgcaagtggcagaagagcatcaaccccaagagcgacctgaaccccgtgcaccacgacgtggccgtgctgctgaccagaaaggacatctgcgccggcttcaacagaccctgcgagaccctgggcctgagccacctgagcggcatgtgccagccccacagaagctgcaacatcaacgaggacagcggcctgcccctggccttcaccatcgcccacgagctgggccacagcttcggcatccagcacgacggcaaggagaacgactgcgagcccgtgggcagacacccctacatcatgagcagacagctgcagtacgaccccacccccctgacctggagcaagtgcagcgaggagtacatcaccagattcctggacagaggctggggcttctgcctggacgacatccccaagaagaagggcctgaagagcaaggtgatcgcccccggcgtgatctacgacgtgcaccaccagtgccagctgcagtacggccccaacgccaccttctgccaggaggtggagaacgtgtgccagaccctgtggtgcagcgtgaagggcttctgcagaagcaagctggacgccgccgccgacggcacccagtgcggcgagaagaagtggtgcatggccggcaagtgcatcaccgtgggcaagaagcccgagagcatccccggcggctggggcagatggagcccctggagccactgcagcagaacctgcggcgccggcgtgcagagcgccgagagactgtgcaacaaccccgagcccaagttcggcggcaagtactgcaccggcgagagaaagagatacagactgtgcaacgtgcacccctgcagaagcgaggcccccaccttcagacagatgcagtgcagcgagttcgacaccgtgccctacaagaacgagctgtaccactggttccccatcttcaaccccggctacgtggacatcggcctgatccccaagggcgccagagacatcagagtgatggagatcgagggcgccggcaacttcctggccatcagaagcgaggaccccgagaagtactacctgaacggcggcttcatcatccagtggaacggcaactacaagctggccggcaccgtgttccagtacgacagaaagggcgacctggagaagctgatggccaccggccccaccaacgagagcgtgtggatccagctgctgttccaggtgaccaaccccggcatcaagtacgagtacaccatccagaaggacggcctggacaacgacgtggagcagcagatgtacttctggcagtacggccactggaccgagtgcagcgtgacctgcggcaccggcatcagaagacagaccgcccactgcatcaagaagggcagaggcatggtgaaggccaccttctgcgaccccgagacccagcccaacggcagacagaagaagtgccacgagaaggcctgcccccccagatggtgggccggcgagtgggaggcctgcagcgccacctgcggcccccacggcgagaagaagagaaccgtgctgtgcatccagaccatggtgagcgacgagcaggccctgccccccaccgactgccagcacctgctgaagcccaagaccctgctgagctgcaacagagacatcctgtgccccagcgactggaccgtgggcaactggagcgagtgcagcgtgagctgcggcggcggcgtgagaatcagaagcgtgacctgcgccaagaaccacgacgagccctgcgacgtgaccagaaagcccaacagcagagccctgtgcggcctgcagcagtgccccagcagcagaagagtgctgaagcccaacaagggcaccatcagcaacggcaagaacccccccaccctgaagcccgtgcccccccccaccagcagacccagaatgctgaccacccccaccggccccgagagcatgagcaccagcacccccgccatcagcagccccagccccaccaccgccagcaaggagggcgacctgggcggcaagcagtggcaggacagcagcacccagcccgagctgagcagcagatacctgatcagcaccggcagcaccagccagcccatcctgaccagccagagcctgagcatccagcccagcgaggagaacgtgagcagcagcgacaccggccccaccagcgagggcggcctggtggccaccaccaccagcggcagcggcctgagcagcagcagaaaccccatcacctggcccgtgacccccttctacaacaccctgaccaagggccccgagatggagatccacagcggcagcggcgaggagagagagcagcccgaggacaaggacgagagcaaccccgtgatctggaccaagatcagagtgcccggcaacgacgcccccgtggagagcaccgagatgcccctggccccccccctgacccccgacctgagcagagagagctggtggccccccttcagcaccgtgatggagggcctgctgcccagccagagacccaccaccagcgagaccggcacccccagagtggagggcatggtgaccgagaagcccgccaacaccctgctgcccctgggcggcgaccaccagcccgagcccagcggcaagaccgccaacagaaaccacctgaagctgcccaacaacatgaaccagaccaagagcagcgagcccgtgctgaccgaggaggacgccaccagcctgatcaccgagggcttcctgctgaacgccagcaactacaagcagctgaccaacggccacggcagcgcccactggatcgtgggcaactggagcgagtgcagcaccacctgcggcctgggcgcctactggagaagagtggagtgcagcacccagatggacagcgactgcgccgccatccagagacccgaccccgccaagagatgccacctgagaccctgcgccggctggaaggtgggcaactggagcaagtgcagcagaaactgcagcggcggcttcaagatcagagagatccagtgcgtggacagcagagaccacagaaacctgagacccttccactgccagttcctggccggcatccccccccccctgagcatgagctgcaaccccgagccctgcgaggcctggcaggtggagccctggagccagtgcagcagaagctgcggcggcggcgtgcaggagagaggcgtgttctgccccggcggcctgtgcgactggaccaagagacccaccagcaccatgagctgcaacgagcacctgtgctgccactgggccaccggcaactgggacctgtgcagcaccagctgcggcggcggcttccagaagagaaccgtgcagtgcgtgcccagcgagggcaacaagaccgaggaccaggaccagtgcctgtgcgaccacaagcccagaccccccgagttcaagaagtgcaaccagcaggcctgcaagaagagcgccgacctgctgtgcaccaaggacaagctgagcgccagcttctgccagaccctgaaggccatgaagaagtgcagcgtgcccaccgtgagagccgagtgctgcttcagctgcccccagacccacatcacccacacccagagacagagaagacagagactgctgcagaagagcaaggagctgtag

SEQ ID NO: 71844 - DNA, 4785 bp, synthetic construct
  misc_feature 1..4785: note = Description of Artificial Sequence: Synthetic coding sequence
  source 1..4785: mol_type = other DNA
atgccctgcgcccagagaagctggctggccaacctgagcgtggtggcccagctgctgaacttcggcgccctgtgctacggcagacagccccagcccggccccgtgagattccccgacagaagacaggagcacttcatcaagggcctgcccgagtaccacgtggtgggccccgtgagagtggacgccagcggccacttcctgagctacggcctgcactaccccatcaccagcagcagaagaaagagagacctggacggcagcgaggactgggtgtactacagaatcagccacgaggagaaggacctgttcttcaacctgaccgtgaaccagggcttcctgagcaacagctacatcatggagaagagatacggcaacctgagccacgtgaagatgatggccagcagcgcccccctgtgccacctgagcggcaccgtgctgcagcagggcaccagagtgggcaccgccgccctgagcgcctgccacggcctgaccggcttcttccagctgccccacggcgacttcttcatcgagcccgtgaagaagcaccccctggtggagggcggctaccacccccacatcgtgtacagaagacagaaggtgcccgagaccaaggagcccacctgcggcctgaaggacagcgtgaacatcagccagaagcaggagctgtggagagagaagtgggagagacacaacctgcccagcagaagcctgagcagaagaagcatcagcaaggagagatgggtggagaccctggtggtggccgacaccaagatgatcgagtaccacggcagcgagaacgtggagagctacatcctgaccatcatgaacatggtgaccggcctgttccacaaccccagcatcggcaacgccatccacatcgtggtggtgagactgatcctgctggaggaggaggagcagggcctgaagatcgtgcaccacgccgagaagaccctgagcagcttctgcaagtggcagaagagcatcaaccccaagagcgacctgaaccccgtgcaccacgacgtggccgtgctgctgaccagaaaggacatctgcgccggcttcaacagaccctgcgagaccctgggcctgagccacctgagcggcatgtgccagccccacagaagctgcaacatcaacgaggacagcggcctgcccctggccttcaccatcgcccacgagctgggccacagcttcggcatccagcacgacggcaaggagaacgactgcgagcccgtgggcagacacccctacatcatgagcagacagctgcagtacgaccccacccccctgacctggagcaagtgcagcgaggagtacatcaccagattcctggacagaggctggggcttctgcctggacgacatccccaagaagaagggcctgaagagcaaggtgatcgcccccggcgtgatctacgacgtgcaccaccagtgccagctgcagtacggccccaacgccaccttctgccaggaggtggagaacgtgtgccagaccctgtggtgcagcgtgaagggcttctgcagaagcaagctggacgccgccgccgacggcacccagtgcggcgagaagaagtggtgcatggccggcaagtgcatcaccgtgggcaagaagcccgagagcatccccggcggctggggcagatggagcccctggagccactgcagcagaacctgcggcgccggcgtgcagagcgccgagagactgtgcaacaaccccgagcccaagttcggcggcaagtactgcaccggcgagagaaagagatacagactgtgcaacgtgcacccctgcagaagcgaggcccccaccttcagacagatgcagtgcagcgagttcgacaccgtgccctacaagaacgagctgtaccactggttccccatcttcaaccccgcccacccctgcgagctgtactgcagacccatcgacggccagttcagcgagaagatgctggacgccgtgatcgacggcaccccctgcttcgagggcggcaacagcagaaacgtgtgcatcaacggcatctgcaagatggtgggctgcgactacgagatcgacagcaacgccaccgaggacagatgcggcgtgtgcctgggcgacggcagcagctgccagaccgtgagaaagatgttcaagcagaaggagggcagcggctacgtggacatcggcctgatccccaagggcgccagagacatcagagtgatggagatcgagggcgccggcaacttcctggccatcagaagcgaggaccccgagaagtactacctgaacggcggcttcatcatccagtggaacggcaactacaagctggccggcaccgtgttccagtacgacagaaagggcgacctggagaagctgatggccaccggccccaccaacgagagcgtgtggatccagctgctgttccaggtgaccaaccccggcatcaagtacgagtacaccatccagaaggacggcctggacaacgacgtggagcagcagatgtacttctggcagtacggccactggaccgagtgcagcgtgacctgcggcaccggcatcagaagacagaccgcccactgcatcaagaagggcagaggcatggtgaaggccaccttctgcgaccccgagacccagcccaacggcagacagaagaagtgccacgagaaggcctgcccccccagatggtgggccggcgagtgggaggcctgcagcgccacctgcggcccccacggcgagaagaagagaaccgtgctgtgcatccagaccatggtgagcgacgagcaggccctgccccccaccgactgccagcacctgctgaagcccaagaccctgctgagctgcaacagagacatcctgtgccccagcgactggaccgtgggcaactggagcgagtgcagcgtgagctgcggcggcggcgtgagaatcagaagcgtgacctgcgccaagaaccacgacgagccctgcgacgtgaccagaaagcccaacagcagagccctgtgcggcctgcagcagtgccccagcagcagaagagtgctgaagcccaacaagggcaccatcagcaacggcaagaacccccccaccctgaagcccgtgcccccccccaccagcagacccagaatgctgaccacccccaccggccccgagagcatgagcaccagcacccccgccatcagcagccccagccccaccaccgccagcaaggagggcgacctgggcggcaagcagtggcaggacagcagcacccagcccgagctgagcagcagatacctgatcagcaccggcagcaccagccagcccatcctgaccagccagagcctgagcatccagcccagcgaggagaacgtgagcagcagcgacaccggccccaccagcgagggcggcctggtggccaccaccaccagcggcagcggcctgagcagcagcagaaaccccatcacctggcccgtgacccccttctacaacaccctgaccaagggccccgagatggagatccacagcggcagcggcgaggagagagagcagcccgaggacaaggacgagagcaaccccgtgatctggaccaagatcagagtgcccggcaacgacgcccccgtggagagcaccgagatgcccctggccccccccctgacccccgacctgagcagagagagctggtggccccccttcagcaccgtgatggagggcctgctgcccagccagagacccaccaccagcgagaccggcacccccagagtggagggcatggtgaccgagaagcccgccaacaccctgctgcccctgggcggcgaccaccagcccgagcccagcggcaagaccgccaacagaaaccacctgaagctgcccaacaacatgaaccagaccaagagcagcgagcccgtgctgaccgaggaggacgccaccagcctgatcaccgagggcttcctgctgaacgccagcaactacaagcagctgaccaacggccacggcagcgcccactggatcgtgggcaactggagcgagtgcagcaccacctgcggcctgggcgcctactggagaagagtggagtgcagcacccagatggacagcgactgcgccgccatccagagacccgaccccgccaagagatgccacctgagaccctgcgccggctggaaggtgggcaactggagcaagtgcagcagaaactgcagcggcggcttcaagatcagagagatccagtgcgtggacagcagagaccacagaaacctgagacccttccactgccagttcctggccggcatccccccccccctgagcatgagctgcaaccccgagccctgcgaggcctggcaggtggagccctggagccagtgcagcagaagctgcggcggcggcgtgcaggagagaggcgtgttctgccccggcggcctgtgcgactggaccaagagacccaccagcaccatgagctgcaacgagcacctgtgctgccactgggccaccggcaactgggacctgtgcagcaccagctgcggcggcggcttccagaagagaaccgtgcagtgcgtgcccagcgagggcaacaagaccgaggaccaggaccagtgcctgtgcgaccacaagcccagaccccccgagttcaagaagtgcaaccagcaggcctgcaagaagagcgccgacctgctgtgcaccaaggacaagctgagcgccagcttctgccagaccctgaaggccatgaagaagtgcagcgtgcccaccgtgagagccgagtgctgcttcagctgcccccagacccacatcacccacacccagagacagagaagacagagactgctgcagaagagcaaggagctgtag

SEQ ID NO: 71845 - DNA, 699 bp, synthetic construct
  misc_feature 1..699: note = Description of Artificial Sequence: Synthetic coding sequence
  source 1..699: mol_type = other DNA
atgccctgcgcccagagaagctggctggccaacctgagcgtggtggcccagctgctgaacttcggcgccctgtgctacggcagacagccccagcccggccccgtgagattccccgacagaagacaggagcacttcatcaagggcctgcccgagtaccacgtggtgggccccgtgagagtggacgccagcggccacttcctgagctacggcctgcactaccccatcaccagcagcagaagaaagagagacctggacggcagcgaggactgggtgtactacagaatcagccacgaggagaaggacctgttcttcaacctgaccgtgaaccagggcttcctgagcaacagctacatcatggagaagagatacggcaacctgagccacgtgaagatgatggccagcagcgcccccctgtgccacctgagcggcaccgtgctgcagcagggcaccagagtgggcaccgccgccctgagcgcctgccacggcctgaccggcttcttccagctgccccacggcgacttcttcatcgagcccgtgaagaagcaccccctggtggagggcggctaccacccccacatcgtgtacagaagacagaaggtgcccgagaccaaggagcccacctgcggcctgaagggcatcgtgacccacatgagcagctgggtggaggagagcgtgctgttcttctggctgttctactag

SEQ ID NO: 71846 - DNA, 3675 bp, synthetic construct
  misc_feature 1..3675: note = Description of Artificial Sequence: Synthetic coding sequence
  source 1..3675: mol_type = other DNA
atgaagcccagagccagaggctggagaggcctggccgccctgtggatgctgctggcccaggtggccgagcaggcccccgcctgcgccatgggccccgccgccgccgcccccggcagccccagcgtgcccagaccccccccccccgccgagagacccggctggatggagaagggcgagtacgacctggtgagcgcctacgaggtggaccacagaggcgactacgtgagccacgagatcatgcaccaccagagaagaagaagagccgtgcccgtgagcgaggtggagagcctgcacctgagactgaagggcagcagacacgacttccacatggacctgagaaccagcagcagcctggtggcccccggcttcatcgtgcagaccctgggcaagaccggcaccaagagcgtgcagaccctgccccccgaggacttctgcttctaccagggcagcctgagaagccacagaaacagcagcgtggccctgagcacctgccagggcctgagcggcatgatcagaaccgaggaggccgactacttcctgagacccctgcccagccacctgagctggaagctgggcagagccgcccagggcagcagccccagccacgtgctgtacaagagaagcaccgagccccacgcccccggcgccagcgaggtgctggtgaccagcagaacctgggagctggcccaccagcccctgcacagcagcgacctgagactgggcctgccccagaagcagcacttctgcggcagaagaaagaagtacatgccccagccccccaaggaggacctgttcatcctgcccgacgagtacaagagctgcctgagacacaagagaagcctgctgagaagccacagaaacgaggagctgaacgtggagaccctggtggtggtggacaagaagatgatgcagaaccacggccacgagaacatcaccacctacgtgctgaccatcctgaacatggtgagcgccctgttcaaggacggcaccatcggcggcaacatcaacatcgccatcgtgggcctgatcctgctggaggacgagcagcccggcctggtgatcagccaccacgccgaccacaccctgagcagcttctgccagtggcagagcggcctgatgggcaaggacggcaccagacacgaccacgccatcctgctgaccggcctggacatctgcagctggaagaacgagccctgcgacaccctgggcttcgcccccatcagcggcatgtgcagcaagtacagaagctgcaccatcaacgaggacaccggcctgggcctggccttcaccatcgcccacgagagcggccacaacttcggcatgatccacgacggcgagggcaacatgtgcaagaagagcgagggcaacatcatgagccccaccctggccggcagaaacggcgtgttcagctggagcccctgcagcagacagtacctgcacaagttcctgagcaccgcccaggccatctgcctggccgaccagcccaagcccgtgaaggagtacaagtaccccgagaagctgcccggcgagctgtacgacgccaacacccagtgcaagtggcagttcggcgagaaggccaagctgtgcatgctggacttcaagaaggacatctgcaaggccctgtggtgccacagaatcggcagaaagtgcgagaccaagttcatgcccgccgccgagggcaccatctgcggccacgacatgtggtgcagaggcggccagtgcgtgaagtacggcgacgagggccccaagcccacccacggccactggagcgactggagcagctggagcccctgcagcagaacctgcggcggcggcgtgagccacagaagcagactgtgcaccaaccccaagcccagccacggcggcaagttctgcgagggcagcaccagaaccctgaagctgtgcaacagccagaagtgccccagagacagcgtggacttcagagccgcccagtgcgccgagcacaacagcagaagattcagaggcagacactacaagtggaagccctacacccaggtggaggaccaggacctgtgcaagctgtactgcatcgccgagggcttcgacttcttcttcagcctgagcaacaaggtgaaggacggcaccccctgcagcgaggacagcagaaacgtgtgcatcgacggcatctgcgagagagtgggctgcgacaacgtgctgggcagcgacgccgtggaggacgtgtgcggcgtgtgcaacggcaacaacagcgcctgcaccatccacagaggcctgtacaccaagcaccaccacaccaaccagtactaccacatggtgaccatccccagcggcgccagaagcatcagaatctacgagatgaacgtgagcaccagctacatcagcgtgagaaacgccctgagaagatactacctgaacggccactggaccgtggactggcccggcagatacaagttcagcggcaccaccttcgactacagaagaagctacaacgagcccgagaacctgatcgccaccggccccaccaacgagaccctgatcgtggagctgctgttccagggcagaaaccccggcgtggcctgggagtacagcatgcccagactgggcaccgagaagcagccccccgcccagcccagctacacctgggccatcgtgagaagcgagtgcagcgtgagctgcggcggcggccagatgaccgtgagagagggctgctacagagacctgaagttccaggtgaacatgagcttctgcaaccccaagaccagacccgtgaccggcctggtgccctgcaaggtgagcgcctgcccccccagctggagcgtgggcaactggagcgcctgcagcagaacctgcggcggcggcgcccagagcagacccgtgcagtgcaccagaagagtgcactacgacagcgagcccgtgcccgccagcctgtgcccccagcccgcccccagcagcagacaggcctgcaacagccagagctgcccccccgcctggagcgccggcccctgggccgagtgcagccacacctgcggcaagggctggagaaagagagccgtggcctgcaagagcaccaaccccagcgccagagcccagctgctgcccgacgccgtgtgcaccagcgagcccaagcccagaatgcacgaggcctgcctgctgcagagatgccacaagcccaagaagctgcagtggctggtgagcgcctggagccagtgcagcgtgacctgcgagagaggcacccagaagagattcctgaagtgcgccgagaagtacgtgagcggcaagtacagagagctggccagcaagaagtgcagccacctgcccaagcccagcctggagctggagagagcctgcgcccccctgccctgccccagacacccccccttcgccgccgccggccccagcagaggcagctggttcgccagcccctggagccagtgcaccgccagctgcggcggcggcgtgcagaccagaagcgtgcagtgcctggccggcggcagacccgccagcggctgcctgctgcaccagaagcccagcgccagcctggcctgcaacacccacttctgccccatcgccgagaagaaggacgccttctgcaaggactacttccactggtgctacctggtgccccagcacggcatgtgcagccacaagttctacggcaagcagtgctgcaagacctgcagcaagagcaacctgtag

SEQ ID NO: 71847 - DNA, 2787 bp, synthetic construct
  misc_feature 1..2787: note = Description of Artificial Sequence: Synthetic coding sequence
  source 1..2787: mol_type = other DNA
atgaagcccagagccagaggctggagaggcctggccgccctgtggatgctgctggcccaggtggccgagcaggcccccgcctgcgccatgggccccgccgccgccgcccccggcagccccagcgtgcccagaccccccccccccgccgagagacccggctggatggagaagggcgagtacgacctggtgagcgcctacgaggtggaccacagaggcgactacgtgagccacgagatcatgcaccaccagagaagaagaagagccgtgcccgtgagcgaggtggagagcctgcacctgagactgaagggcagcagacacgacttccacatggacctgagaaccagcagcagcctggtggcccccggcttcatcgtgcagaccctgggcaagaccggcaccaagagcgtgcagaccctgccccccgaggacttctgcttctaccagggcagcctgagaagccacagaaacagcagcgtggccctgagcacctgccagggcctgagcggcatgatcagaaccgaggaggccgactacttcctgagacccctgcccagccacctgagctggaagctgggcagagccgcccagggcagcagccccagccacgtgctgtacaagagaagcaccgagccccacgcccccggcgccagcgaggtgctggtgaccagcagaacctgggagctggcccaccagcccctgcacagcagcgacctgagactgggcctgccccagaagcagcacttctgcggcagaagaaagaagtacatgccccagccccccaaggaggacctgttcatcctgcccgacgagtacaagagctgcctgagacacaagagaagcctgctgagaagccacagaaacgaggagctgaacgtggagaccctggtggtggtggacaagaagatgatgcagaaccacggccacgagaacatcaccacctacgtgctgaccatcctgaacatggtgagcgccctgttcaaggacggcaccatcggcggcaacatcaacatcgccatcgtgggcctgatcctgctggaggacgagcagcccggcctggtgatcagccaccacgccgaccacaccctgagcagcttctgccagtggcagagcggcctgatgggcaaggacggcaccagacacgaccacgccatcctgctgaccggcctggacatctgcagctggaagaacgagccctgcgacaccctgggcttcgcccccatcagcggcatgtgcagcaagtacagaagctgcaccatcaacgaggacaccggcctgggcctggccttcaccatcgcccacgagagcggccacaacttcggcatgatccacgacggcgagggcaacatgtgcaagaagagcgagggcaacatcatgagccccaccctggccggcagaaacggcgtgttcagctggagcccctgcagcagacagtacctgcacaagttcctgagcaccgcccaggccatctgcctggccgaccagcccaagcccgtgaaggagtacaagtaccccgagaagctgcccggcgagctgtacgacgccaacacccagtgcaagtggcagttcggcgagaaggccaagctgtgcatgctggacttcaagaaggacatctgcaaggccctgtggtgccacagaatcggcagaaagtgcgagaccaagttcatgcccgccgccgagggcaccatctgcggccacgacatgtggtgcagaggcggccagtgcgtgaagtacggcgacgagggccccaagcccacccacggccactggagcgactggagcagctggagcccctgcagcagaacctgcggcggcggcgtgagccacagaagcagactgtgcaccaaccccaagcccagccacggcggcaagttctgcgagggcagcaccagaaccctgaagctgtgcaacagccagaagtgccccagagacagcgtggacttcagagccgcccagtgcgccgagcacaacagcagaagattcagaggcagacactacaagtggaagccctacacccaggtggaggaccaggacctgtgcaagctgtactgcatcgccgagggcttcgacttcttcttcagcctgagcaacaaggtgaaggacggcaccccctgcagcgaggacagcagaaacgtgtgcatcgacggcatctgcgagagagtgggctgcgacaacgtgctgggcagcgacgccgtggaggacgtgtgcggcgtgtgcaacggcaacaacagcgcctgcaccatccacagaggcctgtacaccaagcaccaccacaccaaccagtactaccacatggtgaccatccccagcggcgccagaagcatcagaatctacgagatgaacgtgagcaccagctacatcagcgtgagaaacgccctgagaagatactacctgaacggccactggaccgtggactggcccggcagatacaagttcagcggcaccaccttcgactacagaagaagctacaacgagcccgagaacctgatcgccaccggccccaccaacgagaccctgatcgtggagctgctgttccagggcagaaaccccggcgtggcctgggagtacagcatgcccagactgggcaccgagaagcagccccccgcccagcccagctacacctgggccatcgtgagaagcgagtgcagcgtgagctgcggcggcggccagatgaccgtgagagagggctgctacagagacttcctgtacttcatgttctacctgagccagctgttcgccagcgagtgccccttcaagaacaccctgctgcacgccttcctgtgcaagtag

SEQ ID NO: 71848 - DNA, 3288 bp, synthetic construct
  misc_feature 1..3288: note = Description of Artificial Sequence: Synthetic coding sequence
  source 1..3288: mol_type = other DNA
atgtgcgacggcgccctgctgccccccctggtgctgcccgtgctgctgctgctggtgtggggcctggaccccggcaccgccgtgggcgacgccgccgccgacgtggaggtggtgctgccctggagagtgagacccgacgacgtgcacctgccccccctgcccgccgcccccggccccagaagaagaagaagacccagaaccccccccgccgcccccagagccagacccggcgagagagccctgctgctgcacctgcccgccttcggcagagacctgtacctgcagctgagaagagacctgagattcctgagcagaggcttcgaggtggaggaggccggcgccgccagaagaagaggcagacccgccgagctgtgcttctacagcggcagagtgctgggccaccccggcagcctggtgagcctgagcgcctgcggcgccgccggcggcctggtgggcctgatccagctgggccaggagcaggtgctgatccagcccctgaacaacagccagggccccttcagcggcagagagcacctgatcagaagaaagtggagcctgacccccagccccagcgccgaggcccagagacccgagcagctgtgcaaggtgctgaccgagaagaagaagcccacctggggcagacccagcagagactggagagagagaagaaacgccatcagactgaccagcgagcacaccgtggagaccctggtggtggccgacgccgacatggtgcagtaccacggcgccgaggccgcccagagattcatcctgaccgtgatgaacatggtgtacaacatgttccagcaccagagcctgggcatcaagatcaacatccaggtgaccaagctggtgctgctgagacagagacccgccaagctgagcatcggccaccacggcgagagaagcctggagagcttctgccactggcagaacgaggagtacggcggcgccagatacctgggcaacaaccaggtgcccggcggcaaggacgacccccccctggtggacgccgccgtgttcgtgaccagaaccgacttctgcgtgcacaaggacgagccctgcgacaccgtgggcatcgcctacctgggcggcgtgtgcagcgccaagagaaagtgcgtgctggccgaggacaacggcctgaacctggccttcaccatcgcccacgagctgggccacaacctgggcatgaaccacgacgacgaccacagcagctgcgccggcagaagccacatcatgagcggcgagtgggtgaagggcagaaaccccagcgacctgagctggagcagctgcagcagagacgacctggagaacttcctgaagagcaaggtgagcacctgcctgctggtgaccgaccccagaagccagcacaccgtgagactgccccacaagctgcccggcatgcactacagcgccaacgagcagtgccagatcctgttcggcatgaacgccaccttctgcagaaacatggagcacctgatgtgcgccggcctgtggtgcctggtggagggcgacaccagctgcaagaccaagctggacccccccctggacggcaccgagtgcggcgccgacaagtggtgcagagccggcgagtgcgtgagcaagacccccatccccgagcacgtggacggcgactggagcccctggggcgcctggagcatgtgcagcagaacctgcggcaccggcgccagattcagacagagaaagtgcgacaaccccccccccggccccggcggcacccactgccccggcgccagcgtggagcacgccgtgtgcgagaacctgccctgccccaagggcctgcccagcttcagagaccagcagtgccaggcccacgacagactgagccccaagaagaagggcctgctgaccgccgtggtggtggacgacaagccctgcgagctgtactgcagccccctgggcaaggagagccccctgctggtggccgacagagtgctggacggcaccccctgcggcccctacgagaccgacctgtgcgtgcacggcaagtgccagaagatcggctgcgacggcatcatcggcagcgccgccaaggaggacagatgcggcgtgtgcagcggcgacggcaagacctgccacctggtgaagggcgacttcagccacgccagaggcaccgccctgaaggacagcggcaagggcagcatcaacagcgactggaagatcgagctgcccggcgagttccagatcgccggcaccaccgtgagatacgtgagaagaggcctgtgggagaagatcagcgccaagggccccaccaagctgcccctgcacctgatggtgctgctgttccacgaccaggactacggcatccactacgagtacaccgtgcccgtgaacagaaccgccgagaaccagagcgagcccgagaagccccaggacagcctgttcatctggacccacagcggctgggagggctgcagcgtgcagtgcggcggcggcgagagaagaaccatcgtgagctgcaccagaatcgtgaacaagaccaccaccctggtgaacgacagcgactgcccccaggccagcagacccgagccccaggtgagaagatgcaacctgcacccctgccagagcagatgggtggccggcccctggagcccctgcagcgccacctgcgagaagggcttccagcacagagaggtgacctgcgtgtaccagctgcagaacggcacccacgtggccaccagacccctgtactgccccggccccagacccgccgccgtgcagagctgcgagggccaggactgcctgagcatctgggaggccagcgagtggagccagtgcagcgccagctgcggcaagggcgtgtggaagagaaccgtggcctgcaccaacagccagggcaagtgcgacgccagcaccagacccagagccgaggaggcctgcgaggactacagcggctgctacgagtggaagaccggcgactggagcacctgcagcagcacctgcggcaagggcctgcagagcagagtggtgcagtgcatgcacaaggtgaccggcagacacggcagcgagtgccccgccctgagcaagcccgccccctacagacagtgctaccaggaggtgtgcaacgacagaatcaacgccaacaccatcaccagccccagactggccgccctgacctacaagtgcaccagagaccagtggaccgtgtactgcagagtgatcagagagaagaacctgtgccaggacatgagatggtaccagagatgctgccagacctgcagagacttctacgccaacaagatgagacagcccccccccaacagctag

SEQ ID NO: 71849 - DNA, 3666 bp, synthetic construct
  misc_feature 1..3666: note = Description of Artificial Sequence: Synthetic coding sequence
  source 1..3666: mol_type = other DNA
atggagtgcgccctgctgctggcctgcgccttccccgccgccggcagcggcccccccagaggcctggccggcctgggcagagtggccaaggccctgcagctgtgctgcctgtgctgcgccagcgtggccgccgccctggccagcgacagcagcagcggcgccagcggcctgaacgacgactacgtgttcgtgacccccgtggaggtggacagcgccggcagctacatcagccacgacatcctgcacaacggcagaaagaagagaagcgcccagaacgccagaagcagcctgcactacagattcagcgccttcggccaggagctgcacctggagctgaagcccagcgccatcctgagcagccacttcatcgtgcaggtgctgggcaaggacggcgccagcgagacccagaagcccgaggtgcagcagtgcttctaccagggcttcatcagaaacgacagcagcagcagcgtggccgtgagcacctgcgccggcctgagcggcctgatcagaaccagaaagaacgagttcctgatcagccccctgccccagctgctggcccaggagcacaactacagcagccccgccggccaccacccccacgtgctgtacaagagaaccgccgaggagaagatccagagatacagaggctaccccggcagcggcagaaactaccccggctacagccccagccacatcccccacgccagccagagcagagagaccgagtaccaccacagaagactgcagaagcagcacttctgcggcagaagaaagaagtacgcccccaagccccccaccgaggacacctacctgagattcgacgagtacggcagcagcggcagacccagaagaagcgccggcaagagccagaagggcctgaacgtggagaccctggtggtggccgacaagaagatggtggagaagcacggcaagggcaacgtgaccacctacatcctgaccgtgatgaacatggtgagcggcctgttcaaggacggcaccatcggcagcgacatcaacgtggtggtggtgagcctgatcctgctggagcaggagcccggcggcctgctgatcaaccaccacgccgaccagagcctgaacagcttctgccagtggcagagcgccctgatcggcaagaacggcaagagacacgaccacgccatcctgctgaccggcttcgacatctgcagctggaagaacgagccctgcgacaccctgggcttcgcccccatcagcggcatgtgcagcaagtacagaagctgcaccatcaacgaggacaccggcctgggcctggccttcaccatcgcccacgagagcggccacaacttcggcatgatccacgacggcgagggcaacccctgcagaaaggccgagggcaacatcatgagccccaccctgaccggcaacaacggcgtgttcagctggagcagctgcagcagacagtacctgaagaagttcctgagcaccccccaggccggctgcctggtggacgagcccaagcaggccggccagtacaagtaccccgacaagctgcccggccagatctacgacgccgacacccagtgcaagtggcagttcggcgccaaggccaagctgtgcagcctgggcttcgtgaaggacatctgcaagagcctgtggtgccacagagtgggccacagatgcgagaccaagttcatgcccgccgccgagggcaccgtgtgcggcctgagcatgtggtgcagacagggccagtgcgtgaagttcggcgagctgggccccagacccatccacggccagtggagcgcctggagcaagtggagcgagtgcagcagaacctgcggcggcggcgtgaagttccaggagagacactgcaacaaccccaagccccagtacggcggcctgttctgccccggcagcagcagaatctaccagctgtgcaacatcaacccctgcaacgagaacagcctggacttcagagcccagcagtgcgccgagtacaacagcaagcccttcagaggctggttctaccagtggaagccctacaccaaggtggaggaggaggacagatgcaagctgtactgcaaggccgagaacttcgagttcttcttcgccatgagcggcaaggtgaaggacggcaccccctgcagccccaacaagaacgacgtgtgcatcgacggcgtgtgcgagctggtgggctgcgaccacgagctgggcagcaaggccgtgagcgacgcctgcggcgtgtgcaagggcgacaacagcacctgcaagttctacaagggcctgtacctgaaccagcacaaggccaacgagtactaccccgtggtgctgatccccgccggcgccagaagcatcgagatccaggagctgcaggtgagcagcagctacctggccgtgagaagcctgagccagaagtactacctgaccggcggctggagcatcgactggcccggcgagttccccttcgccggcaccaccttcgagtaccagagaagcttcaacagacccgagagactgtacgcccccggccccaccaacgagaccctggtgttcgagatcctgatgcagggcaagaaccccggcatcgcctggaagtacgccctgcccaaggtgatgaacggcaccccccccgccaccaagagacccgcctacacctggagcatcgtgcagagcgagtgcagcgtgagctgcggcggcggctacatcaacgtgaaggccatctgcctgagagaccagaacacccaggtgaacagcagcttctgcagcgccaagaccaagcccgtgaccgagcccaagatctgcaacgccttcagctgccccgcctactggatgcccggcgagtggagcacctgcagcaaggcctgcgccggcggccagcagagcagaaagatccagtgcgtgcagaagaagcccttccagaaggaggaggccgtgctgcacagcctgtgccccgtgagcacccccacccaggtgcaggcctgcaacagccacgcctgccccccccagtggagcctgggcccctggagccagtgcagcaagacctgcggcagaggcgtgagaaagagagagctgctgtgcaagggcagcgccgccgagaccctgcccgagagccagtgcaccagcctgcccagacccgagctgcaggagggctgcgtgctgggcagatgccccaagaacagcagactgcagtgggtggccagcagctggagcgagtgcagcgccacctgcggcctgggcgtgagaaagagagagatgaagtgcagcgagaagggcttccagggcaagctgatcaccttccccgagagaagatgcagaaacatcaagaagcccaacctggacctggaggagacctgcaacagaagagcctgccccgcccaccccgtgtacaacatggtggccggctggtacagcctgccctggcagcagtgcaccgtgacctgcggcggcggcgtgcagaccagaagcgtgcactgcgtgcagcagggcagacccagcagcagctgcctgctgcaccagaagccccccgtgctgagagcctgcaacaccaacttctgccccgcccccgagaagagagaggaccccagctgcgtggacttcttcaactggtgccacctggtgccccagcacggcgtgtgcaaccacaagttctacggcaagcagtgctgcaagagctgcaccagaaagatctag

SEQ ID NO: 71850 - DNA, 825 bp, synthetic construct
  misc_feature 1..825: note = Description of Artificial Sequence: Synthetic coding sequence
  source 1..825: mol_type = other DNA
atggagtgcgccctgctgctggcctgcgccttccccgccgccggcagcggcccccccagaggcctggccggcctgggcagagtggccaaggccctgcagctgtgctgcctgtgctgcgccagcgtggccgccgccctggccagcgacagcagcagcggcgccagcggcctgaacgacgactacgtgttcgtgacccccgtggaggtggacagcgccggcagctacatcagccacgacatcctgcacaacggcagaaagaagagaagcgcccagaacgccagaagcagcctgcactacagattcagcgccttcggccaggagctgcacctggagctgaagcccagcgccatcctgagcagccacttcatcgtgcaggtgctgggcaaggacggcgccagcgagacccagaagcccgaggtgcagcagtgcttctaccagggcttcatcagaaacgacagcagcagcagcgtggccgtgagcacctgcgccggcctgagcggcctgatcagaaccagaaagaacgagttcctgatcagccccctgccccagctgctggcccaggagcacaactacagcagccccgccggccaccacccccacgtgctgtacaagagaaccgccgaggagaagatccagagatacagaggctaccccggcagcggcagaaactaccccggctacagccccagccacatcccccacgccagccagagcagagagaccgagtaccaccacagaagactgcagaagcagcacttctgcggcagaagaaagaagtgcatctgcagccaggccagccacagaggccacctgagcaaggtgtag

SEQ ID NO: 71851 - DNA, 3636 bp, synthetic construct
  misc_feature 1..3636: note = Description of Artificial Sequence: Synthetic coding sequence
  source 1..3636: mol_type = other DNA
atggacccccccgccggcgccgccagaagactgctgtgccccgccctgctgctgctgctgctgctgctgcccccccccctgctgccccccccccccccccccgccaacgccagactggccgccgccgccgacccccccggcggccccctgggccacggcgccgagagaatcctggccgtgcccgtgagaaccgacgcccagggcagactggtgagccacgtggtgagcgccgccaccagcagagccggcgtgagagccagaagagccgcccccgtgagaacccccagcttccccggcggcaacgaggaggagcccggcagccacctgttctacaacgtgaccgtgttcggcagagacctgcacctgagactgagacccaacgccagactggtggcccccggcgccaccatggagtggcagggcgagaagggcaccaccagagtggagcccctgctgggcagctgcctgtacgtgggcgacgtggccggcctggccgaggccagcagcgtggccctgagcaactgcgacggcctggccggcctgatcagaatggaggaggaggagttcttcatcgagcccctggagaagggcctggccgcccaggaggccgagcagggcagagtgcacgtggtgtacagaagaccccccaccagcccccccctgggcggcccccaggccctggacaccggcgccagcctggacagcctggacagcctgagcagagccctgggcgtgctggaggagcacgccaacagcagcagaagaagagccagaagacacgccgccgacgacgactacaacatcgaggtgctgctgggcgtggacgacagcgtggtgcagttccacggcaaggagcacgtgcagaagtacctgctgaccctgatgaacatcgtgaacgagatctaccacgacgagagcctgggcgcccacatcaacgtggtgctggtgagaatcatcctgctgagctacggcaagagcatgagcctgatcgagatcggcaaccccagccagagcctggagaacgtgtgcagatgggcctacctgcagcagaagcccgacaccggccacgacgagtaccacgaccacgccatcttcctgaccagacaggacttcggccccagcggcatgcagggctacgcccccgtgaccggcatgtgccaccccgtgagaagctgcaccctgaaccacgaggacggcttcagcagcgccttcgtggtggcccacgagaccggccacgtgctgggcatggagcacgacggccagggcaacagatgcggcgacgaggtgagactgggcagcatcatggcccccctggtgcaggccgccttccacagattccactggagcagatgcagccagcaggagctgagcagatacctgcacagctacgactgcctgctggacgaccccttcgcccacgactggcccgccctgccccagctgcccggcctgcactacagcatgaacgagcagtgcagattcgacttcggcctgggctacatgatgtgcaccgccttcagaaccttcgacccctgcaagcagctgtggtgcagccaccccgacaacccctacttctgcaagaccaagaagggcccccccctggacggcaccatgtgcgcccccggcaagcactgcttcaagggccactgcatctggctgacccccgacatcctgaagagagacggcagctggggcgcctggagccccttcggcagctgcagcagaacctgcggcaccggcgtgaagttcagaaccagacagtgcgacaacccccaccccgccaacggcggcagaacctgcagcggcctggcctacgacttccagctgtgcagcagacaggactgccccgacagcctggccgacttcagagaggagcagtgcagacagtgggacctgtacttcgagcacggcgacgcccagcaccactggctgccccacgagcacagagacgccaaggagagatgccacctgtactgcgagagcagagagaccggcgaggtggtgagcatgaagagaatggtgcacgacggcaccagatgcagctacaaggacgccttcagcctgtgcgtgagaggcgactgcagaaaggtgggctgcgacggcgtgatcggcagcagcaagcaggaggacaagtgcggcgtgtgcggcggcgacaacagccactgcaaggtggtgaagggcaccttcaccagaagccccaagaagcacggctacatcaagatgttcgagatccccgccggcgccagacacctgctgatccaggaggtggacgccaccagccaccacctggccgtgaagaacctggagaccggcaagttcatcctgaacgaggagaacgacgtggacgccagcagcaagaccttcatcgccatgggcgtggagtgggagtacagagacgaggacggcagagagaccctgcagaccatgggccccctgcacggcaccatcaccgtgctggtgatccccgtgggcgacaccagagtgagcctgacctacaagtacatgatccacgaggacagcctgaacgtggacgacaacaacgtgctggaggaggacagcgtggtgtacgagtgggccctgaagaagtggagcccctgcagcaagccctgcggcggcggcagccagttcaccaagtacggctgcagaagaagactggaccacaagatggtgcacagaggcttctgcgccgccctgagcaagcccaaggccatcagaagagcctgcaacccccaggagtgcagccagcccgtgtgggtgaccggcgagtgggagccctgcagccagacctgcggcagaaccggcatgcaggtgagaagcgtgagatgcatccagcccctgcacgacaacaccaccagaagcgtgcacgccaagcactgcaacgacgccagacccgagagcagaagagcctgcagcagagagctgtgccccggcagatggagagccggcccctggagccagtgcagcgtgacctgcggcaacggcacccaggagagacccgtgctgtgcagaaccgccgacgacagcttcggcatctgccaggaggagagacccgagaccgccagaacctgcagactgggcccctgccccagaaacatcagcgaccccagcaagaagagctacgtggtgcagtggctgagcagacccgaccccgacagccccatcagaaagatcagcagcaagggccactgccagggcgacaagagcatcttctgcagaatggaggtgctgagcagatactgcagcatccccggctacaacaagctgtgctgcaagagctgcaacctgtacaacaacctgaccaacgtggagggcagaatcgagcccccccccggcaagcacaacgacatcgacgtgttcatgcccaccctgcccgtgcccaccgtggccatggaggtgagacccagccccagcacccccctggaggtgcccctgaacgccagcagcaccaacgccaccgaggaccaccccgagaccaacgccgtggacgagccctacaagatccacggcctggaggacgaggtgcagccccccaacctgatccccagaagacccagcccctacgagaagaccagaaaccagagaatccaggagctgatcgacgagatgagaaagaaggagatgctgggcaagttctag

SEQ ID NO: 71852 - DNA, 1701 bp, synthetic construct
  misc_feature 1..1701: note = Description of Artificial Sequence: Synthetic coding sequence
  source 1..1701: mol_type = other DNA
atggacccccccgccggcgccgccagaagactgctgtgccccgccctgctgctgctgctgctgctgctgcccccccccctgctgccccccccccccccccccgccaacgccagactggccgccgccgccgacccccccggcggccccctgggccacggcgccgagagaatcctggccgtgcccgtgagaaccgacgcccagggcagactggtgagccacgtggtgagcgccgccaccagcagagccggcgtgagagccagaagagccgcccccgtgagaacccccagcttccccggcggcaacgaggaggagcccggcagccacctgttctacaacgtgaccgtgttcggcagagacctgcacctgagactgagacccaacgccagactggtggcccccggcgccaccatggagtggcagggcgagaagggcaccaccagagtggagcccctgctgggcagctgcctgtacgtgggcgacgtggccggcctggccgaggccagcagcgtggccctgagcaactgcgacggcctggccggcctgatcagaatggaggaggaggagttcttcatcgagcccctggagaagggcctggccgcccaggaggccgagcagggcagagtgcacgtggtgtacagaagaccccccaccagcccccccctgggcggcccccaggccctggacaccggcgccagcctggacagcctggacagcctgagcagagccctgggcgtgctggaggagcacgccaacagcagcagaagaagagccagaagacacgccgccgacgacgactacaacatcgaggtgctgctgggcgtggacgacagcgtggtgcagttccacggcaaggagcacgtgcagaagtacctgctgaccctgatgaacatcgtgaacgagatctaccacgacgagagcctgggcgcccacatcaacgtggtgctggtgagaatcatcctgctgagctacggcaagagcatgagcctgatcgagatcggcaaccccagccagagcctggagaacgtgtgcagatgggcctacctgcagcagaagcccgacaccggccacgacgagtaccacgaccacgccatcttcctgaccagacaggacttcggccccagcggcatgcagggctacgcccccgtgaccggcatgtgccaccccgtgagaagctgcaccctgaaccacgaggacggcttcagcagcgccttcgtggtggcccacgagaccggccacgtgctgggcatggagcacgacggccagggcaacagatgcggcgacgaggtgagactgggcagcatcatggcccccctggtgcaggccgccttccacagattccactggagcagatgcagccagcaggagctgagcagatacctgcacagctacgactgcctgctggacgaccccttcgcccacgactggcccgccctgccccagctgcccggcctgcactacagcatgaacgagcagtgcagattcgacttcggcctgggctacatgatgtgcaccgccttcagaaccttcgacccctgcaagcagctgtggtgcagccaccccgacaacccctacttctgcaagaccaagaagggcccccccctggacggcaccatgtgcgcccccggcaagttcagacccggcgccgtggcccacgcctgctaccccagcaccctgggcggccagggcagatggatcgcctag

SEQ ID NO: 71853 - DNA, 4515 bp, synthetic construct
  misc_feature 1..4515: note = Description of Artificial Sequence: Synthetic coding sequence
  source 1..4515: mol_type = other DNA
atgtgggtggccaagtggctgaccggcctgctgtaccacctgagcctgttcatcaccagaagctgggaggtggacttccaccccagacaggaggccctggtgagaaccctgaccagctacgaggtggtgatccccgagagagtgaacgagttcggcgaggtgttcccccagagccaccacttcagcagacagaagagaagcagcgaggccctggagcccatgcccttcagaacccactacagattcaccgcctacggccagctgttccagctgaacctgaccgccgacgccagcttcctggccgccggctacaccgaggtgcacctgggcacccccgagagaggcgcctgggagagcgacgccggccccagcgacctgagacactgcttctacagaggccaggtgaacagccaggaggactacaaggccgtggtgagcctgtgcggcggcctgaccggcaccttcaagggccagaacggcgagtacttcctggagcccatcatgaaggccgacggcaacgagtacgaggacggccacaacaagccccacctgatctacagacaggacctgaacaacagcttcctgcagaccctgaagtactgcagcgtgagcgagagccagatcaaggagaccagcctgcccttccacacctacagcaacatgaacgaggacctgaacgtgatgaaggagagagtgctgggccacaccagcaagaacgtgcccctgaaggacgagagaagacacagcagaaagaagagactgatcagctaccccagatacatcgagatcatggtgaccgccgacgccaaggtggtgagcgcccacggcagcaacctgcagaactacatcctgaccctgatgagcatcgtggccaccatctacaaggaccccagcatcggcaacctgatccacatcgtggtggtgaagctggtgatgatccacagagaggaggagggccccgtgatcaacttcgacggcgccaccaccctgaagaacttctgcagctggcagcagacccagaacgacctggacgacgtgcaccccagccaccacgacaccgccgtgctgatcaccagagaggacatctgcagcagcaaggagaagtgcaacatgctgggcctgagctacctgggcaccatctgcgaccccctgcagagctgcttcatcaacgaggagaagggcctgatcagcgccttcaccatcgcccacgagctgggccacaccctgggcgtgcagcacgacgacaaccccagatgcaaggagatgaaggtgaccaagtaccacgtgatggcccccgccctgagcttccacatgagcccctggagctggagcaactgcagcagaaagtacgtgaccgagttcctggacaccggctacggcgagtgcctgctggacaagcccgacgaggagatctacaacctgcccagcgagctgcccggcagcagatacgacggcaacaagcagtgcgagctggccttcggccccggcagccagatgtgcccccacatcaacatctgcatgcacctgtggtgcaccagcaccgagaagctgcacaagggctgcttcacccagcacgtgccccccgccgacggcaccgactgcggccccggcatgcactgcagacacggcctgtgcgtgaacaaggagaccgagaccagacccgtgaacggcgagtggggcccctgggagccctacagcagctgcagcagaacctgcggcggcggcatcgagagcgccaccagaagatgcaacagacccgagcccagaaacggcggcaactactgcgtgggcagaagaatgaagttcagaagctgcaacaccgacagctgccccaagggcacccaggacttcagagagaagcagtgcagcgacttcaacggcaagcacctggacatcagcggcatccccagcaacgtgagatggctgcccagatacagcggcatcggcaccaaggacagatgcaagctgtactgccaggtggccggcaccaactacttctacctgctgaaggacatggtggaggacggcaccccctgcggcaccgagagctacaacatcgactgcaactgcgtgctgaaggccgccggctgcgaccacgtgctgaacagcagcgccaagatcgacaagtgcggcgtgtgcggcggcgacaacagcagctgcaagaccatcaccggcgtgttcaacagcagccactacggctacaacgtggtggtgaagatccccgccggcgccaccaacgtggacatcagacagtacagctacagcggccagcccgacgacagctacctggccctgagcgacgccgagggcaacttcctgttcaacggcaacttcctgctgagcaccagcaagaaggagatcaacgtgcagggcaccagaaccgtgatcgagtacagcggcagcaacaacgccgtggagagaatcaacagcaccaacagacaggagaaggagatcctgatcgaggtgctgtgcgtgggcaacctgtacaaccccgacgtgcactacagcttcaacatccccctggaggagagaagcgacatgttcacctgggacccctacggcccctgggagggctgcaccaagatgtgccagggcctgcagagaagaaacatcacctgcatccacaagagcgaccacagcgtggtgagcgacaaggagtgcgaccacctgcccctgcccagcttcgtgacccagagctgcaacaccgactgcgagctgagatggcacgtgatcggcaagagcgagtgcagcagccagtgcggccagggctacagaaccctggacatccactgcatgaagtacagcatccacgagggccagaccgtgcaggtggacgaccactactgcggcgaccagctgaagccccccacccaggagctgtgccacggcaactgcgtgttcaccagatggcactacagcgagtggagccagtgcagcagaagctgcggcggcggcgagagaagcagagagagctactgcatgaacaacttcggccacagactggccgacaacgagtgccaggagctgagcagagtgaccagagagaactgcaacgagttcagctgccccagctgggccgccagcgagtggagcgagtgcctggtgacctgcggcaagggcaccaagcagagacaggtgtggtgccagctgaacgtggaccacctgagcgacggcttctgcaacagcagcaccaagcccgagagcctgagcccctgcgagctgcacacctgcgccagctggcaggtgggcccctggggcccctgcaccaccacctgcggccacggctaccagatgagagacgtgaagtgcgtgaacgagctggccagcgccgtgctggaggacaccgagtgccacgaggccagcagacccagcgacagacagagctgcgtgctgaccccctgcagcttcatcagcaagctggagaccgccctgctgcccaccgtgctgatcaagaagatggcccagtggagacacggcagctggaccccctgcagcgtgagctgcggcagaggcacccaggccagatacgtgagctgcagagacgccctggacagaatcgccgacgagagctactgcgcccacctgcccagacccgccgagatctgggactgcttcaccccctgcggcgagtggcaggccggcgactggagcccctgcagcgccagctgcggccacggcaagaccaccagacaggtgctgtgcatgaactaccaccagcccatcgacgagaactactgcgaccccgaggtgagacccctgatggagcaggagtgcagcctggccgcctgcccccccgcccacagccacttccccagcagccccgtgcagcccagctactacctgagcaccaacctgcccctgacccagaagctggaggacaacgagaaccaggtggtgcaccccagcgtgagaggcaaccagtggagaaccggcccctggggcagctgcagcagcagctgcagcggcggcctgcagcacagagccgtggtgtgccaggacgagaacggccagagcgccagctactgcgacgccgccagcaagccccccgagctgcagcagtgcggccccggcccctgcccccagtggaactacggcaactggggcgagtgcagccagacctgcggcggcggcatcaagagcagactggtgatctgccagttccccaacggccagatcctggaggaccacaactgcgagatcgtgaacaagccccccagcgtgatccagtgccacatgcacgcctgccccgccgacgtgagctggcaccaggagccctggaccagcgaggacctgaaggtgaagctgctgccccagagaaccatcatcctgtgggagctgatgaagaacatcttctgccacggcaagcacagccacatgtacctgatcaacgtggtgaccgaccacctgctgtaccccagacactgcgaccccgagaccatcgagacctacttcctgagcctgtggagcctgcagttcacctggggcgacctgaagtactacaagaacagcctgtag

SEQ ID NO: 71854 - DNA, 5733 bp, synthetic construct
  misc_feature 1..5733: note = Description of Artificial Sequence: Synthetic coding sequence
  source 1..5733: mol_type = other DNA
atgtgggtggccaagtggctgaccggcctgctgtaccacctgagcctgttcatcaccagaagctgggaggtggacttccaccccagacaggaggccctggtgagaaccctgaccagctacgaggtggtgatccccgagagagtgaacgagttcggcgaggtgttcccccagagccaccacttcagcagacagaagagaagcagcgaggccctggagcccatgcccttcagaacccactacagattcaccgcctacggccagctgttccagctgaacctgaccgccgacgccagcttcctggccgccggctacaccgaggtgcacctgggcacccccgagagaggcgcctgggagagcgacgccggccccagcgacctgagacactgcttctacagaggccaggtgaacagccaggaggactacaaggccgtggtgagcctgtgcggcggcctgaccggcaccttcaagggccagaacggcgagtacttcctggagcccatcatgaaggccgacggcaacgagtacgaggacggccacaacaagccccacctgatctacagacaggacctgaacaacagcttcctgcagaccctgaagtactgcagcgtgagcgagagccagatcaaggagaccagcctgcccttccacacctacagcaacatgaacgaggacctgaacgtgatgaaggagagagtgctgggccacaccagcaagaacgtgcccctgaaggacgagagaagacacagcagaaagaagagactgatcagctaccccagatacatcgagatcatggtgaccgccgacgccaaggtggtgagcgcccacggcagcaacctgcagaactacatcctgaccctgatgagcatcgtggccaccatctacaaggaccccagcatcggcaacctgatccacatcgtggtggtgaagctggtgatgatccacagagaggaggagggccccgtgatcaacttcgacggcgccaccaccctgaagaacttctgcagctggcagcagacccagaacgacctggacgacgtgcaccccagccaccacgacaccgccgtgctgatcaccagagaggacatctgcagcagcaaggagaagtgcaacatgctgggcctgagctacctgggcaccatctgcgaccccctgcagagctgcttcatcaacgaggagaagggcctgatcagcgccttcaccatcgcccacgagctgggccacaccctgggcgtgcagcacgacgacaaccccagatgcaaggagatgaaggtgaccaagtaccacgtgatggcccccgccctgagcttccacatgagcccctggagctggagcaactgcagcagaaagtacgtgaccgagttcctggacaccggctacggcgagtgcctgctggacaagcccgacgaggagatctacaacctgcccagcgagctgcccggcagcagatacgacggcaacaagcagtgcgagctggccttcggccccggcagccagatgtgcccccacatcaacatctgcatgcacctgtggtgcaccagcaccgagaagctgcacaagggctgcttcacccagcacgtgccccccgccgacggcaccgactgcggccccggcatgcactgcagacacggcctgtgcgtgaacaaggagaccgagaccagacccgtgaacggcgagtggggcccctgggagccctacagcagctgcagcagaacctgcggcggcggcatcgagagcgccaccagaagatgcaacagacccgagcccagaaacggcggcaactactgcgtgggcagaagaatgaagttcagaagctgcaacaccgacagctgccccaagggcacccaggacttcagagagaagcagtgcagcgacttcaacggcaagcacctggacatcagcggcatccccagcaacgtgagatggctgcccagatacagcggcatcggcaccaaggacagatgcaagctgtactgccaggtggccggcaccaactacttctacctgctgaaggacatggtggaggacggcaccccctgcggcaccgagacccacgacatctgcgtgcagggccagtgcatggccgccggctgcgaccacgtgctgaacagcagcgccaagatcgacaagtgcggcgtgtgcggcggcgacaacagcagctgcaagaccatcaccggcgtgttcaacagcagccactacggctacaacgtggtggtgaagatccccgccggcgccaccaacgtggacatcagacagtacagctacagcggccagcccgacgacagctacctggccctgagcgacgccgagggcaacttcctgttcaacggcaacttcctgctgagcaccagcaagaaggagatcaacgtgcagggcaccagaaccgtgatcgagtacagcggcagcaacaacgccgtggagagaatcaacagcaccaacagacaggagaaggagctgatcctgcaggtgctgtgcgtgggcaacctgtacaaccccgacgtgcactacagcttcaacatccccctggaggagagaagcgacatgttcacctgggacccctacggcccctgggagggctgcaccaagatgtgccagggcctgcagagaagaaacatcacctgcatccacaagagcgaccacagcgtggtgagcgacaaggagtgcgaccacctgcccctgcccagcttcgtgacccagagctgcaacaccgactgcgagctgagatggcacgtgatcggcaagagcgagtgcagcagccagtgcggccagggctacagaaccctggacatccactgcatgaagtacagcatccacgagggccagaccgtgcaggtggacgaccactactgcggcgaccagctgaagccccccacccaggagctgtgccacggcaactgcgtgttcaccagatggcactacagcgagtggagccagtgcagcagaagctgcggcggcggcgagagaagcagagagagctactgcatgaacaacttcggccacagactggccgacaacgagtgccaggagctgagcagagtgaccagagagaactgcaacgagttcagctgccccagctgggccgccagcgagtggagcgagtgcctggtgacctgcggcaagggcaccaagcagagacaggtgtggtgccagctgaacgtggaccacctgagcgacggcttctgcaacagcagcaccaagcccgagagcctgagcccctgcgagctgcacacctgcgccagctggcaggtgggcccctggggcccctgcaccaccacctgcggccacggctaccagatgagagacgtgaagtgcgtgaacgagctggccagcgccgtgctggaggacaccgagtgccacgaggccagcagacccagcgacagacagagctgcgtgctgaccccctgcagcttcatcagcaagctggagaccgccctgctgcccaccgtgctgatcaagaagatggcccagtggagacacggcagctggaccccctgcagcgtgagctgcggcagaggcacccaggccagatacgtgagctgcagagacgccctggacagaatcgccgacgagagctactgcgcccacctgcccagacccgccgagatctgggactgcttcaccccctgcggcgagtggcaggccggcgactggagcccctgcagcgccagctgcggccacggcaagaccaccagacaggtgctgtgcatgaactaccaccagcccatcgacgagaactactgcgaccccgaggtgagacccctgatggagcaggagtgcagcctggccgcctgcccccccgcccacagccacttccccagcagccccgtgcagcccagctactacctgagcaccaacctgcccctgacccagaagctggaggacaacgagaaccaggtggtgcaccccagcgtgagaggcaaccagtggagaaccggcccctggggcagctgcagcagcagctgcagcggcggcctgcagcacagagccgtggtgtgccaggacgagaacggccagagcgccagctactgcgacgccgccagcaagccccccgagctgcagcagtgcggccccggcccctgcccccagtggaactacggcaactggggcgagtgcagccagacctgcggcggcggcatcaagagcagactggtgatctgccagttccccaacggccagatcctggaggaccacaactgcgagatcgtgaacaagccccccagcgtgatccagtgccacatgcacgcctgccccgccgacgtgagctggcaccaggagccctggaccagctgcagcgccagctgcggcaagggcagaaagtacagagaggtgttctgcatcgaccagttccagagaaagctggaggacaccaactgcagccaggtgcagaagccccccacccacaaggcctgcagaagcgtgagatgccccagctggaaggccaacagctggaacgagtgcagcgtgacctgcggcagcggcgtgcagcagagagacgtgtactgcagactgaagggcgtgggccaggtggtggaggagatgtgcgaccagagcaccagaccctgcagccagagaagatgctggagccaggactgcgtgcagcacaagggcatggagagaggcagactgaactgcagcaccagctgcgagagaaaggacagccaccagagaatggagtgcaccgacaaccagatcagacaggtgaacgagatcgtgtacaacagcagcaccatcagcctgaccagcaagaactgcagaaaccccccctgcaactacatcgtggtgaccgccgacagcagccagtgcgccaacaactgcggcttcagctacagacagagaatcacctactgcaccgagatccccagcaccaagaagcacaagctgcacagactgagacccatcgtgtaccaggagtgccccgtggtgcccagcagccaggtgtaccagtgcatcaacagctgcctgcacctggccacctggaaggtgggcaagtggagcaagtgcagcgtgacctgcggcatcggcatcatgaagagacaggtgaagtgcatcaccaagcacggcctgagcagcgacctgtgcctgaaccacctgaagcccggcgcccagaagaagtgctacgccaacgactgcaagagcttcaccacctgcaaggagatccaggtgaagaaccacatcagaaaggacggcgactactacctgaacatcaagggcagaatcatcaagatctactgcgccgacatgtacctggagaaccccaaggagtacctgaccctggtgcagggcgaggagaacttcagcgaggtgtacggcttcagactgaagaacccctaccagtgccccttcaacggcagcagaagagaggactgcgagtgcgacaacggccacctggccgccggctacaccgtgttcagcaagatcagaatcgacctgaccagcatgcagatcaagaccaccgacctgctgttcagcaagaccatcttcggcaacgccgtgcccttcgccaccgccggcgactgctacagcgccttcagatgcccccagggccagttcagcatcaacctgagcggcaccggcatgaagatcagcagcaccgccaagtggctgacccagggcagctacaccagcgtgagcatcagaagaagcgaggacggcaccagattcttcggcaagtgcggcggctactgcggcaagtgcctgccccacatgaccaccggcctgcccatccaggtgatctag

SEQ ID NO: 71855 - DNA, 1869 bp, synthetic construct
  misc_feature 1..1869: note = Description of Artificial Sequence: Synthetic coding sequence
  source 1..1869: mol_type = other DNA
atgttcacctgggacccctacggcccctgggagggctgcaccaagatgtgccagggcctgcagagaagaaacatcacctgcatccacaagagcgaccacagcgtggtgagcgacaaggagtgcgaccacctgcccctgcccagcttcgtgacccagagctgcaacaccgactgcgagctgagatggcacgtgatcggcaagagcgagtgcagcagccagtgcggccagggctacagaaccctggacatccactgcatgaagtacagcatccacgagggccagaccgtgcaggtggacgaccactactgcggcgaccagctgaagccccccacccaggagctgtgccacggcaactgcgtgttcaccagatggcactacagcgagtggagccagtgcagcagaagctgcggcggcggcgagagaagcagagagagctactgcatgaacaacttcggccacagactggccgacaacgagtgccaggagctgagcagagtgaccagagagaactgcaacgagttcagctgccccagctgggccgccagcgagtggagcgagtgcctggtgacctgcggcaagggcaccaagcagagacaggtgtggtgccagctgaacgtggaccacctgagcgacggcttctgcaacagcagcaccaagcccgagagcctgagcccctgcgagctgcacacctgcgccagctggcaggtgggcccctggggcccctgcaccaccacctgcggccacggctaccagatgagagacgtgaagtgcgtgaacgagctggccagcgccgtgctggaggacaccgagtgccacgaggccagcagacccagcgacagacagtgcagcgtgagctgcggcagaggcacccaggccagatacgtgagctgcagagacgccctggacagaatcgccgacgagagctactgcgcccacctgcccagacccgccgagatctgggactgcttcaccccctgcggcgagtggcaggccggcgactggagcccctgcagcgccagctgcggccacggcaagaccaccagacaggtgctgtgcatgaactaccaccagcccatcgacgagaactactgcgaccccgaggtgagacccctgatggagcaggagtgcagcctggccgcctgcccccccgcccacagccacttccccagcagccccgtgcagcccagctactacctgagcaccaacctgcccctgacccagaagctggaggacaacgagaaccaggtggtgcaccccagcgtgagaggcaaccagtggagaaccggcccctggggcagctgcagcagcagctgcagcggcggcctgcagcacagagccgtggtgtgccaggacgagaacggccagagcgccagctactgcgacgccgccagcaagccccccgagctgcagcagtgcggccccggcccctgcccccagtggaactacggcaactggggcgagtgcagccagacctgcggcggcggcatcaagagcagactggtgatctgccagttccccaacggccagatcctggaggaccacaactgcgagatcgtgaacaagccccccagcgtgatccagtgccacatgcacgcctgccccgccgacgtgagctggcaccaggagccctggaccagcgaggacctgaaggtgaagctgctgccccagagaaccatcatcctgtgggagctgatgaagaacatcttctgccacggcaagcacagccacatgtacctgatcaacgtggtgaccgaccacctgctgtaccccagacactgcgaccccgagaccatcgagacctacttcctgagcctgtggagcctgcagttcacctggggcgacctgaagtactacaagaacagcctgtag

SEQ ID NO: 71856 - DNA, 4515 bp, synthetic construct
  misc_feature 1..4515: note = Description of Artificial Sequence: Synthetic coding sequence
  source 1..4515: mol_type = other DNA
atgtgggtggccaagtggctgaccggcctgctgtaccacctgagcctgttcatcaccagaagctgggaggtggacttccaccccagacaggaggccctggtgagaaccctgaccagctacgaggtggtgatccccgagagagtgaacgagttcggcgaggtgttcccccagagccaccacttcagcagacagaagagaagcagcgaggccctggagcccatgcccttcagaacccactacagattcaccgcctacggccagctgttccagctgaacctgaccgccgacgccagcttcctggccgccggctacaccgaggtgcacctgggcacccccgagagaggcgcctgggagagcgacgccggccccagcgacctgagacactgcttctacagaggccaggtgaacagccaggaggactacaaggccgtggtgagcctgtgcggcggcctgaccggcaccttcaagggccagaacggcgagtacttcctggagcccatcatgaaggccgacggcaacgagtacgaggacggccacaacaagccccacctgatctacagacaggacctgaacaacagcttcctgcagaccctgaagtactgcagcgtgagcgagagccagatcaaggagaccagcctgcccttccacacctacagcaacatgaacgaggacctgaacgtgatgaaggagagagtgctgggccacaccagcaagaacgtgcccctgaaggacgagagaagacacagcagaaagaagagactgatcagctaccccagatacatcgagatcatggtgaccgccgacgccaaggtggtgagcgcccacggcagcaacctgcagaactacatcctgaccctgatgagcatcgtggccaccatctacaaggaccccagcatcggcaacctgatccacatcgtggtggtgaagctggtgatgatccacagagaggaggagggccccgtgatcaacttcgacggcgccaccaccctgaagaacttctgcagctggcagcagacccagaacgacctggacgacgtgcaccccagccaccacgacaccgccgtgctgatcaccagagaggacatctgcagcagcaaggagaagtgcaacatgctgggcctgagctacctgggcaccatctgcgaccccctgcagagctgcttcatcaacgaggagaagggcctgatcagcgccttcaccatcgcccacgagctgggccacaccctgggcgtgcagcacgacgacaaccccagatgcaaggagatgaaggtgaccaagtaccacgtgatggcccccgccctgagcttccacatgagcccctggagctggagcaactgcagcagaaagtacgtgaccgagttcctggacaccggctacggcgagtgcctgctggacaagcccgacgaggagatctacaacctgcccagcgagctgcccggcagcagatacgacggcaacaagcagtgcgagctggccttcggccccggcagccagatgtgcccccacatcaacatctgcatgcacctgtggtgcaccagcaccgagaagctgcacaagggctgcttcacccagcacgtgccccccgccgacggcaccgactgcggccccggcatgcactgcagacacggcctgtgcgtgaacaaggagaccgagaccagacccgtgaacggcgagtggggcccctgggagccctacagcagctgcagcagaacctgcggcggcggcatcgagagcgccaccagaagatgcaacagacccgagcccagaaacggcggcaactactgcgtgggcagaagaatgaagttcagaagctgcaacaccgacagctgccccaagggcacccaggacttcagagagaagcagtgcagcgacttcaacggcaagcacctggacatcagcggcatccccagcaacgtgagatggctgcccagatacagcggcatcggcaccaaggacagatgcaagctgtactgccaggtggccggcaccaactacttctacctgctgaaggacatggtggaggacggcaccccctgcggcaccgagacccacgacatctgcgtgcagggccagtgcatggccgccggctgcgaccacgtgctgaacagcagcgccaagatcgacaagtgcggcgtgtgcggcggcgacaacagcagctgcaagaccatcaccggcgtgttcaacagcagccactacggctacaacgtggtggtgaagatccccgccggcgccaccaacgtggacatcagacagtacagctacagcggccagcccgacgacagctacctggccctgagcgacgccgagggcaacttcctgttcaacggcaacttcctgctgagcaccagcaagaaggagatcaacgtgcagggcaccagaaccgtgatcgagtacagcggcagcaacaacgccgtggagagaatcaacagcaccaacagacaggagaaggagctgatcctgcaggtgctgtgcgtgggcaacctgtacaaccccgacgtgcactacagcttcaacatccccctggaggagagaagcgacatgttcacctgggacccctacggcccctgggagggctgcaccaagatgtgccagggcctgcagagaagaaacatcacctgcatccacaagagcgaccacagcgtggtgagcgacaaggagtgcgaccacctgcccctgcccagcttcgtgacccagagctgcaacaccgactgcgagctgagatggcacgtgatcggcaagagcgagtgcagcagccagtgcggccagggctacagaaccctggacatccactgcatgaagtacagcatccacgagggccagaccgtgcaggtggacgaccactactgcggcgaccagctgaagccccccacccaggagctgtgccacggcaactgcgtgttcaccagatggcactacagcgagtggagccagtgcagcagaagctgcggcggcggcgagagaagcagagagagctactgcatgaacaacttcggccacagactggccgacaacgagtgccaggagctgagcagagtgaccagagagaactgcaacgagttcagctgccccagctgggccgccagcgagtggagcgagtgcctggtgacctgcggcaagggcaccaagcagagacaggtgtggtgccagctgaacgtggaccacctgagcgacggcttctgcaacagcagcaccaagcccgagagcctgagcccctgcgagctgcacacctgcgccagctggcaggtgggcccctggggcccctgcaccaccacctgcggccacggctaccagatgagagacgtgaagtgcgtgaacgagctggccagcgccgtgctggaggacaccgagtgccacgaggccagcagacccagcgacagacagagctgcgtgctgaccccctgcagcttcatcagcaagctggagaccgccctgctgcccaccgtgctgatcaagaagatggcccagtggagacacggcagctggaccccctgcagcgtgagctgcggcagaggcacccaggccagatacgtgagctgcagagacgccctggacagaatcgccgacgagagctactgcgcccacctgcccagacccgccgagatctgggactgcttcaccccctgcggcgagtggcaggccggcgactggagcccctgcagcgccagctgcggccacggcaagaccaccagacaggtgctgtgcatgaactaccaccagcccatcgacgagaactactgcgaccccgaggtgagacccctgatggagcaggagtgcagcctggccgcctgcccccccgcccacagccacttccccagcagccccgtgcagcccagctactacctgagcaccaacctgcccctgacccagaagctggaggacaacgagaaccaggtggtgcaccccagcgtgagaggcaaccagtggagaaccggcccctggggcagctgcagcagcagctgcagcggcggcctgcagcacagagccgtggtgtgccaggacgagaacggccagagcgccagctactgcgacgccgccagcaagccccccgagctgcagcagtgcggccccggcccctgcccccagtggaactacggcaactggggcgagtgcagccagacctgcggcggcggcatcaagagcagactggtgatctgccagttccccaacggccagatcctggaggaccacaactgcgagatcgtgaacaagccccccagcgtgatccagtgccacatgcacgcctgccccgccgacgtgagctggcaccaggagccctggaccagcgaggacctgaaggtgaagctgctgccccagagaaccatcatcctgtgggagctgatgaagaacatcttctgccacggcaagcacagccacatgtacctgatcaacgtggtgaccgaccacctgctgtaccccagacactgcgaccccgagaccatcgagacctacttcctgagcctgtggagcctgcagttcacctggggcgacctgaagtactacaagaacagcctgtag

SEQ ID NO: 71857 - DNA, 3618 bp, synthetic construct
  misc_feature 1..3618: note = Description of Artificial Sequence: Synthetic coding sequence
  source 1..3618: mol_type = other DNA
atggtgctgctgagcctgtggctgatcgccgccgccctggtggaggtgagaaccagcgccgacggccaggccggcaacgaggagatggtgcagatcgacctgcccatcaagagatacagagagtacgagctggtgacccccgtgagcaccaacctggagggcagatacctgagccacaccctgagcgccagccacaagaagagaagcgccagagacgtgagcagcaaccccgagcagctgttcttcaacatcaccgccttcggcaaggacttccacctgagactgaagcccaacacccagctggtggcccccggcgccgtggtggagtggcacgagaccagcctggtgcccggcaacatcaccgaccccatcaacaaccaccagcccggcagcgccacctacagaatcagaagaaccgagcccctgcagaccaactgcgcctacgtgggcgacatcgtggacatccccggcaccagcgtggccatcagcaactgcgacggcctggccggcatgatcaagagcgacaacgaggagtacttcatcgagcccctggagagaggcaagcagatggaggaggagaagggcagaatccacgtggtgtacaagagaagcgccgtggagcaggcccccatcgacatgagcaaggacttccactacagagagagcgacctggagggcctggacgacctgggcaccgtgtacggcaacatccaccagcagctgaacgagaccatgagaagaagaagacacgccggcgagaacgactacaacatcgaggtgctgctgggcgtggacgacagcgtggtgagattccacggcaaggagcacgtgcagaactacctgctgaccctgatgaacatcgtgaacgagatctaccacgacgagagcctgggcgtgcacatcaacgtggtgctggtgagaatgatcatgctgggctacgccaagagcatcagcctgatcgagagaggcaaccccagcagaagcctggagaacgtgtgcagatgggccagccagcagcagagaagcgacctgaaccacagcgagcaccacgaccacgccatcttcctgaccagacaggacttcggccccgccggcatgcagggctacgcccccgtgaccggcatgtgccaccccgtgagaagctgcaccctgaaccacgaggacggcttcagcagcgccttcgtggtggcccacgagaccggccacgtgctgggcatggagcacgacggccagggcaacagatgcggcgacgagaccgccatgggcagcgtgatggcccccctggtgcaggccgccttccacagataccactggagcagatgcagcggccaggagctgaagagatacatccacagctacgactgcctgctggacgaccccttcgaccacgactggcccaagctgcccgagctgcccggcatcaactacagcatggacgagcagtgcagattcgacttcggcgtgggctacaagatgtgcaccgccttcagaaccttcgacccctgcaagcagctgtggtgcagccaccccgacaacccctacttctgcaagaccaagaagggcccccccctggacggcaccgagtgcgccgccggcaagtggtgctacaagggccactgcatgtggaagaacgccaaccagcagaagcaggacggcaactggggcagctggaccaagttcggcagctgcagcagaacctgcggcaccggcgtgagattcagaaccagacagtgcaacaaccccatgcccatcaacggcggccaggactgccccggcgtgaacttcgagtaccagctgtgcaacaccgaggagtgccagaagcacttcgaggacttcagagcccagcagtgccagcagagaaacagccacttcgagtaccagaacaccaagcaccactggctgccctacgagcaccccgaccccaagaagagatgccacctgtactgccagagcaaggagaccggcgacgtggcctacatgaagcagctggtgcacgacggcacccactgcagctacaaggacccctacagcatctgcgtgagaggcgagtgcgtgaaggtgggctgcgacaaggagatcggcagcaacaaggtggaggacaagtgcggcgtgtgcggcggcgacaacagccactgcagaaccgtgaagggcaccttcaccagaacccccagaaagctgggctacctgaagatgttcgacatcccccccggcgccagacacgtgctgatccaggaggacgaggccagcccccacatcctggccatcaagaaccaggccaccggccactacatcctgaacggcaagggcgaggaggccaagagcagaaccttcatcgacctgggcgtggagtgggactacaacatcgaggacgacatcgagagcctgcacaccgacggccccctgcacgaccccgtgatcgtgctgatcatcccccaggagaacgacaccagaagcagcctgacctacaagtacatcatccacgaggacagcgtgcccaccatcaacagcaacaacgtgatccaggaggagctggacaccttcgagtgggccctgaagagctggagccagtgcagcaagccctgcggcggcggcttccagtacaccaagtacggctgcagaagaaagagcgacaacaagatggtgcacagaagcttctgcgaggccaacaagaagcccaagcccatcagaagaatgtgcaacatccaggagtgcacccaccccctgtgggtggccgaggagtgggagcactgcaccaagacctgcggcagcagcggctaccagctgagaaccgtgagatgcctgcagcccctgctggacggcaccaacagaagcgtgcacagcaagtactgcatgggcgacagacccgagagcagaagaccctgcaacagagtgccctgccccgcccagtggaagaccggcccctggagcgagtgcagcgtgacctgcggcgagggcaccgaggtgagacaggtgctgtgcagagccggcgaccactgcgacggcgagaagcccgagagcgtgagagcctgccagctgcccccctgcaacgacgagccctgcctgggcgacaagagcatcttctgccagatggaggtgctggccagatactgcagcatccccggctacaacaagctgtgctgcgagagctgcagcaagagaagcagcaccctgccccccccctacctgctggaggccgccgagacccacgacgacgtgatcagcaaccccagcgacctgcccagaagcctggtgatgcccaccagcctggtgccctaccacagcgagacccccgccaagaagatgagcctgagcagcatcagcagcgtgggcggccccaacgcctacgccgccttcagacccaacagcaagcccgacggcgccaacctgagacagagaagcgcccagcaggccggcagcaagaccgtgagactggtgaccgtgcccagcagcccccccaccaagagagtgcacctgagcagcgccagccagatggccgccgccagcttcttcgccgccagcgacagcatcggcgccagcagccaggccagaaccagcaagaaggacggcaagatcatcgacaacagaagacccaccagaagcagcaccctggagagatag

SEQ ID NO: 71858 - DNA, 1020 bp, synthetic construct
  misc_feature 1..1020: note = Description of Artificial Sequence: Synthetic coding sequence
  source 1..1020: mol_type = other DNA
atgagccagaccggcagccaccccggcagaggcctggccggcagatggctgtggggcgcccagccctgcctgctgctgcccatcgtgcccctgagctggctggtgtggctgctgctgctgctgctggccagcctgctgcccagcgccagactggccagccccctgcccagagaggaggagatcgtgttccccgagaagctgaacggcagcgtgctgcccggcagcggcgcccccgccagactgctgtgcagactgcaggccttcggcgagaccctgctgctggagctggagcaggacagcggcgtgcaggtggagggcctgaccgtgcagtacctgggccaggcccccgagctgctgggcggcgccgagcccggcacctacctgaccggcaccatcaacggcgaccccgagagcgtggccagcctgcactgggacggcggcgccctgctgggcgtgctgcagtacagaggcgccgagctgcacctgcagcccctggagggcggcacccccaacagcgccggcggccccggcgcccacatcctgagaagaaagagccccgccagcggccagggccccatgtgcaacgtgaaggcccccctgggcagccccagccccagacccagaagagccaagagattcgccagcctgagcagattcgtggagaccctggtggtggccgacgacaagatggccgccttccacggcgccggcctgaagagatacctgctgaccgtgatggccgccgccgccaaggccttcaagcaccccagcatcagaaaccccgtgagcctggtggtgaccagactggtgatcctgggcagcggcgaggagggcccccaggtgggccccagcgccgcccagaccctgagaagcttctgcgcctggcagagaggcctgaacacccccgaggacagcgaccccgaccacttcgacaccgccatcctgttcaccagacaggtgagaccccagagcgccccccaggccatgcactgcaccatcctgagaagcgccaccacctag

SEQ ID NO: 71859 - DNA, 2514 bp, synthetic construct
  misc_feature 1..2514: note = Description of Artificial Sequence: Synthetic coding sequence
  source 1..2514: mol_type = other DNA
atgagccagaccggcagccaccccggcagaggcctggccggcagatggctgtggggcgcccagccctgcctgctgctgcccatcgtgcccctgagctggctggtgtggctgctgctgctgctgctggccagcctgctgcccagcgccagactggccagccccctgcccagagaggaggagatcgtgttccccgagaagctgaacggcagcgtgctgcccggcagcggcgcccccgccagactgctgtgcagactgcaggccttcggcgagaccctgctgctggagctggagcaggacagcggcgtgcaggtggagggcctgaccgtgcagtacctgggccaggcccccgagctgctgggcggcgccgagcccggcacctacctgaccggcaccatcaacggcgaccccgagagcgtggccagcctgcactgggacggcggcgccctgctgggcgtgctgcagtacagaggcgccgagctgcacctgcagcccctggagggcggcacccccaacagcgccggcggccccggcgcccacatcctgagaagaaagagccccgccagcggccagggccccatgtgcaacgtgaaggcccccctgggcagccccagccccagacccagaagagccaagagattcgccagcctgagcagattcgtggagaccctggtggtggccgacgacaagatggccgccttccacggcgccggcctgaagagatacctgctgaccgtgatggccgccgccgccaaggccttcaagcaccccagcatcagaaaccccgtgagcctggtggtgaccagactggtgatcctgggcagcggcgaggagggcccccaggtgggccccagcgccgcccagaccctgagaagcttctgcgcctggcagagaggcctgaacacccccgaggacagcgaccccgaccacttcgacaccgccatcctgttcaccagacaggacctgtgcggcgtgagcacctgcgacaccctgggcatggccgacgtgggcaccgtgtgcgaccccgccagaagctgcgccatcgtggaggacgacggcctgcagagcgccttcaccgccgcccacgagctgggccacgtgttcaacatgctgcacgacaacagcaagccctgcatcagcctgaacggccccctgagcaccagcagacacgtgatggcccccgtgatggcccacgtggaccccgaggagccctggagcccctgcagcgccagattcatcaccgacttcctggacaacggctacggccactgcctgctggacaagcccgaggcccccctgcacctgcccgtgaccttccccggcaaggactacgacgccgacagacagtgccagctgaccttcggccccgacagcagacactgcccccagctgccccccccctgcgccgccctgtggtgcagcggccacctgaacggccacgccatgtgccagaccaagcacagcccctgggccgacggcaccccctgcggccccgcccaggcctgcatgggcggcagatgcctgcacatggaccagctgcaggacttcaacatcccccaggccggcggctggggcccctggggcccctggggcgactgcagcagaacctgcggcggcggcgtgcagttcagcagcagagactgcaccagacccgtgcccagaaacggcggcaagtactgcgagggcagaagaaccagattcagaagctgcaacaccgaggactgccccaccggcagcgccctgaccttcagagaggagcagtgcgccgcctacaaccacagaaccgacctgttcaagagcttccccggccccatggactgggtgcccagatacaccggcgtggccccccaggaccagtgcaagctgacctgccaggcccaggccctgggctactactacgtgctggagcccagagtggtggacggcaccccctgcagccccgacagcagcagcgtgtgcgtgcagggcagatgcatccacgccggctgcgacagaatcatcggcagcaagaagaagttcgacaagtgcatggtgtgcggcggcgacggcagcggctgcagcaagcagagcggcagcttcagaaagttcagatacggctacaacaacgtggtgaccatccccgccggcgccacccacatcctggtgagacagcagggcaaccccggccacagaagcatctacctggccctgaagctgcccgacggcagctacgccctgaacggcgagtacaccctgatgcccagccccaccgacgtggtgctgcccggcgccgtgagcctgagatacagcggcgccaccgccgccagcgagaccctgagcggccacggccccctggcccagcccctgaccctgcaggtgctggtggccggcaacccccaggacaccagactgagatacagcttcttcgtgcccagacccacccccagcacccccagacccaccccccaggactggctgcacagaagagcccagatcctggagatcctgagaagaagaccctgggccggcagaaagtag

SEQ ID NO: 71860 - DNA, 2793 bp, synthetic construct
  misc_feature 1..2793: note = Description of Artificial Sequence: Synthetic coding sequence
  source 1..2793: mol_type = other DNA
atgctgctgggctgggccagcctgctgctgtgcgccttcagactgcccctggccgccgtgggccccgccgccacccccgcccaggacaaggccggccagccccccaccgccgccgccgccgcccagcccagaagaagacagggcgaggaggtgcaggagagagccgagccccccggccacccccaccccctggcccagagaagaagaagcaagggcctggtgcagaacatcgaccagctgtacagcggcggcggcaaggtgggctacctggtgtacgccggcggcagaagattcctgctggacctggagagagacggcagcgtgggcatcgccggcttcgtgcccgccggcggcggcaccagcgccccctggagacacagaagccactgcttctacagaggcaccgtggacggcagccccagaagcctggccgtgttcgacctgtgcggcggcctggacggcttcttcgccgtgaagcacgccagatacaccctgaagcccctgctgagaggcccctgggccgaggaggagaagggcagagtgtacggcgacggcagcgccagaatcctgcacgtgtacaccagagagggcttcagcttcgaggccctgccccccagagccagctgcgagacccccgccagcacccccgaggcccacgagcacgcccccgcccacagcaaccccagcggcagagccgccctggccagccagctgctggaccagagcgccctgagccccgccggcggcagcggcccccagacctggtggagaagaagaagaagaagcatcagcagagccagacaggtggagctgctgctggtggccgacgccagcatggccagactgtacggcagaggcctgcagcactacctgctgaccctggccagcatcgccaacagactgtacagccacgccagcatcgagaaccacatcagactggccgtggtgaaggtggtggtgctgggcgacaaggacaagagcctggaggtgagcaagaacgccgccaccaccctgaagaacttctgcaagtggcagcaccagcacaaccagctgggcgacgaccacgaggagcactacgacgccgccatcctgttcaccagagaggacctgtgcggccaccacagctgcgacaccctgggcatggccgacgtgggcaccatctgcagccccgagagaagctgcgccgtgatcgaggacgacggcctgcacgccgccttcaccgtggcccacgagatcggccacctgctgggcctgagccacgacgacagcaagttctgcgaggagaccttcggcagcaccgaggacaagagactgatgagcagcatcctgaccagcatcgacgccagcaagccctggagcaagtgcaccagcgccaccatcaccgagttcctggacgacggccacggcaactgcctgctggacctgcccagaaagcagatcctgggccccgaggagctgcccggccagacctacgacgccacccagcagtgcaacctgaccttcggccccgagtacagcgtgtgccccggcatggacgtgtgcgccagactgtggtgcgccgtggtgagacagggccagatggtgtgcctgaccaagaagctgcccgccgtggagggcaccccctgcggcaagggcagaatctgcctgcagggcaagtgcgtggacaagaccaagaagaagtactacagcaccagcagccacggcaactggggcagctggggcagctggggccagtgcagcagaagctgcggcggcggcgtgcagttcgcctacagacactgcaacaaccccgcccccagaaacaacggcagatactgcaccggcaagagagccatctacagaagctgcagcctgatgccctgcccccccaacggcaagagcttcagacacgagcagtgcgaggccaagaacggctaccagagcgacgccaagggcgtgaagaccttcgtggagtgggtgcccaagtacgccggcgtgctgcccgccgacgtgtgcaagctgacctgcagagccaagggcaccggctactacgtggtgttcagccccaaggtgaccgacggcaccgagtgcagactgtacagcaacagcgtgtgcgtgagaggcaagtgcgtgagaaccggctgcgacggcatcatcggcagcaagctgcagtacgacaagtgcggcgtgtgcggcggcgacaacagcagctgcaccaagatcgtgggcaccttcaacaagaagagcaagggctacaccgacgtggtgagaatccccgagggcgccacccacatcaaggtgagacagttcaaggccaaggaccagaccagattcaccgcctacctggccctgaagaagaagaacggcgagtacctgatcaacggcaagtacatgatcagcaccagcgagaccatcatcgacatcaacggcaccgtgatgaactacagcggctggagccacagagacgacttcctgcacggcatgggctacagcgccaccaaggagatcctgatcgtgcagatcctggccaccgaccccaccaagcccctggacgtgagatacagcttcttcgtgcccaagaagagcacccccaaggtgaacagcgtgaccagccacggcagcaacaaggtgggcagccacaccagccagccccagtgggtgaccggcccctggctggcctgcagcagaacctgcgacaccggctggcacaccagaaccgtgcagtgccaggacggcaacagaaagctggccaagggctgccccctgagccagagacccagcgccttcaagcagtgcctgctgaagaagtgctag

SEQ ID NO: 71861 - DNA, 2577 bp, synthetic construct
  misc_feature 1..2577: note = Description of Artificial Sequence: Synthetic coding sequence
  source 1..2577: mol_type = other DNA
atggagatcctgtggaagaccctgacctggatcctgagcctgatcatggccagcagcgagttccacagcgaccacagactgagctacagcagccaggaggagttcctgacctacctggagcactaccagctgaccatccccatcagagtggaccagaacggcgccttcctgagcttcaccgtgaagaacgacaagcacagcagaagaagaagaagcatggaccccatcgacccccagcaggccgtgagcaagctgttcttcaagctgagcgcctacggcaagcacttccacctgaacctgaccctgaacaccgacttcgtgagcaagcacttcaccgtggagtactggggcaaggacggcccccagtggaagcacgacttcctggacaactgccactacaccggctacctgcaggaccagagaagcaccaccaaggtggccctgagcaactgcgtgggcctgcacggcgtgatcgccaccgaggacgaggagtacttcatcgagcccctgaagaacaccaccgaggacagcaagcacttcagctacgagaacggccacccccacgtgatctacaagaagagcgccctgcagcagagacacctgtacgaccacagccactgcggcgtgagcgacttcaccagaagcggcaagccctggtggctgaacgacaccagcaccgtgagctacagcctgcccatcaacaacacccacatccaccacagacagaagagaagcgtgagcatcgagagattcgtggagaccctggtggtggccgacaagatgatggtgggctaccacggcagaaaggacatcgagcactacatcctgagcgtgatgaacatcgtggccaagctgtacagagacagcagcctgggcaacgtggtgaacatcatcgtggccagactgatcgtgctgaccgaggaccagcccaacctggagatcaaccaccacgccgacaagagcctggacagcttctgcaagtggcagaagagcatcctgagccaccagagcgacggcaacaccatccccgagaacggcatcgcccaccacgacaacgccgtgctgatcaccagatacgacatctgcacctacaagaacaagccctgcggcaccctgggcctggccagcgtggccggcatgtgcgagcccgagagaagctgcagcatcaacgaggacatcggcctgggcagcgccttcaccatcgcccacgagatcggccacaacttcggcatgaaccacgacggcatcggcaacagctgcagaaaggtgatgaagcagcagtacggcagcagccactactgcgagtaccagagcttcttcctggtgtgcctgcagagcagactgcaccaccagctgagcagagaggtgtgcagagagctgtggtgcctgagcaagagcaacagatgcgtgaccaacagcatccccgccgccgagggcaccctgtgccagaccggcaacatcgagaagggctggtgctaccagggcgactgcgtgcccttcggcacctggccccagagcatcgacggcggctggggcccctggagcctgtggggcgagtgcagcagaacctgcggcggcggcgtgagcagcagcctgagacactgcgacagccccgcccccagcggcggcggcaagtactgcctgggcgagagaaagagatacagaagctgcaacaccgacccctgccccctgggcagcagagacttcagagagaagcagtgcgccgacttcgacaacatgcccttcagaggcaagtactacaactggaagccctacaccggcggcggcgtgaagccctgcgccctgaactgcctggccgagggctacaacttctacaccgagagagcccccgccgtgatcgacggcacccagtgcaacgccgacagcctggacatctgcatcaacggcgagtgcaagcacgtgggctgcgacaacatcctgggcagcgacgccagagaggacagatgcagagtgtgcggcggcgacggcagcacctgcgacgccatcgagggcttcttcaacgacagcctgcccagaggcggctacatggaggtggtgcagatccccagaggcagcgtgcacatcgaggtgagagaggtggccatgagcaagaactacatcgccctgaagagcgagggcgacgactactacatcaacggcgcctggaccatcgactggcccagaaagttcgacgtggccggcaccgccttccactacaagagacccaccgacgagcccgagagcctggaggccctgggccccaccagcgagaacctgatcgtgatggtgctgctgcaggagcagaacctgggcatcagatacaagttcaacgtgcccatcaccagaaccggcagcggcgacaacgaggtgggcttcacctggaaccaccagccctggagcgagtgcagcgccacctgcgccggcggcaagatgcccaccagacagcccacccagagagccagatggagaaccaagcacatcctgagctacgccctgtgcctgctgaagaagctgatcggcaacatcagctgcagattcgccagcagctgcaacctggccaaggagaccctgctgtag

SEQ ID NO: 71862 - DNA, 3354 bp, synthetic construct
  misc_feature 1..3354: note = Description of Artificial Sequence: Synthetic coding sequence
  source 1..3354: mol_type = other DNA
atggagatcctgtggaagaccctgacctggatcctgagcctgatcatggccagcagcgagttccacagcgaccacagactgagctacagcagccaggaggagttcctgacctacctggagcactaccagctgaccatccccatcagagtggaccagaacggcgccttcctgagcttcaccgtgaagaacgacaagcacagcagaagaagaagaagcatggaccccatcgacccccagcaggccgtgagcaagctgttcttcaagctgagcgcctacggcaagcacttccacctgaacctgaccctgaacaccgacttcgtgagcaagcacttcaccgtggagtactggggcaaggacggcccccagtggaagcacgacttcctggacaactgccactacaccggctacctgcaggaccagagaagcaccaccaaggtggccctgagcaactgcgtgggcctgcacggcgtgatcgccaccgaggacgaggagtacttcatcgagcccctgaagaacaccaccgaggacagcaagcacttcagctacgagaacggccacccccacgtgatctacaagaagagcgccctgcagcagagacacctgtacgaccacagccactgcggcgtgagcgacttcaccagaagcggcaagccctggtggctgaacgacaccagcaccgtgagctacagcctgcccatcaacaacacccacatccaccacagacagaagagaagcgtgagcatcgagagattcgtggagaccctggtggtggccgacaagatgatggtgggctaccacggcagaaaggacatcgagcactacatcctgagcgtgatgaacatcgtggccaagctgtacagagacagcagcctgggcaacgtggtgaacatcatcgtggccagactgatcgtgctgaccgaggaccagcccaacctggagatcaaccaccacgccgacaagagcctggacagcttctgcaagtggcagaagagcatcctgagccaccagagcgacggcaacaccatccccgagaacggcatcgcccaccacgacaacgccgtgctgatcaccagatacgacatctgcacctacaagaacaagccctgcggcaccctgggcctggccagcgtggccggcatgtgcgagcccgagagaagctgcagcatcaacgaggacatcggcctgggcagcgccttcaccatcgcccacgagatcggccacaacttcggcatgaaccacgacggcatcggcaacagctgcggcaccaagggccacgaggccgccaagctgatggccgcccacatcaccgccaacaccaaccccttcagctggagcgcctgcagcagagactacatcaccagcttcctggacagcggcagaggcacctgcctggacaacgagccccccaagagagacttcctgtaccccgccgtggcccccggccaggtgtacgacgccgacgagcagtgcagattccagtacggcgccaccagcagacagtgcaagtacggcgaggtgtgcagagagctgtggtgcctgagcaagagcaacagatgcgtgaccaacagcatccccgccgccgagggcaccctgtgccagaccggcaacatcgagaagggctggtgctaccagggcgactgcgtgcccttcggcacctggccccagagcatcgacggcggctggggcccctggagcctgtggggcgagtgcagcagaacctgcggcggcggcgtgagcagcagcctgagacactgcgacagccccgcccccagcggcggcggcaagtactgcctgggcgagagaaagagatacagaagctgcaacaccgacccctgccccctgggcagcagagacttcagagagaagcagtgcgccgacttcgacaacatgcccttcagaggcaagtactacaactggaagccctacaccggcggcggcgtgaagccctgcgccctgaactgcctggccgagggctacaacttctacaccgagagagcccccgccgtgatcgacggcacccagtgcaacgccgacagcctggacatctgcatcaacggcgagtgcaagcacgtgggctgcgacaacatcctgggcagcgacgccagagaggacagatgcagagtgtgcggcggcgacggcagcacctgcgacgccatcgagggcttcttcaacgacagcctgcccagaggcggctacatggaggtggtgcagatccccagaggcagcgtgcacatcgaggtgagagaggtggccatgagcaagaactacatcgccctgaagagcgagggcgacgactactacatcaacggcgcctggaccatcgactggcccagaaagttcgacgtggccggcaccgccttccactacaagagacccaccgacgagcccgagagcctggaggccctgggccccaccagcgagaacctgatcgtgatggtgctgctgcaggagcagaacctgggcatcagatacaagttcaacgtgcccatcaccagaaccggcagcggcgacaacgaggtgggcttcacctggaaccaccagccctggagcgagtgcagcgccacctgcgccggcggcgtgcagagacaggaggtggtgtgcaagagactggacgacaacagcatcgtgcagaacaactactgcgaccccgacagcaagccccccgagaaccagagagcctgcaacaccgagccctgcccccccgagtggttcatcggcgactggctggagtgcagcaagacctgcgacggcggcatgagaaccagagccgtgctgtgcatcagaaagatcggccccagcgaggaggagaccctggactacagcggctgcctgacccacagacccgtggagaaggagccctgcaacaaccagagctgccccccccagtgggtggccctggactggagcgagtgcacccccaagtgcggccccggcttcaagcacagaatcgtgctgtgcaagagcagcgacctgagcaagaccttccccgccgcccagtgccccgaggagagcaagccccccgtgagaatcagatgcagcctgggcagatgccccccccccagatgggtgaccggcgactggggccagtgcagcgcccagtgcggcctgggccagcagatgagaaccgtgcagtgcctgagctacaccggccaggccagcagcgactgcctggagaccgtgagaccccccagcatgcagcagtgcgagagcaagtgcgacagcacccccatcagcaacaccgaggagtgcaaggacgtgaacaaggtggcctactgccccctggtgctgaagttcaagttctgcagcagagcctacttcagacagatgtgctgcaagacctgccagggccactag

SEQ ID NO: 71863 - DNA, 1407 bp, synthetic construct
  misc_feature 1..1407: note = Description of Artificial Sequence: Synthetic coding sequence
  source 1..1407: mol_type = other DNA
atggagatcctgtggaagaccctgacctggatcctgagcctgatcatggccagcagcgagttccacagcgaccacagactgagctacagcagccaggaggagttcctgacctacctggagcactaccagctgaccatccccatcagagtggaccagaacggcgccttcctgagcttcaccgtgaagaacgacaagcacagcagaagaagaagaagcatggaccccatcgacccccagcaggccgtgagcaagctgttcttcaagctgagcgcctacggcaagcacttccacctgaacctgaccctgaacaccgacttcgtgagcaagcacttcaccgtggagtactggggcaaggacggcccccagtggaagcacgacttcctggacaactgccactacaccggctacctgcaggaccagagaagcaccaccaaggtggccctgagcaactgcgtgggcctgcacggcgtgatcgccaccgaggacgaggagtacttcatcgagcccctgaagaacaccaccgaggacagcaagcacttcagctacgagaacggccacccccacgtgatctacaagaagagcgccctgcagcagagacacctgtacgaccacagccactgcggcgtgagcgacttcaccagaagcggcaagccctggtggctgaacgacaccagcaccgtgagctacagcctgcccatcaacaacacccacatccaccacagacagaagagaagcgtgagcatcgagagattcgtggagaccctggtggtggccgacaagatgatggtgggctaccacggcagaaaggacatcgagcactacatcctgagcgtgatgaacatcgtggccaagctgtacagagacagcagcctgggcaacgtggtgaacatcatcgtggccagactgatcgtgctgaccgaggaccagcccaacctggagatcaaccaccacgccgacaagagcctggacagcttctgcaagtggcagaagagcatcctgagccaccagagcgacggcaacaccatccccgagaacggcatcgcccaccacgacaacgccgtgctgatcaccagatacgacatctgcacctacaagaacaagccctgcggcaccctgggcctggccagcgtggccggcatgtgcgagcccgagagaagctgcagcatcaacgaggacatcggcctgggcagcgccttcaccatcgcccacgagatcggccacaacttcggcatgaaccacgacggcatcggcaacagctgcggcaccaagggccacgaggccgccaagctgatggccgcccacatcaccgccaacaccaaccccttcagctggagcgcctgcagcagagactacatcaccagcttcctggagttcctgaagctgggcgacagcatcagcggcagctag

SEQ ID NO: 71864 - DNA, 5061 bp, synthetic construct
  misc_feature 1..5061: note = Description of Artificial Sequence: Synthetic coding sequence
  source 1..5061: mol_type = other DNA
atgcccggcggccccagccccagaagccccgcccccctgctgagacccctgctgctgctgctgtgcgccctggcccccggcgcccccggccccgcccccggcagagccaccgagggcagagccgccctggacatcgtgcaccccgtgagagtggacgccggcggcagcttcctgagctacgagctgtggcccagagccctgagaaagagagacgtgagcgtgagaagagacgcccccgccttctacgagctgcagtacagaggcagagagctgagattcaacctgaccgccaaccagcacctgctggcccccggcttcgtgagcgagaccagaagaagaggcggcctgggcagagcccacatcagagcccacacccccgcctgccacctgctgggcgaggtgcaggaccccgagctggagggcggcctggccgccatcagcgcctgcgacggcctgaagggcgtgttccagctgagcaacgaggactacttcatcgagcccctggacagcgcccccgccagacccggccacgcccagccccacgtggtgtacaagagacaggcccccgagagactggcccagagaggcgacagcagcgcccccagcacctgcggcgtgcaggtgtaccccgagctggagagcagaagagagagatgggagcagagacagcagtggagaagacccagactgagaagactgcaccagagaagcgtgagcaaggagaagtgggtggagaccctggtggtggccgacgccaagatggtggagtaccacggccagccccaggtggagagctacgtgctgaccatcatgaacatggtggccggcctgttccacgaccccagcatcggcaaccccatccacatcaccatcgtgagactggtgctgctggaggacgaggaggaggacctgaagatcacccaccacgccgacaacaccctgaagagcttctgcaagtggcagaagagcatcaacatgaagggcgacgcccaccccctgcaccacgacaccgccatcctgctgaccagaaaggacctgtgcgccgccatgaacagaccctgcgagaccctgggcctgagccacgtggccggcatgtgccagccccacagaagctgcagcatcaacgaggacaccggcctgcccctggccttcaccgtggcccacgagctgggccacagcttcggcatccagcacgacggcagcggcaacgactgcgagcccgtgggcaagagacccttcatcatgagcccccagctgctgtacgacgccgcccccctgacctggagcagatgcagcagacagtacatcaccagattcctggacagaggctggggcctgtgcctggacgacccccccgccaaggacatcatcgacttccccagcgtgccccccggcgtgctgtacgacgtgagccaccagtgcagactgcagtacggcgcctacagcgccttctgcgaggacatggacaacgtgtgccacaccctgtggtgcagcgtgggcaccacctgccacagcaagctggacgccgccgtggacggcaccagatgcggcgagaacaagtggtgcctgagcggcgagtgcgtgcccgtgggcttcagacccgaggccgtggacggcggctggagcggctggagcgcctggagcatctgcagcagaagctgcggcatgggcgtgcagagcgccgagagacagtgcacccagcccacccccaagtacaagggcagatactgcgtgggcgagagaaagagattcagactgtgcaacctgcaggcctgccccgccggcagacccagcttcagacacgtgcagtgcagccacttcgacgccatgctgtacaagggccagctgcacacctgggtgcccgtggtgaacgacgtgaacccctgcgagctgcactgcagacccgccaacgagtacttcgccgagaagctgagagacgccgtggtggacggcaccccctgctaccaggtgagagccagcagagacctgtgcatcaacggcatctgcaagaacgtgggctgcgacttcgagatcgacagcggcgccatggaggacagatgcggcgtgtgccacggcaacggcagcacctgccacaccgtgagcggcaccttcgaggaggccgagggcctgggctacgtggacgtgggcctgatccccgccggcgccagagagatcagaatccaggaggtggccgaggccgccaacttcctggccctgagaagcgaggaccccgagaagtacttcctgaacggcggctggaccatccagtggaacggcgactaccaggtggccggcaccaccttcacctacgccagaagaggcaactgggagaacctgaccagccccggccccaccaaggagcccgtgtggatccagctgctgttccaggagagcaaccccggcgtgcactacgagtacaccatccacagagaggccggcggccacgacgaggtgcccccccccgtgttcagctggcactacggcccctggaccaagtgcaccgtgacctgcggcagaggcgtgcagagacagaacgtgtactgcctggagagacaggccggccccgtggacgaggagcactgcgaccccctgggcagacccgacgaccagcagagaaagtgcagcgagcagccctgccccgccagatggtgggccggcgagtggcagctgtgcagcagcagctgcggccccggcggcctgagcagaagagccgtgctgtgcatcagaagcgtgggcctggacgagcagagcgccctggagccccccgcctgcgagcacctgcccagaccccccaccgagaccccctgcaacagacacgtgccctgccccgccacctgggccgtgggcaactggagccagtgcagcgtgacctgcggcgagggcacccagagaagaaacgtgctgtgcaccaacgacaccggcgtgccctgcgacgaggcccagcagcccgccagcgaggtgacctgcagcctgcccctgtgcagatggcccctgggcaccctgggccccgagggcagcggcagcggcagcagcagccacgagctgttcaacgaggccgacttcatcccccaccacctggcccccagacccagccccgccagcagccccaagcccggcaccatgggcaacgccatcgaggaggaggcccccgagctggacctgcccggccccgtgttcgtggacgacttctactacgactacaacttcatcaacttccacgaggacctgagctacggccccagcgaggagcccgacctggacctggccggcaccggcgacagaaccccccccccccacagccaccccgccgcccccagcaccggcagccccgtgcccgccaccgagccccccgccgccaaggaggagggcgtgctgggcccctggagccccagcccctggcccagccaggccggcagaagcccccccccccccagcgagcagacccccggcaaccccctgatcaacttcctgcccgaggaggacacccccatcggcgcccccgacctgggcctgcccagcctgagctggcccagagtgagcaccgacggcctgcagacccccgccacccccgagagccagaacgacttccccgtgggcaaggacagccagagccagctgccccccccctggagagacagaaccaacgaggtgttcaaggacgacgaggagcccaagggcagaggcgccccccacctgccccccagacccagcagcaccctgccccccctgagccccgtgggcagcacccacagcagccccagccccgacgtggccgagctgtggaccggcggcaccgtggcctgggagcccgccctggagggcggcctgggccccgtggacagcgagctgtggcccaccgtgggcgtggccagcctgctgcccccccccatcgcccccctgcccgagatgaaggtgagagacagcagcctggagcccggcacccccagcttccccacccccggccccggcagctgggacctgcagaccgtggccgtgtggggcaccttcctgcccaccaccctgaccggcctgggccacatgcccgagcccgccctgaaccccggccccaagggccagcccgagagcctgagccccgaggtgcccctgagcagcagactgctgagcacccccgcctgggacagccccgccaacagccacagagtgcccgagacccagcccctggcccccagcctggccgaggccggcccccccgccgaccccctggtggtgagaaacgccggctggcaggccggcaactggagcgagtgcagcaccacctgcggcctgggcgccgtgtggagacccgtgagatgcagcagcggcagagacgaggactgcgcccccgccggcagaccccagcccgccagaagatgccacctgagaccctgcgccacctggcacagcggcaactggagcaagtgcagcagaagctgcggcggcggcagcagcgtgagagacgtgcagtgcgtggacaccagagacctgagacccctgagacccttccactgccagcccggccccgccaagccccccgcccacagaccctgcggcgcccagccctgcctgagctggtacaccagcagctggagagagtgcagcgaggcctgcggcggcggcgagcagcagagactggtgacctgccccgagcccggcctgtgcgaggaggccctgagacccaacaccaccagaccctgcaacacccacccctgcacccagtgggtggtgggcccctggggccagtgcagcggcccctgcggcggcggcgtgcagagaagactggtgaagtgcgtgaacacccagaccggcctgcccgaggaggacagcgaccagtgcggccacgaggcctggcccgagagcagcagaccctgcggcaccgaggactgcgagcccgtggagccccccagatgcgagagagacagactgagcttcggcttctgcgagaccctgagactgctgggcagatgccagctgcccaccatcagaacccagtgctgcagaagctgcagcccccccagccacggcgcccccagcagaggccaccagagagtggccagaagatag

SEQ ID NO: 71865 - DNA, 1383 bp, synthetic construct
  misc_feature 1..1383: note = Description of Artificial Sequence: Synthetic coding sequence
  source 1..1383: mol_type = other DNA
atgcccggcggccccagccccagaagccccgcccccctgctgagacccctgctgctgctgctgtgcgccctggcccccggcgcccccggccccgcccccggcagagccaccgagggcagagccgccctggacatcgtgcaccccgtgagagtggacgccggcggcagcttcctgagctacgagctgtggcccagagccctgagaaagagagacgtgagcgtgagaagagacgcccccgccttctacgagctgcagtacagaggcagagagctgagattcaacctgaccgccaaccagcacctgctggcccccggcttcgtgagcgagaccagaagaagaggcggcctgggcagagcccacatcagagcccacacccccgcctgccacctgctgggcgaggtgcaggaccccgagctggagggcggcctggccgccatcagcgcctgcgacggcctgaagggcgtgttccagctgagcaacgaggactacttcatcgagcccctggacagcgcccccgccagacccggccacgcccagccccacgtggtgtacaagagacaggcccccgagagactggcccagagaggcgacagcagcgcccccagcacctgcggcgtgcaggtgtaccccgagctggagagcagaagagagagatgggagcagagacagcagtggagaagacccagactgagaagactgcaccagagaagcgtgagcaaggagaagtgggtggagaccctggtggtggccgacgccaagatggtggagtaccacggccagccccaggtggagagctacgtgctgaccatcatgaacatggtggccggcctgttccacgaccccagcatcggcaaccccatccacatcaccatcgtgagactggtgctgctggaggacgaggaggaggacctgaagatcacccaccacgccgacaacaccctgaagagcttctgcaagtggcagaagagcatcaacatgaagggcgacgcccaccccctgcaccacgacaccgccatcctgctgaccagaaaggacctgtgcgccgccatgaacagaccctgcgagaccctgggcctgagccacgtggccggcatgtgccagccccacagaagctgcagcatcaacgaggacaccggcctgcccctggccttcaccgtggcccacgagctgggccacagcagctgcaccacccccctgcccagccccggccccgccgccgccgccagcatcagccccggcagcctgagcgtgcagagacagaacgtgtactgcctggagagacaggccggccccgtggacgaggagcactgcgaccccctgggcagacccgacgaccagcagagaaagtgcagcgagcagccctgccccgccagcgcccagtag

SEQ ID NO: 71866 - DNA, 2670 bp, synthetic construct
  misc_feature 1..2670: note = Description of Artificial Sequence: Synthetic coding sequence
  source 1..2670: mol_type = other DNA
atgctgcccgcccccgccgcccccagatggccccccctgctgctgctgctgctgctgctgctgcccctggccagaggcgcccccgccagacccgccgccggcggccaggccagcgagctggtggtgcccaccagactgcccggcagcgccggcgagctggccctgcacctgagcgccttcggcaagggcttcgtgctgagactggcccccgacgacagcttcctggcccccgagttcaagatcgagagactgggcggcagcggcagagccaccggcggcgagagaggcctgagaggctgcttcttcagcggcaccgtgaacggcgagcccgagagcctggccgccgtgagcctgtgcagaggcctgagcggcagcttcctgctggacggcgaggagttcaccatccagccccagggcgccggcggcagcctggcccagccccacagactgcagagatggggccccgccggcgccagacccctgcccagaggccccgagtgggaggtggagaccggcgagggccagagacaggagagaggcgaccaccaggaggacagcgaggaggagagccaggaggaggaggccgagggcgccagcgagccccccccccccctgggcgccaccagcagaaccaagagattcgtgagcgaggccagattcgtggagaccctgctggtggccgacgccagcatggccgccttctacggcgccgacctgcagaaccacatcctgaccctgatgagcgtggccgccagaatctacaagcaccccagcatcaagaacagcatcaacctgatggtggtgaaggtgctgatcgtggaggacgagaagtggggccccgaggtgagcgacaacggcggcctgaccctgagaaacttctgcaactggcagagaagattcaaccagcccagcgacagacaccccgagcactacgacaccgccatcctgctgaccagacagaacttctgcggccaggagggcctgtgcgacaccctgggcgtggccgacatcggcaccatctgcgaccccaacaagagctgcagcgtgatcgaggacgagggcctgcaggccgcccacaccctggcccacgagctgggccacgtgctgagcatgccccacgacgacagcaagccctgcaccagactgttcggccccatgggcaagcaccacgtgatggcccccctgttcgtgcacctgaaccagaccctgccctggagcccctgcagcgccatgtacctgaccgagctgctggacggcggccacggcgactgcctgctggacgcccccgccgccgccctgcccctgcccaccggcctgcccggcagaatggccctgtaccagctggaccagcagtgcagacagatcttcggccccgacttcagacactgccccaacaccagcgcccaggacgtgtgcgcccagctgtggtgccacaccgacggcgccgagcccctgtgccacaccaagaacggcagcctgccctgggccgacggcaccccctgcggccccggccacctgtgcagcgagggcagctgcctgcccgaggaggaggtggagagacccaagcccgtggccgacggcggctgggccccctggggcccctggggcgagtgcagcagaacctgcggcggcggcgtgcagttcagccacagagagtgcaaggaccccgagccccagaacggcggcagatactgcctgggcagaagagccaagtaccagagctgccacaccgaggagtgcccccccgacggcaagagcttcagagagcagcagtgcgagaagtacaacgcctacaactacaccgacatggacggcaacctgctgcagtgggtgcccaagtacgccggcgtgagccccagagacagatgcaagctgttctgcagagccagaggcagaagcgagttcaaggtgttcgaggccaaggtgatcgacggcaccctgtgcggccccgagaccctggccatctgcgtgagaggccagtgcgtgaaggccggctgcgaccacgtggtggacagccccagaaagctggacaagtgcggcgtgtgcggcggcaagggcaacagctgcagaaaggtgagcggcagcctgacccccaccaactacggctacaacgacatcgtgaccatccccgccggcgccaccaacatcgacgtgaagcagagaagccaccccggcgtgcagaacgacggcaactacctggccctgaagaccgccgacggccagtacctgctgaacggcaacctggccatcagcgccatcgagcaggacatcctggtgaagggcaccatcctgaagtacagcggcagcatcgccaccctggagagactgcagagcttcagacccctgcccgagcccctgaccgtgcagctgctgaccgtgcccggcgaggtgttcccccccaaggtgaagtacaccttcttcgtgcccaacgacgtggacttcagcatgcagagcagcaaggagagagccaccaccaacatcatccagcccctgctgcacgcccagtgggtgctgggcgactggagcgagtgcagcagcacctgcggcgccggctggcagagaagaaccgtggagtgcagagaccccagcggccaggccagcgccacctgcaacaaggccctgaagcccgaggacgccaagccctgcgagagccagctgtgccccctgtag

SEQ ID NO: 71867 - DNA, 2757 bp, synthetic construct
  misc_feature 1..2757: note = Description of Artificial Sequence: Synthetic coding sequence
  source 1..2757: mol_type = other DNA
gccgccagagccagactgggcggcggcggcgccggcggcgccggctgcgccagccagagaggcagaagaggcagcgcccccgccgccggccccagaggccccagcagaccctgcaccagactgatccccctgttcctggagagagccgccggccccagaagcggcagacagcacctgcccgcccccggcggcctgctgcccagccccgccagaagccacagaagaagcccccacgcccccagacccagaagaccccccgtggccagcgcccccgccgccgccgccgccgccgccgccgccggccccagaagacccggccccgccagaagcagaggcgccggcctgggcgccggcggcgcccacgccgtggccagactgagaggctgcttcttcagcggcaccgtgaacggcgagcccgagagcctggccgccgtgagcctgtgcagaggcctgagcggcagcttcctgctggacggcgaggagttcaccatccagccccagggcgccggcggcagcctggcccagccccacagactgcagagatggggccccgccggcgccagacccctgcccagaggccccgagtgggaggtggagaccggcgagggccagagacaggagagaggcgaccaccaggaggacagcgaggaggagagccaggaggaggaggccgagggcgccagcgagccccccccccccctgggcgccaccagcagaaccaagagattcgtgagcgaggccagattcgtggagaccctgctggtggccgacgccagcatggccgccttctacggcgccgacctgcagaaccacatcctgaccctgatgagcgtggccgccagaatctacaagcaccccagcatcaagaacagcatcaacctgatggtggtgaaggtgctgatcgtggaggacgagaagtggggccccgaggtgagcgacaacggcggcctgaccctgagaaacttctgcaactggcagagaagattcaaccagcccagcgacagacaccccgagcactacgacaccgccatcctgctgaccagacagaacttctgcggccaggagggcctgtgcgacaccctgggcgtggccgacatcggcaccatctgcgaccccaacaagagctgcagcgtgatcgaggacgagggcctgcaggccgcccacaccctggcccacgagctgggccacgtgctgagcatgccccacgacgacagcaagccctgcaccagactgttcggccccatgggcaagcaccacgtgatggcccccctgttcgtgcacctgaaccagaccctgccctggagcccctgcagcgccatgtacctgaccgagctgctggacggcggccacggcgactgcctgctggacgcccccgccgccgccctgcccctgcccaccggcctgcccggcagaatggccctgtaccagctggaccagcagtgcagacagatcttcggccccgacttcagacactgccccaacaccagcgcccaggacgtgtgcgcccagctgtggtgccacaccgacggcgccgagcccctgtgccacaccaagaacggcagcctgccctgggccgacggcaccccctgcggccccggccacctgtgcagcgagggcagctgcctgcccgaggaggaggtggagagacccaagcccgtggccgacggcggctgggccccctggggcccctggggcgagtgcagcagaacctgcggcggcggcgtgcagttcagccacagagagtgcaaggaccccgagccccagaacggcggcagatactgcctgggcagaagagccaagtaccagagctgccacaccgaggagtgcccccccgacggcaagagcttcagagagcagcagtgcgagaagtacaacgcctacaactacaccgacatggacggcaacctgctgcagtgggtgcccaagtacgccggcgtgagccccagagacagatgcaagctgttctgcagagccagaggcagaagcgagttcaaggtgttcgaggccaaggtgatcgacggcaccctgtgcggccccgagaccctggccatctgcgtgagaggccagtgcgtgaaggccggctgcgaccacgtggtggacagccccagaaagctggacaagtgcggcgtgtgcggcggcaagggcaacagctgcagaaaggtgagcggcagcctgacccccaccaactacggctacaacgacatcgtgaccatccccgccggcgccaccaacatcgacgtgaagcagagaagccaccccggcgtgcagaacgacggcaactacctggccctgaagaccgccgacggccagtacctgctgaacggcaacctggccatcagcgccatcgagcaggacatcctggtgaagggcaccatcctgaagtacagcggcagcatcgccaccctggagagactgcagagcttcagacccctgcccgagcccctgaccgtgcagctgctgaccgtgcccggcgaggtgttcccccccaaggtgaagtacaccttcttcgtgcccaacgacgtggacttcagcatgcagagcagcaaggagagagccaccaccaacatcatccagcccctgctgcacgcccagtgggtgctgggcgactggagcgagtgcagcagcacctgcggcgccggctggcagagaagaaccgtggagtgcagagaccccagcggccaggccagcgccacctgcaacaaggccctgaagcccgaggacgccaagccctgcgagagccagctgtgccccctgtag

SEQ ID NO: 71868 - DNA, 5724 bp, synthetic construct
  misc_feature 1..5724: note = Description of Artificial Sequence: Synthetic coding sequence
  source 1..5724: mol_type = other DNA
atgcagttcgtgagctgggccaccctgctgaccctgctggtgagagacctggccgagatgggcagccccgacgccgccgccgccgtgagaaaggacagactgcaccccagacaggtgaagctgctggagaccctgagcgagtacgagatcgtgagccccatcagagtgaacgccctgggcgagcccttccccaccaacgtgcacttcaagagaaccagaagaagcatcaacagcgccaccgacccctggcccgccttcgccagcagcagcagcagcagcaccagcagccaggcccactacagactgagcgccttcggccagcagttcctgttcaacctgaccgccaacgccggcttcatcgcccccctgttcaccgtgaccctgctgggcacccccggcgtgaaccagaccaagttctacagcgaggaggaggccgagctgaagcactgcttctacaagggctacgtgaacaccaacagcgagcacaccgccgtgatcagcctgtgcagcggcatgctgggcaccttcagaagccacgacggcgactacttcatcgagcccctgcagagcatggacgagcaggaggacgaggaggagcagaacaagccccacatcatctacagaagaagcgccccccagagagagcccagcaccggcagacacgcctgcgacaccagcgagcacaagaacagacacagcaaggacaagaagaagaccagagccagaaagtggggcgagagaatcaacctggccggcgacgtggccgccctgaacagcggcctggccaccgaggccttcagcgcctacggcaacaagaccgacaacaccagagagaagagaacccacagaagaaccaagagattcctgagctaccccagattcgtggaggtgctggtggtggccgacaacagaatggtgagctaccacggcgagaacctgcagcactacatcctgaccctgatgagcatcgacggccccagcatcagcttcaacgcccagaccaccctgaagaacttctgccagtggcagcacagcaagaacagccccggcggcatccaccacgacaccgccgtgctgctgaccagacaggacatctgcagagcccacgacaagtgcgacaccctgggcctggccgagctgggcaccatctgcgacccctacagaagctgcagcatcagcgaggacagcggcctgagcaccgccttcaccatcgcccacgagctgggccacgtgttcaacatgccccacgacgacaacaacaagtgcaaggaggagggcgtgaagagcccccagcacgtgatggcccccaccctgaacttctacaccaacccctggatgtggagcaagtgcagcagaaagtacatcaccgagttcctggacaccggctacggcgagtgcctgctgaacgagcccgagagcagaccctaccccctgcccgtgcagctgcccggcatcctgtacaacgtgaacaagcagtgcgagctgatcttcggccccggcagccaggtgtgcccctacatgatgcagtgcagaagactgtggtgcaacaacgtgaacggcgtgcacaagggctgcagaacccagcacaccccctgggccgacggcaccgagtgcgagcccggcaagcactgcaagtacggcttctgcgtgcccaaggagatggacgtgcccgtgaccgacggcagctggggcagctggagccccttcggcacctgcagcagaacctgcggcggcggcatcaagaccgccatcagagagtgcaacagacccgagcccaagaacggcggcaagtactgcgtgggcagaagaatgaagttcaagagctgcaacaccgagccctgcctgaagcagaagagagacttcagagacgagcagtgcgcccacttcgacggcaagcacttcaacatcaacggcctgctgcccaacgtgagatgggtgcccaagtacagcggcatcctgatgaaggacagatgcaagctgttctgcagagtggccggcaacaccgcctactaccagctgagagacagagtgatcgacggcaccccctgcggccaggacaccaacgacatctgcgtgcagggcctgtgcagacaggccggctgcgaccacgtgctgaacagcaaggccagaagagacaagtgcggcgtgtgcggcggcgacaacagcagctgcaagaccgtggccggcaccttcaacaccgtgcactacggctacaacaccgtggtgagaatccccgccggcgccaccaacatcgacgtgagacagcacagcttcagcggcgagaccgacgacgacaactacctggccctgagcagcagcaagggcgagttcctgctgaacggcaacttcgtggtgaccatggccaagagagagatcagaatcggcaacgccgtggtggagtacagcggcagcgagaccgccgtggagagaatcaacagcaccgacagaatcgagcaggagctgctgctgcaggtgctgagcgtgggcaagctgtacaaccccgacgtgagatacagcttcaacatccccatcgaggacaagccccagcagttctactggaacagccacggcccctggcaggcctgcagcaagccctgccagggcgagagaaagagaaagctggtgtgcaccagagagagcgaccagctgaccgtgagcgaccagagatgcgacagactgccccagcccggccacatcaccgagccctgcggcaccgactgcgacctgagatggcacgtggccagcagaagcgagtgcagcgcccagtgcggcctgggctacagaaccctggacatctactgcgccaagtacagcagactggacggcaagaccgagaaggtggacgacggcttctgcagcagccaccccaagcccagcaacagagagaagtgcagcggcgagtgcaacaccggcggctggagatacagcgcctggaccgagtgcagcaagagctgcgacggcggcacccagagaagaagagccatctgcgtgaacaccagaaacgacgtgctggacgacagcaagtgcacccaccaggagaaggtgaccatccagagatgcagcgagttcccctgcccccagtggaagagcggcgactggagcgagtgcctggtgacctgcggcaagggccacaagcacagacaggtgtggtgccagttcggcgaggacagactgaacgacagaatgtgcgaccccgagaccaagcccaccagcatgcagacctgccagcagcccgagtgcgccagctggcaggccggcccctggggccagtgcagcgtgacctgcggccagggctaccagctgagagccgtgaagtgcatcatcggcacctacatgagcgtggtggacgacaacgactgcaacgccgccaccagacccaccgacacccaggactgcgagctgcccagctgccaccccccccccgccgcccccgagaccagaagaagcacctacagcgcccccagaacccagtggagattcggcagctggaccccctgcagcgccacctgcggcaagggcaccagaatgagatacgtgagctgcagagacgagaacggcagcgtggccgacgagagcgcctgcgccaccctgcccagacccgtggccaaggaggagtgcagcgtgaccccctgcggccagtggaaggccctggactggagcagctgcagcgtgacctgcggccagggcagagccaccagacaggtgatgtgcgtgaactacagcgaccacgtgatcgacagaagcgagtgcgaccaggactacatccccgagaccgaccaggactgcagcatgagcccctgcccccagagaacccccgacagcggcctggcccagcaccccttccagaacgaggactacagacccagaagcgccagccccagcagaacccacgtgctgggcggcaaccagtggagaaccggcccctggggcgcctgcagcagcacctgcgccggcggcagccagagaagagtggtggtgtgccaggacgagaacggctacaccgccaacgactgcgtggagagaatcaagcccgacgagcagagagcctgcgagagcggcccctgcccccagtgggcctacggcaactggggcgagtgcaccaagctgtgcggcggcggcatcagaaccagactggtggtgtgccagagaagcaacggcgagagattccccgacctgagctgcgagatcctggacaagccccccgacagagagcagtgcaacacccacgcctgcccccacgacgccgcctggagcaccggcccctggagcagctgcagcgtgagctgcggcagaggccacaagcagagaaacgtgtactgcatggccaaggacggcagccacctggagagcgactactgcaagcacctggccaagccccacggccacagaaagtgcagaggcggcagatgccccaagtggaaggccggcgcctggagccagtgcagcgtgagctgcggcagaggcgtgcagcagagacacgtgggctgccagatcggcacccacaagatcgccagagagaccgagtgcaacccctacaccagacccgagagcgagagagactgccagggccccagatgccccctgtacacctggagagccgaggagtggcaggagtgcaccaagacctgcggcgagggcagcagatacagaaaggtggtgtgcgtggacgacaacaagaacgaggtgcacggcgccagatgcgacgtgagcaagagacccgtggacagagagagctgcagcctgcagccctgcgagtacgtgtggatcaccggcgagtggagcgagtgcagcgtgacctgcggcaagggctacaagcagagactggtgagctgcagcgagatctacaccggcaaggagaactacgagtacagctaccagaccaccatcaactgccccggcacccagccccccagcgtgcacccctgctacctgagagactgccccgtgagcgccacctggagagtgggcaactggggcagctgcagcgtgagctgcggcgtgggcgtgatgcagagaagcgtgcagtgcctgaccaacgaggaccagcccagccacctgtgccacaccgacctgaagcccgaggagagaaagacctgcagaaacgtgtacaactgcgagctgccccagaactgcaaggaggtgaagagactgaagggcgccagcgaggacggcgagtacttcctgatgatcagaggcaagctgctgaagatcttctgcgccggcatgcacagcgaccaccccaaggagtacgtgaccctggtgcacggcgacagcgagaacttcagcgaggtgtacggccacagactgcacaaccccaccgagtgcccctacaacggcagcagaagagacgactgccagtgcagaaaggactacaccgccgccggcttcagcagcttccagaagatcagaatcgacctgaccagcatgcagatcatcaccaccgacctgcagttcgccagaaccagcgagggccaccccgtgcccttcgccaccgccggcgactgctacagcgccgccaagtgcccccagggcagattcagcatcaacctgtacggcaccggcctgagcctgaccgagagcgccagatggatcagccagggcaactacgccgtgagcgacatcaagaagagccccgacggcaccagagtggtgggcaagtgcggcggctactgcggcaagtgcacccccagcagcggcaccggcctggaggtgagagtgctgtag

SEQ ID NO: 71869 - DNA, 2976 bp, synthetic construct
  misc_feature 1..2976: note = Description of Artificial Sequence: Synthetic coding sequence
  source 1..2976: mol_type = other DNA
tgagagtgcagcgcccagtgcggcctgggctacagaaccctggacatctactgcgccaagtacagcagactggacggcaagaccgagaaggtggacgacggcttctgcagcagccaccccaagcccagcaacagagagaagtgcagcggcgagtgcaacaccggcggctggagatacagcgcctggaccgagtgcagcaagagctgcgacggcggcacccagagaagaagagccatctgcgtgaacaccagaaacgacgtgctggacgacagcaagtgcacccaccaggagaaggtgaccatccagagatgcagcgagttcccctgcccccagtggaagagcggcgactggagcgagtgcctggtgacctgcggcaagggccacaagcacagacaggtgtggtgccagttcggcgaggacagactgaacgacagaatgtgcgaccccgagaccaagcccaccagcatgcagacctgccagcagcccgagtgcgccagctggcaggccggcccctggggccagtgcagcgtgacctgcggccagggctaccagctgagagccgtgaagtgcatcatcggcacctacatgagcgtggtggacgacaacgactgcaacgccgccaccagacccaccgacacccaggactgcgagctgcccagctgccaccccccccccgccgcccccgagaccagaagaagcacctacagcgcccccagaacccagtggagattcggcagctggaccccctgcagcgccacctgcggcaagggcaccagaatgagatacgtgagctgcagagacgagaacggcagcgtggccgacgagagcgcctgcgccaccctgcccagacccgtggccaaggaggagtgcagcgtgaccccctgcggccagtggaaggccctggactggagcagctgcagcgtgacctgcggccagggcagagccaccagacaggtgatgtgcgtgaactacagcgaccacgtgatcgacagaagcgagtgcgaccaggactacatccccgagaccgaccaggactgcagcatgagcccctgcccccagagaacccccgacagcggcctggcccagcaccccttccagaacgaggactacagacccagaagcgccagccccagcagaacccacgtgctgggcggcaaccagtggagaaccggcccctggggcgcctgcagcagcacctgcgccggcggcagccagagaagagtggtggtgtgccaggacgagaacggctacaccgccaacgactgcgtggagagaatcaagcccgacgagcagagagcctgcgagagcggcccctgcccccagtgggcctacggcaactggggcgagtgcaccaagctgtgcggcggcggcatcagaaccagactggtggtgtgccagagaagcaacggcgagagattccccgacctgagctgcgagatcctggacaagccccccgacagagagcagtgcaacacccacgcctgcccccacgacgccgcctggagcaccggcccctggagcagctgcagcgtgagctgcggcagaggccacaagcagagaaacgtgtactgcatggccaaggacggcagccacctggagagcgactactgcaagcacctggccaagccccacggccacagaaagtgcagaggcggcagatgccccaagtggaaggccggcgcctggagccagtgcagcgtgagctgcggcagaggcgtgcagcagagacacgtgggctgccagatcggcacccacaagatcgccagagagaccgagtgcaacccctacaccagacccgagagcgagagagactgccagggccccagatgccccctgtacacctggagagccgaggagtggcaggagtgcaccaagacctgcggcgagggcagcagatacagaaaggtggtgtgcgtggacgacaacaagaacgaggtgcacggcgccagatgcgacgtgagcaagagacccgtggacagagagagctgcagcctgcagccctgcgagtacgtgtggatcaccggcgagtggagcgagtgcagcgtgacctgcggcaagggctacaagcagagactggtgagctgcagcgagatctacaccggcaaggagaactacgagtacagctaccagaccaccatcaactgccccggcacccagccccccagcgtgcacccctgctacctgagagactgccccgtgagcgccacctggagagtgggcaactggggcagctgcagcgtgagctgcggcgtgggcgtgatgcagagaagcgtgcagtgcctgaccaacgaggaccagcccagccacctgtgccacaccgacctgaagcccgaggagagaaagacctgcagaaacgtgtacaactgcgagctgccccagaactgcaaggaggtgaagagactgaagggcgccagcgaggacggcgagtacttcctgatgatcagaggcaagctgctgaagatcttctgcgccggcatgcacagcgaccaccccaaggagtacgtgaccctggtgcacggcgacagcgagaacttcagcgaggtgtacggccacagactgcacaaccccaccgagtgcccctacaacggcagcagaagagacgactgccagtgcagaaaggactacaccgccgccggcttcagcagcttccagaagatcagaatcgacctgaccagcatgcagatcatcaccaccgacctgcagttcgccagaaccagcgagggccaccccgtgcccttcgccaccgccggcgactgctacagcgccgccaagtgcccccagggcagattcagcatcaacctgtacggcaccggcctgagcctgaccgagagcgccagatggatcagccagggcaactacgccgtgagcgacatcaagaagagccccgacggcaccagagtggtgggcaagtgcggcggctactgcggcaagtgcacccccagcagcggcaccggcctggaggtgagagtgctgtag

SEQ ID NO: 71870 - DNA, 5808 bp, synthetic construct
  misc_feature 1..5808: note = Description of Artificial Sequence: Synthetic coding sequence
  source 1..5808: mol_type = other DNA
atgcagttcgtgagctgggccaccctgctgaccctgctggtgagagacctggccgagatgggcagccccgacgccgccgccgccgtgagaaaggacagactgcaccccagacaggtgaagctgctggagaccctgagcgagtacgagatcgtgagccccatcagagtgaacgccctgggcgagcccttccccaccaacgtgcacttcaagagaaccagaagaagcatcaacagcgccaccgacccctggcccgccttcgccagcagcagcagcagcagcaccagcagccaggcccactacagactgagcgccttcggccagcagttcctgttcaacctgaccgccaacgccggcttcatcgcccccctgttcaccgtgaccctgctgggcacccccggcgtgaaccagaccaagttctacagcgaggaggaggccgagctgaagcactgcttctacaagggctacgtgaacaccaacagcgagcacaccgccgtgatcagcctgtgcagcggcatgctgggcaccttcagaagccacgacggcgactacttcatcgagcccctgcagagcatggacgagcaggaggacgaggaggagcagaacaagccccacatcatctacagaagaagcgccccccagagagagcccagcaccggcagacacgcctgcgacaccagcgagcacaagaacagacacagcaaggacaagaagaagaccagagccagaaagtggggcgagagaatcaacctggccggcgacgtggccgccctgaacagcggcctggccaccgaggccttcagcgcctacggcaacaagaccgacaacaccagagagaagagaacccacagaagaaccaagagattcctgagctaccccagattcgtggaggtgctggtggtggccgacaacagaatggtgagctaccacggcgagaacctgcagcactacatcctgaccctgatgagcatcgtggccagcatctacaaggaccccagcatcggcaacctgatcaacatcgtgatcgtgaacctgatcgtgatccacaacgagcaggacggccccagcatcagcttcaacgcccagaccaccctgaagaacttctgccagtggcagcacagcaagaacagccccggcggcatccaccacgacaccgccgtgctgctgaccagacaggacatctgcagagcccacgacaagtgcgacaccctgggcctggccgagctgggcaccatctgcgacccctacagaagctgcagcatcagcgaggacagcggcctgagcaccgccttcaccatcgcccacgagctgggccacgtgttcaacatgccccacgacgacaacaacaagtgcaaggaggagggcgtgaagagcccccagcacgtgatggcccccaccctgaacttctacaccaacccctggatgtggagcaagtgcagcagaaagtacatcaccgagttcctggacaccggctacggcgagtgcctgctgaacgagcccgagagcagaccctaccccctgcccgtgcagctgcccggcatcctgtacaacgtgaacaagcagtgcgagctgatcttcggccccggcagccaggtgtgcccctacatgatgcagtgcagaagactgtggtgcaacaacgtgaacggcgtgcacaagggctgcagaacccagcacaccccctgggccgacggcaccgagtgcgagcccggcaagcactgcaagtacggcttctgcgtgcccaaggagatggacgtgcccgtgaccgacggcagctggggcagctggagccccttcggcacctgcagcagaacctgcggcggcggcatcaagaccgccatcagagagtgcaacagacccgagcccaagaacggcggcaagtactgcgtgggcagaagaatgaagttcaagagctgcaacaccgagccctgcctgaagcagaagagagacttcagagacgagcagtgcgcccacttcgacggcaagcacttcaacatcaacggcctgctgcccaacgtgagatgggtgcccaagtacagcggcatcctgatgaaggacagatgcaagctgttctgcagagtggccggcaacaccgcctactaccagctgagagacagagtgatcgacggcaccccctgcggccaggacaccaacgacatctgcgtgcagggcctgtgcagacaggccggctgcgaccacgtgctgaacagcaaggccagaagagacaagtgcggcgtgtgcggcggcgacaacagcagctgcaagaccgtggccggcaccttcaacaccgtgcactacggctacaacaccgtggtgagaatccccgccggcgccaccaacatcgacgtgagacagcacagcttcagcggcgagaccgacgacgacaactacctggccctgagcagcagcaagggcgagttcctgctgaacggcaacttcgtggtgaccatggccaagagagagatcagaatcggcaacgccgtggtggagtacagcggcagcgagaccgccgtggagagaatcaacagcaccgacagaatcgagcaggagctgctgctgcaggtgctgagcgtgggcaagctgtacaaccccgacgtgagatacagcttcaacatccccatcgaggacaagccccagcagttctactggaacagccacggcccctggcaggcctgcagcaagccctgccagggcgagagaaagagaaagctggtgtgcaccagagagagcgaccagctgaccgtgagcgaccagagatgcgacagactgccccagcccggccacatcaccgagccctgcggcaccgactgcgacctgagatggcacgtggccagcagaagcgagtgcagcgcccagtgcggcctgggctacagaaccctggacatctactgcgccaagtacagcagactggacggcaagaccgagaaggtggacgacggcttctgcagcagccaccccaagcccagcaacagagagaagtgcagcggcgagtgcaacaccggcggctggagatacagcgcctggaccgagtgcagcaagagctgcgacggcggcacccagagaagaagagccatctgcgtgaacaccagaaacgacgtgctggacgacagcaagtgcacccaccaggagaaggtgaccatccagagatgcagcgagttcccctgcccccagtggaagagcggcgactggagcgagtgcctggtgacctgcggcaagggccacaagcacagacaggtgtggtgccagttcggcgaggacagactgaacgacagaatgtgcgaccccgagaccaagcccaccagcatgcagacctgccagcagcccgagtgcgccagctggcaggccggcccctggggccagtgcagcgtgacctgcggccagggctaccagctgagagccgtgaagtgcatcatcggcacctacatgagcgtggtggacgacaacgactgcaacgccgccaccagacccaccgacacccaggactgcgagctgcccagctgccaccccccccccgccgcccccgagaccagaagaagcacctacagcgcccccagaacccagtggagattcggcagctggaccccctgcagcgccacctgcggcaagggcaccagaatgagatacgtgagctgcagagacgagaacggcagcgtggccgacgagagcgcctgcgccaccctgcccagacccgtggccaaggaggagtgcagcgtgaccccctgcggccagtggaaggccctggactggagcagctgcagcgtgacctgcggccagggcagagccaccagacaggtgatgtgcgtgaactacagcgaccacgtgatcgacagaagcgagtgcgaccaggactacatccccgagaccgaccaggactgcagcatgagcccctgcccccagagaacccccgacagcggcctggcccagcaccccttccagaacgaggactacagacccagaagcgccagccccagcagaacccacgtgctgggcggcaaccagtggagaaccggcccctggggcgcctgcagcagcacctgcgccggcggcagccagagaagagtggtggtgtgccaggacgagaacggctacaccgccaacgactgcgtggagagaatcaagcccgacgagcagagagcctgcgagagcggcccctgcccccagtgggcctacggcaactggggcgagtgcaccaagctgtgcggcggcggcatcagaaccagactggtggtgtgccagagaagcaacggcgagagattccccgacctgagctgcgagatcctggacaagccccccgacagagagcagtgcaacacccacgcctgcccccacgacgccgcctggagcaccggcccctggagcagctgcagcgtgagctgcggcagaggccacaagcagagaaacgtgtactgcatggccaaggacggcagccacctggagagcgactactgcaagcacctggccaagccccacggccacagaaagtgcagaggcggcagatgccccaagtggaaggccggcgcctggagccagtgcagcgtgagctgcggcagaggcgtgcagcagagacacgtgggctgccagatcggcacccacaagatcgccagagagaccgagtgcaacccctacaccagacccgagagcgagagagactgccagggccccagatgccccctgtacacctggagagccgaggagtggcaggagtgcaccaagacctgcggcgagggcagcagatacagaaaggtggtgtgcgtggacgacaacaagaacgaggtgcacggcgccagatgcgacgtgagcaagagacccgtggacagagagagctgcagcctgcagccctgcgagtacgtgtggatcaccggcgagtggagcgagtgcagcgtgacctgcggcaagggctacaagcagagactggtgagctgcagcgagatctacaccggcaaggagaactacgagtacagctaccagaccaccatcaactgccccggcacccagccccccagcgtgcacccctgctacctgagagactgccccgtgagcgccacctggagagtgggcaactggggcagctgcagcgtgagctgcggcgtgggcgtgatgcagagaagcgtgcagtgcctgaccaacgaggaccagcccagccacctgtgccacaccgacctgaagcccgaggagagaaagacctgcagaaacgtgtacaactgcgagctgccccagaactgcaaggaggtgaagagactgaagggcgccagcgaggacggcgagtacttcctgatgatcagaggcaagctgctgaagatcttctgcgccggcatgcacagcgaccaccccaaggagtacgtgaccctggtgcacggcgacagcgagaacttcagcgaggtgtacggccacagactgcacaaccccaccgagtgcccctacaacggcagcagaagagacgactgccagtgcagaaaggactacaccgccgccggcttcagcagcttccagaagatcagaatcgacctgaccagcatgcagatcatcaccaccgacctgcagttcgccagaaccagcgagggccaccccgtgcccttcgccaccgccggcgactgctacagcgccgccaagtgcccccagggcagattcagcatcaacctgtacggcaccggcctgagcctgaccgagagcgccagatggatcagccagggcaactacgccgtgagcgacatcaagaagagccccgacggcaccagagtggtgggcaagtgcggcggctactgcggcaagtgcacccccagcagcggcaccggcctggaggtgagagtgctgtag

SEQ ID NO: 71871 - DNA, 1176 bp, synthetic construct
  misc_feature 1..1176: note = Description of Artificial Sequence: Synthetic coding sequence
  source 1..1176: mol_type = other DNA
atgatcctgaacggcgaggagatcatcctgagcctgcagaagaccaagcacctgctgggccccgactacaccgagaccctgtacagccccagaggcgaggagatcaccaccaagcccgagaacatggagcactgctactacaagggcaacatcctgaacgagaagaacagcgtggccagcatcagcacctgcgacggcctgagaggctacttcacccaccaccaccagagataccagatcaagcccctgaagagcaccgacgagaaggagcacgccgtgttcaccagcaaccaggaggagcaggaccccgccaaccacacctgcggcgtgaagagcaccgacggcaagcagggccccatcagaatcagcagaagcctgaagagccccgagaaggaggacttcctgagagcccagaagtacatcgacctgtacctggtgctggacaacgccttctacaagaactacaacgagaacctgaccctgatcagaagcttcgtgttcgacgtgatgaacctgctgaacgtgatctacaacaccatcgacgtgcaggtggccctggtgggcatggagatctggagcgacggcgacaagatcaaggtggtgcccagcgccagcaccaccttcgacaacttcctgagatggcacagcagcaacctgggcaagaagatccacgaccacgcccagctgctgagcggcatcagcttcaacaacagaagagtgggcctggccgccagcaacagcctgtgcagccccagcagcgtggccgtgatcgaggccaagaagaagaacaacgtggccctggtgggcgtgatgagccacgagctgggccacgtgctgggcatgcccgacgtgcccttcaacaccaagtgccccagcggcagctgcgtgatgaaccagtacctgagcagcaagttccccaaggacttcagcaccagctgcagagcccacttcgagagatacctgctgagccagaagcccaagtgcctgctgcaggcccccatccccaccaacatcatgaccacccccgtgtgcggcaaccacctgctggaggtgggcgaggactgcgactgcggcagccccaaggagtgcaccaacctgtgctgcgaggccctgacctgcaagctgaagcccggcaccgactgcggcggcgacgcccccaaccacaccaccgagtag

SEQ ID NO: 71872 - DNA, 1413 bp, synthetic construct
  misc_feature 1..1413: note = Description of Artificial Sequence: Synthetic coding sequence
  source 1..1413: mol_type = other DNA
atgctgagaggcatcagccagctgcccgccgtggccaccatgagctgggtgctgctgcccgtgctgtggctgatcgtgcagacccaggccatcgccatcaagcagacccccgagctgaccctgcacgagatcgtgtgccccaagaagctgcacatcctgcacaagagagagatcaagaacaaccagaccgagaagcacggcaaggaggagagatacgagcccgaggtgcagtaccagatgatcctgaacggcgaggagatcatcctgagcctgcagaagaccaagcacctgctgggccccgactacaccgagaccctgtacagccccagaggcgaggagatcaccaccaagcccgagaacatggagcactgctactacaagggcaacatcctgaacgagaagaacagcgtggccagcatcagcacctgcgacggcctgagaggctacttcacccaccaccaccagagataccagatcaagcccctgaagagcaccgacgagaaggagcacgccgtgttcaccagcaaccaggaggagcaggaccccgccaaccacacctgcggcgtgaagagcaccgacggcaagcagggccccatcagaatcagcagaagcctgaagagccccgagaaggaggacttcctgagagcccagaagtacatcgacctgtacctggtgctggacaacgccttctacaagaactacaacgagaacctgaccctgatcagaagcttcgtgttcgacgtgatgaacctgctgaacgtgatctacaacaccatcgacgtgcaggtggccctggtgggcatggagatctggagcgacggcgacaagatcaaggtggtgcccagcgccagcaccaccttcgacaacttcctgagatggcacagcagcaacctgggcaagaagatccacgaccacgcccagctgctgagcggcatcagcttcaacaacagaagagtgggcctggccgccagcaacagcctgtgcagccccagcagcgtggccgtgatcgaggccaagaagaagaacaacgtggccctggtgggcgtgatgagccacgagctgggccacgtgctgggcatgcccgacgtgcccttcaacaccaagtgccccagcggcagctgcgtgatgaaccagtacctgagcagcaagttccccaaggacttcagcaccagctgcagagcccacttcgagagatacctgctgagccagaagcccaagtgcctgctgcaggcccccatccccaccaacatcatgaccacccccgtgtgcggcaaccacctgctggaggtgggcgaggactgcgactgcggcagccccaaggagtgcaccaacctgtgctgcgaggccctgacctgcaagctgaagcccggcaccgactgcggcggcgacgcccccaaccacaccaccgagtag

SEQ ID NO: 71873 - DNA, 1176 bp, synthetic construct; identical to SEQ ID NO: 71871
  misc_feature 1..1176: note = Description of Artificial Sequence: Synthetic coding sequence
  source 1..1176: mol_type = other DNA

SEQ ID NO: 71874 - DNA, 2052 bp, synthetic construct
  misc_feature 1..2052: note = Description of Artificial Sequence: Synthetic coding sequence
  source 1..2052: mol_type = other DNA
atggagtgctgcagaagagccacccccggcaccctgctgctgttcctggccttcctgctgctgagcagcagaaccgccagaagcgaggaggacagagacggcctgtgggacgcctggggcccctggagcgagtgcagcagaacctgcggcggcggcgccagctacagcctgagaagatgcctgagcagcaagagctgcgagggcagaaacatcagatacagaacctgcagcaacgtggactgcccccccgaggccggcgacttcagagcccagcagtgcagcgcccacaacgacgtgaagcaccacggccagttctacgagtggctgcccgtgagcaacgaccccgacaacccctgcagcctgaagtgccaggccaagggcaccaccctggtggtggagctggcccccaaggtgctggacggcaccagatgctacaccgagagcctggacatgtgcatcagcggcctgtgccagatcgtgggctgcgaccaccagctgggcagcaccgtgaaggaggacaactgcggcgtgtgcaacggcgacggcagcacctgcagactggtgagaggccagtacaagagccagctgagcgccaccaagagcgacgacaccgtggtggccatcccctacggcagcagacacatcagactggtgctgaagggccccgaccacctgtacctggagaccaagaccctgcagggcaccaagggcgagaacagcctgagcagcaccggcaccttcctggtggacaacagcagcgtggacttccagaagttccccgacaaggagatcctgagaatggccggccccctgaccgccgacttcatcgtgaagatcagaaacagcggcagcgccgacagcaccgtgcagttcatcttctaccagcccatcatccacagatggagagagaccgacttcttcccctgcagcgccacctgcggcggcggctaccagctgaccagcgccgagtgctacgacctgagaagcaacagagtggtggccgaccagtactgccactactaccccgagaacatcaagcccaagcccaagctgcaggagtgcaacctggacccctgccccgccagcgacggctacaagcagatcatgccctacgacctgtaccaccccctgcccagatgggaggccaccccctggaccgcctgcagcagcagctgcggcggcggcatccagagcagagccgtgagctgcgtggaggaggacatccagggccacgtgaccagcgtggaggagtggaagtgcatgtacacccccaagatgcccatcgcccagccctgcaacatcttcgactgccccaagtggctggcccaggagtggagcccctgcaccgtgacctgcggccagggcctgagatacagagtggtgctgtgcatcgaccacagaggcatgcacaccggcggctgcagccccaagaccaagccccacatcaaggaggagtgcatcgtgcccaccccctgctacaagcccaaggagaagctgcccgtggaggccaagctgccctggttcaagcaggcccaggagctggaggagggcgccgccgtgagcgaggagcccagcttcatccccgaggcctggagcgcctgcaccgtgacctgcggcgtgggcacccaggtgagaatcgtgagatgccaggtgctgctgagcttcagccagagcgtggccgacctgcccatcgacgagtgcgagggccccaagcccgccagccagagagcctgctacgccggcccctgcagcggcgagatccccgagttcaaccccgacgagaccgacggcctgttcggcggcctgcaggacttcgacgagctgtacgactgggagtacgagggcttcaccaagtgcagcgagagctgcggcggcggcgtgcaggaggccgtggtgagctgcctgaacaagcagaccagagagcccgccgaggagaacctgtgcgtgaccagcagaagacccccccagctgctgaagagctgcaacctggacccctgccccgccagaagcagcatcgacagcgcctggaacgcctgcaacgtgctgtgctag

SEQ ID NO: 71875 - DNA, 1401 bp, synthetic construct
  misc_feature 1..1401: note = Description of Artificial Sequence: Synthetic coding sequence
  source 1..1401: mol_type = other DNA
atgtgcctgaccgacgagtggggcttcttcttcttcttcttcctgggcgtgcccgaggccgaggtgacctggttcagaaacaagagcaagctgggcagcccccaccacctgcacgagggcagcctgctgctgaccaacgtgagcagcagcgaccagggcctgtacagctgcagagccgccaacctgcacggcgagctgaccgagagcacccagctgctgatcctggaccccccccaggtgcccacccagctggaggacatcagagccctgctggccgccaccggccccaacctgcccagcgtgctgaccagccccctgggcacccagctggtgctggaccccggcaacagcgccctgctgggctgccccatcaagggccaccccgtgcccaacatcacctggttccacggcggccagcccatcgtgaccgccaccggcctgacccaccacatcctggccgccggccagatcctgcaggtggccaacctgagcggcggcagccagggcgagttcagctgcctggcccagaacgaggccggcgtgctgatgcagaaggccagcctggtgatccaggactactggtggagcgtggacagactggccacctgcagcgccagctgcggcaacagaggcgtgcagcagcccagactgagatgcctgctgaacagcaccgaggtgaaccccgcccactgcgccggcaaggtgagacccgccgtgcagcccatcgcctgcaacagaagagactgccccagcagatggatggtgaccagctggagcgcctgcaccagaagctgcggcggcggcgtgcagaccagaagagtgacctgccagaagctgaaggccagcggcatcagcacccccgtgagcaacgacatgtgcacccaggtggccaagagacccgtggacacccaggcctgcaaccagcagctgtgcgtggagtgggccttcagcagctggggccagtgcaacggcccctgcatcggcccccacctggccgtgcagcacagacaggtgttctgccagaccagagacggcatcaccctgcccagcgagcagtgcagcgccctgcccagacccgtgagcacccagaactgctggagcgaggcctgcagcgtgcactggagagtgagcctgtggaccctgtgcaccgccacctgcggcaactacggcttccagagcagaagagtggagtgcgtgcacgccagaaccaacaaggccgtgcccgagcacctgtgcagctggggccccagacccgccaactggcagagatgcaacatcaccccctgcgagaacatggagtgcagagacaccaccagatactgcgagaaggtgaagcagctgaagctgtgccagctgagccagttcaagagcagatgctgcggcacctgcggcaaggcctag

SEQ ID NO: 71876 - DNA, 1578 bp, synthetic construct
  misc_feature 1..1578: note = Description of Artificial Sequence: Synthetic coding sequence
  source 1..1578: mol_type = other DNA
atggagtgctgcagaagagccacccccggcaccctgctgctgttcctggccttcctgctgctgagcagcagaaccgccagaagcgaggaggacagagacggcctgtgggacgcctggggcccctggagcgagtgcagcagaacctgcggcggcggcgccagctacagcctgagaagatgcctgagcagcaagagctgcgagggcagaaacatcagatacagaacctgcagcaacgtggactgcccccccgaggccggcgacttcagagcccagcagtgcagcgcccacaacgacgtgaagcaccacggccagttctacgagtggctgcccgtgagcaacgaccccgacaacccctgcagcctgaagtgccaggccaagggcaccaccctggtggtggagctggcccccaaggtgctggacggcaccagatgctacaccgagagcctggacatgtgcatcagcggcctgtgccagatcgtgggctgcgaccaccagctgggcagcaccgtgaaggaggacaactgcggcgtgtgcaacggcgacggcagcacctgcagactggtgagaggccagtacaagagccagctgagcgccaccaagagcgacgacaccgtggtggccatcccctacggcagcagacacatcagactggtgctgaagggccccgaccacctgtacctggagaccaagaccctgcagggcaccaagggcgagaacagcctgagcagcaccggcaccttcctggtggacaacagcagcgtggacttccagaagttccccgacaaggagatcctgagaatggccggccccctgaccgccgacttcatcgtgaagatcagaaacagcggcagcgccgacagcaccgtgcagttcatcttctaccagcccatcatccacagatggagagagaccgacttcttcccctgcagcgccacctgcggcggcggctaccagctgaccagcgccgagtgctacgacctgagaagcaacagagtggtggccgaccagtactgccactactaccccgagaacatcaagcccaagcccaagctgcaggagtgcaacctggacccctgccccgccagcgacggctacaagcagatcatgccctacgacctgtaccaccccctgcccagatgggaggccaccccctggaccgcctgcagcagcagctgcggcggcggcatccagagcagagccgtgagctgcgtggaggaggacatccagggccacgtgaccagcgtggaggagtggaagtgcatgtacacccccaagatgcccatcgcccagccctgcaacatcttcgactgccccaagtggctggcccaggagtggagcccctgcaccgtgacctgcggccagggcctgagatacagagtggtgctgtgcatcgaccacagaggcatgcacaccggcggctgcagccccaagaccaagccccacatcaaggaggagtgcatcgtgcccaccccctgctacaagcccaaggagaagctgcccgtggaggccaagctgccctggttcaagcaggcccaggagctggaggagggcgccgccgtgagcgaggagcccagctag

SEQ ID NO: 71877 - DNA, 786 bp, synthetic construct
  misc_feature 1..786: note = Description of Artificial Sequence: Synthetic coding sequence
  source 1..786: mol_type = other DNA
atgtgcctgaccgacgagtggggcttcttcttcttcttcttcctgggcgtgcccgaggccgaggtgacctggttcagaaacaagagcaagctgggcagcccccaccacctgcacgagggcagcctgctgctgaccaacgtgagcagcagcgaccagggcctgtacagctgcagagccgccaacctgcacggcgagctgaccgagagcacccagctgctgatcctggaccccccccaggtgcccacccagctggaggacatcagagccctgctggccgccaccggccccaacctgcccagcgtgctgaccagccccctgggcacccagctggtgctggaccccggcaacagcgccctgctgggctgccccatcaagggccaccccgtgcccaacatcacctggttccacggcggccagcccatcgtgaccgccaccggcctgacccaccacatcctggccgccggccagatcctgcaggtggccaacctgagcggcggcagccagggcgagttcagctgcctggcccagaacgaggccggcgtgctgatgcagaaggccagcctggtgatccaggactactggtggagcgtggacagactggccacctgcagcgccagctgcggcaacagaggcgtgcagcagcccagactgagatgcctgctgaacagcaccgaggtgaaccccgcccactgcgccggcaaggtgagacccgccgtgcagcccatcgcctgcaacagaagagactgccccagcagagccatgggcctggccagcggcctgacctag

SEQ ID NO: 71878 - DNA, 5289 bp, synthetic construct
  misc_feature 1..5289: note = Description of Artificial Sequence: Synthetic coding sequence
  source 1..5289: mol_type = other DNA
atggagtgctgcagaagagccacccccggcaccctgctgctgttcctggccttcctgctgctgagcagcagaaccgccagaagcgaggaggacagagacggcctgtgggacgcctggggcccctggagcgagtgcagcagaacctgcggcggcggcgccagctacagcctgagaagatgcctgagcagcaagagctgcgagggcagaaacatcagatacagaacctgcagcaacgtggactgcccccccgaggccggcgacttcagagcccagcagtgcagcgcccacaacgacgtgaagcaccacggccagttctacgagtggctgcccgtgagcaacgaccccgacaacccctgcagcctgaagtgccaggccaagggcaccaccctggtggtggagctggcccccaaggtgctggacggcaccagatgctacaccgagagcctggacatgtgcatcagcggcctgtgccagatcgtgggctgcgaccaccagctgggcagcaccgtgaaggaggacaactgcggcgtgtgcaacggcgacggcagcacctgcagactggtgagaggccagtacaagagccagctgagcgccaccaagagcgacgacaccgtggtggccatcccctacggcagcagacacatcagactggtgctgaagggccccgaccacctgtacctggagaccaagaccctgcagggcaccaagggcgagaacagcctgagcagcaccggcaccttcctggtggacaacagcagcgtggacttccagaagttccccgacaaggagatcctgagaatggccggccccctgaccgccgacttcatcgtgaagatcagaaacagcggcagcgccgacagcaccgtgcagttcatcttctaccagcccatcatccacagatggagagagaccgacttcttcccctgcagcgccacctgcggcggcggctaccagctgaccagcgccgagtgctacgacctgagaagcaacagagtggtggccgaccagtactgccactactaccccgagaacatcaagcccaagcccaagctgcaggagtgcaacctggacccctgccccgccagcgacggctacaagcagatcatgccctacgacctgtaccaccccctgcccagatgggaggccaccccctggaccgcctgcagcagcagctgcggcggcggcatccagagcagagccgtgagctgcgtggaggaggacatccagggccacgtgaccagcgtggaggagtggaagtgcatgtacacccccaagatgcccatcgcccagccctgcaacatcttcgactgccccaagtggctggcccaggagtggagcccctgcaccgtgacctgcggccagggcctgagatacagagtggtgctgtgcatcgaccacagaggcatgcacaccggcggctgcagccccaagaccaagccccacatcaaggaggagtgcatcgtgcccaccccctgctacaagcccaaggagaagctgcccgtggaggccaagctgccctggttcaagcaggcccaggagctggaggagggcgccgccgtgagcgaggagcccagcttcatccccgaggcctggagcgcctgcaccgtgacctgcggcgtgggcacccaggtgagaatcgtgagatgccaggtgctgctgagcttcagccagagcgtggccgacctgcccatcgacgagtgcgagggccccaagcccgccagccagagagcctgctacgccggcccctgcagcggcgagatccccgagttcaaccccgacgagaccgacggcctgttcggcggcctgcaggacttcgacgagctgtacgactgggagtacgagggcttcaccaagtgcagcgagagctgcggcggcggcgtgcaggaggccgtggtgagctgcctgaacaagcagaccagagagcccgccgaggagaacctgtgcgtgaccagcagaagacccccccagctgctgaagagctgcaacctggacccctgccccgccagatgggagatcggcaagtggagcccctgcagcctgacctgcggcgtgggcctgcagaccagagacgtgttctgcagccacctgctgagcagagagatgaacgagaccgtgatcctggccgacgagctgtgcagacagcccaagcccagcaccgtgcaggcctgcaacagattcaactgcccccccgcctggtaccccgcccagtggcagccctgcagcagaacctgcggcggcggcgtgcagaagagagaggtgctgtgcaagcagagaatggccgacggcagcttcctggagctgcccgagaccttctgcagcgccagcaagcccgcctgccagcaggcctgcaagaaggacgactgccccagcgagtggctgctgagcgactggaccgagtgcagcaccagctgcggcgagggcacccagaccagaagcgccatctgcagaaagatgctgaagaccggcctgagcaccgtggtgaacagcaccctgtgcccccccctgcccttcagcagcagcatcagaccctgcatgctggccacctgcgccagacccggcagacccagcaccaagcacagcccccacatcgccgccgccagaaaggtgtacatccagaccagaagacagagaaagctgcacttcgtggtgggcggcttcgcctacctgctgcccaagaccgccgtggtgctgagatgccccgccagaagagtgagaaagcccctgatcacctgggagaaggacggccagcacctgatcagcagcacccacgtgaccgtggcccccttcggctacctgaagatccacagactgaagcccagcgacgccggcgtgtacacctgcagcgccggccccgccagagagcacttcgtgatcaagctgatcggcggcaacagaaagctggtggccagacccctgagccccagaagcgaggaggaggtgctggccggcagaaagggcggccccaaggaggccctgcagacccacaagcaccagaacggcatcttcagcaacggcagcaaggccgagaagagaggcctggccgccaaccccggcagcagatacgacgacctggtgagcagactgctggagcagggcggctggcccggcgagctgctggccagctgggaggcccaggacagcgccgagagaaacaccaccagcgaggaggaccccggcgccgagcaggtgctgctgcacctgcccttcaccatggtgaccgagcagagaagactggacgacatcctgggcaacctgagccagcagcccgaggagctgagagacctgtacagcaagcacctggtggcccagctggcccaggagatcttcagaagccacctggagcaccaggacaccctgctgaagcccagcgagagaagaaccagccccgtgaccctgagcccccacaagcacgtgagcggcttcagcagcagcctgagaaccagcagcaccggcgacgccggcggcggcagcagaagaccccacagaaagcccaccatcctgagaaagatcagcgccgcccagcagctgagcgccagcgaggtggtgacccacctgggccagaccgtggccctggccagcggcaccctgagcgtgctgctgcactgcgaggccatcggccaccccagacccaccatcagctgggccagaaacggcgaggaggtgcagttcagcgacagaatcctgctgcagcccgacgacagcctgcagatcctggcccccgtggaggccgacgtgggcttctacacctgcaacgccaccaacgccctgggctacgacagcgtgagcatcgccgtgaccctggccggcaagcccctggtgaagaccagcagaatgaccgtgatcaacaccgagaagcccgccgtgaccgtggacatcggcagcaccatcaagaccgtgcagggcgtgaacgtgaccatcaactgccaggtggccggcgtgcccgaggccgaggtgacctggttcagaaacaagagcaagctgggcagcccccaccacctgcacgagggcagcctgctgctgaccaacgtgagcagcagcgaccagggcctgtacagctgcagagccgccaacctgcacggcgagctgaccgagagcacccagctgctgatcctggaccccccccaggtgcccacccagctggaggacatcagagccctgctggccgccaccggccccaacctgcccagcgtgctgaccagccccctgggcacccagctggtgctggaccccggcaacagcgccctgctgggctgccccatcaagggccaccccgtgcccaacatcacctggttccacggcggccagcccatcgtgaccgccaccggcctgacccaccacatcctggccgccggccagatcctgcaggtggccaacctgagcggcggcagccagggcgagttcagctgcctggcccagaacgaggccggcgtgctgatgcagaaggccagcctggtgatccaggactactggtggagcgtggacagactggccacctgcagcgccagctgcggcaacagaggcgtgcagcagcccagactgagatgcctgctgaacagcaccgaggtgaaccccgcccactgcgccggcaaggtgagacccgccgtgcagcccatcgcctgcaacagaagagactgccccagcagatggatggtgaccagctggagcgcctgcaccagaagctgcggcggcggcgtgcagaccagaagagtgacctgccagaagctgaaggccagcggcatcagcacccccgtgagcaacgacatgtgcacccaggtggccaagagacccgtggacacccaggcctgcaaccagcagctgtgcgtggagtgggccttcagcagctggggccagtgcaacggcccctgcatcggcccccacctggccgtgcagcacagacaggtgttctgccagaccagagacggcatcaccctgcccagcgagcagtgcagcgccctgcccagacccgtgagcacccagaactgctggagcgaggcctgcagcgtgcactggagagtgagcctgtggaccctgtgcaccgccacctgcggcaactacggcttccagagcagaagagtggagtgcgtgcacgccagaaccaacaaggccgtgcccgagcacctgtgcagctggggccccagacccgccaactggcagagatgcaacatcaccccctgcgagaacatggagtgcagagacaccaccagatactgcgagaaggtgaagcagctgaagctgtgccagctgagccagttcaagagcagatgctgcggcacctgcggcaaggcctag

SEQ ID NO: 71879 - DNA, 1320 bp, synthetic construct
  misc_feature 1..1320: note = Description of Artificial Sequence: Synthetic coding sequence
  source 1..1320: mol_type = other DNA
atggagtgctgcagaagagccacccccggcaccctgctgctgttcctggccttcctgctgctgagcagcagaaccgccagaagcgaggaggacagagacggcctgtgggacgcctggggcccctggagcgagtgcagcagaacctgcggcggcggcgccagctacagcctgagaagatgcctgagcagcaagagctgcgagggcagaaacatcagatacagaacctgcagcaacgtggactgcccccccgaggccggcgacttcagagcccagcagtgcagcgcccacaacgacgtgaagcaccacggccagttctacgagtggctgcccgtgagcaacgaccccgacaacccctgcagcctgaagtgccaggccaagggcaccaccctggtggtggagctggcccccaaggtgctggacggcaccagatgctacaccgagagcctggacatgtgcatcagcggcctgtgccagatcgtgggctgcgaccaccagctgggcagcaccgtgaaggaggacaactgcggcgtgtgcaacggcgacggcagcacctgcagactggtgagaggccagtacaagagccagctgagcgccaccaagagcgacgacaccgtggtggccatcccctacggcagcagacacatcagactggtgctgaagggccccgaccacctgtacctggagaccaagaccctgcagggcaccaagggcgagaacagcctgagcagcaccggcaccttcctggtggacaacagcagcgtggacttccagaagttccccgacaaggagatcctgagaatggccggccccctgaccgccgacttcatcgtgaagatcagaaacagcggcagcgccgacagcaccgtgcagttcatcttctaccagcccatcatccacagatggagagagaccgacttcttcccctgcagcgccacctgcggcggcggctaccagctgaccagcgccgagtgctacgacctgagaagcaacagagtggtggccgaccagtactgccactactaccccgagaacatcaagcccaagcccaagctgcaggagtgcaacctggacccctgccccgccagatgggaggccaccccctggaccgcctgcagcagcagctgcggcggcggcatccagagcagagccgtgagctgcgtggaggaggacatccagggccacgtgaccagcgtggaggagtggaagtgcatgtacacccccaagatgcccatcgcccagccctgcaacatcttcgactgccccaagtggctggcccaggagtggagccccgtgaccgtgcccagcttcttcgtgcactag

SEQ ID NO: 71880 - DNA, 2856 bp, synthetic construct
  misc_feature 1..2856: note = Description of Artificial Sequence: Synthetic coding sequence
  source 1..2856: mol_type = other DNA
atggacggcagatggcagtgcagctgctgggcctggttcctgctggtgctggccgtggtggccggcgacaccgtgagcaccggcagcaccgacaacagccccaccagcaacagcctggagggcggcaccgacgccaccgccttctggtggggcgagtggaccaagtggaccgcctgcagcagaagctgcggcggcggcgtgaccagccaggagagacactgcctgcagcagagaagaaagagcgtgcccggccccggcaacagaacctgcaccggcaccagcaagagataccagctgtgcagagtgcaggagtgcccccccgacggcagaagcttcagagaggagcagtgcgtgagcttcaacagccacgtgtacaacggcagaacccaccagtggaagcccctgtaccccgacgactacgtgcacatcagcagcaagccctgcgacctgcactgcaccaccgtggacggccagagacagctgatggtgcccgccagagacggcaccagctgcaagctgaccgacctgagaggcgtgtgcgtgagcggcaagtgcgagcccatcggctgcgacggcgtgctgttcagcacccacaccctggacaagtgcggcatctgccagggcgacggcagcagctgcacccacgtgaccggcaactacagaaagggcaacgcccacctgggctacagcctggtgacccacatccccgccggcgccagagacatccagatcgtggagagaaagaagagcgccgacgtgctggccctggccgacgaggccggctactacttcttcaacggcaactacaaggtggacagccccaagaacttcaacatcgccggcaccgtggtgaagtacagaagacccatggacgtgtacgagaccggcatcgagtacatcgtggcccagggccccaccaaccagggcctgaacgtgatggtgtggaaccagaacggcaagagccccagcatcaccttcgagtacaccctgctgcagcccccccacgagagcagaccccagcccatctactacggcttcagcgagagcgccgagagccagggcctggacggcgccggcctgatgggcttcgtgccccacaacggcagcctgtacggccaggccagcagcgagagactgggcctggacaacagactgttcggccaccccggcctggacatggagctgggccccagccagggccaggagaccaacgaggtgtgcgagcaggccggcggcggcgcctgcgagggcccccccagaggcaagggcttcagagacagaaacgtgaccggcacccccctgaccggcgacaaggacgacgaggaggtggacacccacttcgccagccaggagttcttcagcgccaacgccatcagcgaccagctgctgggcgccggcagcgacctgaaggacttcaccctgaacgagaccgtgaacagcatcttcgcccagggcgcccccagaagcagcctggccgagagcttcttcgtggactacgaggagaacgagggcgccggcccctacctgctgaacggcagctacctggagctgagcagcgacagagtggccaacagcagcagcgaggcccccttccccaacgtgagcaccagcctgctgaccagcgccggcaacagaacccacaaggccagaaccagacccaaggccagaaagcagggcgtgagccccgccgacatgtacagatggaagctgagcagccacgagccctgcagcgccacctgcaccaccggcgtgatgagcgcctacgccatgtgcgtgagatacgacggcgtggaggtggacgacagctactgcgacgccctgaccagacccgagcccgtgcacgagttctgcgccggcagagagtgccagcccagatgggagaccagcagctggagcgagtgcagcagaacctgcggcgagggctaccagttcagagtggtgagatgctggaagatgctgagccccggcttcgacagcagcgtgtacagcgacctgtgcgaggccgccgaggccgtgagacccgaggagagaaagacctgcagaaaccccgcctgcggcccccagtgggagatgagcgagtggagcgagtgcaccgccaagtgcggcgagagaagcgtggtgaccagagacatcagatgcagcgaggacgagaagctgtgcgaccccaacaccagacccgtgggcgagaagaactgcaccggccccccctgcgacagacagtggaccgtgagcgactggggcccctgcagcggcagctgcggccagggcagaaccatcagacacgtgtactgcaagaccagcgacggcagagtggtgcccgagagccagtgccagatggagaccaagcccctggccatccacccctgcggcgacaagaactgccccgcccactggctggcccaggactgggagagatgcaacaccacctgcggcagaggcgtgaagaagagactggtgctgtgcatggagctggccaacggcaagccccagaccagaagcggccccgagtgcggcctggccaagaagccccccgaggagagcacctgcttcgagagaccctgcttcaagtggtacaccagcccctggagcgagtgcaccaagacctgcggcgtgggcgtgagaatgagagacgtgaagtgctaccagggcaccgacatcgtgagaggctgcgaccccctggtgaagcccgtgggcagacaggcctgcgacctgcagccctgccccaccgagccccccgacgacagctgccaggaccagcccggcaccaactgcgccctggccatcaaggtgaacctgtgcggccactggtactacagcaaggcctgctgcagaagctgcagacccccccacagctag

SEQ ID NO: 71881 - DNA, 2856 bp, synthetic construct; identical to SEQ ID NO: 71880
  misc_feature 1..2856: note = Description of Artificial Sequence: Synthetic coding sequence
  source 1..2856: mol_type = other DNA

SEQ ID NO: 71882 - DNA, 3183 bp, synthetic construct
  misc_feature 1..3183: note = Description of Artificial Sequence: Synthetic coding sequence
  source 1..3183: mol_type = other DNA
atgctgttcgaggtgggcgagggcggcggcgccggcgaggagggcaagggcagaggcagacccggcagaagcctgtgcacccacgccgcccccgccagaaccgcccacctggcccccagcgccctgagaagcgccagacccttcctgtgggaggacaacctgctgaccagaagccagggcctgcccgacaaccacgaccagctggtgcccgacaacctggaggcctgggccctggccggccccagaggcctgttccccaagagaaccctggtgatctggaagagaatcggcgccggcctggtggtgaccgtggccctgctgcccagaatggacggcagatggcagtgcagctgctgggcctggttcctgctggtgctggccgtggtggccggcgacaccgtgagcaccggcagcaccgacaacagccccaccagcaacagcctggagggcggcaccgacgccaccgccttctggtggggcgagtggaccaagtggaccgcctgcagcagaagctgcggcggcggcgtgaccagccaggagagacactgcctgcagcagagaagaaagagcgtgcccggccccggcaacagaacctgcaccggcaccagcaagagataccagctgtgcagagtgcaggagtgcccccccgacggcagaagcttcagagaggagcagtgcgtgagcttcaacagccacgtgtacaacggcagaacccaccagtggaagcccctgtaccccgacgactacgtgcacatcagcagcaagccctgcgacctgcactgcaccaccgtggacggccagagacagctgatggtgcccgccagagacggcaccagctgcaagctgaccgacctgagaggcgtgtgcgtgagcggcaagtgcgagcccatcggctgcgacggcgtgctgttcagcacccacaccctggacaagtgcggcatctgccagggcgacggcagcagctgcacccacgtgaccggcaactacagaaagggcaacgcccacctgggctacagcctggtgacccacatccccgccggcgccagagacatccagatcgtggagagaaagaagagcgccgacgtgctggccctggccgacgaggccggctactacttcttcaacggcaactacaaggtggacagccccaagaacttcaacatcgccggcaccgtggtgaagtacagaagacccatggacgtgtacgagaccggcatcgagtacatcgtggcccagggccccaccaaccagggcctgaacgtgatggtgtggaaccagaacggcaagagccccagcatcaccttcgagtacaccctgctgcagcccccccacgagagcagaccccagcccatctactacggcttcagcgagagcgccgagagccagggcctggacggcgccggcctgatgggcttcgtgccccacaacggcagcctgtacggccaggccagcagcgagagactgggcctggacaacagactgttcggccaccccggcctggacatggagctgggccccagccagggccaggagaccaacgaggtgtgcgagcaggccggcggcggcgcctgcgagggcccccccagaggcaagggcttcagagacagaaacgtgaccggcacccccctgaccggcgacaaggacgacgaggaggtggacacccacttcgccagccaggagttcttcagcgccaacgccatcagcgaccagctgctgggcgccggcagcgacctgaaggacttcaccctgaacgagaccgtgaacagcatcttcgcccagggcgcccccagaagcagcctggccgagagcttcttcgtggactacgaggagaacgagggcgccggcccctacctgctgaacggcagctacctggagctgagcagcgacagagtggccaacagcagcagcgaggcccccttccccaacgtgagcaccagcctgctgaccagcgccggcaacagaacccacaaggccagaaccagacccaaggccagaaagcagggcgtgagccccgccgacatgtacagatggaagctgagcagccacgagccctgcagcgccacctgcaccaccggcgtgatgagcgcctacgccatgtgcgtgagatacgacggcgtggaggtggacgacagctactgcgacgccctgaccagacccgagcccgtgcacgagttctgcgccggcagagagtgccagcccagatgggagaccagcagctggagcgagtgcagcagaacctgcggcgagggctaccagttcagagtggtgagatgctggaagatgctgagccccggcttcgacagcagcgtgtacagcgacctgtgcgaggccgccgaggccgtgagacccgaggagagaaagacctgcagaaaccccgcctgcggcccccagtgggagatgagcgagtggagcgagtgcaccgccaagtgcggcgagagaagcgtggtgaccagagacatcagatgcagcgaggacgagaagctgtgcgaccccaacaccagacccgtgggcgagaagaactgcaccggccccccctgcgacagacagtggaccgtgagcgactggggcccctgcagcggcagctgcggccagggcagaaccatcagacacgtgtactgcaagaccagcgacggcagagtggtgcccgagagccagtgccagatggagaccaagcccctggccatccacccctgcggcgacaagaactgccccgcccactggctggcccaggactgggagagatgcaacaccacctgcggcagaggcgtgaagaagagactggtgctgtgcatggagctggccaacggcaagccccagaccagaagcggccccgagtgcggcctggccaagaagccccccgaggagagcacctgcttcgagagaccctgcttcaagtggtacaccagcccctggagcgagtgcaccaagacctgcggcgtgggcgtgagaatgagagacgtgaagtgctaccagggcaccgacatcgtgagaggctgcgaccccctggtgaagcccgtgggcagacaggcctgcgacctgcagccctgccccaccgagccccccgacgacagctgccaggaccagcccggcaccaactgcgccctggccatcaaggtgaacctgtgcggccactggtactacagcaaggcctgctgcagaagctgcagacccccccacagctag

SEQ ID NO: 71883 - DNA, 5076 bp, synthetic construct
  misc_feature 1..5076: note = Description of Artificial Sequence: Synthetic coding sequence
  source 1..5076: mol_type = other DNA
atggccagctggaccagcccctggtgggtgctgatcggcatggtgttcatgcacagccccctgccccagaccaccgccgagaagagccccggcgcctacttcctgcccgagttcgccctgagcccccagggcagcttcctggaggacaccaccggcgagcagttcctgacctacagatacgacgaccagaccagcagaaacaccagaagcgacgaggacaaggacggcaactgggacgcctggggcgactggagcgactgcagcagaacctgcggcggcggcgccagctacagcctgagaagatgcctgaccggcagaaactgcgagggccagaacatcagatacaagacctgcagcaaccacgactgcccccccgacgccgaggacttcagagcccagcagtgcagcgcctacaacgacgtgcagtaccagggccactactacgagtggctgcccagatacaacgaccccgccgccccctgcgccctgaagtgccacgcccagggccagaacctggtggtggagctggcccccaaggtgctggacggcaccagatgcaacaccgacagcctggacatgtgcatcagcggcatctgccaggccgtgggctgcgacagacagctgggcagcaacgccaaggaggacaactgcggcgtgtgcgccggcgacggcagcacctgcagactggtgagaggccagagcaagagccacgtgagccccgagaagagagaggagaacgtgatcgccgtgcccctgggcagcagaagcgtgagaatcaccgtgaagggccccgcccacctgttcatcgagagcaagaccctgcagggcagcaagggcgagcacagcttcaacagccccggcgtgttcctggtggagaacaccaccgtggagttccagagaggcagcgagagacagaccttcaagatccccggccccctgatggccgacttcatcttcaagaccagatacaccgccgccaaggacagcgtggtgcagttcttcttctaccagcccatcagccaccagtggagacagaccgacttcttcccctgcaccgtgacctgcggcggcggctaccagctgaacagcgccgagtgcgtggacatcagactgaagagagtggtgcccgaccactactgccactactaccccgagaacgtgaagcccaagcccaagctgaaggagtgcagcatggacccctgccccagcagcgacggcttcaaggagatcatgccctacgaccacttccagcccctgcccagatgggagcacaacccctggaccgcctgcagcgtgagctgcggcggcggcatccagagaagaagcttcgtgtgcgtggaggagagcatgcacggcgagatcctgcaggtggaggagtggaagtgcatgtacgcccccaagcccaaggtgatgcagacctgcaacctgttcgactgccccaagtggatcgccatggagtggagccagtgcaccgtgacctgcggcagaggcctgagatacagagtggtgctgtgcatcaaccacagaggcgagcacgtgggcggctgcaacccccagctgaagctgcacatcaaggaggagtgcgtgatccccatcccctgctacaagcccaaggagaagagccccgtggaggccaagctgccctggctgaagcaggcccaggagctggaggagaccagaatcgccaccgaggagcccaccttcatccccgagccctggagcgcctgcagcaccacctgcggccccggcgtgcaggtgagagaggtgaagtgcagagtgctgctgaccttcacccagaccgagaccgagctgcccgaggaggagtgcgagggccccaagctgcccaccgagagaccctgcctgctggaggcctgcgacgagagccccgccagcagagagctggacatccccctgcccgaggacagcgagaccacctacgactgggagtacgccggcttcaccccctgcaccgccacctgcgtgggcggccaccaggaggccatcgccgtgtgcctgcacatccagacccagcagaccgtgaacgacagcctgtgcgacatggtgcacagaccccccgccatgagccaggcctgcaacaccgagccctgcccccccagatggcacgtgggcagctggggcccctgcagcgccacctgcggcgtgggcatccagaccagagacgtgtactgcctgcaccccggcgagacccccgccccccccgaggagtgcagagacgagaagccccacgccctgcaggcctgcaaccagttcgactgcccccccggctggcacatcgaggagtggcagcagtgcagcagaacctgcggcggcggcacccagaacagaagagtgacctgcagacagctgctgaccgacggcagcttcctgaacctgagcgacgagctgtgccagggccccaaggccagcagccacaagagctgcgccagaaccgactgccccccccacctggccgtgggcgactggagcaagtgcagcgtgagctgcggcgtgggcatccagagaagaaagcaggtgtgccagagactggccgccaagggcagaagaatccccctgagcgagatgatgtgcagagacctgcccggcctgcccctggtgagaagctgccagatgcccgagtgcagcaagatcaagagcgagatgaagaccaagctgggcgagcagggcccccagatcctgagcgtgcagagagtgtacatccagaccagagaggagaagagaatcaacctgaccatcggcagcagagcctacctgctgcccaacaccagcgtgatcatcaagtgccccgtgagaagattccagaagagcctgatccagtgggagaaggacggcagatgcctgcagaacagcaagagactgggcatcaccaagagcggcagcctgaagatccacggcctggccgcccccgacatcggcgtgtacagatgcatcgccggcagcgcccaggagaccgtggtgctgaagctgatcggcaccgacaacagactgatcgccagacccgccctgagagagcccatgagagagtaccccggcatggaccacagcgaggccaacagcctgggcgtgacctggcacaagatgagacagatgtggaacaacaagaacgacctgtacctggacgacgaccacatcagcaaccagcccttcctgagagccctgctgggccactgcagcaacagcgccggcagcaccaacagctgggagctgaagaacaagcagttcgaggccgccgtgaagcagggcgcctacagcatggacaccgcccagttcgacgagctgatcagaaacatgagccagctgatggagaccggcgaggtgagcgacgacctggccagccagctgatctaccagctggtggccgagctggccaaggcccagcccacccacatgcagtggagaggcatccaggaggagaccccccccgccgcccagctgagaggcgagaccggcagcgtgagccagagcagccacgccaagaacagcggcaagctgaccttcaagcccaagggccccgtgctgatgagacagagccagccccccagcatcagcttcaacaagaccatcaacagcagaatcggcaacaccgtgtacatcaccaagagaaccgaggtgatcaacatcctgtgcgacctgatcacccccagcgaggccacctacacctggaccaaggacggcaccctgctgcagcccagcgtgaagatcatcctggacggcaccggcaagatccagatccagaaccccaccagaaaggagcagggcatctacgagtgcagcgtggccaaccacctgggcagcgacgtggagagcagcagcgtgctgtacgccgaggcccccgtgatcctgagcgtggagagaaacatcaccaagcccgagcacaaccacctgagcgtggtggtgggcggcatcgtggaggccgccctgggcgccaacgtgaccatcagatgccccgtgaagggcgtgccccagcccaacatcacctggctgaagagaggcggcagcctgagcggcaacgtgagcctgctgttcaacggcagcctgctgctgcagaacgtgagcctggagaacgagggcacctacgtgtgcatcgccaccaacgccctgggcaaggccgtggccaccagcgtgctgcacctgctggagagaagatggcccgagagcagaatcgtgttcctgcagggccacaagaagtacatcctgcaggccaccaacaccagaaccaacagcaacgaccccaccggcgagccccccccccaggagcccttctgggagcccggcaactggagccactgcagcgccacctgcggccacctgggcgccagaatccagagaccccagtgcgtgatggccaacggccaggaggtgagcgaggccctgtgcgaccacctgcagaagcccctggccggcttcgagccctgcaacatcagagactgccccgccagatggttcaccagcgtgtggagccagtgcagcgtgagctgcggcgagggctaccacagcagacaggtgacctgcaagagaaccaaggccaacggcaccgtgcaggtggtgagccccagagcctgcgcccccaaggacagacccctgggcagaaagccctgcttcggccacccctgcgtgcagtgggagcccggcaacagatgccccggcagatgcatgggcagagccgtgagaatgcagcagagacacaccgcctgccagcacaacagcagcgacagcaactgcgacgacagaaagagacccaccctgagaagaaactgcaccagcggcgcctgcgacgtgtgctggcacaccggcccctggaagccctgcaccgccgcctgcggcagaggcttccagagcagaaaggtggactgcatccacaccagaagctgcaagcccgtggccaagagacactgcgtgcagaagaagaagcccatcagctggagacactgcctgggccccagctgcgacagagactgcaccgacaccacccactactgcatgttcgtgaagcacctgaacctgtgcagcctggacagatacaagcagagatgctgccagagctgccaggagggctag

SEQ ID NO: 71884 - DNA, 3225 bp, synthetic construct
  misc_feature 1..3225: note = Description of Artificial Sequence: Synthetic coding sequence
  source 1..3225: mol_type = other DNA
atggagaactggaccggcagaccctggctgtacctgctgctgctgctgagcctgccccagctgtgcctggaccaggaggtgctgagcggccacagcctgcagacccccaccgaggagggccagggccccgagggcgtgtggggcccctgggtgcagtgggccagctgcagccagccctgcggcgtgggcgtgcagagaagaagcagaacctgccagctgcccaccgtgcagctgcaccccagcctgcccctgccccccagaccccccagacaccccgaggccctgctgcccagaggccagggccccagaccccagaccagccccgagaccctgcccctgtacagaacccagagcagaggcagaggcggccccctgagaggccccgccagccacctgggcagagaggagacccaggagatcagagccgccagaagaagcagactgagagaccccatcaagcccggcatgttcggctacggcagagtgcccttcgccctgcccctgcacagaaacagaagacaccccagaagcccccccagaagcgagctgagcctgatcagcagcagaggcgaggaggccatccccagccccacccccagagccgagcccttcagcgccaacggcagcccccagaccgagctgccccccaccgagctgagcgtgcacacccccagcccccaggccgagcccctgagccccgagaccgcccagaccgaggtggcccccagaaccagacccgcccccctgagacaccaccccagagcccaggccagcggcaccgagccccccagccccacccacagcctgggcgagggcggcttcttcagagccagcccccagcccagaagacccagcagccagggctgggccagcccccaggtggccggcagaagacccgaccccttccccagcgtgcccagaggcagaggccagcagggccagggcccctggggcaccggcggcaccccccacggccccagactggagcccgacccccagcaccccggcgcctggctgcccctgctgagcaacggcccccacgccagcagcctgtggagcctgttcgcccccagcagccccatccccagatgcagcggcgagagcgagcagctgagagcctgcagccaggccccctgcccccccgagcagcccgaccccagagccctgcagtgcgccgccttcaacagccaggagttcatgggccagctgtaccagtgggagcccttcaccgaggtgcagggcagccagagatgcgagctgaactgcagacccagaggcttcagattctacgtgagacacaccgagaaggtgcaggacggcaccctgtgccagcccggcgcccccgacatctgcgtggccggcagatgcctgagccccggctgcgacggcatcctgggcagcggcagaagacccgacggctgcggcgtgtgcggcggcgacgacagcacctgcagactggtgagcggcaacctgaccgacagaggcggccccctgggctaccagaagatcctgtggatccccgccggcgccctgagactgcagatcgcccagctgagacccagcagcaactacctggccctgagaggccccggcggcagaagcatcatcaacggcaactgggccgtggacccccccggcagctacagagccggcggcaccgtgttcagatacaacagaccccccagagaggagggcaagggcgagagcctgagcgccgagggccccaccacccagcccgtggacgtgtacatgatcttccaggaggagaaccccggcgtgttctaccagtacgtgatcagcagccccccccccatcctggagaaccccacccccgagccccccgtgccccagctgcagcccgagatcctgagagtggagccccccctggcccccgcccccagacccgccagaacccccggcaccctgcagagacaggtgagaatcccccagatgcccgcccccccccaccccagaacccccctgggcagccccgccgcctactggaagagagtgggccacagcgcctgcagcgccagctgcggcaagggcgtgtggagacccatcttcctgtgcatcagcagagagagcggcgaggagctggacgagagaagctgcgccgccggcgccagaccccccgccagccccgagccctgccacggcaccccctgccccccctactgggaggccggcgagtggaccagctgcagcagaagctgcggccccggcacccagcacagacagctgcagtgcagacaggagttcggcggcggcggcagcagcgtgccccccgagagatgcggccacctgcccagacccaacatcacccagagctgccagctgagactgtgcggccactgggaggtgggcagcccctggagccagtgcagcgtgagatgcggcagaggccagagaagcagacaggtgagatgcgtgggcaacaacggcgacgaggtgagcgagcaggagtgcgccagcggccccccccagccccccagcagagaggcctgcgacatgggcccctgcaccaccgcctggttccacagcgactggagcagcaagtgcagcgccgagtgcggcaccggcatccagagaagaagcgtggtgtgcctgggcagcggcgccgccctgggccccggccagggcgaggccggcgccggcaccggccagagctgccccaccggcagcagaccccccgacatgagagcctgcagcctgggcccctgcgagagaacctggagatggtacaccggcccctggggcgagtgcagcagcgagtgcggcagcggcacccagagaagagacatcatctgcgtgagcaagctgggcaccgagttcaacgtgaccagccccagcaactgcagccacctgcccagaccccccgccctgcagccctgccagggccaggcctgccaggacagatggttcagcaccccctggagcccctgcagcagaagctgccagggcggcacccagaccagagaggtgcagtgcctgagcaccaaccagaccctgagcaccagatgccccccccagctgagacccagcagaaagagaccctgcaacagccagccctgcagccagagacccgacgaccagtgcaaggacagcagcccccactgccccctggtggtgcaggccagactgtgcgtgtacccctactacaccgccacctgctgcagaagctgcgcccacgtgctggagagaagcccccaggaccccagctag

SEQ ID NO: 71885 - DNA, 3225 bp, synthetic construct; identical to SEQ ID NO: 71884
  misc_feature 1..3225: note = Description of Artificial Sequence: Synthetic coding sequence
  source 1..3225: mol_type = other DNA

SEQ ID NO: 71886 - DNA, 3294 bp, synthetic construct
  misc_feature 1..3294: note = Description of Artificial Sequence: Synthetic coding sequence
  source 1..3294: mol_type = other DNA
atggagaactggaccggcagaccctggctgtacctgctgctgctgctgagcctgccccagctgtgcctggaccaggaggtgctgagcggccacagcctgcagacccccaccgaggagggccagggccccgagggcgtgtggggcccctgggtgcagtgggccagctgcagccagccctgcggcgtgggcgtgcagagaagaagcagaacctgccagctgcccaccgtgcagctgcaccccagcctgcccctgccccccagaccccccagacaccccgaggccctgctgcccagaggccagggccccagaccccagaccagccccgagaccctgcccctgtacagaacccagagcagaggcagaggcggccccctgagaggccccgccagccacctgggcagagaggagacccaggagatcagagccgccagaagaagcagactgagagaccccatcaagcccggcatgttcggctacggcagagtgcccttcgccctgcccctgcacagaaacagaagacaccccagaagcccccccagaagcgagctgagcctgatcagcagcagaggcgaggaggccatccccagccccacccccagagccgagcccttcagcgccaacggcagcccccagaccgagctgccccccaccgagctgagcgtgcacacccccagcccccaggccgagcccctgagccccgagaccgcccagaccgaggtggcccccagaaccagacccgcccccctgagacaccaccccagagcccaggccagcggcaccgagccccccagccccacccacagcctgggcgagggcggcttcttcagagccagcccccagcccagaagacccagcagccagggctgggccagcccccaggtggccggcagaagacccgaccccttccccagcgtgcccagaggcagaggccagcagggccagggcccctggggcaccggcggcaccccccacggccccagactggagcccgacccccagcaccccggcgcctggctgcccctgctgagcaacggcccccacgccagcagcctgtggagcctgttcgcccccagcagccccatccccagatgcagcggcgagagcgagcagctgagagcctgcagccaggccccctgcccccccgagcagcccgaccccagagccctgcagtgcgccgccttcaacagccaggagttcatgggccagctgtaccagtgggagcccttcaccgaggcccccctgctgcccctgagacacgccttcttcctgctgcccggcgccggcagcggcgacagcaccggcgtgcagggcagccagagatgcgagctgaactgcagacccagaggcttcagattctacgtgagacacaccgagaaggtgcaggacggcaccctgtgccagcccggcgcccccgacatctgcgtggccggcagatgcctgagccccggctgcgacggcatcctgggcagcggcagaagacccgacggctgcggcgtgtgcggcggcgacgacagcacctgcagactggtgagcggcaacctgaccgacagaggcggccccctgggctaccagaagatcctgtggatccccgccggcgccctgagactgcagatcgcccagctgagacccagcagcaactacctggccctgagaggccccggcggcagaagcatcatcaacggcaactgggccgtggacccccccggcagctacagagccggcggcaccgtgttcagatacaacagaccccccagagaggagggcaagggcgagagcctgagcgccgagggccccaccacccagcccgtggacgtgtacatgatcttccaggaggagaaccccggcgtgttctaccagtacgtgatcagcagccccccccccatcctggagaaccccacccccgagccccccgtgccccagctgcagcccgagatcctgagagtggagccccccctggcccccgcccccagacccgccagaacccccggcaccctgcagagacaggtgagaatcccccagatgcccgcccccccccaccccagaacccccctgggcagccccgccgcctactggaagagagtgggccacagcgcctgcagcgccagctgcggcaagggcgtgtggagacccatcttcctgtgcatcagcagagagagcggcgaggagctggacgagagaagctgcgccgccggcgccagaccccccgccagccccgagccctgccacggcaccccctgccccccctactgggaggccggcgagtggaccagctgcagcagaagctgcggccccggcacccagcacagacagctgcagtgcagacaggagttcggcggcggcggcagcagcgtgccccccgagagatgcggccacctgcccagacccaacatcacccagagctgccagctgagactgtgcggccactgggaggtgggcagcccctggagccagtgcagcgtgagatgcggcagaggccagagaagcagacaggtgagatgcgtgggcaacaacggcgacgaggtgagcgagcaggagtgcgccagcggccccccccagccccccagcagagaggcctgcgacatgggcccctgcaccaccgcctggttccacagcgactggagcagcaagtgcagcgccgagtgcggcaccggcatccagagaagaagcgtggtgtgcctgggcagcggcgccgccctgggccccggccagggcgaggccggcgccggcaccggccagagctgccccaccggcagcagaccccccgacatgagagcctgcagcctgggcccctgcgagagaacctggagatggtacaccggcccctggggcgagtgcagcagcgagtgcggcagcggcacccagagaagagacatcatctgcgtgagcaagctgggcaccgagttcaacgtgaccagccccagcaactgcagccacctgcccagaccccccgccctgcagccctgccagggccaggcctgccaggacagatggttcagcaccccctggagcccctgcagcagaagctgccagggcggcacccagaccagagaggtgcagtgcctgagcaccaaccagaccctgagcaccagatgccccccccagctgagacccagcagaaagagaccctgcaacagccagccctgcagccagagacccgacgaccagtgcaaggacagcagcccccactgccccctggtggtgcaggccagactgtgcgtgtacccctactacaccgccacctgctgcagaagctgcgcccacgtgctggagagaagcccccaggaccccagctag

SEQ ID NO: 71887 - DNA, 2634 bp, synthetic construct
  misc_feature 1..2634: note = Description of Artificial Sequence: Synthetic coding sequence
  source 1..2634: mol_type = other DNA
atggagaactggaccggcagaccctggctgtacctgctgctgctgctgagcctgccccagctgtgcctggaccaggaggtgctgagcggccacagcctgcagacccccaccgaggagggccagggccccgagggcgtgtggggcccctgggtgcagtgggccagctgcagccagccctgcggcgtgggcgtgcagagaagaagcagaacctgccagctgcccaccgtgcagctgcaccccagcctgcccctgccccccagaccccccagacaccccgaggccctgctgcccagaggccagggccccagaccccagaccagccccgagaccctgcccctgtacagaacccagagcagaggcagaggcggccccctgagaggccccgccagccacctgggcagagaggagacccaggagatcagagccgccagaagaagcagactgagagaccccatcaagcccggcatgttcggctacggcagagtgcccttcgccctgcccctgcacagaaacagaagacaccccagaagcccccccagaagcgagctgagcctgatcagcagcagaggcgaggaggccatccccagccccacccccagagccgagcccttcagcgccaacggcagcccccagaccgagctgccccccaccgagctgagcgtgcacacccccagcccccaggccgagcccctgagccccgagaccgcccagaccgaggtggcccccagaaccagacccgcccccctgagacaccaccccagagcccaggccagcggcaccgagccccccagccccacccacagcctgggcgagggcggcttcttcagagccagcccccagcccagaagacccagcagccagggctgggccagcccccaggtggccggcagaagacccgaccccttccccagcgtgcccagaggcagaggccagcagggccagggcccctggggcaccggcggcaccccccacggccccagactggagcccgacccccagcaccccggcgcctggctgcccctgctgagcaacggcccccacgccagcagcctgtggagcctgttcgcccccagcagccccatccccagatgcagcggcgagagcgagcagctgagagcctgcagccaggccccctgcccccccgagcagcccgaccccagagccctgcagtgcgccgccttcaacagccaggagttcatgggccagctgtaccagtgggagcccttcaccgaggtgcagggcagccagagatgcgagctgaactgcagacccagaggcttcagattctacgtgagacacaccgagaaggtgcaggacggcaccctgtgccagcccggcgcccccgacatctgcgtggccggcagatgcctgagccccggctgcgacggcatcctgggcagcggcagaagacccgacggctgcggcgtgtgcggcggcgacgacagcacctgcagactggtgagcggcaacctgaccgacagaggcggccccctgggctaccagaagatcctgtggatccccgccggcgccctgagactgcagatcgcccagctgagacccagcagcaactacctggccctgagaggccccggcggcagaagcatcatcaacggcaactgggccgtggacccccccggcagctacagagccggcggcaccgtgttcagatacaacagaccccccagagaggagggcaagggcgagagcctgagcgccgagggccccaccacccagcccgtggacgtgtacatgatcttccaggaggagaaccccggcgtgttctaccagtacgtgatcagcagccccccccccatcctggagaaccccacccccgagccccccgtgccccagctgcagcccgagatcctgagagtggagccccccctggcccccgcccccagacccgccagaacccccggcaccctgcagagacaggtgagaatcccccagatgcccgcccccccccaccccagaacccccctgggcagccccgccgcctactggaagagagtgggccacagcgcctgcagcgccagctgcggcaagggcgtgtggagacccatcttcctgtgcatcagcagagagagcggcgaggagctggacgagagaagctgcgccgccggcgccagaccccccgccagccccgagccctgccacggcaccccctgccccccctactgggaggccggcgagtggaccagctgcagcagaagctgcggccccggcacccagcacagacagctgcagtgcagacaggagttcggcggcggcggcagcagcgtgccccccgagagatgcggccacctgcccagacccaacatcacccagagctgccagctgagactgtgcggccactgggaggtgggcagcccctggagccagtgcagcgtgagatgcggcagaggccagagaagcagacaggtgagatgcgtgggcaacaacggcgacgaggtgagcgagcaggagtgcgccagcggccccccccagccccccagcagagaggcctgcgacatgggcccctgcaccaccgcctggttccacagcgactggagcagcaaggtgagccccgagccccccgccatcagctgcatcctgggcaaccacgcccaggacaccagcgccttccccgcctag

SEQ ID NO: 71888 - DNA, 1311 bp, synthetic construct
  misc_feature 1..1311: note = Description of Artificial Sequence: Synthetic coding sequence
  source 1..1311: mol_type = other DNA
atgggcagcctggccctggccggcgtgctgatggccgtggagagcgtgggcgtgatgatcctgcccgtggccctgttcagaggcaccagcctgaccgagggcgccccctgggccatcagaagaagctgcggcttccagagagagccctgcggcagcagactgcccagcagcggcctggcccccaccacctggcacttcgtggccctgggcagaagcatcatcaacggcaactgggccgtggacccccccggcagctacagagccggcggcaccgtgttcagatacaacagaccccccagagaggagggcaagggcgagagcctgagcgccgagggccccaccacccagcccgtggacgtgtacatgatcttccaggaggagaaccccggcgtgttctaccagtacgtgatcagcagccccccccccatcctggagaaccccacccccgagccccccgtgccccagctgcagcccgagatcctgagagtggagccccccctggcccccgcccccagacccgccagaacccccggcaccctgcagagacaggtgagaatcccccagatgcccgcccccccccaccccagaacccccctgggcagccccgccgcctactggaagagagtgggccacagcgcctgcagcgccagctgcggcaagggcgtgtggagacccatcttcctgtgcatcagcagagagagcggcgaggagctggacgagagaagctgcgccgccggcgccagaccccccgccagccccgagccctgccacggcaccccctgccccccctactgggaggccggcgagtggaccagctgcagcagaagctgcggccccggcacccagcacagacagctgcagtgcagacaggagttcggcggcggcggcagcagcgtgccccccgagagatgcggccacctgcccagacccaacatcacccagagctgccagctgagactgtgcggccactgggaggtgggcagcccctggagccagtgcagcgtgagatgcggcagaggccagagaagcagacaggtgagatgcgtgggcaacaacggcgacgaggtgagcgagcaggagtgcgccagcggccccccccagccccccagcagagaggcctgcgacatgggcccctgcaccaccgcctggttccacagcgactggagcagcaagtgcagcgccgagtgcggcaccggcatccagagaagaagcgtggtgtgcctgggcagcggcgccgccctgggccccggccagggcgaggccggcgccggcaccggccagagctgccccaccggcagcagacccccctag

SEQ ID NO: 71889 - DNA, 2130 bp, synthetic construct
  misc_feature 1..2130: note = Description of Artificial Sequence: Synthetic coding sequence
  source 1..2130: mol_type = other DNA
atgcccggcatcgacaagctgcccatcgaggagaccctggaggacagcccccagaccagaagcctgctgggcgtgttcgaggaggacgccaccgccatcagcaactacatgaaccagctgtaccaggccatgcacagaatctacgacgcccagaacgagctgagcgccgccacccacctgaccagcaagctgctgaaggagtacgagaagcagagattccccctgggcggcgacgacgaggtgatgagcagcaccctgcagcagttcagcaaggtgatcgacgagctgagcagctgccacgccgtgctgagcacccagctggccgacgccatgatgttccccatcacccagttcaaggagagagacctgaaggagatcctgaccctgaaggaggtgttccagatcgccagcaacgaccacgacgccgccatcaacagatacagcagactgagcaagaagagagagaacgacaaggtgaagtacgaggtgaccgaggacgtgtacaccagcagaaagaagcagcaccagaccatgatgcactacttctgcgccctgaacaccctgcagtacaagaagaagatcgccctgctggagcccctgctgggctacatgcaggcccagatcagcttcttcaagatgggcagcgagaacctgaacgagcagctggaggagttcctggccaacatcggcaccagcgtgcagaacgtgagaagagagatggacagcgacatcgagaccatgcagcagaccatcgaggacctggaggtggccagcgaccccctgtacgtgcccgaccccgaccccaccaagttccccgtgaacagaaacctgaccagaaaggccggctacctgaacgccagaaacaagaccggcctggtgagcagcacctgggacagacagttctacttcacccagggcggcaacctgatgagccaggccagaggcgacgtggccggcggcctggccatggacatcgacaactgcagcgtgatggccgtggactgcgaggacagaagatactgcttccagatcaccagcttcgacggcaagaagagcagcatcctgcaggccgagagcaagaaggaccacgaggagtggatctgcaccatcaacaacatcagcaagcagatctacctgagcgagaaccccgaggagaccgccgccagagtgaaccagagcgccctggaggccgtgacccccagccccagcttccagcagagacacgagagcctgagacccgccgccggccagagcagaccccccaccgccagaaccagcagcagcggcagcctgggcagcgagagcaccaacctggccgccctgagcctggacagcctggtggcccccgacacccccatccagttcgacatcatcagccccgtgtgcgaggaccagcccggccaggccaaggccttcggccagggcggcagaagaaccaaccccttcggcgagagcggcggcagcaccaagagcgagaccgaggacagcatcctgcaccagctgttcatcgtgagattcctgggcagcatggaggtgaagagcgacgaccaccccgacgtggtgtacgagaccatgagacagatcctggccgccagagccatccacaacatcttcagaatgaccgagagccacctgctggtgacctgcgactgcctgaagctgatcgacccccagacccaggtgaccagactgaccttccccctgccctgcgtggtgctgtacgccacccaccaggagaacaagagactgttcggcttcgtgctgagaaccagcagcggcagaagcgagagcaacctgagcagcgtgtgctacatcttcgagagcaacaacgagggcgagaagatctgcgacagcgtgggcctggccaagcagatcgccctgcacgccgagctggacagaagagccagcgagaagcagaaggagatcgagagagtgaaggagaagcagcagaaggagctgaacaagcagaagcagatcgagaaggacctggaggagcagagcagactgatcgccgccagcagcagacccaaccaggccagcagcgagggccagttcgtggtgctgagcagcagccagagcgaggagagcgacctgggcgagggcggcaagaagagagagagcgaggcctag

SEQ ID NO: 71890 - DNA, 1995 bp, synthetic construct
  misc_feature 1..1995: note = Description of Artificial Sequence: Synthetic coding sequence
  source 1..1995: mol_type = other DNA
atgcccgccgtggacaagctgctgctggaggaggccctgcaggacagcccccagaccagaagcctgctgagcgtgttcgaggaggacgccggcaccctgaccgactacaccaaccagctgctgcaggccatgcagagagtgtacggcgcccagaacgagatgtgcctggccacccagcagctgagcaagcagctgctggcctacgagaagcagaacttcgccctgggcaagggcgacgaggaggtgatcagcaccctgcactacttcagcaaggtggtggacgagctgaacctgctgcacaccgagctggccaagcagctggccgacaccatggtgctgcccatcatccagttcagagagaaggacctgaccgaggtgagcaccctgaaggacctgttcggcctggccagcaacgagcacgacctgagcatggccaagtacagcagactgcccaagaagaaggagaacgagaaggtgaagaccgaggtgggcaaggaggtggccgccgccagaagaaagcagcacctgagcagcctgcagtactactgcgccctgaacgccctgcagtacagaaagcagatggccatgatggagcccatgatcggcttcgcccacggccagatcaacttcttcaagaagggcgccgagatgttcagcaagagaatggacagcttcctgagcagcgtggccgacatggtgcagagcatccaggtggagctggaggccgaggccgagaagatgagagtgagccagcaggagctgctgagcgtggacgagagcgtgtacacccccgacagcgacgtggccgccccccagatcaacagaaacctgatccagaaggccggctacctgaacctgagaaacaagaccggcctggtgaccaccacctgggagagactgtacttcttcacccagggcggcaacctgatgtgccagcccagaggcgccgtggccggcggcctgatccaggacctggacaactgcagcgtgatggccgtggactgcgaggacagaagatactgcttccagatcaccacccccaacggcaagagcggcatcatcctgcaggccgagagcagaaaggagaacgaggagtggatctgcgccatcaacaacatcagcagacagatctacctgaccgacaaccccgaggccgtggccatcaagctgaaccagaccgccctgcaggccgtgacccccatcaccagcttcggcaagaagcaggagagcagctgccccagccagaacctgaagaacagcgagatggagaacgagaacgacaagatcgtgcccaaggccaccgccagcctgcccgaggccgaggagctgatcgcccccggcacccccatccagttcgacatcgtgctgcccgccaccgagttcctggaccagaacagaggcagcagaagaaccaaccccttcggcgagaccgaggacgagagcttccccgaggccgaggacagcctgctgcagcagatgttcatcgtgagattcctgggcagcatggccgtgaagaccgacagcaccaccgaggtgatctacgaggccatgagacaggtgctggccgccagagccatccacaacatcttcagaatgaccgagagccacctgatggtgaccagccagagcctgagactgatcgacccccagacccaggtgagcagagccaacttcgagctgaccagcgtgacccagttcgccgcccaccaggagaacaagagactggtgggcttcgtgatcagagtgcccgagagcaccggcgaggagagcctgagcacctacatcttcgagagcaacagcgagggcgagaagatctgctacgccatcaacctgggcaaggagatcatcgaggtgcagaaggaccccgaggccctggcccagctgatgctgagcatccccctgaccaacgacggcaagtacgtgctgctgaacgaccagcccgacgacgacgacggcaaccccaacgagcacagaggcgccgagagcgaggcctag

SEQ ID NO: 71891 - DNA, 2013 bp, synthetic construct
  misc_feature 1..2013: note = Description of Artificial Sequence: Synthetic coding sequence
  source 1..2013: mol_type = other DNA
atgcccgccgtggacaagctgctgctggaggaggccctgcaggacagcccccagaccagaagcctgctgagcgtgttcgaggaggacgccggcaccctgaccgactacaccaaccagctgctgcaggccatgcagagagtgtacggcgcccagaacgagatgtgcctggccacccagcagctgagcaagcagctgctggcctacgagaagcagaacttcgccctgggcaagggcgacgaggaggtgatcagcaccctgcactacttcagcaaggtggtggacgagctgaacctgctgcacaccgagctggccaagcagctggccgacaccatggtgctgcccatcatccagttcagagagaaggacctgaccgaggtgagcaccctgaaggacctgttcggcctggccagcaacgacgtgtgcctgttcctggagcacgacctgagcatggccaagtacagcagactgcccaagaagaaggagaacgagaaggtgaagaccgaggtgggcaaggaggtggccgccgccagaagaaagcagcacctgagcagcctgcagtactactgcgccctgaacgccctgcagtacagaaagcagatggccatgatggagcccatgatcggcttcgcccacggccagatcaacttcttcaagaagggcgccgagatgttcagcaagagaatggacagcttcctgagcagcgtggccgacatggtgcagagcatccaggtggagctggaggccgaggccgagaagatgagagtgagccagcaggagctgctgagcgtggacgagagcgtgtacacccccgacagcgacgtggccgccccccagatcaacagaaacctgatccagaaggccggctacctgaacctgagaaacaagaccggcctggtgaccaccacctgggagagactgtacttcttcacccagggcggcaacctgatgtgccagcccagaggcgccgtggccggcggcctgatccaggacctggacaactgcagcgtgatggccgtggactgcgaggacagaagatactgcttccagatcaccacccccaacggcaagagcggcatcatcctgcaggccgagagcagaaaggagaacgaggagtggatctgcgccatcaacaacatcagcagacagatctacctgaccgacaaccccgaggccgtggccatcaagctgaaccagaccgccctgcaggccgtgacccccatcaccagcttcggcaagaagcaggagagcagctgccccagccagaacctgaagaacagcgagatggagaacgagaacgacaagatcgtgcccaaggccaccgccagcctgcccgaggccgaggagctgatcgcccccggcacccccatccagttcgacatcgtgctgcccgccaccgagttcctggaccagaacagaggcagcagaagaaccaaccccttcggcgagaccgaggacgagagcttccccgaggccgaggacagcctgctgcagcagatgttcatcgtgagattcctgggcagcatggccgtgaagaccgacagcaccaccgaggtgatctacgaggccatgagacaggtgctggccgccagagccatccacaacatcttcagaatgaccgagagccacctgatggtgaccagccagagcctgagactgatcgacccccagacccaggtgagcagagccaacttcgagctgaccagcgtgacccagttcgccgcccaccaggagaacaagagactggtgggcttcgtgatcagagtgcccgagagcaccggcgaggagagcctgagcacctacatcttcgagagcaacagcgagggcgagaagatctgctacgccatcaacctgggcaaggagatcatcgaggtgcagaaggaccccgaggccctggcccagctgatgctgagcatccccctgaccaacgacggcaagtacgtgctgctgaacgaccagcccgacgacgacgacggcaaccccaacgagcacagaggcgccgagagcgaggcctag

SEQ ID NO: 71892 - DNA, 2760 bp, synthetic construct
  misc_feature 1..2760: note = Description of Artificial Sequence: Synthetic coding sequence
  source 1..2760: mol_type = other DNA
atgaccgacagcaagtacttcaccaccaccaagaagggcgagatcttcgagctgaaggccgagctgaacagcgacaagaaggagaagaagaaggaggccgtgaagaaggtgatcgccagcatgaccgtgggcaaggacgtgagcgccctgttccccgacgtggtgaactgcatgcagaccgacaacctggagctgaagaagctggtgtacctgtacctgatgaactacgccaagagccagcccgacatggccatcatggccgtgaacaccttcgtgaaggactgcgaggaccccaaccccctgatcagagccctggccgtgagaaccatgggctgcatcagagtggacaagatcaccgagtacctgtgcgagcccctgagaaagtgcctgaaggacgaggacccctacgtgagaaagaccgccgccgtgtgcgtggccaagctgcacgacatcaacgcccagctggtggaggaccagggcttcctggacaccctgaaggacctgatcagcgacagcaaccccatggtggtggccaacgccgtggccgccctgagcgagatcgccgagagccaccccagcagcaacctgctggacctgaacccccagagcatcaacaagctgctgaccgccctgaacgagtgcaccgagtggggccagatcttcatcctggactgcctggccaactacatgcccaaggacgacagagaggcccagagcatctgcgagagagtgacccccagactgagccacgccaacagcgccgtggtgctgagcgccgtgaaggtgctgatgaagttcatggagatgctgagcaaggacctggactactacggcaccctgctgaagaagctggccccccccctggtgaccctgctgagcgccgagcccgagctgcagtacgtggccctgagaaacatcaacctgatcgtgcagaagagacccgagatcctgaagcacgagatgaaggtgttcttcgtgaagtacaacgaccccatctacgtgaagctggagaagctggacatcatgatcagactggccagccaggccaacatcgcccaggtgctggccgagctgaaggagtacgccaccgaggtggacgtggacttcgtgagaaaggccgtgagagccatcggcagatgcgccatcaaggtggagcagagcgccgagagatgcgtgagcaccctgctggacctgatccagaccaaggtgaactacgtggtgcaggaggccatcgtggtgatcaaggacatcttcagaaagtaccccaacaagtacgagagcgtgatcgccaccctgtgcgagaacctggacagcctggacgagcccgaggccagagccgccatgatctggatcgtgggcgagtacgccgagagaatcgacaacgccgacgagctgctggagagcttcctggagggcttccacgacgagagcacccaggtgcagctgcagctgctgaccgccatcgtgaagctgttcctgaagaagcccaccgagacccaggagctggtgcagcaggtgctgagcctggccacccaggacagcgacaaccccgacctgagagacagaggctacatctactggagactgctgagcaccgaccccgtggccgccaaggaggtggtgctggccgagaagcccctgatcagcgaggagaccgacctgatcgagcccaccctgctggacgagctgatctgctacatcggcaccctggccagcgtgtaccacaagccccccagcgccttcgtggagggcggcagaggcgtggtgcacaagagcctgccccccagaaccgccagcagcgagagcgccgagagccccgagaccgcccccaccggcgccccccccggcgagcagcccgacgtgatccccgcccagggcgacctgctgggcgacctgctgaacctggacctgggcccccccgtgagcggcccccccctggccaccagcagcgtgcagatgggcgccgtggacctgctgggcggcggcctggacagcctgatcggcggcaccaacttcgtggccccccccaccgccgccgtgcccgccaacctgggcgcccccatcggcagcggcctgagcgacctgttcgacctgaccagcggcgtgggcaccctgagcggcagctacgtggcccccaaggccgtgggcagcatcagcatggacctgcagctgaccaacaaggccctgcaggtgatgaccgacttcgccatccagttcaacagaaacagcttcggcctggcccccgccacccccctgcaggtgcacgcccccctgagccccaaccagaccgtggagatcagcctgcccctgagcaccgtgggcagcgtgatgaagatggagcccctgaacaacctgcaggtggccgtgaagaacaacatcgacgtgttctacttcagcaccctgtaccccctgcacatcctgttcgtggaggacggcaagatggacagacagatgttcctggccacctggaaggacatccccaacgagaacgaggcccagttccagatcagagactgccccctgaacgccgaggccgccagcagcaagctgcagagcagcaacatcttcaccgtggccaagagaaacgtggagggccaggacatgctgtaccagagcctgaagctgaccaacggcatctgggtgctggccgagctgagaatccagcccggcaaccccagctgcaccctgagcctgaagtgcagagcccccgaggtgagccagcacgtgtaccaggcctacgagaccatcctgaagaactag

SEQ ID NO: 71893 - DNA, 2829 bp, synthetic construct
  misc_feature 1..2829: note = Description of Artificial Sequence: Synthetic coding sequence
  source 1..2829: mol_type = other DNA
atgaccgacagcaagtacttcaccaccaccaagaagggcgagatcttcgagctgaaggccgagctgaacagcgacaagaaggagaagaagaaggaggccgtgaagaaggtgatcgccagcatgaccgtgggcaaggacgtgagcgccctgttccccgacgtggtgaactgcatgcagaccgacaacctggagctgaagaagctggtgtacctgtacctgatgaactacgccaagagccagcccgacatggccatcatggccgtgaacaccttcgtgaaggactgcgaggaccccaaccccctgatcagagccctggccgtgagaaccatgggctgcatcagagtggacaagatcaccgagtacctgtgcgagcccctgagaaagtgcctgaaggacgaggacccctacgtgagaaagaccgccgccgtgtgcgtggccaagctgcacgacatcaacgcccagctggtggaggaccagggcttcctggacaccctgaaggacctgatcagcgacagcaaccccatggtggtggccaacgccgtggccgccctgagcgagatcgccgagagccaccccagcagcaacctgctggacctgaacccccagagcatcaacaagctgctgaccgccctgaacgagtgcaccgagtggggccagatcttcatcctggactgcctggccaactacatgcccaaggacgacagagaggcccagagcatctgcgagagagtgacccccagactgagccacgccaacagcgccgtggtgctgagcgccgtgaaggtgctgatgaagttcatggagatgctgagcaaggacctggactactacggcaccctgctgaagaagctggccccccccctggtgaccctgctgagcgccgagcccgagctgcagtacgtggccctgagaaacatcaacctgatcgtgcagaagagacccgagatcctgaagcacgagatgaaggtgttcttcgtgaagtacaacgaccccatctacgtgaagctggagaagctggacatcatgatcagactggccagccaggccaacatcgcccaggtgctggccgagctgaaggagtacgccaccgaggtggacgtggacttcgtgagaaaggccgtgagagccatcggcagatgcgccatcaaggtggagcagagcgccgagagatgcgtgagcaccctgctggacctgatccagaccaaggtgaactacgtggtgcaggaggccatcgtggtgatcaaggacatcttcagaaagtaccccaacaagtacgagagcgtgatcgccaccctgtgcgagaacctggacagcctggacgagcccgaggccagagccgccatgatctggatcgtgggcgagtacgccgagagaatcgacaacgccgacgagctgctggagagcttcctggagggcttccacgacgagagcacccaggtgcagctgcagctgctgaccgccatcgtgaagctgttcctgaagaagcccaccgagacccaggagctggtgcagcaggtgctgagcctggccacccaggacagcgacaaccccgacctgagagacagaggctacatctactggagactgctgagcaccgaccccgtggccgccaaggaggtggtgctggccgagaagcccctgatcagcgaggagaccgacctgatcgagcccaccctgctggacgagctgatctgctacatcggcaccctggccagcgtgtaccacaagccccccagcgccttcgtggagggcggcagaggcgtggtgcacaagagcctgccccccagaaccgccagcagcgagagcgccgagagccccgagaccgcccccaccggcgccccccccggcgagcagcccgacgtgatccccgcccagggcgacctgctgggcgacctgctgaacctggacctgggcccccccgtgagcggcccccccctggccaccagcagcgtgcagatgggcgccgtggacctgctgggcggcggcctggacagcctgatcggcggcaccaacttcgtggccccccccaccgccgccgtgcccgccaacctgggcgcccccatcggcagcggcctgagcgacctgttcgacctgaccagcggcgtgggcaccctgagcggcagctacgtggcccccaaggccgtgtggctgcccgccatgaaggccaagggcctggagatcagcggcaccttcaccagacaggtgggcagcatcagcatggacctgcagctgaccaacaaggccctgcaggtgatgaccgacttcgccatccagttcaacagaaacagcttcggcctggcccccgccacccccctgcaggtgcacgcccccctgagccccaaccagaccgtggagatcagcctgcccctgagcaccgtgggcagcgtgatgaagatggagcccctgaacaacctgcaggtggccgtgaagaacaacatcgacgtgttctacttcagcaccctgtaccccctgcacatcctgttcgtggaggacggcaagatggacagacagatgttcctggccacctggaaggacatccccaacgagaacgaggcccagttccagatcagagactgccccctgaacgccgaggccgccagcagcaagctgcagagcagcaacatcttcaccgtggccaagagaaacgtggagggccaggacatgctgtaccagagcctgaagctgaccaacggcatctgggtgctggccgagctgagaatccagcccggcaaccccagctgcaccgacctggagctgagcctgaagtgcagagcccccgaggtgagccagcacgtgtaccaggcctacgagaccatcctgaagaactag

SEQ ID NO: 71894 - DNA, 2850 bp, synthetic construct
  misc_feature 1..2850: note = Description of Artificial Sequence: Synthetic coding sequence
  source 1..2850: mol_type = other DNA
atgaccgacagcaagtacttcaccaccaccaagaagggcgagatcttcgagctgaaggccgagctgaacagcgacaagaaggagaagaagaaggaggccgtgaagaaggtgatcgccagcatgaccgtgggcaaggacgtgagcgccctgttccccgacgtggtgaactgcatgcagaccgacaacctggagctgaagaagctggtgtacctgtacctgatgaactacgccaagagccagcccgacatggccatcatggccgtgaacaccttcgtgaaggactgcgaggaccccaaccccctgatcagagccctggccgtgagaaccatgggctgcatcagagtggacaagatcaccgagtacctgtgcgagcccctgagaaagtgcctgaaggacgaggacccctacgtgagaaagaccgccgccgtgtgcgtggccaagctgcacgacatcaacgcccagctggtggaggaccagggcttcctggacaccctgaaggacctgatcagcgacagcaaccccatggtggtggccaacgccgtggccgccctgagcgagatcgccgagagccaccccagcagcaacctgctggacctgaacccccagagcatcaacaagctgctgaccgccctgaacgagtgcaccgagtggggccagatcttcatcctggactgcctggccaactacatgcccaaggacgacagagaggcccagagcatctgcgagagagtgacccccagactgagccacgccaacagcgccgtggtgctgagcgccgtgaaggtgctgatgaagttcatggagatgctgagcaaggacctggactactacggcaccctgctgaagaagctggccccccccctggtgaccctgctgagcgccgagcccgagctgcagtacgtggccctgagaaacatcaacctgatcgtgcagaagagacccgagatcctgaagcacgagatgaaggtgttcttcgtgaagtacaacgaccccatctacgtgaagctggagaagctggacatcatgatcagactggccagccaggccaacatcgcccaggtgctggccgagctgaaggagtacgccaccgaggtggacgtggacttcgtgagaaaggccgtgagagccatcggcagatgcgccatcaaggtggagcagagcgccgagagatgcgtgagcaccctgctggacctgatccagaccaaggtgaactacgtggtgcaggaggccatcgtggtgatcaaggacatcttcagaaagtaccccaacaagtacgagagcgtgatcgccaccctgtgcgagaacctggacagcctggacgagcccgaggccagagccgccatgatctggatcgtgggcgagtacgccgagagaatcgacaacgccgacgagctgctggagagcttcctggagggcttccacgacgagagcacccaggtgcagctgcagctgctgaccgccatcgtgaagctgttcctgaagaagcccaccgagacccaggagctggtgcagcaggtgctgagcctggccacccaggacagcgacaaccccgacctgagagacagaggctacatctactggagactgctgagcaccgaccccgtggccgccaaggaggtggtgctggccgagaagcccctgatcagcgaggagaccgacctgatcgagcccaccctgctggacgagctgatctgctacatcggcaccctggccagcgtgtaccacaagccccccagcgccttcgtggagggcggcagaggcgtggtgcacaagagcctgccccccagaaccgccagcagcgagagcgccgagagccccgagaccgcccccaccggcgccccccccggcgagcagcccgacgtgatccccgcccagggcgacctgctgggcgacctgctgaacctggacctgggcccccccgtgagcggcccccccctggccaccagcagcgtgcagatgggcgccgtggacctgctgggcggcggcctggacagcctgatgggcgacgagcccgagggcatcggcggcaccaacttcgtggccccccccaccgccgccgtgcccgccaacctgggcgcccccatcggcagcggcctgagcgacctgttcgacctgaccagcggcgtgggcaccctgagcggcagctacgtggcccccaaggccgtgtggctgcccgccatgaaggccaagggcctggagatcagcggcaccttcaccagacaggtgggcagcatcagcatggacctgcagctgaccaacaaggccctgcaggtgatgaccgacttcgccatccagttcaacagaaacagcttcggcctggcccccgccacccccctgcaggtgcacgcccccctgagccccaaccagaccgtggagatcagcctgcccctgagcaccgtgggcagcgtgatgaagatggagcccctgaacaacctgcaggtggccgtgaagaacaacatcgacgtgttctacttcagcaccctgtaccccctgcacatcctgttcgtggaggacggcaagatggacagacagatgttcctggccacctggaaggacatccccaacgagaacgaggcccagttccagatcagagactgccccctgaacgccgaggccgccagcagcaagctgcagagcagcaacatcttcaccgtggccaagagaaacgtggagggccaggacatgctgtaccagagcctgaagctgaccaacggcatctgggtgctggccgagctgagaatccagcccggcaaccccagctgcaccgacctggagctgagcctgaagtgcagagcccccgaggtgagccagcacgtgtaccaggcctacgagaccatcctgaagaactag

SEQ ID NO: 71895 - DNA, 2820 bp, synthetic construct
  misc_feature 1..2820: note = Description of Artificial Sequence: Synthetic coding sequence
  source 1..2820: mol_type = other DNA
atgaccgacagcaagtacttcaccaccaccaagaagggcgagatcttcgagctgaaggccgagctgaacagcgacaagaaggagaagaagaaggaggccgtgaagaaggtgatcgccagcatgaccgtgggcaaggacgtgagcgccctgttccccgacgtggtgaactgcatgcagaccgacaacctggagctgaagaagctggtgtacctgtacctgatgaactacgccaagagccagcccgacatggccatcatggccgtgaacaccttcgtgaaggactgcgaggaccccaaccccctgatcagagccctggccgtgagaaccatgggctgcatcagagtggacaagatcaccgagtacctgtgcgagcccctgagaaagtgcctgaaggacgaggacccctacgtgagaaagaccgccgccgtgtgcgtggccaagctgcacgacatcaacgcccagctggtggaggaccagggcttcctggacaccctgaaggacctgatcagcgacagcaaccccatggtggtggccaacgccgtggccgccctgagcgagatcgccgagagccaccccagcagcaacctgctggacctgaacccccagagcatcaacaagctgctgaccgccctgaacgagtgcaccgagtggggccagatcttcatcctggactgcctggccaactacatgcccaaggacgacagagaggcccagagcatctgcgagagagtgacccccagactgagccacgccaacagcgccgtggtgctgagcgccgtgaaggtgctgatgaagttcatggagatgctgagcaaggacctggactactacggcaccctgctgaagaagctggccccccccctggtgaccctgctgagcgccgagcccgagctgcagtacgtggccctgagaaacatcaacctgatcgtgcagaagagacccgagatcctgaagcacgagatgaaggtgttcttcgtgaagtacaacgaccccatctacgtgaagctggagaagctggacatcatgatcagactggccagccaggccaacatcgcccaggtgctggccgagctgaaggagtacgccaccgaggtggacgtggacttcgtgagaaaggccgtgagagccatcggcagatgcgccatcaaggtggagcagagcgccgagagatgcgtgagcaccctgctggacctgatccagaccaaggtgaactacgtggtgcaggaggccatcgtggtgatcaaggacatcttcagaaagtaccccaacaagtacgagagcgtgatcgccaccctgtgcgagaacctggacagcctggacgagcccgaggccagagccgccatgatctggatcgtgggcgagtacgccgagagaatcgacaacgccgacgagctgctggagagcttcctggagggcttccacgacgagagcacccaggtgcagctgcagctgctgaccgccatcgtgaagctgttcctgaagaagcccaccgagacccaggagctggtgcagcaggtgctgagcctggccacccaggacagcgacaaccccgacctgagagacagaggctacatctactggagactgctgagcaccgaccccgtggccgccaaggaggtggtgctggccgagaagcccctgatcagcgaggagaccgacctgatcgagcccaccctgctggacgagctgatctgctacatcggcaccctggccagcgtgtaccacaagccccccagcgccttcgtggagggcggcagaggcgtggtgcacaagagcctgccccccagaaccgccagcagcgagagcgccgagagccccgagaccgcccccaccggcgccccccccggcgagcagcccgacgtgatccccgcccagggcgacctgctgggcgacctgctgaacctggacctgggcccccccgtgagcggcccccccctggccaccagcagcgtgcagatgggcgccgtggacctgctgggcggcggcctggacagcctgatcggcggcaccaacttcgtggccccccccaccgccgccgtgcccgccaacctgggcgcccccatcggcagcggcctgagcgacctgttcgacctgaccagcggcgtgggcaccctgagcggcagctacgtggcccccaaggccgtgtggctgcccgccatgaaggccaagggcctggagatcagcggcaccttcaccagacaggtgggcagcatcagcatggacctgcagctgaccaacaaggccctgcaggtgatgaccgacttcgccatccagttcaacagaaacagcttcggcctggcccccgccacccccctgcaggtgcacgcccccctgagccccaaccagaccgtggagatcagcctgcccctgagcaccgtgggcagcgtgatgaagatggagcccctgaacaacctgcaggtggccgtgaagaacaacatcgacgtgttctacttcagcaccctgtaccccctgcacatcctgttcgtggaggacggcaagatggacagacagatgttcctggccacctggaaggacatccccaacgagaacgaggcccagttccagatcagagactgccccctgaacgccgaggccgccagcagcaagctgcagagcagcaacatcttcaccgtggccaagagaaacgtggagggccaggacatgctgtaccagagcctgaagctgaccaacggcatctgggtgctggccgagctgagaatccagcccggcaaccccagctgcaccctgagcctgaagtgcagagcccccgaggtgagccagcacgtgtaccaggcctacgagaccatcctgaagaactag

SEQ ID NO: 71896 - DNA, 2850 bp, synthetic construct; identical to SEQ ID NO: 71894
  misc_feature 1..2850: note = Description of Artificial Sequence: Synthetic coding sequence
  source 1..2850: mol_type = other DNA

SEQ ID NO: 71897 - DNA, 2820 bp, synthetic construct; identical to SEQ ID NO: 71895
  misc_feature 1..2820: note = Description of Artificial Sequence: Synthetic coding sequence
  source 1..2820: mol_type = other DNA

SEQ ID NO: 71898 - DNA, 1737 bp, synthetic construct
  misc_feature 1..1737: note = Description of Artificial Sequence: Synthetic coding sequence
  source 1..1737: mol_type = other DNA
atgaccgacagcaagtacttcaccaccaccaagaagggcgagatcttcgagctgaaggccgagctgaacagcgacaagaaggagaagaagaaggaggccgtgaagaaggtgatcgccagcatgaccgtgggcaaggacgtgagcgccctgttccccgacgtggtgaactgcatgcagaccgacaacctggagctgaagaagctggtgtacctgtacctgatgaactacgccaagagccagcccgacatggccatcatggccgtgaacaccttcgtgaaggactgcgaggaccccaaccccctgatcagagccctggccgtgagaaccatgggctgcatcagagtggacaagatcaccgagtacctgtgcgagcccctgagaaagtgcctgaaggacgaggacccctacgtgagaaagaccgccgccgtgtgcgtggccaagctgcacgacatcaacgcccagctggtggaggaccagggcttcctggacaccctgaaggacctgatcagcgacagcaaccccatggtggtggccaacgccgtggccgccctgagcgagatcgccgagagccaccccagcagcaacctgctggacctgaacccccagagcatcaacaagctgctgaccgccctgaacgagtgcaccgagtggggccagatcttcatcctggactgcctggccaactacatgcccaaggacgacagagaggcccagagcatctgcgagagagtgacccccagactgagccacgccaacagcgccgtggtgctgagcgccgtgaaggtgctgatgaagttcatggagatgctgagcaaggacctggactactacggcaccctgctgaagaagctggccccccccctggtgaccctgctgagcgccgagcccgagctgcagtacgtggccctgagaaacatcaacctgatcgtgcagaagagacccgagatcctgaagcacgagatgaaggtgttcttcgtgaagtacaacgaccccatctacgtgaagctggagaagctggacatcatgatcagactggccagccaggccaacatcgcccaggtgctggccgagctgaaggagtacgccaccgaggtggacgtggacttcgtgagaaaggccgtgagagccatcggcagatgcgccatcaaggtggagcagagcgccgagagatgcgtgagcaccctgctggacctgatccagaccaaggtgaactacgtggtgcaggaggccatcgtggtgatcaaggacatcttcagaaagtaccccaacaagtacgagagcgtgatcgccaccctgtgcgagaacctggacagcctggacgagcccgaggccagagccgccatgatctggatcgtgggcgagtacgccgagagaatcgacaacgccgacgagctgctggagagcttcctggagggcttccacgacgagagcacccaggtgcagctgcagctgctgaccgccatcgtgaagctgttcctgaagaagcccaccgagacccaggagctggtgcagcaggtgctgagcctggccacccaggacagcgacaaccccgacctgagagacagaggctacatctactggagactgctgagcaccgaccccgtggccgccaaggaggtggtgctggccgagaagcccctgatcagcgaggagaccgacctgatcgagcccaccctgctggacgagctgatctgctacatcggcaccctggccagcgtgtaccacaagcccccctag

SEQ ID NO: 71899 - DNA, 2820 bp, synthetic construct; identical to SEQ ID NO: 71895
  misc_feature 1..2820: note = Description of Artificial Sequence: Synthetic coding sequence
  source 1..2820: mol_type = other DNA

SEQ ID NO: 71900 - DNA, 2469 bp, synthetic construct
  misc_feature 1..2469: note = Description of Artificial Sequence: Synthetic coding sequence
  source 1..2469: mol_type = other DNA
atgcccgcccccatcagactgagagagctgatcagaaccatcagaaccgccagaacccaggccgaggagagagagatgatccagaaggagtgcgccgccatcagaagcagcttcagagaggaggacaacacctacagatgcagaaacgtggccaagctgctgtacatgcacatgctgggctaccccgcccacttcggccagctggagtgcctgaagctgatcgccagccagaagttcaccgacaagagaatcggctacctgggcgccatgctgctgctggacgagagacaggacgtgcacctgctgatgaccaactgcatcaagaacgacctgaaccacagcacccagttcgtgcagggcctggccctgtgcaccctgggctgcatgggcagcagcgagatgtgcagagacctggccggcgaggtggagaagctgctgaagaccagcaacagctacctgagaaagaaggccgccctgtgcgccgtgcacgtgatcagaaaggtgcccgagctgatggagatgttcctgcccgccaccaagaacctgctgaacgagaagaaccacggcgtgctgcacaccagcgtggtgctgctgaccgagatgtgcgagagaagccccgacatgctggcccacttcagaaagctggtgccccagctggtgagaatcctgaagaacctgatcatgagcggctacagccccgagcacgacgtgagcggcatcagcgaccccttcctgcaggtgagaatcctgagactgctgagaatcctgggcagaaacgacgacgacagcagcgaggccatgaacgacatcctggcccaggtggccaccaacaccgagaccagcaagaacgtgggcaacgccatcctgtacgagaccgtgctgaccatcatggacatcaagagcgagagcggcctgagagtgctggccatcaacatcctgggcagattcctgctgaacaacgacaagaacatcagatacgtggccctgaccagcctgctgaagaccgtgcagaccgaccacaacgccgtgcagagacacagaagcaccatcgtggactgcctgaaggacctggacgtgagcatcaagagaagagccatggagctgagcttcgccctggtgaacggcaacaacatcagaggcatgatgaaggagctgctgtacttcctggacagctgcgagcccgagttcaaggccgactgcgccagcggcatcttcctggccgccgagaagtacgcccccagcaagagatggcacatcgacaccatcatgagagtgctgaccaccgccggcagctacgtgagagacgacgccgtgcccaacctgatccagctgatcaccaacagcgtggagatgcacgcctacaccgtgcagagactgtacaaggccatcctgggcgactacagccagcagcccctggtgcaggtggccgcctggtgcatcggcgagtacggcgacctgctggtgagcggccagtgcgaggaggaggagcccatccaggtgaccgaggacgaggtgctggacatcctggagagcgtgctgatcagcaacatgagcaccagcgtgaccagaggctacgccctgaccgccatcatgaagctgagcaccagattcacctgcaccgtgaacagaatcaagaaggtggtgagcatctacggcagcagcatcgacgtggagctgcagcagagagccgtggagtacaacgccctgttcaagaagtacgaccacatgagaagcgccctgctggagagaatgcccgtgatggagaaggtgaccaccaacggccccaccgagatcgtgcagaccaacggcgagaccgagcccgcccccctggagaccaagcccccccccagcggcccccagcccaccagccaggccaacgacctgctggacctgctgggcggcaacgacatcacccccgtgatccccaccgcccccaccagcaagcccagcagcgccggcggcgagctgctggacctgctgggcgacatcaacctgaccggcgcccccgccgccgcccccgcccccgccagcgtgccccagatcagccagccccccttcctgctggacggcctgagcagccagcccctgttcaacgacatcgccgccggcatccccagcatcaccgcctacagcaagaacggcctgaagatcgagttcaccttcgagagaagcaacaccaaccccagcgtgaccgtgatcaccatccaggccagcaacagcaccgagctggacatgaccgacttcgtgttccaggccgccgtgcccaagaccttccagctgcagctgctgagccccagcagcagcatcgtgcccgccttcaacaccggcaccatcacccaggtgatcaaggtgctgaacccccagaagcagcagctgagaatgagaatcaagctgacctacaaccacaagggcagcgccatgcaggacctggccgaggtgaacaacttccccccccagagctggcagtag

SEQ ID NO: 71901 - DNA, 2478 bp, synthetic construct
  misc_feature 1..2478: note = Description of Artificial Sequence: Synthetic coding sequence
  source 1..2478: mol_type = other DNA
atgcccgcccccatcagactgagagagctgatcagaaccatcagaaccgccagaacccaggccgaggagagagagatgatccagaaggagtgcgccgccatcagaagcagcttcagagaggaggacaacacctacagatgcagaaacgtggccaagctgctgtacatgcacatgctgggctaccccgcccacttcggccagctggagtgcctgaagctgatcgccagccagaagttcaccgacaagagaatcggctacctgggcgccatgctgctgctggacgagagacaggacgtgcacctgctgatgaccaactgcatcaagaacgacctgaaccacagcacccagttcgtgcagggcctggccctgtgcaccctgggctgcatgggcagcagcgagatgtgcagagacctggccggcgaggtggagaagctgctgaagaccagcaacagctacctgagaaagaaggccgccctgtgcgccgtgcacgtgatcagaaaggtgcccgagctgatggagatgttcctgcccgccaccaagaacctgctgaacgagaagaaccacggcgtgctgcacaccagcgtggtgctgctgaccgagatgtgcgagagaagccccgacatgctggcccacttcagaaagaacgagaagctggtgccccagctggtgagaatcctgaagaacctgatcatgagcggctacagccccgagcacgacgtgagcggcatcagcgaccccttcctgcaggtgagaatcctgagactgctgagaatcctgggcagaaacgacgacgacagcagcgaggccatgaacgacatcctggcccaggtggccaccaacaccgagaccagcaagaacgtgggcaacgccatcctgtacgagaccgtgctgaccatcatggacatcaagagcgagagcggcctgagagtgctggccatcaacatcctgggcagattcctgctgaacaacgacaagaacatcagatacgtggccctgaccagcctgctgaagaccgtgcagaccgaccacaacgccgtgcagagacacagaagcaccatcgtggactgcctgaaggacctggacgtgagcatcaagagaagagccatggagctgagcttcgccctggtgaacggcaacaacatcagaggcatgatgaaggagctgctgtacttcctggacagctgcgagcccgagttcaaggccgactgcgccagcggcatcttcctggccgccgagaagtacgcccccagcaagagatggcacatcgacaccatcatgagagtgctgaccaccgccggcagctacgtgagagacgacgccgtgcccaacctgatccagctgatcaccaacagcgtggagatgcacgcctacaccgtgcagagactgtacaaggccatcctgggcgactacagccagcagcccctggtgcaggtggccgcctggtgcatcggcgagtacggcgacctgctggtgagcggccagtgcgaggaggaggagcccatccaggtgaccgaggacgaggtgctggacatcctggagagcgtgctgatcagcaacatgagcaccagcgtgaccagaggctacgccctgaccgccatcatgaagctgagcaccagattcacctgcaccgtgaacagaatcaagaaggtggtgagcatctacggcagcagcatcgacgtggagctgcagcagagagccgtggagtacaacgccctgttcaagaagtacgaccacatgagaagcgccctgctggagagaatgcccgtgatggagaaggtgaccaccaacggccccaccgagatcgtgcagaccaacggcgagaccgagcccgcccccctggagaccaagcccccccccagcggcccccagcccaccagccaggccaacgacctgctggacctgctgggcggcaacgacatcacccccgtgatccccaccgcccccaccagcaagcccagcagcgccggcggcgagctgctggacctgctgggcgacatcaacctgaccggcgcccccgccgccgcccccgcccccgccagcgtgccccagatcagccagccccccttcctgctggacggcctgagcagccagcccctgttcaacgacatcgccgccggcatccccagcatcaccgcctacagcaagaacggcctgaagatcgagttcaccttcgagagaagcaacaccaaccccagcgtgaccgtgatcaccatccaggccagcaacagcaccgagctggacatgaccgacttcgtgttccaggccgccgtgcccaagaccttccagctgcagctgctgagccccagcagcagcatcgtgcccgccttcaacaccggcaccatcacccaggtgatcaaggtgctgaacccccagaagcagcagctgagaatgagaatcaagctgacctacaaccacaagggcagcgccatgcaggacctggccgaggtgaacaacttccccccccagagctggcagtag

SEQ ID NO: 71902 - DNA, 2478 bp, synthetic construct
  misc_feature 1..2478: note = Description of Artificial Sequence: Synthetic coding sequence
  source 1..2478: mol_type = other DNA
atgcccgcccccatcagactgagagagctgatcagaaccatcagaaccgccagaacccaggccgaggagagagagatgatccagaaggagtgcgccgccatcagaagcagcttcagagaggaggacaacacctacagatgcagaaacgtggccaagctgctgtacatgcacatgctgggctaccccgcccacttcggccagctggagtgcctgaagctgatcgccagccagaagttcaccgacaagagaatcggctacctgggcgccatgctgctgctggacgagagacaggacgtgcacctgctgatgaccaactgcatcaagaacgacctgaaccacagcacccagttcgtgcagggcctggccctgtgcaccctgggctgcatgggcagcagcgagatgtgcagagacctggccggcgaggtggagaagctgctgaagaccagcaacagctacctgagaaagaaggccgccctgtgcgccgtgcacgtgatcagaaaggtgcccgagctgatggagatgttcctgcccgccaccaagaacctgctgaacgagaagaaccacggcgtgctgcacaccagcgtggtgctgctgaccgagatgtgcgagagaagccccgacatgctggcccacttcagaaaggagagcaagctggtgccccagctggtgagaatcctgaagaacctgatcatgagcggctacagccccgagcacgacgtgagcggcatcagcgaccccttcctgcaggtgagaatcctgagactgctgagaatcctgggcagaaacgacgacgacagcagcgaggccatgaacgacatcctggcccaggtggccaccaacaccgagaccagcaagaacgtgggcaacgccatcctgtacgagaccgtgctgaccatcatggacatcaagagcgagagcggcctgagagtgctggccatcaacatcctgggcagattcctgctgaacaacgacaagaacatcagatacgtggccctgaccagcctgctgaagaccgtgcagaccgaccacaacgccgtgcagagacacagaagcaccatcgtggactgcctgaaggacctggacgtgagcatcaagagaagagccatggagctgagcttcgccctggtgaacggcaacaacatcagaggcatgatgaaggagctgctgtacttcctggacagctgcgagcccgagttcaaggccgactgcgccagcggcatcttcctggccgccgagaagtacgcccccagcaagagatggcacatcgacaccatcatgagagtgctgaccaccgccggcagctacgtgagagacgacgccgtgcccaacctgatccagctgatcaccaacagcgtggagatgcacgcctacaccgtgcagagactgtacaaggccatcctgggcgactacagccagcagcccctggtgcaggtggccgcctggtgcatcggcgagtacggcgacctgctggtgagcggccagtgcgaggaggaggagcccatccaggtgaccgaggacgaggtgctggacatcctggagagcgtgctgatcagcaacatgagcaccagcgtgaccagaggctacgccctgaccgccatcatgaagctgagcaccagattcacctgcaccgtgaacagaatcaagaaggtggtgagcatctacggcagcagcatcgacgtggagctgcagcagagagccgtggagtacaacgccctgttcaagaagtacgaccacatgagaagcgccctgctggagagaatgcccgtgatggagaaggtgaccaccaacggccccaccgagatcgtgcagaccaacggcgagaccgagcccgcccccctggagaccaagcccccccccagcggcccccagcccaccagccaggccaacgacctgctggacctgctgggcggcaacgacatcacccccgtgatccccaccgcccccaccagcaagcccagcagcgccggcggcgagctgctggacctgctgggcgacatcaacctgaccggcgcccccgccgccgcccccgcccccgccagcgtgccccagatcagccagccccccttcctgctggacggcctgagcagccagcccctgttcaacgacatcgccgccggcatccccagcatcaccgcctacagcaagaacggcctgaagatcgagttcaccttcgagagaagcaacaccaaccccagcgtgaccgtgatcaccatccaggccagcaacagcaccgagctggacatgaccgacttcgtgttccaggccgccgtgcccaagaccttccagctgcagctgctgagccccagcagcagcatcgtgcccgccttcaacaccggcaccatcacccaggtgatcaaggtgctgaacccccagaagcagcagctgagaatgagaatcaagctgacctacaaccacaagggcagcgccatgcaggacctggccgaggtgaacaacttccccccccagagctggcagtag

SEQ ID NO: 71903 - DNA, 1698 bp, synthetic construct
  misc_feature 1..1698: note = Description of Artificial Sequence: Synthetic coding sequence
  source 1..1698: mol_type = other DNA
atgttcggcagctgctgccactgctgcagaagacccagaagctgctggttccacagcagattcagagccgtgagcggcgtgcagagccaggccgtgggcgtggagaagagaagacagagaagctgggccagaagaggcagagagccccagggcctgctgagactgctggagggcagacccagaggcctgggccccggcggcagcgccagaagaggcgtgccctgctgcggcgtggccccccccagaatgcccgcccccatcagactgagagagctgatcagaaccatcagaaccgccagaacccaggccgaggagagagagatgatccagaaggagtgcgccgccatcagaagcagcttcagagaggaggacaacacctacagatgcagaaacgtggccaagctgctgtacatgcacatgctgggctaccccgcccacttcggccagctggagtgcctgaagctgatcgccagccagaagttcaccgacaagagaatcggctacctgggcgccatgctgctgctggacgagagacaggacgtgcacctgctgatgaccaactgcatcaagaacgacctgaaccacagcacccagttcgtgcagggcctggccctgtgcaccctgggctgcatgggcagcagcgagatgtgcagagacctggccggcgaggtggagaagctgctgaagaccagcaacagctacctgagaaagaaggccgccctgtgcgccgtgcacgtgatcagaaaggtgcccgagctgatggagatgttcctgcccgccaccaagaacctgctgaacgagaagaaccacggcgtgctgcacaccagcgtggtgctgctgaccgagatgtgcgagagaagccccgacatgctggcccacttcagaaaggagagcaagctggtgccccagctggtgagaatcctgaagaacctgatcatgagcggctacagccccgagcacgacgtgagcggcatcagcgaccccttcctgcaggtgagaatcctgagactgctgagaatcctgggcagaaacgacgacgacagcagcgaggccatgaacgacatcctggcccaggtggccaccaacaccgagaccagcaagaacgtgggcaacgccatcctgtacgagaccgtgctgaccatcatggacatcaagagcgagagcggcctgagagtgctggccatcaacatcctgggcagattcctgctgaacaacgacaagaacatcagatacgtggccctgaccagcctgctgaagaccgtgcagaccgaccacaacgccgtgcagagacacagaagcaccatcgtggactgcctgaaggacctggacgtgagcatcaagagaagagccatggagctgagcttcgccctggtgaacggcaacaacatcagaggcatgatgaaggagctgctgtacttcctggacagctgcgagcccgagttcaaggccgactgcgccagcggcatcttcctggccgccgagaagtacgcccccagcaagagatggcacatcgacaccatcatgagagtgctgaccaccgccggcagctacgtgagagacgacgccgtgcccaacctgatccagctgatcaccaacagcgtggagatgcacgcctacaccgtgcagagactgtacaaggccatcctgggcgactacagccccaccttcggcaccagcggctgcatggtgtacagatag

SEQ ID NO: 71904 - DNA, 2538 bp, synthetic construct
  misc_feature 1..2538: note = Description of Artificial Sequence: Synthetic coding sequence
  source 1..2538: mol_type = other DNA
atggagaagaacatcaacctgagaaactgccagaccctgaacacctacgtgatgctgacccacctgagaatgcccgcccccatcagactgagagagctgatcagaaccatcagaaccgccagaacccaggccgaggagagagagatgatccagaaggagtgcgccgccatcagaagcagcttcagagaggaggacaacacctacagatgcagaaacgtggccaagctgctgtacatgcacatgctgggctaccccgcccacttcggccagctggagtgcctgaagctgatcgccagccagaagttcaccgacaagagaatcggctacctgggcgccatgctgctgctggacgagagacaggacgtgcacctgctgatgaccaactgcatcaagaacgacctgaaccacagcacccagttcgtgcagggcctggccctgtgcaccctgggctgcatgggcagcagcgagatgtgcagagacctggccggcgaggtggagaagctgctgaagaccagcaacagctacctgagaaagaaggccgccctgtgcgccgtgcacgtgatcagaaaggtgcccgagctgatggagatgttcctgcccgccaccaagaacctgctgaacgagaagaaccacggcgtgctgcacaccagcgtggtgctgctgaccgagatgtgcgagagaagccccgacatgctggcccacttcagaaagctggtgccccagctggtgagaatcctgaagaacctgatcatgagcggctacagccccgagcacgacgtgagcggcatcagcgaccccttcctgcaggtgagaatcctgagactgctgagaatcctgggcagaaacgacgacgacagcagcgaggccatgaacgacatcctggcccaggtggccaccaacaccgagaccagcaagaacgtgggcaacgccatcctgtacgagaccgtgctgaccatcatggacatcaagagcgagagcggcctgagagtgctggccatcaacatcctgggcagattcctgctgaacaacgacaagaacatcagatacgtggccctgaccagcctgctgaagaccgtgcagaccgaccacaacgccgtgcagagacacagaagcaccatcgtggactgcctgaaggacctggacgtgagcatcaagagaagagccatggagctgagcttcgccctggtgaacggcaacaacatcagaggcatgatgaaggagctgctgtacttcctggacagctgcgagcccgagttcaaggccgactgcgccagcggcatcttcctggccgccgagaagtacgcccccagcaagagatggcacatcgacaccatcatgagagtgctgaccaccgccggcagctacgtgagagacgacgccgtgcccaacctgatccagctgatcaccaacagcgtggagatgcacgcctacaccgtgcagagactgtacaaggccatcctgggcgactacagccagcagcccctggtgcaggtggccgcctggtgcatcggcgagtacggcgacctgctggtgagcggccagtgcgaggaggaggagcccatccaggtgaccgaggacgaggtgctggacatcctggagagcgtgctgatcagcaacatgagcaccagcgtgaccagaggctacgccctgaccgccatcatgaagctgagcaccagattcacctgcaccgtgaacagaatcaagaaggtggtgagcatctacggcagcagcatcgacgtggagctgcagcagagagccgtggagtacaacgccctgttcaagaagtacgaccacatgagaagcgccctgctggagagaatgcccgtgatggagaaggtgaccaccaacggccccaccgagatcgtgcagaccaacggcgagaccgagcccgcccccctggagaccaagcccccccccagcggcccccagcccaccagccaggccaacgacctgctggacctgctgggcggcaacgacatcacccccgtgatccccaccgcccccaccagcaagcccagcagcgccggcggcgagctgctggacctgctgggcgacatcaacctgaccggcgcccccgccgccgcccccgcccccgccagcgtgccccagatcagccagccccccttcctgctggacggcctgagcagccagcccctgttcaacgacatcgccgccggcatccccagcatcaccgcctacagcaagaacggcctgaagatcgagttcaccttcgagagaagcaacaccaaccccagcgtgaccgtgatcaccatccaggccagcaacagcaccgagctggacatgaccgacttcgtgttccaggccgccgtgcccaagaccttccagctgcagctgctgagccccagcagcagcatcgtgcccgccttcaacaccggcaccatcacccaggtgatcaaggtgctgaacccccagaagcagcagctgagaatgagaatcaagctgacctacaaccacaagggcagcgccatgcaggacctggccgaggtgaacaacttccccccccagagctggcagtag

SEQ ID NO: 71905 - DNA, 531 bp, synthetic construct
  misc_feature 1..531: note = Description of Artificial Sequence: Synthetic coding sequence
  source 1..531: mol_type = other DNA
atgcccgcccccatcagactgagagagctgatcagaaccatcagaaccgccagaacccaggccgaggagagagagatgatccagaaggagtgcgccgccatcagaagcagcttcagagaggaggacaacacctacagatgcagaaacgtggccaagctgctgtacatgcacatgctgggctaccccgcccacttcggccagctggagtgcctgaagctgatcgccagccagaagttcaccgacaagagaatcggctacctgggcgccatgctgctgctggacgagagacaggacgtgcacctgctgatgaccaactgcatcaagaacgacctgaaccacagcacccagttcgtgcagggcctggccctgtgcaccctgggctgcatgggcagcagcgagatgtgcagagacctggccggcgaggtggagaagctgctgaagaccagcaacagctacctgagaaagaaggagatgatctacaagcagaccaacgtgaccggctacatcctgggcggcatccccaacagctag

SEQ ID NO: 71906 - DNA, 1047 bp, synthetic construct
  misc_feature 1..1047: note = Description of Artificial Sequence: Synthetic coding sequence
  source 1..1047: mol_type = other DNA
atgaaggacaagatgtgcagagacctggccggcgaggtggagaagctgctgaagaccagcaacagctacctgagaaagaaggccgccctgtgcgccgtgcacgtgatcagaaaggtgcccgagctgatggagatgttcctgcccgccaccaagaacctgctgaacgagaagaaccacggcgtgctgcacaccagcgtggtgctgctgaccgagatgtgcgagagaagccccgacatgctggcccacttcagaaagctggtgccccagctggtgagaatcctgaagaacctgatcatgagcggctacagccccgagcacgacgtgagcggcatcagcgaccccttcctgcaggtgagaatcctgagactgctgagaatcctgggcagaaacgacgacgacagcagcgaggccatgaacgacatcctggcccaggtggccaccaacaccgagaccagcaagaacgtgggcaacgccatcctgtacgagaccgtgctgaccatcatggacatcaagagcgagagcggcctgagagtgctggccatcaacatcctgggcagattcctgctgaacaacgacaagaacatcagatacgtggccctgaccagcctgctgaagaccgtgcagaccgaccacaacgccgtgcagagacacagaagcaccatcgtggactgcctgaaggacctggacgtgagcatcaagagaagagccatggagctgagcttcgccctggtgaacggcaacaacatcagaggcatgatgaaggagctgctgtacttcctggacagctgcgagcccgagttcaaggccgactgcgccagcggcatcttcctggccgccgtgcccaagaccttccagctgcagctgctgagccccagcagcagcatcgtgcccgccttcaacaccggcaccatcacccaggtgatcaaggtgctgaacccccagaagcagcagctgagaatgagaatcaagctgacctacaaccacaagggcagcgccatgcaggacctggccgaggtgaacaacttccccccccagagctggcagtag

SEQ ID NO: 71907 - DNA, 1272 bp, synthetic construct
  misc_feature 1..1272: note = Description of Artificial Sequence: Synthetic coding sequence
  source 1..1272: mol_type = other DNA
atgagcgccagcgccgtgtacgtgctggacctgaagggcaaggtgctgatctgcagaaactacagaggcgacgtggacatgagcgaggtggagcacttcatgcccatcctgatggagaaggaggaggagggcatgctgagccccatcctggcccacggcggcgtgagattcatgtggatcaagcacaacaacctgtacctggtggccaccagcaagaagaacgcctgcgtgagcctggtgttcagcttcctgtacaaggtggtgcaggtgttcagcgagtacttcaaggagctggaggaggagagcatcagagacaacttcgtgatcatctacgagctgctggacgagctgatggacttcggctacccccagaccaccgacagcaagatcctgcaggagtacatcacccaggagggccacaagctggagaccggcgcccccagaccccccgccaccgtgaccaacgccgtgagctggagaagcgagggcatcaagtacagaaagaacgaggtgttcctggacgtgatcgagagcgtgaacctgctggtgagcgccaacggcaacgtgctgagaagcgagatcgtgggcagcatcaagatgagagtgttcctgagcggcatgcccgagctgagactgggcctgaacgacaaggtgctgttcgacaacaccggcagaggcaagagcaagagcgtggagctggaggacgtgaagttccaccagtgcgtgagactgagcagattcgagaacgacagaaccatcagcttcatcccccccgacggcgagttcgagctgatgagctacagactgaacacccacgtgaagcccctgatctggatcgagagcgtgatcgagaagcacagccacagcagaatcgagtacatgatcaaggccaagagccagttcaagagaagaagcaccgccaacaacgtggagatccacatccccgtgcccaacgacgccgacagccccaagttcaagaccaccgtgggcagcgtgaagtgggtgcccgagaacagcgagatcgtgtggagcatcaagagcttccccggcggcaaggagtacctgatgagagcccacttcggcctgcccagcgtggaggccgaggacaaggagggcaagccccccatcagcgtgaagttcgagatcccctacttcaccaccagcggcatccaggtgagatacctgaagatcatcgagaagagcggctaccaggccctgccctgggtgagatacatcacccagaacggcgactaccagctgagaacccagtag

SEQ ID NO: 71908 - DNA, 1113 bp, synthetic construct
  misc_feature 1..1113: note = Description of Artificial Sequence: Synthetic coding sequence
  source 1..1113: mol_type = other DNA
atgagcgccagcgccgtgtacgtgctggacctgaagggcaaggtgctgatctgcagaaactacagaggcgacgtggacatgagcgaggtggagcacttcatgcccatcctgatggagaaggaggaggagggcatgctgagccccatcctggcccacggcggcgtgagattcatgtggatcaagcacaacaacctgtacctggtggccaccagcaagaagaacgcctgcgtgagcctggtgttcagcttcctgtacaaggtggtgcaggtgttcagcgagtacttcaaggagctggaggaggagagcatcagagacaacttcgtgatcatctacgagctgctggacgagctgatggacttcggctacccccagaccaccgacagcaagatcctgcaggagtacatcacccaggagggccacaagctggagaccggcgcccccagaccccccgccaccgtgaccaacgccgtgagctggagaagcgagggcatcaagtacagaaagaacgaggtgttcctggacgtgatcgagagcgtgaacctgctggtgagcgccaacggcaacgtgctgagaagcgagatcgtgggcagcatcaagatgagagtgttcctgagcggcatgcccgagctgagactgggcctgaacgacaaggtgctgttcgacaacaccggcagaggcaagagcaagagcgtggagctggaggacgtgaagttccaccagtgcgtgagactgagcagattcgagaacgacagaaccatcagcttcatcccccccgacggcgagttcgagctgatgagctacagactgaacacccacgtgaagcccctgatctggatcgagagcgtgatcgagaagcacagccacagcagaatcgagtacatgatcaagggcggcaaggagtacctgatgagagcccacttcggcctgcccagcgtggaggccgaggacaaggagggcaagccccccatcagcgtgaagttcgagatcccctacttcaccaccagcggcatccaggtgagatacctgaagatcatcgagaagagcggctaccaggccctgccctgggtgagatacatcacccagaacggcgactaccagctgagaacccagtag

SEQ ID NO: 71909 - DNA, 1308 bp, synthetic construct
  misc_feature 1..1308: note = Description of Artificial Sequence: Synthetic coding sequence
  source 1..1308: mol_type = other DNA
atgagcgccagcgccgtgtacgtgctggacctgaagggcaaggtgctgatctgcagaaactacagaggcgacgtggacatgagcgaggtggagcacttcatgcccatcctgatggagaaggaggaggagggcatgctgagccccatcctggcccacggcggcgtgagattcatgtggatcaagcacaacaacctgtacctggtggccaccagcaagaagaacgcctgcgtgagcctggtgttcagcttcctgtacaaggtggtgcaggtgttcagcgagtacttcaaggagctggaggaggagagcatcagagacaacttcgtgatcatctacgagctgctggacgagctgatggacttcggctacccccagaccaccgacagcaagatcctgcaggagtacatcacccaggagggccacaagctggagaccggcgcccccagaccccccgccaccgtgaccaacgccgtgagctggagaagcgagggcatcaagtacagaaagaacgaggtgttcctggacgtgatcgagagcgtgaacctgctgggcaagtaccccggcgtgggctggctgggccacaccgtgagcgccaacggcaacgtgctgagaagcgagatcgtgggcagcatcaagatgagagtgttcctgagcggcatgcccgagctgagactgggcctgaacgacaaggtgctgttcgacaacaccggcagaggcaagagcaagagcgtggagctggaggacgtgaagttccaccagtgcgtgagactgagcagattcgagaacgacagaaccatcagcttcatcccccccgacggcgagttcgagctgatgagctacagactgaacacccacgtgaagcccctgatctggatcgagagcgtgatcgagaagcacagccacagcagaatcgagtacatgatcaaggccaagagccagttcaagagaagaagcaccgccaacaacgtggagatccacatccccgtgcccaacgacgccgacagccccaagttcaagaccaccgtgggcagcgtgaagtgggtgcccgagaacagcgagatcgtgtggagcatcaagagcttccccggcggcaaggagtacctgatgagagcccacttcggcctgcccagcgtggaggccgaggacaaggagggcaagccccccatcagcgtgaagttcgagatcccctacttcaccaccagcggcatccaggtgagatacctgaagatcatcgagaagagcggctaccaggccctgccctgggtgagatacatcacccagaacggcgactaccagctgagaacccagtag

SEQ ID NO: 71910 - DNA, 1056 bp, synthetic construct
  misc_feature 1..1056: note = Description of Artificial Sequence: Synthetic coding sequence
  source 1..1056: mol_type = other DNA
atgagcgccagcgccgtgtacgtgctggacctgaagggcaaggtggtgcaggtgttcagcgagtacttcaaggagctggaggaggagagcatcagagacaacttcgtgatcatctacgagctgctggacgagctgatggacttcggctacccccagaccaccgacagcaagatcctgcaggagtacatcacccaggagggccacaagctggagaccggcgcccccagaccccccgccaccgtgaccaacgccgtgagctggagaagcgagggcatcaagtacagaaagaacgaggtgttcctggacgtgatcgagagcgtgaacctgctggtgagcgccaacggcaacgtgctgagaagcgagatcgtgggcagcatcaagatgagagtgttcctgagcggcatgcccgagctgagactgggcctgaacgacaaggtgctgttcgacaacaccggcagaggcaagagcaagagcgtggagctggaggacgtgaagttccaccagtgcgtgagactgagcagattcgagaacgacagaaccatcagcttcatcccccccgacggcgagttcgagctgatgagctacagactgaacacccacgtgaagcccctgatctggatcgagagcgtgatcgagaagcacagccacagcagaatcgagtacatgatcaaggccaagagccagttcaagagaagaagcaccgccaacaacgtggagatccacatccccgtgcccaacgacgccgacagccccaagttcaagaccaccgtgggcagcgtgaagtgggtgcccgagaacagcgagatcgtgtggagcatcaagagcttccccggcggcaaggagtacctgatgagagcccacttcggcctgcccagcgtggaggccgaggacaaggagggcaagccccccatcagcgtgaagttcgagatcccctacttcaccaccagcggcatccaggtgagatacctgaagatcatcgagaagagcggctaccaggccctgccctgggtgagatacatcacccagaacggcgactaccagctgagaacccagtag

SEQ ID NO: 71911 - DNA, 1272 bp, synthetic construct
  misc_feature 1..1272: note = Description of Artificial Sequence: Synthetic coding sequence
  source 1..1272: mol_type = other DNA
atgagcgccagcgccgtgttcatcctggacgtgaagggcaagcccctgatcagcagaaactacaagggcgacgtggccatgagcaagatcgagcacttcatgcccctgctggtgcagagagaggaggagggcgccctggcccccctgctgagccacggccaggtgcacttcctgtggatcaagcacagcaacctgtacctggtggccaccaccagcaagaacgccaacgccagcctggtgtacagcttcctgtacaagaccatcgaggtgttctgcgagtacttcaaggagctggaggaggagagcatcagagacaacttcgtgatcgtgtacgagctgctggacgagctgatggacttcggcttcccccagaccaccgacagcaagatcctgcaggagtacatcacccagcagagcaacaagctggagaccggcaagagcagagtgccccccaccgtgaccaacgccgtgagctggagaagcgagggcatcaagtacaagaagaacgaggtgttcatcgacgtgatcgagagcgtgaacctgctggtgaacgccaacggcagcgtgctgctgagcgagatcgtgggcaccatcaagctgaaggtgttcctgagcggcatgcccgagctgagactgggcctgaacgacagagtgctgttcgagctgaccggcagaagcaagaacaagagcgtggagctggaggacgtgaagttccaccagtgcgtgagactgagcagattcgacaacgacagaaccatcagcttcatcccccccgacggcgacttcgagctgatgagctacagactgagcacccaggtgaagcccctgatctggatcgagagcgtgatcgagaagttcagccacagcagagtggagatcatggtgaaggccaagggccagttcaagaagcagagcgtggccaacggcgtggagatcagcgtgcccgtgcccagcgacgccgacagccccagattcaagaccagcgtgggcagcgccaagtacgtgcccgagagaaacgtggtgatctggagcatcaagagcttccccggcggcaaggagtacctgatgagagcccacttcggcctgcccagcgtggagaaggaggaggtggagggcagaccccccatcggcgtgaagttcgagatcccctacttcaccgtgagcggcatccaggtgagatacatgaagatcatcgagaagagcggctaccaggccctgccctgggtgagatacatcacccagagcggcgactaccagctgagaaccagctag

SEQ ID NO: 71912 - DNA, 477 bp, synthetic construct
  misc_feature 1..477: note = Description of Artificial Sequence: Synthetic coding sequence
  source 1..477: mol_type = other DNA
atgatgagattcatgctgctgttcagcagacagggcaagctgagactgcagaagtggtacctggccaccagcgacaaggagagaaagaagatggtgagagagctgatgcaggtggtgctggccagaaagcccaagatgtgcagcttcctggagtggagagacctgaaggtggtgtacaagagatacgccagcctgtacttctgctgcgccatcgagggccaggacaacgagctgatcaccctggagctgatccacagatacgtggagctgctggacaagtacttcggcagcgtgtgcgagctggacatcatcttcaacttcgagaaggcctacttcatcctggacgagttcctgatgggcggcgacgtgcaggacaccagcaagaagagcgtgctgaaggccatcgagcaggccgacctgctgcaggaggaggacgagagccccagaagcgtgctggaggagatgggcctggcctag

SEQ ID NO: 71913 - DNA, 477 bp, synthetic construct; identical to SEQ ID NO: 71912
  misc_feature 1..477: note = Description of Artificial Sequence: Synthetic coding sequence
  source 1..477: mol_type = other DNA

SEQ ID NO: 71914 - DNA, 474 bp, synthetic construct
  misc_feature 1..474: note = Description of Artificial Sequence: Synthetic coding sequence
  source 1..474: mol_type = other DNA
atgcagttcatgctgctgttcagcagacagggcaagctgagactgcagaagtggtacgtgcccctgagcgacaaggagaagaagaagatcaccagagagctggtgcagaccgtgctggccagaaagcccaagatgtgcagcttcctggagtggagagacctgaagatcgtgtacaagagatacgccagcctgtacttctgctgcgccatcgaggaccaggacaacgagctgatcaccctggagatcatccacagatacgtggagctgctggacaagtacttcggcagcgtgtgcgagctggacatcatcttcaacttcgagaaggcctacttcatcctggacgagttcctgctgggcggcgaggtgcaggagaccagcaagaagaacgtgctgaaggccatcgagcaggccgacctgctgcaggaggaggccgagacccccagaagcgtgctggaggagatcggcctgacctag

SEQ ID NO: 71915 - DNA, 462 bp, synthetic construct
  misc_feature 1..462: note = Description of Artificial Sequence: Synthetic coding sequence
  source 1..462: mol_type = other DNA
atgctgctgttcagcagacagggcaagctgagactgcagaagtggtacgtgcccctgagcgacaaggagaagaagaagatcaccagagagctggtgcagaccgtgctggccagaaagcccaagatgtgcagcttcctggagtggagagacctgaagatcgtgtacaagagatacgccagcctgtacttctgctgcgccatcgaggaccaggacaacgagctgatcaccctggagatcatccacagatacgtggagctgctggacaagtacttcggcagcgtgtgcgagctggacatcatcttcaacttcgagaaggcctacttcatcctggacgagttcctgctgggcggcgaggtgcaggagaccagcaagaagaacgtgctgaaggccatcgagcaggccgacctgctgcaggagagccagaacgaggagtggggcggcctgagcgaggacatcctgtag

SEQ ID NO: 71916 - DNA, 483 bp, synthetic construct
  misc_feature 1..483: note = Description of Artificial Sequence: Synthetic coding sequence
  source 1..483: mol_type = other DNA
atgcagttcatgctgctgttcagcagacagggcaagctgagactgcagaagtggtacgtgcccctgagcgacaaggagaagaagaagatcaccagagagctggtgcagaccgtgctggccagaaagcccaagatgtgcagcttcctggagtggagagacctgaagatcgtgtacaagagatacgccagcctgtacttctgctgcgccatcgaggaccaggacaacgagctgatcaccctggagatcatccacagatacgtggagctgctggacaagtacttcggcagcgtgtgcgagctggacatcatcttcaacttcgagaaggcctacttcatcctggacgagttcctgctgggcggcgaggtgcaggagaccagcaagaagaacgtgctgaaggccatcgagcaggccgacctgctgcaggagaagaccgagaccatgtaccacagcaagagcttcatcggcttcaagaaggcctactag

SEQ ID NO: 71917 - DNA, 609 bp, synthetic construct
  misc_feature 1..609: note = Description of Artificial Sequence: Synthetic coding sequence
  source 1..609: mol_type = other DNA
atgcccgccggctgccccccccacagcaccaccgccagcctgccccagcacggcgacagaggcttccccttcgccgccgccgccgccgccggccaggccccccccagacccagacccgccgccgccatgcagttcatgctgctgttcagcagacagggcaagctgagactgcagaagtggtacgtgcccctgagcgacaaggagaagaagaagatcaccagagagctggtgcagaccgtgctggccagaaagcccaagatgtgcagcttcctggagtggagagacctgaagatcgtgtacaagagatacgccagcctgtacttctgctgcgccatcgaggaccaggacaacgagctgatcaccctggagatcatccacagatacgtggagctgctggacaagtacttcggcagcgtgtgcgagctggacatcatcttcaacttcgagaaggcctacttcatcctggacgagttcctgctgggcggcgaggtgcaggagaccagcaagaagaacgtgctgaaggccatcgagcaggccgacctgctgcaggagaagaccgagaccatgtaccacagcaagagcttcatcggcttcaagaaggcctactag

SEQ ID NO: 71918 - DNA, 441 bp, synthetic construct
  misc_feature 1..441: note = Description of Artificial Sequence: Synthetic coding sequence
  source 1..441: mol_type = other DNA
tgaagacagggcaagctgagactgcagaagtggtacgtgcccctgagcgacaaggagaagaagaagatcaccagagagctggtgcagaccgtgctggccagaaagcccaagatgtgcagcttcctggagtggagagacctgaagatcgtgtacaagagatacgccagcctgtacttctgctgcgccatcgaggaccaggacaacgagctgatcaccctggagatcatccacagatacgtggagctgctggacaagtacttcggcagcgtgtgcgagctggacatcatcttcaacttcgagaaggcctacttcatcctggacgagttcctgctgggcggcgaggtgcaggagaccagcaagaagaacgtgctgaaggccatcgagcaggccgacctgctgcaggagcccagacacgagtacttcaacgtgcccgtgtactag

SEQ ID NO: 71919 - DNA, 462 bp, synthetic construct
  misc_feature 1..462: note = Description of Artificial Sequence: Synthetic coding sequence
  source 1..462: mol_type = other DNA
tgactgctgttcagcagacagggcaagctgagactgcagaagtggtacgtgcccctgagcgacaaggagaagaagaagatcaccagagagctggtgcagaccgtgctggccagaaagcccaagatgtgcagcttcctggagtggagagacctgaagatcgtgtacaagagatacgccagcctgtacttctgctgcgccatcgaggaccaggacaacgagctgatcaccctggagatcatccacagatacgtggagctgctggacaagtacttcggcagcgtgtgcgagctggacatcatcttcaacttcgagaaggcctacttcatcctggacgagttcctgctgggcggcgaggtgcaggagaccagcaagaagaacgtgctgaaggccatcgagcaggccgacctgctgcaggagagccagaacgaggagtggggcggcctgagcgaggacatcctgtag

SEQ ID NO: 71920 - DNA, 588 bp, synthetic construct
  misc_feature 1..588: note = Description of Artificial Sequence: Synthetic coding sequence
  source 1..588: mol_type = other DNA
atgcccgccggctgccccccccacagcaccaccgccagcctgccccagcacggcgacagaggcttccccttcgccgccgccgccgccgccggccaggccccccccagacccagacccgccgccgccatgcagttcatgctgctgttcagcagacagggcaagctgagactgcagaagtggtacgtgcccctgagcgacaaggagaagaagaagatcaccagagagctggtgcagaccgtgctggccagaaagcccaagatgtgcagcttcctggagtggagagacctgaagatcgtgtacaagagatacgccagcctgtacttctgctgcgccatcgaggaccaggacaacgagctgatcaccctggagatcatccacagatacgtggagctgctggacaagtacttcggcagcgtgtgcgagctggacatcatcttcaacttcgagaaggcctacttcatcctggacgagttcctgctgggcggcgaggtgcaggagaccagcaagaagaacgtgctgaaggccatcgagcaggccgacctgctgcaggagcccagacacgagtacttcaacgtgcccgtgtactag

SEQ ID NO: 71921 - DNA, 315 bp, synthetic construct
  misc_feature 1..315: note = Description of Artificial Sequence: Synthetic coding sequence
  source 1..315: mol_type = other DNA
atgatcagattcatcctgatccagaacagagccggcaagaccagactggccaagtggtacatgcagttcgacgacgacgagaagcagaagctgatcgaggaggtgcacgccgtggtgaccgtgagagacgccaagcacaccaacttcgtggaggtgctgaacgagtacttccacaacgtgtgcgagctggacctggtgttcaacttctacaaggtgtacaccgtggtggacgagatgttcctggccggcgagatcagagagaccagccagaccaaggtgctgaagcagctgctgatgctgcagagcctggagtag

SEQ ID NO: 71922 - DNA, 2868 bp, synthetic construct
  misc_feature 1..2868: note = Description of Artificial Sequence: Synthetic coding sequence
  source 1..2868: mol_type = other DNA
atgcccgccgtgagcaagggcgacggcatgagaggcctggccgtgttcatcagcgacatcagaaactgcaagagcaaggaggccgagatcaagagaatcaacaaggagctggccaacatcagaagcaagttcaagggcgacaaggccctggacggctacagcaagaagaagtacgtgtgcaagctgctgttcatcttcctgctgggccacgacatcgacttcggccacatggaggccgtgaacctgctgagcagcaacaagtacaccgagaagcagatcggctacctgttcatcagcgtgctggtgaacagcaacagcgagctgatcagactgatcaacaacgccatcaagaacgacctggccagcagaaaccccaccttcatgtgcctggccctgcactgcatcgccaacgtgggcagcagagagatgggcgaggccttcgccgccgacatccccagaatcctggtggccggcgacagcatggacagcgtgaagcagagcgccgccctgtgcctgctgagactgtacaaggccagccccgacctggtgcccatgggcgagtggaccgccagagtggtgcacctgctgaacgaccagcacatgggcgtggtgaccgccgccgtgagcctgatcacctgcctgtgcaagaagaaccccgacgacttcaagacctgcgtgagcctggccgtgagcagactgagcagaatcgtgagcagcgccagcaccgacctgcaggactacacctactacttcgtgcccgccccctggctgagcgtgaagctgctgagactgctgcagtgctaccccccccccgaggacgccgccgtgaagggcagactggtggagtgcctggagaccgtgctgaacaaggcccaggagccccccaagagcaagaaggtgcagcacagcaacgccaagaacgccatcctgttcgagaccatcagcctgatcatccactacgacagcgagcccaacctgctggtgagagcctgcaaccagctgggccagttcctgcagcacagagagaccaacctgagatacctggccctggagagcatgtgcaccctggccagcagcgagttcagccacgaggccgtgaagacccacatcgacaccgtgatcaacgccctgaagaccgagagagacgtgagcgtgagacagagagccgccgacctgctgtacgccatgtgcgacagaagcaacgccaagcagatcgtgagcgagatgctgagatacctggagaccgccgactacgccatcagagaggagatcgtgctgaaggtggccatcctggccgagaagtacgccgtggactacagctggtacgtggacaccatcctgaacctgatcagaatcgccggcgactacgtgagcgaggaggtgtggtacagagtgctgcagatcgtgaccaacagagacgacgtgcagggctacgccgccaagaccgtgttcgaggccctgcaggcccccgcctgccacgagaacatggtgaaggtgggcggctacatcctgggcgagttcggcaacctgatcgccggcgaccccagaagcagcccccccgtgcagttcagcctgctgcacagcaagttccacctgtgcagcgtggccaccagagccctgctgctgagcacctacatcaagttcatcaacctgttccccgagaccaaggccaccatccagggcgtgctgagagccggcagccagctgagaaacgccgacgtggagctgcagcagagagccgtggagtacctgaccctgagcagcgtggccagcaccgacgtgctggccaccgtgctggaggagatgccccccttccccgagagagagagcagcatcctggccaagctgaagagaaagaagggccccggcgccggcagcgccctggacgacggcagaagagaccccagcagcaacgacatcaacggcggcatggagcccacccccagcaccgtgagcacccccagccccagcgccgacctgctgggcctgagagccgcccccccccccgccgccccccccgccagcgccggcgccggcaacctgctggtggacgtgttcgacggccccgccgcccagcccagcctgggccccacccccgaggaggccttcctgagccccggccccgaggacatcggcccccccatccccgaggccgacgagctgctgaacaagttcgtgtgcaagaacaacggcgtgctgttcgagaaccagctgctgcagatcggcgtgaagagcgagttcagacagaacctgggcagaatgtacctgttctacggcaacaagaccagcgtgcagttccagaacttcagccccaccgtggtgcaccccggcgacctgcagacccagctggccgtgcagaccaagagagtggccgcccaggtggacggcggcgcccaggtgcagcaggtgctgaacatcgagtgcctgagagacttcctgaccccccccctgctgagcgtgagattcagatacggcggcgccccccaggccctgaccctgaagctgcccgtgaccatcaacaagttcttccagcccaccgagatggccgcccaggacttcttccagagatggaagcagctgagcctgccccagcaggaggcccagaagatcttcaaggccaaccaccccatggacgccgaggtgaccaaggccaagctgctgggcttcggcagcgccctgctggacaacgtggaccccaaccccgagaacttcgtgggcgccggcatcatccagaccaaggccctgcaggtgggctgcctgctgagactggagcccaacgcccaggcccagatgtacagactgaccctgagaaccagcaaggagcccgtgagcagacacctgtgcgagctgctggcccagcagttctag

SEQ ID NO: 71923 - DNA, 2934 bp, synthetic construct
  misc_feature 1..2934: note = Description of Artificial Sequence: Synthetic coding sequence
  source 1..2934: mol_type = other DNA
atgcccgccgtgagcaagggcgacggcatgagaggcctggccgtgttcatcagcgacatcagaaactgcaagagcaaggaggccgagatcaagagaatcaacaaggagctggccaacatcagaagcaagttcaagggcgacaaggccctggacggctacagcaagaagaagtacgtgtgcaagctgctgttcatcttcctgctgggccacgacatcgacttcggccacatggaggccgtgaacctgctgagcagcaacaagtacaccgagaagcagatcggctacctgttcatcagcgtgctggtgaacagcaacagcgagctgatcagactgatcaacaacgccatcaagaacgacctggccagcagaaaccccaccttcatgtgcctggccctgcactgcatcgccaacgtgggcagcagagagatgggcgaggccttcgccgccgacatccccagaatcctggtggccggcgacagcatggacagcgtgaagcagagcgccgccctgtgcctgctgagactgtacaaggccagccccgacctggtgcccatgggcgagtggaccgccagagtggtgcacctgctgaacgaccagcacatgggcgtggtgaccgccgccgtgagcctgatcacctgcctgtgcaagaagaaccccgacgacttcaagacctgcgtgagcctggccgtgagcagactgagcagaatcgtgagcagcgccagcaccgacctgcaggactacacctactacttcgtgcccgccccctggctgagcgtgaagctgctgagactgctgcagtgctaccccccccccgaggacgccgccgtgaagggcagactggtggagtgcctggagaccgtgctgaacaaggcccaggagccccccaagagcaagaaggtgcagcacagcaacgccaagaacgccatcctgttcgagaccatcagcctgatcatccactacgacagcgagcccaacctgctggtgagagcctgcaaccagctgggccagttcctgcagcacagagagaccaacctgagatacctggccctggagagcatgtgcaccctggccagcagcgagttcagccacgaggccgtgaagacccacatcgacaccgtgatcaacgccctgaagaccgagagagacgtgagcgtgagacagagagccgccgacctgctgtacgccatgtgcgacagaagcaacgccaagcagatcgtgagcgagatgctgagatacctggagaccgccgactacgccatcagagaggagatcgtgctgaaggtggccatcctggccgagaagtacgccgtggactacagctggtacgtggacaccatcctgaacctgatcagaatcgccggcgactacgtgagcgaggaggtgtggtacagagtgctgcagatcgtgaccaacagagacgacgtgcagggctacgccgccaagaccgtgttcgaggccctgcaggcccccgcctgccacgagaacatggtgaaggtgggcggctacatcctgggcgagttcggcaacctgatcgccggcgaccccagaagcagcccccccgtgcagttcagcctgctgcacagcaagttccacctgtgcagcgtggccaccagagccctgctgctgagcacctacatcaagttcatcaacctgttccccgagaccaaggccaccatccagggcgtgctgagagccggcagccagctgagaaacgccgacgtggagctgcagcagagagccgtggagtacctgaccctgagcagcgtggccagcaccgacgtgctggccaccgtgctggaggagatgccccccttccccgagagagagagcagcatcctggccaagctgaagagaaagaagggccccggcgccggcagcgccctggacgacggcagaagagaccccagcagcaacgacatcaacggcggcatggagcccacccccagcaccgtgagcacccccagccccagcgccgacctgctgggcctgagagccgcccccccccccgccgccccccccgccagcgccggcgccggcaacctgctggtggacgtgttcgacggccccgccgcccagcccagcctgggccccacccccgaggaggccttcctgagcgagctggagccccccgcccccgagagccccatggccctgctggccgaccccgcccccgccgccgaccccggccccgaggacatcggcccccccatccccgaggccgacgagctgctgaacaagttcgtgtgcaagaacaacggcgtgctgttcgagaaccagctgctgcagatcggcgtgaagagcgagttcagacagaacctgggcagaatgtacctgttctacggcaacaagaccagcgtgcagttccagaacttcagccccaccgtggtgcaccccggcgacctgcagacccagctggccgtgcagaccaagagagtggccgcccaggtggacggcggcgcccaggtgcagcaggtgctgaacatcgagtgcctgagagacttcctgaccccccccctgctgagcgtgagattcagatacggcggcgccccccaggccctgaccctgaagctgcccgtgaccatcaacaagttcttccagcccaccgagatggccgcccaggacttcttccagagatggaagcagctgagcctgccccagcaggaggcccagaagatcttcaaggccaaccaccccatggacgccgaggtgaccaaggccaagctgctgggcttcggcagcgccctgctggacaacgtggaccccaaccccgagaacttcgtgggcgccggcatcatccagaccaaggccctgcaggtgggctgcctgctgagactggagcccaacgcccaggcccagatgtacagactgaccctgagaaccagcaaggagcccgtgagcagacacctgtgcgagctgctggcccagcagttctag

SEQ ID NO: 71924 - DNA, 1404 bp, synthetic construct
  misc_feature 1..1404: note = Description of Artificial Sequence: Synthetic coding sequence
  source 1..1404: mol_type = other DNA
atgggcctggccctgcactgcatcgccagcgtgggcagcagagagatggccgaggccttcgccggcgagatccccaaggtgctggtggccggcgacaccatggacagcgtgaagcagagcgccgccctgtgcctgctgagactgtacagaaccagccccgacctggtgcccatgggcgactggaccagcagagtggtgcacctgctgaacgaccagcacctgggcgtggtgaccgccgccaccagcctgatcaccaccctggcccagaagaaccccgaggagttcaagaccagcgtgagcctggccgtgagcagactgagcagaatcgtgaccagcgccagcaccgacctgcaggactacacctactacttcgtgcccgccccctggctgagcgtgaagctgctgagactgctgcagtgctaccccccccccgaccccgccgtgagaggcagactgaccgagtgcctggagaccatcctgaacaaggcccaggagccccccaagagcaagaaggtgcagcacagcaacgccaagaacgccgtgctgttcgaggccatcagcctgatcatccaccacgacagcgagcccaacctgctggtgagagcctgcaaccagctgggccagttcctgcagcacagagagaccaacctgagatacctggccctggagagcatgtgcaccctggccagcagcgagttcagccacgaggccgtgaagacccacatcgagaccgtgatcaacgccctgaagaccgagagagacgtgagcgtgctgccccccaccccccccagaagcctgtgggagcagcagtgccactgcgcctggagaggcctgagcctgggcgtgtggcccagctggtggctgcacacctggagaagacccggccccctgggcggcgcccagctgaccctggtgctgctgcagagccagctggactgcttccccagacaggacttcaacctggagttcagaaacatctgcatctgcaacgacttctggcagaagcacgtgagctggcccgacgtgaccgtgctgctgagccagctgctgttcgtgaagggcgtgtgctacgcccccgccgtggccgaggccctggacgtgcagcccggcgaggagagacccgccggccccgccggcccccccggcctgcagggcaaggtgtgggccggcggcgccagactgagaggcgtgctggtgagcttcctgagcgagtgggccagccccggccacggcgccggcctgagccccagcaccggccccgtgcagagcagcctggagggcctgtggagaagagacgccagcgtgtggagcggcagcgagggcgccatcggcagaatgccctgcgccacctgcggcctgtgcctgacctgccacctggacagcgcccccagactgcacgtgtag

SEQ ID NO: 71925 - DNA, 2823 bp, synthetic construct
  misc_feature 1..2823: note = Description of Artificial Sequence: Synthetic coding sequence
  source 1..2823: mol_type = other DNA
atgcccgccgtgagcaagggcgacggcatgagaggcctggccgtgttcatcagcgacatcagaaactgcaagagcaaggaggccgagatcaagagaatcaacaaggagctggccaacatcagaagcaagttcaagggcgacaaggccctggacggctacagcaagaagaagtacgtgtgcaagctgctgttcatcttcctgctgggccacgacatcgacttcggccacatggaggccgtgaacctgctgagcagcaacagatacaccgagaagcagatcggctacctgttcatcagcgtgctggtgaacagcaacagcgagctgatcagactgatcaacaacgccatcaagaacgacctggccagcagaaaccccaccttcatgggcctggccctgcactgcatcgccagcgtgggcagcagagagatggccgaggccttcgccggcgagatccccaaggtgctggtggccggcgacaccatggacagcgtgaagcagagcgccgccctgtgcctgctgagactgtacagaaccagccccgacctggtgcccatgggcgactggaccagcagagtggtgcacctgctgaacgaccagcacctgggcgtggtgaccgccgccaccagcctgatcaccaccctggcccagaagaaccccgaggagttcaagaccagcgtgagcctggccgtgagcagactgagcagaatcgtgaccagcgccagcaccgacctgcaggactacacctactacttcgtgcccgccccctggctgagcgtgaagctgctgagactgctgcagtgctaccccccccccgaggaccccgccgtgagaggcagactgaccgagtgcctggagaccatcctgaacaaggcccaggagccccccaagagcaagaaggtgcagcacagcaacgccaagaacgccgtgctgttcgaggccatcagcctgatcatccaccacgacagcgagcccaacctgctggtgagagcctgcaaccagctgggccagttcctgcagcacagagagaccaacctgagatacctggccctggagagcatgtgcaccctggccagcagcgagttcagccacgaggccgtgaagacccacatcgagaccgtgatcaacgccctgaagaccgagagagacgtgagcgtgagacagagagccgtggacctgctgtacgccatgtgcgacagaagcaacgccccccagatcgtggccgagatgctgagctacctggagaccgccgactacagcatcagagaggagatcgtgctgaaggtggccatcctggccgagaagtacgccgtggactacacctggtacgtggacaccatcctgaacctgatcagaatcgccggcgactacgtgagcgaggaggtgtggtacagagtgatccagatcgtgatcaacagagacgacgtgcagggctacgccgccaagaccgtgttcgaggccctgcaggcccccgcctgccacgagaacctggtgaaggtgggcggctacatcctgggcgagttcggcaacctgatcgccggcgaccccagaagcagccccctgatccagttccacctgctgcacagcaagttccacctgtgcagcgtgcccaccagagccctgctgctgagcacctacatcaagttcgtgaacctgttccccgaggtgaagcccaccatccaggacgtgctgagaagcgacagccagctgagaaacgccgacgtggagctgcagcagagagccgtggagtacctgagactgagcaccgtggccagcaccgacatcctggccaccgtgctggaggagatgccccccttccccgagagagagagcagcatcctggccaagctgaagaagaagaagggccccagcaccgtgaccgacctggaggacaccaagagagacagaagcgtggacgtgaacggcggccccgagcccgcccccgccagcaccagcgccgtgagcacccccagccccagcgccgacctgctgggcctgggcgccgccccccccgcccccgccggccccccccccagcagcggcggcagcggcctgctggtggacgtgttcagcgacagcgccagcgtggtggcccccctggcccccggcagcgaggacaacttcgccagattcgtgtgcaagaacaacggcgtgctgttcgagaaccagctgctgcagatcggcctgaagagcgagttcagacagaacctgggcagaatgttcatcttctacggcaacaagaccagcacccagttcctgaacttcacccccaccctgatctgcagcgacgacctgcagcccaacctgaacctgcagaccaagcccgtggaccccaccgtggagggcggcgcccaggtgcagcaggtggtgaacatcgagtgcgtgagcgacttcaccgaggcccccgtgctgaacatccagttcagatacggcggcaccttccagaacgtgagcgtgcagctgcccatcaccctgaacaagttcttccagcccaccgagatggccagccaggacttcttccagagatggaagcagctgagcaacccccagcaggaggtgcagaacatcttcaaggccaagcaccccatggacaccgaggtgaccaaggccaagatcatcggcttcggcagcgccctgctggaggaggtggaccccaaccccgccaacttcgtgggcgccggcatcatccacaccaagaccacccagatcggctgcctgctgagactggagcccaacctgcaggcccagatgtacagactgaccctgagaaccagcaaggaggccgtgagccagagactgtgcgagctgctgagcgcccagttctag

SEQ ID NO: 71926 - DNA, 1062 bp, synthetic construct
  misc_feature 1..1062: note = Description of Artificial Sequence: Synthetic coding sequence
  source 1..1062: mol_type = other DNA
atgcccgccgtgagcaagggcgacggcatgagaggcctggccgtgttcatcagcgacatcagaaactgcaagagcaaggaggccgagatcaagagaatcaacaaggagctggccaacatcagaagcaagttcaagggcgacaaggccctggacggctacagcaagaagaagtacgtgtgcaagctgctgttcatcttcctgctgggccacgacatcgacttcggccacatggaggccgtgaacctgctgagcagcaacagatacaccgagaagcagatcggctacctgttcatcagcgtgctggtgaacagcaacagcgagctgatcagactgatcaacaacgccatcaagaacgacctggccagcagaaaccccaccttcatgggcctggccctgcactgcatcgccagcgtgggcagcagagagatggccgaggccttcgccggcgagatccccaaggtgctggtggccggcgacaccatggacagcgtgaagcagagcgccgccctgtgcctgctgagactgtacagaaccagccccgacctggtgcccatgggcgactggaccagcagagtggtgcacctgctgaacgaccagcacctgggcgtggtgaccgccgccaccagcctgatcaccaccctggcccagaagaaccccgaggagttcaagaccagcgtgagcctggccgtgagcagactgagcagaatcgtgaccagcgccagcaccgacctgcaggactacacctactacttcgtgcccgccccctggctgagcgtgaagctgctgagactgctgcagtgctaccccccccccgaccccgccgtgagaggcagactgaccgagtgcctggagaccatcctgaacaaggcccaggagccccccaagagcaagaaggtgcagcacagcaacgccaagaacgccgtgctgttcgaggccatcagcctgatcatccaccacgacagagagcccaacctgcaggcccagatgtacagactgaccctgagaaccagcaaggaggccgtgagccagagactgtgcgagctgctgagcgcccagttctag

SEQ ID NO: 71927 - DNA, 1971 bp, synthetic construct
  misc_feature 1..1971: note = Description of Artificial Sequence: Synthetic coding sequence
  source 1..1971: mol_type = other DNA
atgcccgccgtgagcaagggcgacggcatgagaggcctggccgtgttcatcagcgacatcagaaactgcaagagcaaggaggccgagatcaagagaatcaacaaggagctggccaacatcagaagcaagttcaagggcgacaaggccctggacggctacagcaagaagaagtacgtgtgcaagctgctgttcatcttcctgctgggccacgacatcgacttcggccacatggaggccgtgaacctgctgagcagcaacagatacaccgagaagcagatcggctacctgttcatcagcgtgctggtgaacagcaacagcgagctgatcagactgatcaacaacgccatcaagaacgacctggccagcagaaaccccaccttcatgggcctggccctgcactgcatcgccagcgtgggcagcagagagatggccgaggccttcgccggcgagatccccaaggtgctggtggccggcgacaccatggacagcgtgaagcagagcgccgccctgtgcctgctgagactgtacagaaccagccccgacctggtgcccatgggcgactggaccagcagagtggtgcacctgctgaacgaccagcacctgggcgtggtgaccgccgccaccagcctgatcaccaccctggcccagaagaaccccgaggagttcaagaccagcgtgagcctggccgtgagcagactgagcagaatcgtgaccagcgccagcaccgacctgcaggactacacctactacttcgtgcccgccccctggctgagcgtgaagctgctgagactgctgcagtgctaccccccccccgaggaccccgccgtgagaggcagactgaccgagtgcctggagaccatcctgaacaaggcccaggagccccccaagagcaagaaggtgcagcacagcaacgccaagaacgccgtgctgttcgaggccatcagcctgatcatccaccacgacagcgagcccaacctgctggtgagagcctgcaaccagctgggccagttcctgcagcacagagagaccaacctgagatacctggccctggagagcatgtgcaccctggccagcagcgagttcagccacgaggccgtgaagacccacatcgagaccgtgatcaacgccctgaagaccgagagagacgtgagcgtgagacagagagccgtggacctgctgtacgccatgtgcgacagaagcaacgccccccagatcgtggccgagatgctgagctacctggagaccgccgactacagcatcagagaggagatcgtgctgaaggtggccatcctggccgagaagtacgccgtggactacacctggtacgtggacaccatcctgaacctgatcagaatcgccggcgactacgtgagcgaggaggtgtggtacagagtgatccagatcgtgatcaacagagacgacgtgcagggctacgccgccaagaccgtgttcgaggccctgcaggcccccgcctgccacgagaacctggtgaaggtgggcggctacatcctgggcgagttcggcaacctgatcgccggcgaccccagaagcagccccctgatccagttccacctgctgcacagcaagttccacctgtgcagcgtgcccaccagagccctgctgctgagcacctacatcaagttcgtgaacctgttccccgaggtgaagcccaccatccaggacgtgctgagaagcgacagccagctgagaaacgccgacgtggagctgcagcagagagccgtggagtacctgagactgagcaccgtggccagcaccgacatcctggccaccgtgctggaggagatgccccccttccccgagagagagagcagcatcctggccaagctgaagaagaagaagggccccagcaccgtgaccgacctggaggacaccaagagagacagaagcgtggacgtgaacggcggccccgagcccgcccccgccagcaccagcgccgtgctgtgcctgtag

SEQ ID NO: 71928 - DNA, 2820 bp, synthetic construct
  misc_feature 1..2820: note = Description of Artificial Sequence: Synthetic coding sequence
  source 1..2820: mol_type = other DNA
atgcccgccgtgagcaagggcgacggcatgagaggcctggccgtgttcatcagcgacatcagaaactgcaagagcaaggaggccgagatcaagagaatcaacaaggagctggccaacatcagaagcaagttcaagggcgacaaggccctggacggctacagcaagaagaagtacgtgtgcaagctgctgttcatcttcctgctgggccacgacatcgacttcggccacatggaggccgtgaacctgctgagcagcaacagatacaccgagaagcagatcggctacctgttcatcagcgtgctggtgaacagcaacagcgagctgatcagactgatcaacaacgccatcaagaacgacctggccagcagaaaccccaccttcatgggcctggccctgcactgcatcgccagcgtgggcagcagagagatggccgaggccttcgccggcgagatccccaaggtgctggtggccggcgacaccatggacagcgtgaagcagagcgccgccctgtgcctgctgagactgtacagaaccagccccgacctggtgcccatgggcgactggaccagcagagtggtgcacctgctgaacgaccagcacctgggcgtggtgaccgccgccaccagcctgatcaccaccctggcccagaagaaccccgaggagttcaagaccagcgtgagcctggccgtgagcagactgagcagaatcgtgaccagcgccagcaccgacctgcaggactacacctactacttcgtgcccgccccctggctgagcgtgaagctgctgagactgctgcagtgctaccccccccccgaccccgccgtgagaggcagactgaccgagtgcctggagaccatcctgaacaaggcccaggagccccccaagagcaagaaggtgcagcacagcaacgccaagaacgccgtgctgttcgaggccatcagcctgatcatccaccacgacagcgagcccaacctgctggtgagagcctgcaaccagctgggccagttcctgcagcacagagagaccaacctgagatacctggccctggagagcatgtgcaccctggccagcagcgagttcagccacgaggccgtgaagacccacatcgagaccgtgatcaacgccctgaagaccgagagagacgtgagcgtgagacagagagccgtggacctgctgtacgccatgtgcgacagaagcaacgccccccagatcgtggccgagatgctgagctacctggagaccgccgactacagcatcagagaggagatcgtgctgaaggtggccatcctggccgagaagtacgccgtggactacacctggtacgtggacaccatcctgaacctgatcagaatcgccggcgactacgtgagcgaggaggtgtggtacagagtgatccagatcgtgatcaacagagacgacgtgcagggctacgccgccaagaccgtgttcgaggccctgcaggcccccgcctgccacgagaacctggtgaaggtgggcggctacatcctgggcgagttcggcaacctgatcgccggcgaccccagaagcagccccctgatccagttccacctgctgcacagcaagttccacctgtgcagcgtgcccaccagagccctgctgctgagcacctacatcaagttcgtgaacctgttccccgaggtgaagcccaccatccaggacgtgctgagaagcgacagccagctgagaaacgccgacgtggagctgcagcagagagccgtggagtacctgagactgagcaccgtggccagcaccgacatcctggccaccgtgctggaggagatgccccccttccccgagagagagagcagcatcctggccaagctgaagaagaagaagggccccagcaccgtgaccgacctggaggacaccaagagagacagaagcgtggacgtgaacggcggccccgagcccgcccccgccagcaccagcgccgtgagcacccccagccccagcgccgacctgctgggcctgggcgccgccccccccgcccccgccggccccccccccagcagcggcggcagcggcctgctggtggacgtgttcagcgacagcgccagcgtggtggcccccctggcccccggcagcgaggacaacttcgccagattcgtgtgcaagaacaacggcgtgctgttcgagaaccagctgctgcagatcggcctgaagagcgagttcagacagaacctgggcagaatgttcatcttctacggcaacaagaccagcacccagttcctgaacttcacccccaccctgatctgcagcgacgacctgcagcccaacctgaacctgcagaccaagcccgtggaccccaccgtggagggcggcgcccaggtgcagcaggtggtgaacatcgagtgcgtgagcgacttcaccgaggcccccgtgctgaacatccagttcagatacggcggcaccttccagaacgtgagcgtgcagctgcccatcaccctgaacaagttcttccagcccaccgagatggccagccaggacttcttccagagatggaagcagctgagcaacccccagcaggaggtgcagaacatcttcaaggccaagcaccccatggacaccgaggtgaccaaggccaagatcatcggcttcggcagcgccctgctggaggaggtggaccccaaccccgccaacttcgtgggcgccggcatcatccacaccaagaccacccagatcggctgcctgctgagactggagcccaacctgcaggcccagatgtacagactgaccctgagaaccagcaaggaggccgtgagccagagactgtgcgagctgctgagcgcccagttctag

SEQ ID NO: 71929 - DNA, 2040 bp, synthetic construct
  misc_feature 1..2040: note = Description of Artificial Sequence: Synthetic coding sequence
  source 1..2040: mol_type = other DNA
atgcccgccgtgagcaagggcgacggcatgagaggcctggccgtgttcatcagcgacatcagaaactgcaagagcaaggaggccgagatcaagagaatcaacaaggagctggccaacatcagaagcaagttcaagggcgacaaggccctggacggctacagcaagaagaagtacgtgtgcaagctgctgttcatcttcctgctgggccacgacatcgacttcggccacatggaggccgtgaacctgctgagcagcaacagatacaccgagaagcagatcggctacctgttcatcagcgtgctggtgaacagcaacagcgagctgatcagactgatcaacaacgccatcaagaccgagagagacgtgagcgtgagacagagagccgtggacctgctgtacgccatgtgcgacagaagcaacgccccccagatcgtggccgagatgctgagctacctggagaccgccgactacagcatcagagaggagatcgtgctgaaggtggccatcctggccgagaagtacgccgtggactacacctggtacgtggacaccatcctgaacctgatcagaatcgccggcgactacgtgagcgaggaggtgtggtacagagtgatccagatcgtgatcaacagagacgacgtgcagggctacgccgccaagaccgtgttcgaggccctgcaggcccccgcctgccacgagaacctggtgaaggtgggcggctacatcctgggcgagttcggcaacctgatcgccggcgaccccagaagcagccccctgatccagttccacctgctgcacagcaagttccacctgtgcagcgtgcccaccagagccctgctgctgagcacctacatcaagttcgtgaacctgttccccgaggtgaagcccaccatccaggacgtgctgagaagcgacagccagctgagaaacgccgacgtggagctgcagcagagagccgtggagtacctgagactgagcaccgtggccagcaccgacatcctggccaccgtgctggaggagatgccccccttccccgagagagagagcagcatcctggccaagctgaagaagaagaagggccccagcaccgtgaccgacctggaggacaccaagagagacagaagcgtggacgtgaacggcggccccgagcccgcccccgccagcaccagcgccgtgagcacccccagccccagcgccgacctgctgggcctgggcgccgccccccccgcccccgccggccccccccccagcagcggcggcagcggcctgctggtggacgtgttcagcgacagcgccagcgtggtggcccccctggcccccggcagcgaggacaacttcgccagattcgtgtgcaagaacaacggcgtgctgttcgagaaccagctgctgcagatcggcctgaagagcgagttcagacagaacctgggcagaatgttcatcttctacggcaacaagaccagcacccagttcctgaacttcacccccaccctgatctgcagcgacgacctgcagcccaacctgaacctgcagaccaagcccgtggaccccaccgtggagggcggcgcccaggtgcagcaggtggtgaacatcgagtgcgtgagcgacttcaccgaggcccccgtgctgaacatccagttcagatacggcggcaccttccagaacgtgagcgtgcagctgcccatcaccctgaacaagttcttccagcccaccgagatggccagccaggacttcttccagagatggaagcagctgagcaacccccagcaggaggtgcagaacatcttcaaggccaagcaccccatggacaccgaggtgaccaaggccaagatcatcggcttcggcagcgccctgctggaggaggtggaccccaaccccgccaacttcgtgggcgccggcatcatccacaccaagaccacccagatcggctgcctgctgagactggagcccaacctgcaggcccagatgtacagactgaccctgagaaccagcaaggaggccgtgagccagagactgtgcgagctgctgagcgcccagttctag

SEQ ID NO: 71930 - DNA, 2031 bp, synthetic construct
  misc_feature 1..2031: note = Description of Artificial Sequence: Synthetic coding sequence
  source 1..2031: mol_type = other DNA
atgcccgccgtgagcaagggcgacggcatgagaggcctggccgtgttcatcagcgacatcagaaactgcaagagcaaggaggccgagatcaagagaatcaacaaggagctggccaacatcagaagcaagttcaagggcgacaaggccctggacggctacagcaagaagaagtacgtgtgcaagctgctgttcatcttcctgctgggccacgacatcgacttcggccacatggaggccgtgaacctgctgagcagcaacagatacaccgagaagcagatcggctacctgttcatcagcgtgctggtgaacagcaacagcgagctgatcagactgatcaacaacaccgagagagacgtgagcgtgagacagagagccgtggacctgctgtacgccatgtgcgacagaagcaacgccccccagatcgtggccgagatgctgagctacctggagaccgccgactacagcatcagagaggagatcgtgctgaaggtggccatcctggccgagaagtacgccgtggactacacctggtacgtggacaccatcctgaacctgatcagaatcgccggcgactacgtgagcgaggaggtgtggtacagagtgatccagatcgtgatcaacagagacgacgtgcagggctacgccgccaagaccgtgttcgaggccctgcaggcccccgcctgccacgagaacctggtgaaggtgggcggctacatcctgggcgagttcggcaacctgatcgccggcgaccccagaagcagccccctgatccagttccacctgctgcacagcaagttccacctgtgcagcgtgcccaccagagccctgctgctgagcacctacatcaagttcgtgaacctgttccccgaggtgaagcccaccatccaggacgtgctgagaagcgacagccagctgagaaacgccgacgtggagctgcagcagagagccgtggagtacctgagactgagcaccgtggccagcaccgacatcctggccaccgtgctggaggagatgccccccttccccgagagagagagcagcatcctggccaagctgaagaagaagaagggccccagcaccgtgaccgacctggaggacaccaagagagacagaagcgtggacgtgaacggcggccccgagcccgcccccgccagcaccagcgccgtgagcacccccagccccagcgccgacctgctgggcctgggcgccgccccccccgcccccgccggccccccccccagcagcggcggcagcggcctgctggtggacgtgttcagcgacagcgccagcgtggtggcccccctggcccccggcagcgaggacaacttcgccagattcgtgtgcaagaacaacggcgtgctgttcgagaaccagctgctgcagatcggcctgaagagcgagttcagacagaacctgggcagaatgttcatcttctacggcaacaagaccagcacccagttcctgaacttcacccccaccctgatctgcagcgacgacctgcagcccaacctgaacctgcagaccaagcccgtggaccccaccgtggagggcggcgcccaggtgcagcaggtggtgaacatcgagtgcgtgagcgacttcaccgaggcccccgtgctgaacatccagttcagatacggcggcaccttccagaacgtgagcgtgcagctgcccatcaccctgaacaagttcttccagcccaccgagatggccagccaggacttcttccagagatggaagcagctgagcaacccccagcaggaggtgcagaacatcttcaaggccaagcaccccatggacaccgaggtgaccaaggccaagatcatcggcttcggcagcgccctgctggaggaggtggaccccaaccccgccaacttcgtgggcgccggcatcatccacaccaagaccacccagatcggctgcctgctgagactggagcccaacctgcaggcccagatgtacagactgaccctgagaaccagcaaggaggccgtgagccagagactgtgcgagctgctgagcgcccagttctag

SEQ ID NO: 71931 - DNA, 2814 bp, synthetic construct
  misc_feature 1..2814: note = Description of Artificial Sequence: Synthetic coding sequence
  source 1..2814: mol_type = other DNA
atgaccgacagcaagtacttcaccaccaacaagaagggcgagatcttcgagctgaaggccgagctgaacaacgagaagaaggagaagagaaaggaggccgtgaagaaggtgatcgccgccatgaccgtgggcaaggacgtgagcagcctgttccccgacgtggtgaactgcatgcagaccgacaacctggagctgaagaagctggtgtacctgtacctgatgaactacgccaagagccagcccgacatggccatcatggccgtgaacagcttcgtgaaggactgcgaggaccccaaccccctgatcagagccctggccgtgagaaccatgggctgcatcagagtggacaagatcaccgagtacctgtgcgagcccctgagaaagtgcctgaaggacgaggacccctacgtgagaaagaccgccgccgtgtgcgtggccaagctgcacgacatcaacgcccagatggtggaggaccagggcttcctggacagcctgagagacctgatcgccgacagcaaccccatggtggtggccaacgccgtggccgccctgagcgagatcagcgagagccaccccaacagcaacctgctggacctgaacccccagaacatcaacaagctgctgaccgccctgaacgagtgcaccgagtggggccagatcttcatcctggactgcctgagcaactacaaccccaaggacgacagagaggcccagagcatctgcgagagagtgacccccagactgagccacgccaacagcgccgtggtgctgagcgccgtgaaggtgctgatgaagttcctggagctgctgcccaaggacagcgactactacaacatgctgctgaagaagctggccccccccctggtgaccctgctgagcggcgagcccgaggtgcagtacgtggccctgagaaacatcaacctgatcgtgcagaagagacccgagatcctgaagcaggagatcaaggtgttcttcgtgaagtacaacgaccccatctacgtgaagctggagaagctggacatcatgatcagactggccagccaggccaacatcgcccaggtgctggccgagctgaaggagtacgccaccgaggtggacgtggacttcgtgagaaaggccgtgagagccatcggcagatgcgccatcaaggtggagcagagcgccgagagatgcgtgagcaccctgctggacctgatccagaccaaggtgaactacgtggtgcaggaggccatcgtggtgatcagagacatcttcagaaagtaccccaacaagtacgagagcatcatcgccaccctgtgcgagaacctggacagcctggacgagcccgacgccagagccgccatgatctggatcgtgggcgagtacgccgagagaatcgacaacgccgacgagctgctggagagcttcctggagggcttccacgacgagagcacccaggtgcagctgaccctgctgaccgccatcgtgaagctgttcctgaagaagcccagcgagacccaggagctggtgcagcaggtgctgagcctggccacccaggacagcgacaaccccgacctgagagacagaggctacatctactggagactgctgagcaccgaccccgtgaccgccaaggaggtggtgctgagcgagaagcccctgatcagcgaggagaccgacctgatcgagcccaccctgctggacgagctgatctgccacatcggcagcctggccagcgtgtaccacaagccccccaacgccttcgtggagggcagccacggcatccacagaaagcacctgcccatccaccacggcagcaccgacgccggcgacagccccgtgggcaccaccaccgccaccaacctggagcagccccaggtgatccccagccagggcgacctgctgggcgacctgctgaacctggacctgggcccccccgtgaacgtgccccaggtgagcagcatgcagatgggcgccgtggacctgctgggcggcggcctggacagcctggtgggccagagcttcatccccagcagcgtgcccgccaccttcgcccccagccccacccccgccgtggtgagcagcggcctgaacgacctgttcgagctgagcaccggcatcggcatggcccccggcggctacgtggcccccaaggccgtgtggctgcccgccgtgaaggccaagggcctggagatcagcggcaccttcacccacagacagggccacatctacatggagatgaacttcaccaacaaggccctgcagcacatgaccgacttcgccatccagttcaacaagaacagcttcggcgtgatccccagcacccccctggccatccacacccccctgatgcccaaccagagcatcgacgtgagcctgcccctgaacaccctgggccccgtgatgaagatggagcccctgaacaacctgcaggtggccgtgaagaacaacatcgacgtgttctacttcagctgcctgatccccctgaacgtgctgttcgtggaggacggcaagatggagagacaggtgttcctggccacctggaaggacatccccaacgagaacgagctgcagttccagatcaaggagtgccacctgaacgccgacaccgtgagcagcaagctgcagaacaacaacgtgtacaccatcgccaagagaaacgtggagggccaggacatgctgtaccagagcctgaagctgaccaacggcatctggatcctggccgagctgagaatccagcccggcaaccccaactacaccctgagcctgaagtgcagagcccccgaggtgagccagtacatctaccaggtgtacgacagcatcctgaagaactag

SEQ ID NO: 71932 - DNA, 2856 bp, synthetic construct
  misc_feature 1..2856: note = Description of Artificial Sequence: Synthetic coding sequence
  source 1..2856: mol_type = other DNA
atgaccgacagcaagtacttcaccaccaacaagaagggcgagatcttcgagctgaaggccgagctgaacaacgagaagaaggagaagagaaaggaggccgtgaagaaggtgatcgccgccatgaccgtgggcaaggacgtgagcagcctgttccccgacgtggtgaactgcatgcagaccgacaacctggagctgaagaagctggtgtacctgtacctgatgaactacgccaagagccagcccgacatggccatcatggccgtgaacagcttcgtgaaggactgcgaggaccccaaccccctgatcagagccctggccgtgagaaccatgggctgcatcagagtggacaagatcaccgagtacctgtgcgagcccctgagaaagtgcctgaaggacgaggacccctacgtgagaaagaccgccgccgtgtgcgtggccaagctgcacgacatcaacgcccagatggtggaggaccagggcttcctggacagcctgagagacctgatcgccgacagcaaccccatggtggtggccaacgccgtggccgccctgagcgagatcagcgagagccaccccaacagcaacctgctggacctgaacccccagaacatcaacaagctgctgaccgccctgaacgagtgcaccgagtggggccagatcttcatcctggactgcctgagcaactacaaccccaaggacgacagagaggcccagagcatctgcgagagagtgacccccagactgagccacgccaacagcgccgtggtgctgagcgccgtgaaggtgctgatgaagttcctggagctgctgcccaaggacagcgactactacaacatgctgctgaagaagctggccccccccctggtgaccctgctgagcggcgagcccgaggtgcagtacgtggccctgagaaacatcaacctgatcgtgcagaagagacccgagatcctgaagcaggagatcaaggtgttcttcgtgaagtacaacgaccccatctacgtgaagctggagaagctggacatcatgatcagactggccagccaggccaacatcgcccaggtgctggccgagctgaaggagtacgccaccgaggtggacgtggacttcgtgagaaaggccgtgagagccatcggcagatgcgccatcaaggtggagcagagcgccgagagatgcgtgagcaccctgctggacctgatccagaccaaggtgaactacgtggtgcaggaggccatcgtggtgatcagagacatcttcagaaagtaccccaacaagtacgagagcatcatcgccaccctgtgcgagaacctggacagcctggacgagcccgacgccagagccgccatgatctggatcgtgggcgagtacgccgagagaatcgacaacgccgacgagctgctggagagcttcctggagggcttccacgacgagagcacccaggtgcagctgaccctgctgaccgccatcgtgaagctgttcctgaagaagcccagcgagacccaggagctggtgcagcaggtgctgagcctggccacccaggacagcgacaaccccgacctgagagacagaggctacatctactggagactgctgagcaccgaccccgtgaccgccaaggaggtggtgctgagcgagaagcccctgatcagcgaggagaccgacctgatcgagcccaccctgctggacgagctgatctgccacatcggcagcctggccagcgtgtaccacaagccccccaacgccttcgtggagggcagccacggcatccacagaaagcacctgcccatccaccacggcagcaccgacgccggcgacagccccgtgggcaccaccaccgccaccaacctggagcagccccaggtgatccccagccagggcgacctgctgggcgacctgctgaacctggacctgggcccccccgtgaacgtgccccaggtgagcagcatgcagatgggcgccgtggacctgctgggcggcggcctggacagcctgctgggcagcgacctgggcggcggcatcggcggcagccccgccgtgggccagagcttcatccccagcagcgtgcccgccaccttcgcccccagccccacccccgccgtggtgagcagcggcctgaacgacctgttcgagctgagcaccggcatcggcatggcccccggcggctacgtggcccccaaggccgtgtggctgcccgccgtgaaggccaagggcctggagatcagcggcaccttcacccacagacagggccacatctacatggagatgaacttcaccaacaaggccctgcagcacatgaccgacttcgccatccagttcaacaagaacagcttcggcgtgatccccagcacccccctggccatccacacccccctgatgcccaaccagagcatcgacgtgagcctgcccctgaacaccctgggccccgtgatgaagatggagcccctgaacaacctgcaggtggccgtgaagaacaacatcgacgtgttctacttcagctgcctgatccccctgaacgtgctgttcgtggaggacggcaagatggagagacaggtgttcctggccacctggaaggacatccccaacgagaacgagctgcagttccagatcaaggagtgccacctgaacgccgacaccgtgagcagcaagctgcagaacaacaacgtgtacaccatcgccaagagaaacgtggagggccaggacatgctgtaccagagcctgaagctgaccaacggcatctggatcctggccgagctgagaatccagcccggcaaccccaactacaccctgagcctgaagtgcagagcccccgaggtgagccagtacatctaccaggtgtacgacagcatcctgaagaactag

SEQ ID NO: 71933 - DNA, 2856 bp, synthetic construct; identical to SEQ ID NO: 71932
  misc_feature 1..2856: note = Description of Artificial Sequence: Synthetic coding sequence
  source 1..2856: mol_type = other DNA

SEQ ID NO: 71934 - DNA, 2643 bp, synthetic construct
  misc_feature 1..2643: note = Description of Artificial Sequence: Synthetic coding sequence
  source 1..2643: mol_type = other DNA
atgcagaccgacaacctggagctgaagaagctggtgtacctgtacctgatgaactacgccaagagccagcccgacatggccatcatggccgtgaacagcttcgtgaaggactgcgaggaccccaaccccctgatcagagccctggccgtgagaaccatgggctgcatcagagtggacaagatcaccgagtacctgtgcgagcccctgagaaagtgcctgaaggacgaggacccctacgtgagaaagaccgccgccgtgtgcgtggccaagctgcacgacatcaacgcccagatggtggaggaccagggcttcctggacagcctgagagacctgatcgccgacagcaaccccatggtggtggccaacgccgtggccgccctgagcgagatcagcgagagccaccccaacagcaacctgctggacctgaacccccagaacatcaacaagctgctgaccgccctgaacgagtgcaccgagtggggccagatcttcatcctggactgcctgagcaactacaaccccaaggacgacagagaggcccagagcatctgcgagagagtgacccccagactgagccacgccaacagcgccgtggtgctgagcgccgtgaaggtgctgatgaagttcctggagctgctgcccaaggacagcgactactacaacatgctgctgaagaagctggccccccccctggtgaccctgctgagcggcgagcccgaggtgcagtacgtggccctgagaaacatcaacctgatcgtgcagaagagacccgagatcctgaagcaggagatcaaggtgttcttcgtgaagtacaacgaccccatctacgtgaagctggagaagctggacatcatgatcagactggccagccaggccaacatcgcccaggtgctggccgagctgaaggagtacgccaccgaggtggacgtggacttcgtgagaaaggccgtgagagccatcggcagatgcgccatcaaggtggagcagagcgccgagagatgcgtgagcaccctgctggacctgatccagaccaaggtgaactacgtggtgcaggaggccatcgtggtgatcagagacatcttcagaaagtaccccaacaagtacgagagcatcatcgccaccctgtgcgagaacctggacagcctggacgagcccgacgccagagccgccatgatctggatcgtgggcgagtacgccgagagaatcgacaacgccgacgagctgctggagagcttcctggagggcttccacgacgagagcacccaggtgcagctgaccctgctgaccgccatcgtgaagctgttcctgaagaagcccagcgagacccaggagctggtgcagcaggtgctgagcctggccacccaggacagcgacaaccccgacctgagagacagaggctacatctactggagactgctgagcaccgaccccgtgaccgccaaggaggtggtgctgagcgagaagcccctgatcagcgaggagaccgacctgatcgagcccaccctgctggacgagctgatctgccacatcggcagcctggccagcgtgtaccacaagccccccaacgccttcgtggagggcagccacggcatccacagaaagcacctgcccatccaccacggcagcaccgacgccggcgacagccccgtgggcaccaccaccgccaccaacctggagcagccccaggtgatccccagccagggcgacctgctgggcgacctgctgaacctggacctgggcccccccgtgaacgtgccccaggtgagcagcatgcagatgggcgccgtggacctgctgggcggcggcctggacagcctggtgggccagagcttcatccccagcagcgtgcccgccaccttcgcccccagccccacccccgccgtggtgagcagcggcctgaacgacctgttcgagctgagcaccggcatcggcatggcccccggcggctacgtggcccccaaggccgtgtggctgcccgccgtgaaggccaagggcctggagatcagcggcaccttcacccacagacagggccacatctacatggagatgaacttcaccaacaaggccctgcagcacatgaccgacttcgccatccagttcaacaagaacagcttcggcgtgatccccagcacccccctggccatccacacccccctgatgcccaaccagagcatcgacgtgagcctgcccctgaacaccctgggccccgtgatgaagatggagcccctgaacaacctgcaggtggccgtgaagaacaacatcgacgtgttctacttcagctgcctgatccccctgaacgtgctgttcgtggaggacggcaagatggagagacaggtgttcctggccacctggaaggacatccccaacgagaacgagctgcagttccagatcaaggagtgccacctgaacgccgacaccgtgagcagcaagctgcagaacaacaacgtgtacaccatcgccaagagaaacgtggagggccaggacatgctgtaccagagcctgaagctgaccaacggcatctggatcctggccgagctgagaatccagcccggcaaccccaactacaccctgagcctgaagtgcagagcccccgaggtgagccagtacatctaccaggtgtacgacagcatcctgaagaactag

SEQ ID NO: 71935 - DNA, 2067 bp, synthetic construct
  misc_feature 1..2067: note = Description of Artificial Sequence: Synthetic coding sequence
  source 1..2067: mol_type = other DNA
atgaagttcctggagctgctgcccaaggacagcgactactacaacatgctgctgaagaagctggccccccccctggtgaccctgctgagcggcgagcccgaggtgcagtacgtggccctgagaaacatcaacctgatcgtgcagaagagacccgagatcctgaagcaggagatcaaggtgttcttcgtgaagtacaacgaccccatctacgtgaagctggagaagctggacatcatgatcagactggccagccaggccaacatcgcccaggtgctggccgagctgaaggagtacgccaccgaggtggacgtggacttcgtgagaaaggccgtgagagccatcggcagatgcgccatcaaggtggagcagagcgccgagagatgcgtgagcaccctgctggacctgatccagaccaaggtgaactacgtggtgcaggaggccatcgtggtgatcagagacatcttcagaaagtaccccaacaagtacgagagcatcatcgccaccctgtgcgagaacctggacagcctggacgagcccgacgccagagccgccatgatctggatcgtgggcgagtacgccgagagaatcgacaacgccgacgagctgctggagagcttcctggagggcttccacgacgagagcacccaggtgcagctgaccctgctgaccgccatcgtgaagctgttcctgaagaagcccagcgagacccaggagctggtgcagcaggtgctgagcctggccacccaggacagcgacaaccccgacctgagagacagaggctacatctactggagactgctgagcaccgaccccgtgaccgccaaggaggtggtgctgagcgagaagcccctgatcagcgaggagaccgacctgatcgagcccaccctgctggacgagctgatctgccacatcggcagcctggccagcgtgtaccacaagccccccaacgccttcgtggagggcagccacggcatccacagaaagcacctgcccatccaccacggcagcaccgacgccggcgacagccccgtgggcaccaccaccgccaccaacctggagcagccccaggtgatccccagccagggcgacctgctgggcgacctgctgaacctggacctgggcccccccgtgaacgtgccccaggtgagcagcatgcagatgggcgccgtggacctgctgggcggcggcctggacagcctgctgggcagcgacctgggcggcggcatcggcggcagccccgccgtgggccagagcttcatccccagcagcgtgcccgccaccttcgcccccagccccacccccgccgtggtgagcagcggcctgaacgacctgttcgagctgagcaccggcatcggcatggcccccggcggctacgtggcccccaaggccgtgtggctgcccgccgtgaaggccaagggcctggagatcagcggcaccttcacccacagacagggccacatctacatggagatgaacttcaccaacaaggccctgcagcacatgaccgacttcgccatccagttcaacaagaacagcttcggcgtgatccccagcacccccctggccatccacacccccctgatgcccaaccagagcatcgacgtgagcctgcccctgaacaccctgggccccgtgatgaagatggagcccctgaacaacctgcaggtggccgtgaagaacaacatcgacgtgttctacttcagctgcctgatccccctgaacgtgctgttcgtggaggacggcaagatggagagacaggtgttcctggccacctggaaggacatccccaacgagaacgagctgcagttccagatcaaggagtgccacctgaacgccgacaccgtgagcagcaagctgcagaacaacaacgtgtacaccatcgccaagagaaacgtggagggccaggacatgctgtaccagagcctgaagctgaccaacggcatctggatcctggccgagctgagaatccagcccggcaaccccaactacaccctgagcctgaagtgcagagcccccgaggtgagccagtacatctaccaggtgtacgacagcatcctgaagaactag

SEQ ID NO: 71936 - DNA, 1308 bp, synthetic construct
  misc_feature 1..1308: note = Description of Artificial Sequence: Synthetic coding sequence
  source 1..1308: mol_type = other DNA
atgatcggcggcctgttcatctacaaccacaagggcgaggtgctgatcagcagagtgtacagagacgacatcggcagaaacgccgtggacgccttcagagtgaacgtgatccacgccagacagcaggtgagaagccccgtgaccaacatcgccagaaccagcttcttccacgtgaagagaagcaacatctggctggccgccgtgaccaagcagaacgtgaacgccgccatggtgttcgagttcctgtacaagatgtgcgacgtgatggccgcctacttcggcaagatcagcgaggagaacatcaagaacaacttcgtgctgatctacgagctgctggacgagatcctggacttcggctacccccagaacagcgagaccggcgccctgaagaccttcatcacccagcagggcatcaagagccagcaccagaccaaggaggagcagagccagatcaccagccaggtgaccggccagatcggctggagaagagagggcatcaagtacagaagaaacgagctgttcctggacgtgctggagagcgtgaacctgctgatgagcccccagggccaggtgctgagcgcccacgtgagcggcagagtggtgatgaagagctacctgagcggcatgcccgagtgcaagttcggcatgaacgacaagatcgtgatcgagaagcagggcaagggcaccgccgacgagaccagcaagagcggcaagcagagcatcgccatcgacgactgcaccttccaccagtgcgtgagactgagcaagttcgacagcgagagaagcatcagcttcatcccccccgacggcgagttcgagctgatgagatacagaaccaccaaggacatcatcctgcccttcagagtgatccccctggtgagagaggtgggcagaaccaagctggaggtgaaggtggtgatcaagagcaacttcaagcccagcctgctggcccagaagatcgaggtgagaatccccacccccctgaacaccagcggcgtgcaggtgatctgcatgaagggcaaggccaagtacaaggccagcgagaacgccatcgtgtggaagatcaagagaatggccggcatgaaggagagccagatcagcgccgagatcgagctgctgcccaccaacgacaagaagaagtgggccagaccccccatcagcatgaacttcgaggtgcccttcgcccccagcggcctgaaggtgagatacctgaaggtgttcgagcccaagctgaactacagcgaccacgacgtgatcaagtgggtgagatacatcggcagaagcggcatctacgagaccagatgctag

SEQ ID NO: 71937 - DNA, 1302 bp, synthetic construct
  misc_feature 1..1302: note = Description of Artificial Sequence: Synthetic coding sequence
  source 1..1302: mol_type = other DNA
atgatcggcggcctgttcatctacaaccacaagggcgaggtgctgatcagcagagtgtacagagacgacatcggcagaaacgccgtggacgccttcagagtgaacgtgatccacgccagacagcaggtgagaagccccgtgaccaacatcgccagaaccagcttcttccacgtgaagagaagcaacatctggctggccgccgtgaccaagcagaacgtgaacgccgccatggtgttcgagttcctgtacaagatgtgcgacgtgatggccgcctacttcggcaagatcagcgaggagaacatcaagaacaacttcgtgctgatctacgagctgctggacgagatcctggacttcggctacccccagaacagcgagaccggcgccctgaagaccttcatcacccagcagggcatcaagagccagaccaaggaggagcagagccagatcaccagccaggtgaccggccagatcggctggagaagagagggcatcaagtacagaagaaacgagctgttcctggacgtgctggagagcgtgaacctgctgatgagcccccagggccaggtgctgagcgcccacgtgagcggcagagtggtgatgaagagctacctgagcggcatgcccgagtgcaagttcggcatgaacgacaagatcgtgatcgagaagcagggcaagggcaccgccgacgagaccagcaagagcggcaagcagagcatcgccatcgacgactgcaccttccaccagtgcgtgagactgagcaagttcgacagcgagagaagcatcagcttcatcccccccgacggcgagttcgagctgatgagatacagaaccaccaaggacatcatcctgcccttcagagtgatccccctggtgagagaggtgggcagaaccaagctggaggtgaaggtggtgatcaagagcaacttcaagcccagcctgctggcccagaagatcgaggtgagaatccccacccccctgaacaccagcggcgtgcaggtgatctgcatgaagggcaaggccaagtacaaggccagcgagaacgccatcgtgtggaagatcaagagaatggccggcatgaaggagagccagatcagcgccgagatcgagctgctgcccaccaacgacaagaagaagtgggccagaccccccatcagcatgaacttcgaggtgcccttcgcccccagcggcctgaaggtgagatacctgaaggtgttcgagcccaagctgaactacagcgaccacgacgtgatcaagtgggtgagatacatcggcagaagcggcatctacgagaccagatgctag

SEQ ID NO: 71938 - DNA, 1302 bp, synthetic construct; identical to SEQ ID NO: 71937
  misc_feature 1..1302: note = Description of Artificial Sequence: Synthetic coding sequence
  source 1..1302: mol_type = other DNA

SEQ ID NO: 71939 - DNA, 342 bp, synthetic construct
  misc_feature 1..342: note = Description of Artificial Sequence: Synthetic coding sequence
  source 1..342: mol_type = other DNA
atgatcggcggcctgttcatctacaaccacaagggcgaggtgctgatcagcagagtgtacagagacgacatcggcagaaacgccgtggacgccttcagagtgaacgtgatccacgccagacagcaggtgagaagccccgtgaccaacatcgccagaaccagcttcttccacgtgaagagaagcaacatctggctggccgccgtgaccaagcagaacgtgaacgccgccatggtgttcgagttcctgtacaagatgtgcgacgtgatggccgcctacttcggcaagatcagcgaggagaacatcaagaacaacttcgtgctgatctacgagctgctggactag

SEQ ID NO: 71940 - DNA, 1263 bp, synthetic construct
  misc_feature 1..1263: note = Description of Artificial Sequence: Synthetic coding sequence
  source 1..1263: mol_type = other DNA
atgatcggcggcctgttcatctacaaccacaagggcgaggtgctgatcagcagagtgtacagagacgacatcggcagaaacgccgtggacgccttcagagtgaacgtgatccacgccagacagcaggtgagaagccccgtgaccaacatctggctggccgccgtgaccaagcagaacgtgaacgccgccatggtgttcgagttcctgtacaagatgtgcgacgtgatggccgcctacttcggcaagatcagcgaggagaacatcaagaacaacttcgtgctgatctacgagctgctggacgagatcctggacttcggctacccccagaacagcgagaccggcgccctgaagaccttcatcacccagcagggcatcaagagccagaccaaggaggagcagagccagatcaccagccaggtgaccggccagatcggctggagaagagagggcatcaagtacagaagaaacgagctgttcctggacgtgctggagagcgtgaacctgctgatgagcccccagggccaggtgctgagcgcccacgtgagcggcagagtggtgatgaagagctacctgagcggcatgcccgagtgcaagttcggcatgaacgacaagatcgtgatcgagaagcagggcaagggcaccgccgacgagaccagcaagagcggcaagcagagcatcgccatcgacgactgcaccttccaccagtgcgtgagactgagcaagttcgacagcgagagaagcatcagcttcatcccccccgacggcgagttcgagctgatgagatacagaaccaccaaggacatcatcctgcccttcagagtgatccccctggtgagagaggtgggcagaaccaagctggaggtgaaggtggtgatcaagagcaacttcaagcccagcctgctggcccagaagatcgaggtgagaatccccacccccctgaacaccagcggcgtgcaggtgatctgcatgaagggcaaggccaagtacaaggccagcgagaacgccatcgtgtggaagatcaagagaatggccggcatgaaggagagccagatcagcgccgagatcgagctgctgcccaccaacgacaagaagaagtgggccagaccccccatcagcatgaacttcgaggtgcccttcgcccccagcggcctgaaggtgagatacctgaaggtgttcgagcccaagctgaactacagcgaccacgacgtgatcaagtgggtgagatacatcggcagaagcggcatctacgagaccagatgctag

SEQ ID NO: 71941 - DNA, 1128 bp, synthetic construct
  misc_feature 1..1128: note = Description of Artificial Sequence: Synthetic coding sequence
  source 1..1128: mol_type = other DNA
atgatcggcggcctgttcatctacaaccacaagggcgaggtgctgatcagcagagtgtacagagacgacatcggcagaaacgccgtggccgcctacttcggcaagatcagcgaggagaacatcaagaacaacttcgtgctgatctacgagctgctggacgagatcctggacttcggctacccccagaacagcgagaccggcgccctgaagaccttcatcacccagcagggcatcaagagccagcaccagaccaaggaggagcagagccagatcaccagccaggtgaccggccagatcggctggagaagagagggcatcaagtacagaagaaacgagctgttcctggacgtgctggagagcgtgaacctgctgatgagcccccagggccaggtgctgagcgcccacgtgagcggcagagtggtgatgaagagctacctgagcggcatgcccgagtgcaagttcggcatgaacgacaagatcgtgatcgagaagcagggcaagggcaccgccgacgagaccagcaagagcggcaagcagagcatcgccatcgacgactgcaccttccaccagtgcgtgagactgagcaagttcgacagcgagagaagcatcagcttcatcccccccgacggcgagttcgagctgatgagatacagaaccaccaaggacatcatcctgcccttcagagtgatccccctggtgagagaggtgggcagaaccaagctggaggtgaaggtggtgatcaagagcaacttcaagcccagcctgctggcccagaagatcgaggtgagaatccccacccccctgaacaccagcggcgtgcaggtgatctgcatgaagggcaaggccaagtacaaggccagcgagaacgccatcgtgtggaagatcaagagaatggccggcatgaaggagagccagatcagcgccgagatcgagctgctgcccaccaacgacaagaagaagtgggccagaccccccatcagcatgaacttcgaggtgcccttcgcccccagcggcctgaaggtgagatacctgaaggtgttcgagcccaagctgaactacagcgaccacgacgtgatcaagtgggtgagatacatcggcagaagcggcatctacgagaccagatgctag

SEQ ID NO: 71942 - DNA, 429 bp, synthetic construct
  misc_feature 1..429: note = Description of Artificial Sequence: Synthetic coding sequence
  source 1..429: mol_type = other DNA
atgatcagattcatcctgatccagaacagagccggcaagaccagactggccaagtggtacatgcagttcgacgacgacgagaagcagaagctgatcgaggaggtgcacgccgtggtgaccgtgagagacgccaagcacaccaacttcgtggagttcagaaacttcaagatcatctacagaagatacgccggcctgtacttctgcatctgcgtggacgtgaacgacaacaacctggcctacctggaggccatccacaacttcgtggaggtgctgaacgagtacttccacaacgtgtgcgagctggacctggtgttcaacttctacaaggtgtacaccgtggtggacgagatgttcctggccggcgagatcagagagaccagccagaccaaggtgctgaagcagctgctgatgctgcagagcctggagtag

SEQ ID NO: 71943 - DNA, 315 bp, synthetic construct; identical to SEQ ID NO: 71921
  misc_feature 1..315: note = Description of Artificial Sequence: Synthetic coding sequence
  source 1..315: mol_type = other DNA

SEQ ID NO: 71944 - DNA, 3285 bp, synthetic construct
  misc_feature 1..3285: note = Description of Artificial Sequence: Synthetic coding sequence
  source 1..3285: mol_type = other DNA
atgagcagcaacagcttcccctacaacgagcagagcggcggcggcgaggccaccgagctgggccaggaggccaccagcaccatcagccccagcggcgccttcggcctgttcagcagcgacctgaagaagaacgaggacctgaagcagatgctggagagcaacaaggacagcgccaagctggacgccatgaagagaatcgtgggcatgatcgccaagggcaagaacgccagcgagctgttccccgccgtggtgaagaacgtggccagcaagaacatcgagatcaagaagctggtgtacgtgtacctggtgagatacgccgaggagcagcaggacctggccctgctgagcatcagcaccttccagagagccctgaaggaccccaaccagctgatcagagccagcgccctgagagtgctgagcagcatcagagtgcccatcatcgtgcccatcatgatgctggccatcaaggaggccagcgccgacctgagcccctacgtgagaaagaacgccgcccacgccatccagaagctgtacagcctggaccccgagcagaaggagatgctgatcgaggtgatcgagaagctgctgaaggacaagagcaccctggtggccggcagcgtggtgatggccttcgaggaggtgtgccccgacagaatcgacctgatccacaagaactacagaaagctgtgcaacctgctggtggacgtggaggagtggggccaggtggtgatcatccacatgctgaccagatacgccagaacccagttcgtgagcccctggaaggagggcgacgagctggaggacaacggcaagaacttctacgagagcgacgacgaccagaaggagaagaccgacaagaagaagaagccctacaccatggaccccgaccacagactgctgatcagaaacaccaagcccctgctgcagagcagaaacgccgccgtggtgatggccgtggcccagctgtactggcacatcagccccaagagcgaggccggcatcatcagcaagagcctggtgagactgctgagaagcaacagagaggtgcagtacatcgtgctgcagaacatcgccaccatgagcatccagagaaagggcatgttcgagccctacctgaagagcttctacgtgagaagcaccgaccccaccatgatcaagaccctgaagctggagatcctgaccaacctggccaacgaggccaacatcagcaccctgctgagagagttccagacctacgtgaagagccaggacaagcagttcgccgccgccaccatccagaccatcggcagatgcgccaccaacatcctggaggtgaccgacacctgcctgaacggcctggtgtgcctgctgagcaacagagacgagatcgtggtggccgagagcgtggtggtgatcaagaagctgctgcagatgcagcccgcccagcacggcgagatcatcaagcacatggccaagctgctggacagcatcaccgtgcccgtggccagagccagcatcctgtggctgatcggcgagaactgcgagagagtgcccaagatcgcccccgacgtgctgagaaagatggccaagagcttcaccagcgaggacgacctggtgaagctgcagatcctgaacctgggcgccaagctgtacctgaccaacagcaagcagaccaagctgctgacccagtacatcctgaacctgggcaagtacgaccagaactacgacatcagagacagaaccagattcatcagacagctgatcgtgcccaacgtgaagagcggcgccctgagcaagtacgccaagaagatcttcctggcccagaagcccgcccccctgctggagagccccttcaaggacagagaccacttccagctgggcaccctgagccacaccctgaacatcaaggccaccggctacctggagctgagcaactggcccgaggtggcccccgaccccagcgtgagaaacgtggaggtgatcgagctggccaaggagtggacccccgccggcaaggccaagcaggagaacagcgccaagaagttctacagcgagagcgaggaggaggaggacagcagcgacagcagcagcgacagcgagagcgagagcggcagcgagagcggcgagcagggcgagagcggcgaggagggcgacagcaacgaggacagcagcgaggacagcagcagcgagcaggacagcgagagcggcagagagagcggcctggagaacaagagaaccgccaagagaaacagcaaggccaagggcaagagcgacagcgaggacggcgagaaggagaacgagaagagcaagaccagcgacagcagcaacgacgagagcagcagcatcgaggacagcagcagcgacagcgagagcgagagcgagcccgagagcgagagcgagagcagaagagtgaccaaggagaaggagaagaagaccaagcaggacagaacccccctgaccaaggacgtgagcctgctggacctggacgacttcaaccccgtgagcacccccgtggccctgcccacccccgccctgagccccagcctgatggccgacctggagggcctgcacctgagcaccagcagcagcgtgatcagcgtgagcacccccgccttcgtgcccaccaagacccacgtgctgctgcacagaatgagcggcaagggcctggccgcccactacttcttccccagacagccctgcatcttcggcgacaagatggtgagcatccagatcaccctgaacaacaccaccgacagaaagatcgagaacatccacatcggcgagaagaagctgcccatcggcatgaagatgcacgtgttcaaccccatcgacagcctggagcccgagggcagcatcaccgtgagcatgggcatcgacttctgcgacagcacccagaccgccagcttccagctgtgcaccaaggacgactgcttcaacgtgaacatccagccccccgtgggcgagctgctgctgcccgtggccatgagcgagaaggacttcaagaaggagcagggcgtgctgaccggcatgaacgagaccagcgccgtgatcatcgccgccccccagaacttcacccccagcgtgatcttccagaaggtggtgaacgtggccaacgtgggcgccgtgcccagcggccaggacaacatccacagattcgccgccaagaccgtgcacagcggcagcctgatgctggtgaccgtggagctgaaggagggcagcaccgcccagctgatcatcaacaccgagaagaccgtgatcggcagcgtgctgctgagagagctgaagcccgtgctgagccagggctag

SEQ ID NO: 71945 - DNA, 1698 bp, synthetic construct
  misc_feature 1..1698: note = Description of Artificial Sequence: Synthetic coding sequence
  source 1..1698: mol_type = other DNA
atgagcagcaacagcttcccctacaacgagcagagcggcggcggcgaggccaccgagctgggccaggaggccaccagcaccatcagccccagcggcgccttcggcctgttcagcagcgacctgaagaagaacgaggacctgaagcagatgctggagagcaacaaggacagcgccatcaaggaggccagcgccgacctgagcccctacgtgagaaagaacgccgcccacgccatccagaagctgtacagcctggaccccgagcagaaggagatgctgatcgaggtgatcgagaagctgctgaaggacaagagcaccctggtggccggcagcgtggtgatggccttcgaggaggtgtgccccgacagaatcgacctgatccacaagaactacagaaagctgtgcaacctgctggtggacgtggaggagtggggccaggtggtgatcatccacatgctgaccagatacgccagaacccagttcgtgagcccctggaaggagggcgacgagctggaggacaacggcaagaacttctacgagagcgacgacgaccagaaggagaagaccgacaagaagaagaagccctacaccatggaccccgaccacagactgctgatcagaaacaccaagcccctgctgcagagcagaaacgccgccgtggtgatggccgtggcccagctgtactggcacatcagccccaagagcgaggccggcatcatcagcaagagcctggtgagactgctgagaagcaacagagaggtgcagtacatcgtgctgcagaacatcgccaccatgagcatccagagaaagggcatgttcgagccctacctgaagagcttctacgtgagaagcaccgaccccaccatgatcaagaccctgaagctggagatcctgaccaacctggccaacgaggccaacatcagcaccctgctgagagagttccagacctacgtgaagagccaggacaagcagttcgccgccgccaccatccagaccatcggcagatgcgccaccaacatcctggaggtgaccgacacctgcctgaacggcctggtgtgcctgctgagcaacagagacgagatcgtggtggccgagagcgtggtggtgatcaagaagctgctgcagatgcagcccgcccagcacggcgagatcatcaagcacatggccaagctgctggacagcatcaccgtgcccgtggccagagccagcatcctgtggctgatcggcgagaactgcgagagagtgcccaagatcgcccccgacgtgctgagaaagatggccaagagcttcaccagcgaggacgacctggtgaagctgcagatcctgaacctgggcgccaagctgtacctgaccaacagcaagcagaccaagctgctgacccagtacatcctgaacctgggcaagtacgaccagaactacgacatcagagacagaaccagattcatcagacagctgatcgtgcccaacgtgaagagcggcgccctgagcaagtacgccaagaagatcttcctggcccagaagcccgcccccctgctggagagccccttcaaggacagagaccacttccagctgggcaccctgagccacaccctgaacatcaaggccaccggctacctggagctgagcaactggcccgaggtggcccccgaccccagcgtgagaaacgtggaggtgatcgagctggtggtgctgagcgagtag

SEQ ID NO: 71946 - DNA, 2403 bp, synthetic construct
  misc_feature 1..2403: note = Description of Artificial Sequence: Synthetic coding sequence
  source 1..2403: mol_type = other DNA
atgagcagcaacagcttcccctacaacgagcagagcggcggcggcgaggccaccgagctgggccaggaggccaccagcaccatcagccccagcggcgccttcggcctgttcagcagcgacctgaagaagaacgaggacctgaagcagatgctggagagcaacaaggacagcgccaagctggacgccatgaagagaatcgtgggcatgatcgccaagggcaagaacgccagcgagctgttccccgccgtggtgaagaacgtggccagcaagaacatcgagatcaagaagctggtgtacgtgtacctggtgagatacgccgaggagcagcaggacctggccctgctgagcatcagcaccttccagagagccctgaaggaccccaaccagctgatcagagccagcgccctgagagtgctgagcagcatcagagtgcccatcatcgtgcccatcatgatgctggccatcaaggaggccagcgccgacctgagcccctacgtgagaaagaacgccgcccacgccatccagaagctgtacagcctggaccccgagcagaaggagatgctgatcgaggtgatcgagaagctgctgaaggacaagagcaccctggtggccggcagcgtggtgatggccttcgaggaggtgtgccccgacagaatcgacctgatccacaagaactacagaaagctgtgcaacctgctggtggacgtggaggagtggggccaggtggtgatcatccacatgctgaccagatacgccagaacccagttcgtgagcccctggaaggagggcgacgagctggaggacaacggcaagaacttctacgagagcgacgacgaccagaaggagaagaccgacaagaagaagaagccctacaccatggaccccgaccacagactgctgatcagaaacaccaagcccctgctgcagagcagaaacgccgccgtggtgatggccgtggcccagctgtactggcacatcagccccaagagcgaggccggcatcatcagcaagagcctggtgagactgctgagaagcaacagagaggtgcagtacatcgtgctgcagaacatcgccaccatgagcatccagagaaagggcatgttcgagccctacctgaagagcttctacgtgagaagcaccgaccccaccatgatcaagaccctgaagctggagatcctgaccaacctggccaacgaggccaacatcagcaccctgctgagagagttccagacctacgtgaagagccaggacaagcagttcgccgccgccaccatccagaccatcggcagatgcgccaccaacatcctggaggtgaccgacacctgcctgaacggcctggtgtgcctgctgagcaacagagacgagatcgtggtggccgagagcgtggtggtgatcaagaagctgctgcagatgcagcccgcccagcacggcgagatcatcaagcacatggccaagctgctggacagcatcaccgtgcccgtggccagagccagcatcctgtggctgatcggcgagaactgcgagagagtgcccaagatcgcccccgacgtgctgagaaagatggccaagagcttcaccagcgaggacgacctggtgaagctgcagatcctgaacctgggcgccaagctgtacctgaccaacagcaagcagaccaagctgctgacccagtacatcctgaacctgggcaagtacgaccagaactacgacatcagagacagaaccagattcatcagacagctgatcgtgcccaacgtgaagagcggcgccctgagcaagtacgccaagaagatcttcctggcccagaagcccgcccccctgctggagagccccttcaaggacagagaccacttccagctgggcaccctgagccacaccctgaacatcaaggccaccggctacctggagctgagcaactggcccgaggtggcccccgaccccagcgtgagaaacgtggaggtgatcgagctggccaaggagtggacccccgccggcaaggccaagcaggagaacagcgccaagaagttctacagcgagagcgaggaggaggaggacagcagcgacagcagcagcgacagcgagagcgagagcggcagcgagagcggcgagcagggcgagagcggcgaggagggcgacagcaacgaggacagcagcgaggacagcagcagcgagcaggacagcgagagcggcagagagagcggcctggagaacaagagaaccgccaagagaaacagcaaggccaagggcaagagcgacagcgaggacggcgagaaggagaacgagaagagcaagaccagcgacagcagcaacgacgagagcagcagcatcgaggacagcagcagcgacagcgagagcgagagcgagcccgagagcgagagcgagagcagaagagtgaccaaggagtag

SEQ ID NO: 71947 - DNA, 582 bp, synthetic construct
  misc_feature 1..582: note = Description of Artificial Sequence: Synthetic coding sequence
  source 1..582: mol_type = other DNA
atgatcaaggccatcctgatcttcaacaaccacggcaagcccagactgagcaagttctaccagccctacagcgaggacacccagcagcagatcatcagagagaccttccacctggtgagcaagagagacgagaacgtgtgcaacttcctggagggcggcctgctgatcggcggcagcgacaacaagctgatctacagacactacgccaccctgtacttcgtgttctgcgtggacagcagcgagagcgagctgggcatcctggacctgatccaggtgttcgtggagaccctggacaagtgcttcgagaacgtgtgcgagctggacctgatcttccacgtggacaaggtgcacaacatcctggccgagatggtgatgggcggcatggtgctggagaccaacatgaacgagatcgtgacccagatcgacgcccagaacaagctggagaagagcgaggccggcctggccggcgcccccgccagagccgtgagcgccgtgaagaacatgaacctgcccgagatccccagaaacatcaacatcggcgacatcagcatcaaggtgcccaacctgcccagcttcaagtag

SEQ ID NO: 71948 - DNA, 450 bp, synthetic construct
  misc_feature 1..450: note = Description of Artificial Sequence: Synthetic coding sequence
  source 1..450: mol_type = other DNA
atgatcaagttcttcctgatggtgaacaagcagggccagaccagactgagcaagtactacgagcacgtggacatcaacaagagaaccctgctggagaccgaggtgatcaagagctgcctgagcagaagcaacgagcagtgcagcttcatcgagtacaaggacttcaagctgatctacagacagtacgccgccctgttcatcgtggtgggcgtgaacgacaccgagaacgagatggccatctacgagttcatccacaacttcgtggaggtgctggacgagtacttcagcagagtgagcgagctggacgtgagcttcttcaacaccgtgttccacagcacctggcagatgcacagcggcccctaccagaccagaagctgcagcgtgacccaggccggcgtgcagagatgcgaccacggcagcctgcaccccggcagccccggcctgaagtag

SEQ ID NO: 71949 - DNA, 408 bp, synthetic construct
  misc_feature 1..408: note = Description of Artificial Sequence: Synthetic coding sequence
  source 1..408: mol_type = other DNA
atgatcaagttcttcctgatggtgaacaagcagggccagaccagactgagcaagtactacgagcacgtggacatcaacaagagaaccctgctggagaccgaggtgatcaagagctgcctgagcagaagcaacgagcagtgcagcttcatcgagtacaaggacttcaagctgatctacagacagtacgccgccctgttcatcgtggtgggcgtgaacgacaccgagaacgagatggccatctacgagttcatccacaacttcgtggaggtgctggacgagtacttcagcagagtggagcccatcgacgagctgcccaagatctgcagcgccctggagccccagcagacctgcttcagccccgacagcagcagcttcaagggcgccgccagcaccacccccatctactag

SEQ ID NO: 71950 - DNA, 2220 bp, synthetic construct
  misc_feature 1..2220: note = Description of Artificial Sequence: Synthetic coding sequence
  source 1..2220: mol_type = other DNA
atgccctacctgggcagcgaggacgtggtgaaggagctgaagaaggccctgtgcaacccccacatccaggccgacagactgagatacagaaacgtgatccagagagtgatcagatacatgacccagggcctggacatgagcggcgtgttcatggagatggtgaaggccagcgccaccgtggacatcgtgcagaagaagctggtgtacctgtacatgtgcacctacgcccccctgaagcccgacctggccctgctggccatcaacaccctgtgcaaggactgcagcgaccccaaccccatggtgagaggcctggccctgagaagcatgtgcagcctgagaatgcccggcgtgcaggagtacatccagcagcccatcctgaacggcctgagagacaaggccagctacgtgagaagagtggccgtgctgggctgcgccaagatgcacaacctgcacggcgacagcgaggtggacggcgccctggtgaacgagctgtacagcctgctgagagaccaggaccccatcgtggtggtgaactgcctgagaagcctggaggagatcctgaagcaggagggcggcgtggtgatcaacaagcccatcgcccaccacctgctgaacagaatgagcaagctggaccagtggggccaggccgaggtgctgaacttcctgctgagataccagcccagaagcgaggaggagctgttcgacatcctgaacctgctggacagcttcctgaagagcagcagccccggcgtggtgatgggcgccaccaagctgttcctgatcctggccaagatgttcccccacgtgcagaccgacgtgctggtgagagtgaagggccccctgctggccgcctgcagcagcgagagcagagagctgtgcttcgtggccctgtgccacgtgagacagatcctgcacagcctgcccggccacttcagcagccactacaagaagttcttctgcagctacagcgagccccactacatcaagctgcagaaggtggaggtgctgtgcgagctggtgaacgacgagaacgtgcagcaggtgctggaggagctgagaggctactgcaccgacgtgagcgccgacttcgcccaggccgccatcttcgccatcggcggcatcgccagaacctacaccgaccagtgcgtgcagatcctgaccgagctgctgggcctgagacaggagcacatcaccaccgtggtggtgcagaccttcagagacctggtgtggctgtgcccccagtgcaccgaggccgtgtgccaggccctgcccggctgcgaggagaacatccaggacagcgagggcaagcaggccctgatctggctgctgggcgtgcacggcgagagaatccccaacgccccctacgtgctggaggacttcgtggagaacgtgaagagcgagaccttccccgccgtgaagatggagctgctgaccgccctgctgagactgttcctgagcagacccgccgagtgccaggacatgctgggcagactgctgtactactgcatcgaggaggagaaggacatggccgtgagagacagaggcctgttctactacagactgctgctggtgggcatcgacgaggtgaagagaatcctgtgcagccccaagagcgaccccaccctgggcctgctggaggaccccgccgagagacccgtgaacagctgggccagcgacttcaacaccctggtgcccgtgtacggcaaggcccactgggccaccatcagcaagtgccagggcgccgagagatgcgaccccgagctgcccaagaccagcagcttcgccgccagcggccccctgatccccgaggagaacaaggagagagtgcaggagctgcccgacagcggcgccctgatgctggtgcccaacagacagctgaccgccgactacttcgagaagacctggctgagcctgaaggtggcccaccagcaggtgctgccctggagaggcgagttccaccccgacaccctgcagatggccctgcaggtggtgaacatccagaccatcgccatgagcagagccggcagcagaccctggaaggcctacctgagcgcccaggacgacaccggctgcctgttcctgaccgagctgctgctggagcccggcaacagcgagatgcagatcagcgtgaagcagaacgaggccagaaccgagaccctgaacagcttcatcagcgtgctggagaccgtgatcggcaccatcgaggagatcaagagctag

SEQ ID NO: 71951 - DNA, 891 bp, synthetic construct
  misc_feature 1..891: note = Description of Artificial Sequence: Synthetic coding sequence
  source 1..891: mol_type = other DNA
atgccctacctgggcagcgaggacgtggtgaaggagctgaagaaggccctgtgcaacccccacatccaggccgacagactgagatacagaaacgtgatccagagagtgatcagaatgcccggcgtgcaggagtacatccagcagcccatcctgaacggcctgagagacaaggccagctacgtgagaagagtggccgtgctgggctgcgccaagatgcacaacctgcacggcgacagcgaggtggacggcgccctggtgaacgagctgtacagcctgctgagagaccaggaccccatcgtggtggtgaactgcctgagaagcctggaggagatcctgaagcaggagggcggcgtggtgatcaacaagcccatcgcccaccacctgctgaacagaatgagcaagctggaccagtggggccaggccgaggtgctgaacttcctgctgagataccagcccagaagcgaggaggagctgttcgacatcctgaacctgctggacagcttcctgaagagcagcagccccggcgtggtgatgggcgccaccaagctgttcctgatcctggccaagatgttcccccacgtgcagaccgacgtgctggtgagagtgaagggccccctgctggccgcctgcagcagcgagagcagagagctgtgcttcgtggccctgtgccacgtgagacagatcctgcacagcctgcccggccacttcagcagccactacaagaagttcttctgcagctacagcgagccccactacatcaagctgcagaaggtggaggtgctgtgcgagctggtgaacgacgagaacgtgcagcaggtgctggaggagctgagaggctactgcaccgacgtgagcgccgacttcgcccaggccgccatcttcgccatctag

SEQ ID NO: 71952 - DNA, 909 bp, synthetic construct
  misc_feature 1..909: note = Description of Artificial Sequence: Synthetic coding sequence
  source 1..909: mol_type = other DNA
atgccctacctgggcagcgaggacgtggtgaaggagctgaagaaggccctgtgcaacccccacatccaggccgacagactgagatacagaaacgtgatccagagagtgatcagatacatgacccagggcctggacatgagcggcgtgttcatggagatggtgaaggccagcgccaccgtggacatcgtgcagaagaagctggtgtacctgtacatgtgcacctacgcccccctgaagcccgacctggccctgctggccatcaacaccctgtgcaaggactgcagcgaccccaaccccatggtgagaggcctggccctgagaagcatgtgcagcctgagaatgagcaagctggaccagtggggccaggccgaggtgctgaacttcctgctgagataccagcccagaagcgaggaggagctgttcgacatcctgaacctgctggacagcttcctgaagagcagcagccccggcgtggtgatgggcgccaccaagctgttcctgatcctggccaagatgttcccccacgtgcagaccgacgtgctggtgagagtgaagggccccctgctggccgcctgcagcagcgagagcagagagctgtgcttcgtggccctgtgccacgtgagacagatcctgcacagcctgcccggccacttcagcagccactacaagaagttcttctgcagctacagcgagccccactacatcaagctgcagaaggtggaggtgctgtgcgagctggtgaacgacgagaacgtgcagcaggtgctggaggagctgagaggctactgcaccgacgtgagcgccgacttcgcccaggccgccatcttcgccatcggcagatgcctgctgctgttcctgctggagaacctggaccagcccgccagaaagctgtggctggaggagccctag

SEQ ID NO: 71953 - DNA, 1716 bp, synthetic construct
  misc_feature 1..1716: note = Description of Artificial Sequence: Synthetic coding sequence
  source 1..1716: mol_type = other DNA
atgccctacctgggcagcgaggacgtggtgaaggagctgaagaaggccctgtgcaacccccacatccaggccgacagactgagatacagaaacgtgatccagagagtgatcagaatgagcaagctggaccagtggggccaggccgaggtgctgaacttcctgctgagataccagcccagaagcgaggaggagctgttcgacatcctgaacctgctggacagcttcctgaagagcagcagccccggcgtggtgatgggcgccaccaagctgttcctgatcctggccaagatgttcccccacgtgcagaccgacgtgctggtgagagtgaagggccccctgctggccgcctgcagcagcgagagcagagagctgtgcttcgtggccctgtgccacgtgagacagatcctgcacagcctgcccggccacttcagcagccactacaagaagttcttctgcagctacagcgagccccactacatcaagctgcagaaggtggaggtgctgtgcgagctggtgaacgacgagaacgtgcagcaggtgctggaggagctgagaggctactgcaccgacgtgagcgccgacttcgcccaggccgccatcttcgccatcggcggcatcgccagaacctacaccgaccagtgcgtgcagatcctgaccgagctgctgggcctgagacaggagcacatcaccaccgtggtggtgcagaccttcagagacctggtgtggctgtgcccccagtgcaccgaggccgtgtgccaggccctgcccggctgcgaggagaacatccaggacagcgagggcaagcaggccctgatctggctgctgggcgtgcacggcgagagaatccccaacgccccctacgtgctggaggacttcgtggagaacgtgaagagcgagaccttccccgccgtgaagatggagctgctgaccgccctgctgagactgttcctgagcagacccgccgagtgccaggacatgctgggcagactgctgtactactgcatcgaggaggagaaggacatggccgtgagagacagaggcctgttctactacagactgctgctggtgggcatcgacgaggtgaagagaatcctgtgcagccccaagagcgaccccaccctgggcctgctggaggaccccgccgagagacccgtgaacagctgggccagcgacttcaacaccctggtgcccgtgtacggcaaggcccactgggccaccatcagcaagtgccagggcgccgagagatgcgaccccgagctgcccaagaccagcagcttcgccgccagcggccccctgatccccgaggagaacaaggagagagtgcaggagctgcccgacagcggcgccctgatgctggtgcccaacagacagctgaccgccgactacttcgagaagacctggctgagcctgaaggtggcccaccagcaggtgctgccctggagaggcgagttccaccccgacaccctgcagatggccctgcaggtggtgaacatccagaccatcgccatgagcagagccggcagcagaccctggaaggcctacctgagcgcccaggacgacaccggctgcctgttcctgaccgagctgctgctggagcccggcaacagcgagatgcagatcagcgtgaagcagaacgaggccagaaccgagaccctgaacagcttcatcagcgtgctggagaccgtgatcggcaccatcgaggagatcaagagctag

SEQ ID NO: 71954 - DNA, 2220 bp, synthetic construct; identical to SEQ ID NO: 71950
  misc_feature 1..2220: note = Description of Artificial Sequence: Synthetic coding sequence
  source 1..2220: mol_type = other DNA

SEQ ID NO: 71955 - DNA, 789 bp, synthetic construct
  misc_feature 1..789: note = Description of Artificial Sequence: Synthetic coding sequence
  source 1..789: mol_type = other DNA
atgccctacctgggcagcgaggacgtggtgaaggagctgaagaaggccctgtgcaacccccacatccaggccgacagactgagatacagaaacgtgatccagagagtgatcagatacatgacccagggcctggacatgagcggcgtgttcatggagatggtgaaggccagcgccaccgtggacatcgtgcagaagaagctggtgtacctgtacatgtgcacctacgcccccctgaagcccgacctggccctgctggccatcaacaccctgtgcaaggactgcagcgaccccaaccccatggtgagaggcctggccctgagaagcatgtgcagcctgagaatgcccggcgtgcaggagtacatccagcagcccatcctgaacggcctgagagacaaggccagctacgtgagaagagtggccgtgctgggctgcgccaagatgcacaacctgcacggcgacagcgaggtggacggcgccctggtgaacgagctgtacagcctgctgagagaccaggaccccatcgtggtggtgaactgcctgagaagcctggaggagatcctgaagcaggagggcggcgtggtgatcaacaagcccatcgcccaccacctgctgaacagaatgagcaagctggaccagtggggccaggccgaggtgctgaacttcctgctgagataccagcccagaagcgaggaggagctgttcgacatcctgaacctgctggacagcttcctgaagagcagcagccccggcgtggtgatgggcgccaccaagctgttcctgatcctgtag

SEQ ID NO: 71956 - DNA, 528 bp, synthetic construct
  misc_feature 1..528: note = Description of Artificial Sequence: Synthetic coding sequence
  source 1..528: mol_type = other DNA
atgccctacctgggcagcgaggacgtggtgaaggagctgaagaaggccctgtgcaacccccacatccaggccgacagactgagatacagaaacgtgatccagagagtgatcagaatgagcaagctggaccagtggggccaggccgaggtgctgaacttcctgctgagataccagcccagaagcgaggaggagctgttcgacatcctgaacctgctggacagcttcctgaagagcagcagccccggcgtggtgatgggcgccaccaagctgttcctgatcctggccaagatgttcccccacgtgcagaccgacgtgctggtgagagtgaagggccccctgctggccgcctgcagcagcgagagcagagagctgtgcttcgtggccctgtgccacgtgagacagatcctgcacagcctgcccggccacttcagcagccactacaagaagttcttctgcagctacagcgagccccactacatcaagctgcagaaggtggaggtgctgtgcgagctggtgaacgacgagtag

SEQ ID NO: 71957 - DNA, 3414 bp, synthetic construct
  misc_feature 1..3414: note = Description of Artificial Sequence: Synthetic coding sequence
  source 1..3414: mol_type = other DNA
atgagcgacatcgtggagaagaccctgaccgccctgcccggcctgttcctgcagaaccagcccggcggcggccccgccgccgccaaggccagcttcagcagcagactgggcagcctggtgagaggcatcaccgccctgaccagcaagcacgaggaggagaagctgatccagcaggagctgagcagcctgaaggccaccgtgagcgcccccaccaccaccctgaagatgatgaaggagtgcatggtgagactgatctactgcgagatgctgggctacgacgccagcttcggctacatccacgccatcaagctggcccagcagggcaacctgctggagaagagagtgggctacctggccgtgagcctgttcctgcacgagagccacgagctgctgctgctgctggtgaacaccgtggtgaaggacctgcagagcaccaacctggtggaggtgtgcatggccctgaccgtggtgagccagatcttcccctgcgagatgatccccgccgtgctgcccctgatcgaggacaagctgcagcacagcaaggagatcgtgagaagaaaggccgtgctggccctgtacaagttccacctgatcgcccccaaccaggtgcagcacatccacatcaagttcagaaaggccctgtgcgacagagacgtgggcgtgatggccgccagcctgcacatctacctgagaatgatcaaggagaacagcagcggctacaaggacctgaccggcagcttcgtgaccatcctgaagcaggtggtgggcggcaagctgcccgtggagttcaactaccacagcgtgcccgccccctggctgcagatccagctgctgagaatcctgggcctgctgggcaaggacgaccagagaaccagcgagctgatgtacgacgtgctggacgagagcctgagaagagccgagctgaaccacaacgtgacctacgccatcctgttcgagtgcgtgcacaccgtgtacagcatctaccccaagagcgagctgctggagaaggccgccaagtgcatcggcaagttcgtgctgagccccaagatcaacctgaagtacctgggcctgaaggccctgacctacgtgatccagcaggaccccaccctggccctgcagcaccagatgaccatcatcgagtgcctggaccaccccgaccccatcatcaagagagagaccctggagctgctgtacagaatcaccaacgcccagaacatcaccgtgatcgtgcagaagatgctggagtacctgcaccagagcaaggaggagtacgtgatcgtgaacctggtgggcaagatcgccgagctggccgagaagtacgcccccgacaacgcctggttcatccagaccatgaacgccgtgttcagcgtgggcggcgacgtgatgcaccccgacatccccaacaacttcctgagactgctggccgagggcttcgacgacgagaccgaggaccagcagctgagactgtacgccgtgcagagctacctgaccctgctggacatggagaacgtgttctacccccagagattcctgcaggtgatgagctgggtgctgggcgagtacagctacctgctggacaaggagacccccgaggaggtgatcgccaagctgtacaagctgctgatgaacgacagcgtgagcagcgagaccaaggcctggctgatcgccgccgtgaccaagctgaccagccaggcccacagcagcaacaccgtggagagactgatccacgagttcaccatcagcctggacacctgcatgagacagcacgccttcgagctgaagcacctgcacgagaacgtggagctgatgaagagcctgctgcccgtggacagaagctgcgaggacctggtggtggacgccagcctgagcttcctggacggcttcgtggccgagggcctgagccagggcgccgccccctacaagcccccccaccagagacaggaggagaagctgagccaggagaaggtgctgaacttcgagccctacggcctgagcttcagcagcagcggcttcaccggcagacagagccccgccggcatcagcctgggcagcgacgtgagcggcaacagcgccgagaccggcctgaaggagaccaacagcctgaagctggagggcatcaagaagctgtggggcaaggagggctacctgcccaagaaggagagcaagaccggcgacgagagcggcgccctgcccgtgccccaggagagcatcatggagaacgtggaccaggccatcaccaagaaggaccagagccaggtgctgacccagagcaaggaggagaaggagaagcagctgctggccagcagcctgttcgtgggcctgggcagcgagagcaccatcaacctgctgggcaaggccgacaccgtgagccacaagttcagaagaaagagcaaggtgaaggaggccaagagcggcgagaccaccagcacccacaacatgacctgcagcagcttcagcagcctgagcaacgtggcctacgaggacgactactacagcaacaccctgcacgacaccggcgacaaggagctgaagaagttcagcctgaccagcgagctgctggacagcgagagcctgaccgagctgcccctggtggagaagttcagctactgcagcctgagcacccccagcctgttcgccaacaacaacatggagatcttccaccccccccagagcaccgccgccagcgtggccaaggagagcagcctggccagcagcttcctggaggagaccaccgagtacatccacagcaacgccatggaggtgtgcaacaacgagaccatcagcgtgagcagctacaagatctggaaggacgactgcctgctgatggtgtggagcgtgaccaacaagagcggcctggagctgaagagcgccgacctggagatcttccccgccgagaacttcaaggtgaccgagcagcccggctgctgcctgcccgtgatggaggccgagagcaccaagagcttccagtacagcgtgcagatcgagaagcccttcaccgagggcaacctgaccggcttcatcagctaccacatgatggacacccacagcgcccagctggagttcagcgtgaacctgagcctgctggacttcatcagacccctgaagatcagcagcgacgacttcggcaagctgtggctgagcttcgccaacgacgtgaagcagaacgtgaagatgagcgagagccaggccgccctgcccagcgccctgaagaccctgcagcagaagctgagactgcacatcatcgagatcatcggcaacgagggcctgctggcctgccagctgctgcccagcatcccctgcctgctgcactgcagagtgcacgccgacgtgctggccctgtggttcagaagcagctgcagcaccctgcccgactacctgctgtaccagtgccagaaggtgatggagggcagctag

SEQ ID NO: 71958 - DNA, 1362 bp, synthetic construct
  misc_feature 1..1362: note = Description of Artificial Sequence: Synthetic coding sequence
  source 1..1362: mol_type = other DNA
atgatcagccagttcttcatcctgagcagcaagggcgaccccctgatctacaaggacttcagaggcgacagcggcggcagagacgtggccgagctgttctacagaaagctgaccggcctgcccggcgacgagagccccgtggtgatgcaccaccacggcagacacttcatccacatcagacacagcggcctgtacctggtggtgaccaccagcgagaacgtgagccccttcagcctgctggagctgctgagcagactggccaccctgctgggcgactactgcggcagcctgggcgagggcaccatcagcagaaacgtggccctggtgtacgagctgctggacgaggtgctggactacggctacgtgcagaccaccagcaccgagatgctgagaaacttcatccagaccgaggccgtggtgagcaagcccttcagcctgttcgacctgagcagcgtgggcctgttcggcgccgagacccagcagagcaaggtggcccccagcagcgccgccagcagacccgtgctgagcagcagaagcgaccagagccagaagaacgaggtgttcctggacgtggtggagagactgagcgtgctgatcgccagcaacggcagcctgctgaaggtggacgtgcagggcgagatcagactgaagagcttcctgcccagcggcagcgagatgagaatcggcctgaccgaggagttctgcgtgggcaagagcgagctgagaggctacggccccggcatcagagtggacgaggtgagcttccacagcagcgtgaacctggacgagttcgagagccacagaatcctgagactgcagcccccccagggcgagctgaccgtgatgagataccagctgagcgacgacctgcccagccccctgcccttcagactgttccccagcgtgcagtgggacagaggcagcggcagactgcaggtgtacctgaagctgagatgcgacctgctgagcaagagccaggccctgaacgtgagactgcacctgcccctgcccagaggcgtggtgagcctgagccaggagctgagcagccccgagcagaaggccgagctggccgagggcgccctgagatgggacctgcccagagtgcagggcggcagccagctgagcggcctgttccagatggacgtgcccggcccccccggcccccccagccacggcctgagcaccagcgccagccccctgggcctgggccccgccagcctgagcttcgagctgcccagacacacctgcagcggcctgcaggtgagattcctgagactggccttcagaccctgcggcaacgccaacccccacaagtgggtgagacacctgagccacagcgacgcctacgtgatcagaatctag

SEQ ID NO: 71959 - DNA, 1362 bp, synthetic construct; identical to SEQ ID NO: 71958
  misc_feature 1..1362: note = Description of Artificial Sequence: Synthetic coding sequence
  source 1..1362: mol_type = other DNA

SEQ ID NO: 71960 - DNA, 1653 bp, synthetic construct
  misc_feature 1..1653: note = Description of Artificial Sequence: Synthetic coding sequence
  source 1..1653: mol_type = other DNA
atgagcgccgcctggatccccgccctgggcctgggcgtgtgcctgctgctgctgcccggccccgccggcagcgagggcgccgcccccatcgccatcacctgcttcaccagaggcctggacatcagaaaggagaaggccgacgtgctgtgccccggcggctgccccctggaggagttcagcgtgtacggcaacatcgtgtacgccagcgtgagcagcatctgcggcgccgccgtgcacagaggcgtgatcagcaacagcggcggccccgtgagagtgtacagcctgcccggcagagagaactacagcagcgtggacgccaacggcatccagagccagatgctgagcagatggagcgccagcttcaccgtgaccaagggcaagagcagcacccaggaggccaccggccaggccgtgagcaccgcccacccccccaccggcaagagactgaagaagacccccgagaagaagaccggcaacaaggactgcaaggccgacatcgccttcctgatcgacggcagcttcaacatcggccagagaagattcaacctgcagaagaacttcgtgggcaaggtggccctgatgctgggcatcggcaccgagggcccccacgtgggcctggtgcaggccagcgagcaccccaagatcgagttctacctgaagaacttcaccagcgccaaggacgtgctgttcgccatcaaggaggtgggcttcagaggcggcaacagcaacaccggcaaggccctgaagcacaccgcccagaagttcttcaccgtggacgccggcgtgagaaagggcatccccaaggtggtggtggtgttcatcgacggctggcccagcgacgacatcgaggaggccggcatcgtggccagagagttcggcgtgaacgtgttcatcgtgagcgtggccaagcccatccccgaggagctgggcatggtgcaggacgtgaccttcgtggacaaggccgtgtgcagaaacaacggcttcttcagctaccacatgcccaactggttcggcaccaccaagtacgtgaagcccctggtgcagaagctgtgcacccacgagcagatgatgtgcagcaagacctgctacaacagcgtgaacatcgccttcctgatcgacggcagcagcagcgtgggcgacagcaacttcagactgatgctggagttcgtgagcaacatcgccaagaccttcgagatcagcgacatcggcgccaagatcgccgccgtgcagttcacctacgaccagagaaccgagttcagcttcaccgactacagcaccaaggagaacgtgctggccgtgatcagaaacatcagatacatgagcggcggcaccgccaccggcgacgccatcagcttcaccgtgagaaacgtgttcggccccatcagagagagccccaacaagaacttcctggtgatcgtgaccgacggccagagctacgacgacgtgcagggccccgccgccgccgcccacgacgccggcatcaccatcttcagcgtgggcgtggcctgggcccccctggacgacctgaaggacatggccagcaagcccaaggagagccacgccttcttcaccagagagttcaccggcctggagcccatcgtgagcgacgtgatcagaggcatctgcagagacttcctggagagccagcagtag

SEQ ID NO: 71961 - DNA, 435 bp, synthetic construct
  misc_feature 1..435: note = Description of Artificial Sequence: Synthetic coding sequence
  source 1..435: mol_type = other DNA
atgatcaagttcttcctgatggtgaacaagcagggccagaccagactgagcaagtactacgagcacgtggacatcaacaagagaaccctgctggagaccgaggtgatcaagagctgcctgagcagaagcaacgagcagtgcagcttcatcgagtacaaggacttcaagctgatctacagacagtacgccgccctgttcatcgtggtgggcgtgaacgacaccgagaacgagatggccatctacgagttcatccacaacttcgtggaggtgctggacgagtacttcagcagagtggtgaagggccacatcatgttcaacctggacaaggtgcacatcatcctggacgagatggtgctgaacggctgcatcgtggagaccaacagagccagaatcctggcccccctgctgatcctggacaagatgagcgagagctag

SEQ ID NO: 71962 - DNA, 435 bp, synthetic construct
  misc_feature 1..435: note = Description of Artificial Sequence: Synthetic coding sequence
  source 1..435: mol_type = other DNA
atgatcaagttcttcctgatggtgaacaagcagggccagaccagactgagcaagtactacgagcacgtggacatcaacaagagaaccctgctggagaccgaggtgatcaagagctgcctgagcagaagcaacgagcagtgcagcttcatcgagtacaaggacttcaagctgatctacagacagtacgccgccctgttcatcgtggtgggcgtgaacgacaccgagaacgagatggccatctacgagttcatccacaacttcgtggaggtgctggacgagtacttcagcagagtgagcgagctggacatcatgttcaacctggacaaggtgcacatcatcctggacgagatggtgctgaacggctgcatcgtggagaccaacagagccagaatcctggcccccctgctgatcctggacaagatgagcgagagctag

SEQ ID NO: 71963 - DNA, 27 bp, synthetic construct
  misc_feature 1..27: note = Description of Artificial Sequence: Synthetic coding sequence
  source 1..27: mol_type = other DNA
atgatcaagttcttcctgatggtgtag

SEQ ID NO: 71964 - DNA, 297 bp, synthetic construct
  misc_feature 1..297: note = Description of Artificial Sequence: Synthetic coding sequence
  source 1..297: mol_type = other DNA
atgatcaagttcttcctgatggtgaacaagcagggccagaccagactgagcaagtactacgagcacgtggacatcaacaagagaaccctgctggagaccgaggtgatcaagagctgcctgagcagaagcaacgagcagtgcagcttcatcgagtacaaggacttcaagctgatctacagacagtacgccgccctgttcatcgtggtgggcgtgaacgacaccgagaacgagatggccatctacgagttcatccacaacttcgtggaggtgctggacgagtacttcagcagagtgtag

SEQ ID NO: 71965 - DNA, 402 bp, synthetic construct
  misc_feature 1..402: note = Description of Artificial Sequence: Synthetic coding sequence
  source 1..402: mol_type = other DNA
atgatcaagttcttcctgatggtgaacaagcagggccagaccagactgagcaagtactacgagcacgtggacatcaacaagagaaccctgctggagaccgaggtgatcaagagctgcctgagcagaagcaacgagcagtgcagcttcatcgagtacaaggacttcaagctgatctacagacagtacgccgccctgttcatcgtggtgggcgtgaacgacaccgagaacgagatggccatctacgagttcatccacaacttcgtggaggtgctggacgagtacttcagcagagtgagcgagctggacatcatgttcaacctggacaaggtgcacatcatcctggacgagatggtgctgaacggctgcatcgtggagaccaacagagccagaatcctggcctag

SEQ ID NO: 71966 - DNA, 4611 bp, synthetic construct
  misc_feature 1..4611: note = Description of Artificial Sequence: Synthetic coding sequence
  source 1..4611: mol_type = other DNA
atgggcgtggtgaacttcgtgttcagagccagcgaggacctgcaggtgctggagaactacagcgacgcccccatgacccccaagcagatcctgcaggtgatcgaggccgagggcctgaaggagatgagcggcaccagccccctggcctgcctgaacgccatgctgcacagcaacagcagaggcggcgagggcctgttctacaagctgcccggcagaatcagcctgttcaccctgaagaaggacgccctgcagtggagcagacaccccgccaccgtggagggcgaggagcccgaggacaccgccgacgtggagagctgcggcagcaacgaggccagcaccgtgagcggcgagaacgacgtgagcctggacgagaccagcagcaacgccagctgcagcaccgagagccagagcagacccctgagcaaccccagagacagctacagagccagcagccaggccaacaagcagaagaagaagaccggcgtgatgctgcccagagtggtgctgacccccctgaaggtgaacggcgcccacgtggagagcgccagcggcttcagcggctgccacgccgacggcgagagcggcagccccagcagcagcagcagcggcagcctggccctgggcagcgccgccatcagaggccaggccgaggtgacccaggaccccgcccccctgctgagaggcttcagaaagcccgccaccggccagatgaagagaaacagaggcgaggagatcgacttcgagacccccggcagcatcctggtgaacaccaacctgagagccctgatcaacagcagaaccttccacgccctgcccagccacttccagcagcagctgctgttcctgctgcccgaggtggacagacaggtgggcaccgacggcctgctgagactgagcagcagcgccctgaacaacgagttcttcacccacgccgcccagagctggagagagagactggccgacggcgagttcacccacgagatgcaggtgagaatcagacaggagatggagaaggagaagaaggtggagcagtggaaggagaagttcttcgaggactactacggccagaagctgggcctgaccaaggaggagagcctgcagcagaacgtgggccaggaggaggccgagatcaagagcggcctgtgcgtgcccggcgagagcgtgagaatccagagaggccccgccaccagacagagagacggccacttcaagaagagaagcagacccgacctgagaaccagagccagaagaaacctgtacaagaagcaggagagcgagcaggccggcgtggccaaggacgccaagagcgtggccagcgacgtgcccctgtacaaggacggcgaggccaagaccgaccccgccggcctgagcagcccccacctgcccggcaccagcagcgccgcccccgacctggagggccccgagttccccgtggagagcgtggccagcagaatccaggccgagcccgacaacctggccagagccagcgccagccccgacagaatccccagcctgccccaggagaccgtggaccaggagcccaaggaccagaagagaaagagcttcgagcaggccgccagcgccagcttccccgagaagaagcccagactggaggacagacagagcttcagaaacaccatcgagagcgtgcacaccgagaagccccagcccaccaaggaggagcccaaggtgccccccatcagaatccagctgagcagaatcaagcccccctgggtggtgaagggccagcccacctaccagatctgccccagaatcatccccaccaccgagagcagctgcagaggctggaccggcgccagaaccctggccgacatcaaggccagagccctgcaggtgagaggcgccagaggccaccactgccacagagaggccgccaccaccgccatcggcggcggcggcggccccggcggcggcggcggcggcgccaccgacgagggcggcggcagaggcagcagcagcggcgacggcggcgaggcctgcggccaccccgagcccagaggcggccccagcacccccggcaagtgcaccagcgacctgcagagaacccagctgctgcccccctaccccctgaacggcgagcacacccaggccggcaccgccatgagcagagccagaagagaggacctgcccagcctgagaaaggaggagagctgcctgctgcagagagccaccgtgggcctgaccgacggcctgggcgacgccagccagctgcccgtggcccccaccggcgaccagccctgccaggccctgcccctgctgagcagccagaccagcgtggccgagagactggtggagcagccccagctgcaccccgacgtgagaaccgagtgcgagagcggcaccaccagctgggagagcgacgacgaggagcagggccccaccgtgcccgccgacaacggccccatcctgagcctggtgggcgacgacaccctggagaagggcaccggccaggccctggacagccaccccaccatgaaggaccccgtgaacgtgacccccagcagcacccccgagagcagccccaccgactgcctgcagaacagagccttcgacgacgagctgggcctgggcggcagctgcccccccatgagagagagcgacaccagacaggagaacctgaagaccaaggccctggtgagcaacagcagcctgcactggatccccatccccagcaacgacgaggtggtgaagcagcccaagcccgagagcagagagcacatccccagcgtggagccccaggtgggcgaggagtgggagaaggccgcccccaccccccccgccctgcccggcgacctgaccgccgaggagggcctggaccccctggacagcctgaccagcctgtggaccgtgcccagcagaggcggcagcgacagcaacggcagctactgccagcaggtggacatcgagaagctgaagatcaacggcgacagcgaggccctgagcccccacggcgagagcaccgacaccgccagcgacttcgagggccacctgaccgaggacagcagcgaggccgacaccagagaggccgccgtgaccaagggcagcagcgtggacaaggacgagaagcccaactggaaccagagcgcccccctgagcaaggtgaacggcgacatgagactggtgaccagaaccgacggcatggtggccccccagagctgggtgagcagagtgtgcgccgtgagacagaagatccccgacagcctgctgctggccagcaccgagtaccagcccagagccgtgtgcctgagcatgcccggcagcagcgtggaggccaccaaccccctggtgatgcagctgctgcagggcagcctgcccctggagaaggtgctgccccccgcccacgacgacagcatgagcgagagcccccaggtgcccctgaccaaggaccagagccacggcagcctgagaatgggcagcctgcacggcctgggcaagaacagcggcatggtggacggcagcagccccagcagcctgagagccctgaaggagcccctgctgcccgacagctgcgagaccggcaccggcctggccagaatcgaggccacccaggcccccggcgccccccagaagaactgcaaggccgtgcccagcttcgacagcctgcaccccgtgaccaaccccatcaccagcagcagaaagctggaggagatggacagcaaggagcagttcagcagcttcagctgcgaggaccagaaggaggtgagagccatgagccaggacagcaacagcaacgccgcccccggcaagagccccggcgacctgaccaccagcagaacccccagattcagcagccccaacgtgatcagcttcggccccgagcagaccggcagagccctgggcgaccagagcaacgtgaccggccagggcaagaagctgttcggcagcggcaacgtggccgccaccctgcagagacccagacccgccgaccccatgcccctgcccgccgagatcccccccgtgttccccagcggcaagctgggccccagcaccaacagcatgagcggcggcgtgcagacccccagagaggactgggcccccaagccccacgccttcgtgggcagcgtgaagaacgagaagaccttcgtgggcggccccctgaaggccaacgccgagaacagaaaggccaccggccacagccccctggagctggtgggccacctggagggcatgcccttcgtgatggacctgcccttctggaagctgcccagagagcccggcaagggcctgagcgagcccctggagcccagcagcctgcccagccagctgagcatcaagcaggccttctacggcaagctgagcaagctgcagctgagcagcaccagcttcaactacagcagcagcagccccaccttccccaagggcctggccggcagcgtggtgcagctgagccacaaggccaacttcggcgccagccacagcgccagcctgagcctgcagatgttcaccgacagcagcaccgtggagagcatcagcctgcagtgcgcctgcagcctgaaggccatgatcatgtgccagggctgcggcgccttctgccacgacgactgcatcggccccagcaagctgtgcgtgctgtgcctggtggtgagatag

SEQ ID NO: 71967 - DNA, 4626 bp, synthetic construct
  misc_feature 1..4626: note = Description of Artificial Sequence: Synthetic coding sequence
  source 1..4626: mol_type = other DNA
atgaaggacaagcagaagaagaagaaggagagaacctgggccgaggccgccagactggtgctggagaactacagcgacgcccccatgacccccaagcagatcctgcaggtgatcgaggccgagggcctgaaggagatgagaagcggcaccagccccctggcctgcctgaacgccatgctgcacagcaacagcagaggcggcgagggcctgttctacaagctgcccggcagaatcagcctgttcaccctgaagaaggacgccctgcagtggagcagacaccccgccaccgtggagggcgaggagcccgaggacaccgccgacgtggagagctgcggcagcaacgaggccagcaccgtgagcggcgagaacgacgtgagcctggacgagaccagcagcaacgccagctgcagcaccgagagccagagcagacccctgagcaaccccagagacagctacagagccagcagccaggccaacaagcagaagaagaagaccggcgtgatgctgcccagagtggtgctgacccccctgaaggtgaacggcgcccacgtggagagcgccagcggcttcagcggctgccacgccgacggcgagagcggcagccccagcagcagcagcagcggcagcctggccctgggcagcgccgccatcagaggccaggccgaggtgacccaggaccccgcccccctgctgagaggcttcagaaagcccgccaccggccagatgaagagaaacagaggcgaggagatcgacttcgagacccccggcagcatcctggtgaacaccaacctgagagccctgatcaacagcagaaccttccacgccctgcccagccacttccagcagcagctgctgttcctgctgcccgaggtggacagacaggtgggcaccgacggcctgctgagactgagcagcagcgccctgaacaacgagttcttcacccacgccgcccagagctggagagagagactggccgacggcgagttcacccacgagatgcaggtgagaatcagacaggagatggagaaggagaagaaggtggagcagtggaaggagaagttcttcgaggactactacggccagaagctgggcctgaccaaggaggagagcctgcagcagaacgtgggccaggaggaggccgagatcaagagcggcctgtgcgtgcccggcgagagcgtgagaatccagagaggccccgccaccagacagagagacggccacttcaagaagagaagcagacccgacctgagaaccagagccagaagaaacctgtacaagaagcaggagagcgagcaggccggcgtggccaaggacgccaagagcgtggccagcgacgtgcccctgtacaaggacggcgaggccaagaccgaccccgccggcctgagcagcccccacctgcccggcaccagcagcgccgcccccgacctggagggccccgagttccccgtggagagcgtggccagcagaatccaggccgagcccgacaacctggccagagccagcgccagccccgacagaatccccagcctgccccaggagaccgtggaccaggagcccaaggaccagaagagaaagagcttcgagcaggccgccagcgccagcttccccgagaagaagcccagactggaggacagacagagcttcagaaacaccatcgagagcgtgcacaccgagaagccccagcccaccaaggaggagcccaaggtgccccccatcagaatccagctgagcagaatcaagcccccctgggtggtgaagggccagcccacctaccagatctgccccagaatcatccccaccaccgagagcagctgcagaggctggaccggcgccagaaccctggccgacatcaaggccagagccctgcaggtgagaggcgccagaggccaccactgccacagagaggccgccaccaccgccatcggcggcggcggcggccccggcggcggcggcggcggcgccaccgacgagggcggcggcagaggcagcagcagcggcgacggcggcgaggcctgcggccaccccgagcccagaggcggccccagcacccccggcaagtgcaccagcgacctgcagagaacccagctgctgcccccctaccccctgaacggcgagcacacccaggccggcaccgccatgagcagagccagaagagaggacctgcccagcctgagaaaggaggagagctgcctgctgcagagagccaccgtgggcctgaccgacggcctgggcgacgccagccagctgcccgtggcccccaccggcgaccagccctgccaggccctgcccctgctgagcagccagaccagcgtggccgagagactggtggagcagccccagctgcaccccgacgtgagaaccgagtgcgagagcggcaccaccagctgggagagcgacgacgaggagcagggccccaccgtgcccgccgacaacggccccatcctgagcctggtgggcgacgacaccctggagaagggcaccggccaggccctggacagccaccccaccatgaaggaccccgtgaacgtgacccccagcagcacccccgagagcagccccaccgactgcctgcagaacagagccttcgacgacgagctgggcctgggcggcagctgcccccccatgagagagagcgacaccagacaggagaacctgaagaccaaggccctggtgagcaacagcagcctgcactggatccccatccccagcaacgacgaggtggtgaagcagcccaagcccgagagcagagagcacatccccagcgtggagccccaggtgggcgaggagtgggagaaggccgcccccaccccccccgccctgcccggcgacctgaccgccgaggagggcctggaccccctggacagcctgaccagcctgtggaccgtgcccagcagaggcggcagcgacagcaacggcagctactgccagcaggtggacatcgagaagctgaagatcaacggcgacagcgaggccctgagcccccacggcgagagcaccgacaccgccagcgacttcgagggccacctgaccgaggacagcagcgaggccgacaccagagaggccgccgtgaccaagggcagcagcgtggacaaggacgagaagcccaactggaaccagagcgcccccctgagcaaggtgaacggcgacatgagactggtgaccagaaccgacggcatggtggccccccagagctgggtgagcagagtgtgcgccgtgagacagaagatccccgacagcctgctgctggccagcaccgagtaccagcccagagccgtgtgcctgagcatgcccggcagcagcgtggaggccaccaaccccctggtgatgcagctgctgcagggcagcctgcccctggagaaggtgctgccccccgcccacgacgacagcatgagcgagagcccccaggtgcccctgaccaaggaccagagccacggcagcctgagaatgggcagcctgcacggcctgggcaagaacagcggcatggtggacggcagcagccccagcagcctgagagccctgaaggagcccctgctgcccgacagctgcgagaccggcaccggcctggccagaatcgaggccacccaggcccccggcgccccccagaagaactgcaaggccgtgcccagcttcgacagcctgcaccccgtgaccaaccccatcaccagcagcagaaagctggaggagatggacagcaaggagcagttcagcagcttcagctgcgaggaccagaaggaggtgagagccatgagccaggacagcaacagcaacgccgcccccggcaagagccccggcgacctgaccaccagcagaacccccagattcagcagccccaacgtgatcagcttcggccccgagcagaccggcagagccctgggcgaccagagcaacgtgaccggccagggcaagaagctgttcggcagcggcaacgtggccgccaccctgcagagacccagacccgccgaccccatgcccctgcccgccgagatcccccccgtgttccccagcggcaagctgggccccagcaccaacagcatgagcggcggcgtgcagacccccagagaggactgggcccccaagccccacgccttcgtgggcagcgtgaagaacgagaagaccttcgtgggcggccccctgaaggccaacgccgagaacagaaaggccaccggccacagccccctggagctggtgggccacctggagggcatgcccttcgtgatggacctgcccttctggaagctgcccagagagcccggcaagggcctgagcgagcccctggagcccagcagcctgcccagccagctgagcatcaagcaggccttctacggcaagctgagcaagctgcagctgagcagcaccagcttcaactacagcagcagcagccccaccttccccaagggcctggccggcagcgtggtgcagctgagccacaaggccaacttcggcgccagccacagcgccagcctgagcctgcagatgttcaccgacagcagcaccgtggagagcatcagcctgcagtgcgcctgcagcctgaaggccatgatcatgtgccagggctgcggcgccttctgccacgacgactgcatcggccccagcaagctgtgcgtgctgtgcctggtggtgagatag

SEQ ID NO: 71968 - DNA, 4626 bp, synthetic construct; identical to SEQ ID NO: 71967
  misc_feature 1..4626: note = Description of Artificial Sequence: Synthetic coding sequence
  source 1..4626: mol_type = other DNA

SEQ ID NO: 71969 - DNA, 4389 bp, synthetic construct
  misc_feature 1..4389: note = Description of Artificial Sequence: Synthetic coding sequence
  source 1..4389: mol_type = other DNA
atgctgagcttccccaacctgaaccaggtgctggagaactacagcgacgcccccatgacccccaagcagatcctgcaggtgatcgaggccgagggcctgaaggagatgagcagcggcaccagccccctggcctgcctgaacgccatgctgcacagcaacagcagaggcggcgagggcctgttctacaagctgcccggcagaatcagcctgttcaccctgaagaaggacgccctgcagtggagcagacaccccgccaccgtggagggcgaggagcccgaggacaccgccgacgtggagagctgcggcagcaacgaggccagcaccgtgagcggcgagaacgacgtgagcctggacgagaccagcagcaacgccagctgcagcaccgagagccagagcagacccctgagcaaccccagagacagctacagagccagcagccaggccaacaagcagaagaagaagaccggcgtgatgctgcccagagtggtgctgacccccctgaaggtgaacggcgcccacgtggagagcgccagcggccagatgaagagaaacagaggcgaggagatcgacttcgagacccccggcagcatcctggtgaacaccaacctgagagccctgatcaacagcagaaccttccacgccctgcccagccacttccagcagcagctgctgttcctgctgcccgaggtggacagacaggtgggcaccgacggcctgctgagactgagcagcagcgccctgaacaacgagttcttcacccacgccgcccagagctggagagagagactggccgacggcgagttcacccacgagatgcaggtgagaatcagacaggagatggagaaggagaagaaggtggagcagtggaaggagaagttcttcgaggactactacggccagaagctgggcctgaccaaggaggagagcctgcagcagaacgtgggccaggaggaggccgagatcaagagcggcctgtgcgtgcccggcgagagcgtgagaatccagagaggccccgccaccagacagagagacggccacttcaagaagagaagcagacccgacctgagaaccagagccagaagaaacctgtacaagaagcaggagagcgagcaggccggcgtggccaaggacgccaagagcgtggccagcgacgtgcccctgtacaaggacggcgaggccaagaccgaccccgccggcctgagcagcccccacctgcccggcaccagcagcgccgcccccgacctggagggccccgagttccccgtggagagcgtggccagcagaatccaggccgagcccgacaacctggccagagccagcgccagccccgacagaatccccagcctgccccaggagaccgtggaccaggagcccaaggaccagaagagaaagagcttcgagcaggccgccagcgccagcttccccgagaagaagcccagactggaggacagacagagcttcagaaacaccatcgagagcgtgcacaccgagaagccccagcccaccaaggaggagcccaaggtgccccccatcagaatccagctgagcagaatcaagcccccctgggtggtgaagggccagcccacctaccagatctgccccagaatcatccccaccaccgagagcagctgcagaggctggaccggcgccagaaccctggccgacatcaaggccagagccctgcaggtgagaggcgccagaggccaccactgccacagagaggccaccgacgagggcggcggcagaggcagcagcagcggcgacggcggcgaggcctgcggccaccccgagcccagaggcggccccagcacccccggcaagtgcaccagcgacctgcagagaacccagctgctgcccccctaccccctgaacggcgagcacacccaggccggcaccgccatgagcagagccagaagagaggacctgcccagcctgagaaaggaggagagctgcctgctgcagagagccaccgtgggcctgaccgacggcctgggcgacgccagccagctgcccgtggcccccaccggcgaccagccctgccaggccctgcccctgctgagcagccagaccagcgtggccgagagactggtggagcagccccagctgcaccccgacgtgagaaccgagtgcgagagcggcaccaccagctgggagagcgacgacgaggagcagggccccaccgtgcccgccgacaacggccccatcctgagcctggtgggcgacgacaccctggagaagggcaccggccaggccctggacagccaccccaccatgaaggaccccgtgaacgtgacccccagcagcacccccgagagcagccccaccgactgcctgcagaacagagccttcgacgacgagctgggcctgggcggcagctgcccccccatgagagagagcgacaccagacaggagaacctgaagaccaaggccctggtgagcaacagcagcctgcactggatccccatccccagcaacgacgaggtggtgaagcagcccaagcccgagagcagagagcacatccccagcgtggagccccaggtgggcgaggagtgggagaaggccgcccccaccccccccgccctgcccggcgacctgaccgccgaggagggcctggaccccctggacagcctgaccagcctgtggaccgtgcccagcagaggcggcagcgacagcaacggcagctactgccagcaggtggacatcgagaagctgaagatcaacggcgacagcgaggccctgagcccccacggcgagagcaccgacaccgccagcgacttcgagggccacctgaccgaggacagcagcgaggccgacaccagagaggccgccgtgaccaagggcagcagcgtggacaaggacgagaagcccaactggaaccagagcgcccccctgagcaaggtgaacggcgacatgagactggtgaccagaaccgacggcatggtggccccccagagctgggtgagcagagtgtgcgccgtgagacagaagatccccgacagcctgctgctggccagcaccgagtaccagcccagagccgtgtgcctgagcatgcccggcagcagcgtggaggccaccaaccccctggtgatgcagctgctgcagggcagcctgcccctggagaaggtgctgccccccgcccacgacgacagcatgagcgagagcccccaggtgcccctgaccaaggaccagagccacggcagcctgagaatgggcagcctgcacggcctgggcaagaacagcggcatggtggacggcagcagccccagcagcctgagagccctgaaggagcccctgctgcccgacagctgcgagaccggcaccggcctggccagaatcgaggccacccaggcccccggcgccccccagaagaactgcaaggccgtgcccagcttcgacagcctgcaccccgtgaccaaccccatcaccagcagcagaaagctggaggagatggacagcaaggagcagttcagcagcttcagctgcgaggaccagaaggaggtgagagccatgagccaggacagcaacagcaacgccgcccccggcaagagccccggcgacctgaccaccagcagaacccccagattcagcagccccaacgtgatcagcttcggccccgagcagaccggcagagccctgggcgaccagagcaacgtgaccggccagggcaagaagctgttcggcagcggcaacgtggccgccaccctgcagagacccagacccgccgaccccatgcccctgcccgccgagatcccccccgtgttccccagcggcaagctgggccccagcaccaacagcatgagcggcggcgtgcagacccccagagaggactgggcccccaagccccacgccttcgtgggcagcgtgaagaacgagaagaccttcgtgggcggccccctgaaggccaacgccgagaacagaaaggccaccggccacagccccctggagctggtgggccacctggagggcatgcccttcgtgatggacctgcccttctggaagctgcccagagagcccggcaagggcctgagcgagcccctggagcccagcagcctgcccagccagctgagcatcaagcaggccttctacggcaagctgagcaagctgcagctgagcagcaccagcttcaactacagcagcagcagccccaccttccccaagggcctggccggcagcgtggtgcagctgagccacaaggccaacttcggcgccagccacagcgccagcctgagcctgcagatgttcaccgacagcagcaccgtggagagcatcagcctgcagtgcgcctgcagcctgaaggccatgatcatgtgccagggctgcggcgccttctgccacgacgactgcatcggccccagcaagctgtgcgtgctgtgcctggtggtgagatag

SEQ ID NO: 71970 - DNA, 4626 bp, synthetic construct; identical to SEQ ID NO: 71967
  misc_feature 1..4626: note = Description of Artificial Sequence: Synthetic coding sequence
  source 1..4626: mol_type = other DNA

SEQ ID NO: 71971 - DNA, 225 bp, synthetic construct
  misc_feature 1..225: note = Description of Artificial Sequence: Synthetic coding sequence
  source 1..225: mol_type = other DNA
tgatgggccgaggccgccagactggtgctggagaactacagcgacgcccccatgacccccaagcagatcctgcaggtgatcgaggccgagggcctgaaggagatgagaagcggcaccagccccctggcctgcctgaacgccatgctgcacagcaacagcagaggcggcgagggcctgttctacaagctgcccggcagaatcagcctgttcaccctgaaggtgtag

SEQ ID NO: 71972 - DNA, 258 bp, synthetic construct
  misc_feature 1..258: note = Description of Artificial Sequence: Synthetic coding sequence
  source 1..258: mol_type = other DNA
atgaaggacaagcagaagaagaagaaggagagaacctgggccgaggccgccagactggtgctggagaactacagcgacgcccccatgacccccaagcagatcctgcaggtgatcgaggccgagggcctgaaggagatgagaagcggcaccagccccctggcctgcctgaacgccatgctgcacagcaacagcagaggcggcgagggcctgttctacaagctgcccggcagaatcagcctgttcaccctgaaggtgtag

SEQ ID NO: 71973 - DNA, 255 bp, synthetic construct
  misc_feature 1..255: note = Description of Artificial Sequence: Synthetic coding sequence
  source 1..255: mol_type = other DNA
atgaaggacaagcagaagaagaagaaggagagaacctgggccgaggccgccagactggtgctggagaactacagcgacgcccccatgacccccaagcagatcctgcaggtgatcgaggccgagggcctgaaggagatgagcggcaccagccccctggcctgcctgaacgccatgctgcacagcaacagcagaggcggcgagggcctgttctacaagctgcccggcagaatcagcctgttcaccctgaagagatag

SEQ ID NO: 71974 - DNA, 2757 bp, synthetic construct
  misc_feature 1..2757: note = Description of Artificial Sequence: Synthetic coding sequence
  source 1..2757: mol_type = other DNA
atgaagagaaccaagtgcgccgacatcgacgtggagacccccgacagcatcctggtgaacaccaacctgagagccctgatcaacaagcacaccttcagcgtgctgcccggcgactgccagcagagactgctgctgctgctgcccgaggtggacagacaggtgggccccgacggcctgatgaagctgaacggcagcgccctgaacaacgagttcttcaccagcgccgcccagggctggaaggagagactgagcgagggcgagttcacccccgagatgcaggtgagaatcagacaggagatcgagaaggagaagaaggtggagccctggaaggagcagttcttcgagagctactacggccagagcagcggcctgagcctggaggacagcaagaagctgaccgccagccccagcgaccccaaggtgaagaagacccccgccgagcagcccaagagcatgcccgtgagcgaggccagcctgatcagaatcgtgcccgtggtgagccagagcgagtgcaaggaggaggccctgcagatgagcagccccggcagaaaggaggagtgcgagagccagggcgaggtgcagcccaacttcagcaccagcagcgagcccctgctgagcagcgccctgaacacccacgagctgagcagcatcctgcccatcaagtgccccaaggacgaggacctgctggagcagaagcccgtgaccagcgccgagcaggagagcgagaagaaccacctgaccaccgccagcaactacaacaagagcgagagccaggagagcctggtgaccagccccagcaagcccaagagccccggcgtggagaagcccatcgtgaagcccaccgccggcgccggcccccaggagaccaacatgaaggagcccctggccaccctggtggaccagagccccgagagcctgaagagaaagagcagcctgacccaggaggaggcccccgtgagctgggagaagagacccagagtgaccgagaacagacagcaccagcagcccttccaggtgagcccccagcccttcctgaacagaggcgacagaatccaggtgagaaaggtgccccccctgaagatccccgtgagcagaatcagccccatgcccttccaccccagccaggtgagccccagagccagattccccgtgagcatcaccagccccaacagaaccggcgccagaaccctggccgacatcaaggccaaggcccagctggtgaaggcccagagagccgccgccgccgccgccgccgccgccgccgccgccgccagcgtgggcggcaccatccccggccccggccccggcggcggccagggccccggcgagggcggcgagggccagaccgccagaggcggcagccccggcagcgacagagtgagcgagaccggcaagggccccaccctggagctggccggcaccggcagcagaggcggcaccagagagctgctgccctgcggccccgagacccagccccagagcgagaccaagaccacccccagccaggcccagccccacagcgtgagcggcgcccagctgcagcagaccccccccgtgccccccacccccgccgtgagcggcgcctgcaccagcgtgcccagccccgcccacatcgagaagctggacaacgagaagctgaaccccaccagagccaccgccaccgtggccagcgtgagccacccccagggccccagcagctgcagacaggagaaggcccccagccccaccggcttccagctggaggacatcagcaccagccagagattcatgctgggcttcgccggcagaagaaccagcaagcccgccatggccggccactacctgctgaacatcagcacctacggcagaggcagcgagagcttcagaagaacccacagcgtgaaccccgaggacagattctgcctgagcagccccaccgaggccctgaagatgggctacaccgactgcaagaacgccaccggcgagagcagcagcagcaaggaggacgacaccgacgaggagagcaccggcgacgagcaggagagcgtgaccgtgaaggaggagccccaggtgagccagagcgccggcaagggcgacaccagcagcggcccccacagcagagagaccctgagcaccagcgactgcctggccagcaagaacgtgaaggccgagatccccctgaacgagcagaccaccctgagcaaggagaactacctgttcaccagaggccagaccttcgacgagaagaccctggccagagacctgatccaggccgcccagaagcagatggcccacgccgtgagaggcaaggccatcagaagcagccccgagctgttcagcagcaccgtgctgcccctgcccgccgacagccccacccaccagcccctgctgctgccccccctgcagacccccaagctgtacggcagccccacccagatcggccccagctacagaggcatgatcaacgtgagcaccagcagcgacatggaccacaacagcgccgtgcccggcagccaggtgagcagcaacgtgggcgacgtgatgagcttcagcgtgaccgtgaccaccatccccgccagccaggccatgaaccccagcagccacggccagaccatccccgtgcaggccttcagcgaggagaacagcatcgagggcacccccagcaagtgctactgcagactgaaggccatgatcatgtgcaagggctgcggcgccttctgccacgacgactgcatcggccccagcaagctgtgcgtgagctgcctggtggtgagatag

SEQ ID NO: 71975 - DNA, 4224 bp, synthetic construct
  misc_feature 1..4224: note = Description of Artificial Sequence: Synthetic coding sequence
  source 1..4224: mol_type = other DNA
atgagccacaaggagatcctgcaggtgatccagagagagggcctgaaggagatcagcagcggcaccagccccctggcctgcctgaacgccatgctgcacaccaacagcagaggcgaggagggcatcttctacaaggtgcccggcagaatgggcgtgtacaccctgaagaaggacgtgcccgacggcgtgaaggagctgagcgagggcagcgaggagagcagcgacggccagagcgacagccagagcagcgagaacagcagcagcagcagcgacggcggcagcaacaaggagggcaagaagagcagatggaagagaaaggtgagcagcagcagcccccagagcggctgccccagccccaccatccccgccggcaaggtgatcagccccagccagaagcacagcaagaaggccctgaagcaggccctgaagcagcagcagcagaagaagcagcagcagcagtgcagacccagcatcagcatcagcagcaaccagcacctgagcctgaagaccgtgaaggccgccagcgacagcgtgcccgccaagcccgccacctgggagggcaagcagagcgacggccagaccggcagcccccagaacagcaacagcagcttcagcagcagcgtgaaggtggagaacaccctgctgggcctgggcaagaagagcttccagagaagcgagagactgcacaccagacagatgaagagaaccaagtgcgccgacatcgacgtggagacccccgacagcatcctggtgaacaccaacctgagagccctgatcaacaagcacaccttcagcgtgctgcccggcgactgccagcagagactgctgctgctgctgcccgaggtggacagacaggtgggccccgacggcctgatgaagctgaacggcagcgccctgaacaacgagttcttcaccagcgccgcccagggctggaaggagagactgagcgagggcgagttcacccccgagatgcaggtgagaatcagacaggagatcgagaaggagaagaaggtggagccctggaaggagcagttcttcgagagctactacggccagagcagcggcctgagcctggaggacagcaagaagctgaccgccagccccagcgaccccaaggtgaagaagacccccgccgagcagcccaagagcatgcccgtgagcgaggccagcctgatcagaatcgtgcccgtggtgagccagagcgagtgcaaggaggaggccctgcagatgagcagccccggcagaaaggaggagtgcgagagccagggcgaggtgcagcccaacttcagcaccagcagcgagcccctgctgagcagcgccctgaacacccacgagctgagcagcatcctgcccatcaagtgccccaaggacgaggacctgctggagcagaagcccgtgaccagcgccgagcaggagagcgagaagaaccacctgaccaccgccagcaactacaacaagagcgagagccaggagagcctggtgaccagccccagcaagcccaagagccccggcgtggagaagcccatcgtgaagcccaccgccggcgccggcccccaggagaccaacatgaaggagcccctggccaccctggtggaccagagccccgagagcctgaagagaaagagcagcctgacccaggaggaggcccccgtgagctgggagaagagacccagagtgaccgagaacagacagcaccagcagcccttccaggtgagcccccagcccttcctgaacagaggcgacagaatccaggtgagaaaggtgccccccctgaagatccccgtgagcagaatcagccccatgcccttccaccccagccaggtgagccccagagccagattccccgtgagcatcaccagccccaacagaaccggcgccagaaccctggccgacatcaaggccaaggcccagctggtgaaggcccagagagccgccgccgccgccgccgccgccgccgccgccgccgccagcgtgggcggcaccatccccggccccggccccggcggcggccagggccccggcgagggcggcgagggccagaccgccagaggcggcagccccggcagcgacagagtgagcgagaccggcaagggccccaccctggagctggccggcaccggcagcagaggcggcaccagagagctgctgccctgcggccccgagacccagccccagagcgagaccaagaccacccccagccaggcccagccccacagcgtgagcggcgcccagctgcagcagaccccccccgtgccccccacccccgccgtgagcggcgcctgcaccagcgtgcccagccccgcccacatcgagaagctggacaacgagaagctgaaccccaccagagccaccgccaccgtggccagcgtgagccacccccagggccccagcagctgcagacaggagaaggcccccagccccaccggccccgccctgatcagcggcgccagccccgtgcactgcgccgccgacggcaccgtggagctgaaggccggccccagcaagaacatccccaaccccagcgccagcagcaagaccgacgccagcgtgcccgtggccgtgacccccagccccctgaccagcctgctgaccaccgccaccctggagaagctgcccgtgccccaggtgagcgccaccaccgcccccgccggcagcgccccccccagcagcaccctgcccgccgccagcagcctgaagacccccggcaccagcctgaacatgaacggccccaccctgagacccaccagcagcatccccgccaacaaccccctggtgacccagctgctgcagggcaaggacgtgcccatggagcagatcctgcccaagcccctgaccaaggtggagatgaagaccgtgcccctgaccgccaaggaggagagaggcatgggcgccctgatcgccaccaacaccaccgagaacagcaccagagaggaggtgaacgagagacagagccaccccgccacccagcagcagctgggcaagaccctgcagagcaagcagctgccccaggtgcccagacccctgcagctgttcagcgccaaggagctgagagacagcagcatcgacacccaccagtaccacgagggcctgagcaaggccacccaggaccagatcctgcagaccctgatccagagagtgagaagacagaacctgctgagcgtggtgccccccagccagttcaacttcgcccacagcggcttccagctggaggacatcagcaccagccagagattcatgctgggcttcgccggcagaagaaccagcaagcccgccatggccggccactacctgctgaacatcagcacctacggcagaggcagcgagagcttcagaagaacccacagcgtgaaccccgaggacagattctgcctgagcagccccaccgaggccctgaagatgggctacaccgactgcaagaacgccaccggcgagagcagcagcagcaaggaggacgacaccgacgaggagagcaccggcgacgagcaggagagcgtgaccgtgaaggaggagccccaggtgagccagagcgccggcaagggcgacaccagcagcggcccccacagcagagagaccctgagcaccagcgactgcctggccagcaagaacgtgaaggccgagatccccctgaacgagcagaccaccctgagcaaggagaactacctgttcaccagaggccagaccttcgacgagaagaccctggccagagacctgatccaggccgcccagaagcagatggcccacgccgtgagaggcaaggccatcagaagcagccccgagctgttcagcagcaccgtgctgcccctgcccgccgacagccccacccaccagcccctgctgctgccccccctgcagacccccaagctgtacggcagccccacccagatcggccccagctacagaggcatgatcaacgtgagcaccagcagcgacatggaccacaacagcgccgtgcccggcagccaggtgagcagcaacgtgggcgacgtgatgagcttcagcgtgaccgtgaccaccatccccgccagccaggccatgaaccccagcagccacggccagaccatccccgtgcaggccttcagcgaggagaacagcatcgagggcacccccagcaagtgctactgcagactgaaggccatgatcatgtgcaagggctgcggcgccttctgccacgacgactgcatcggccccagcaagctgtgcgtgagctgcctggtggtgagatag

SEQ ID NO: 71976 - DNA, 2757 bp, synthetic construct; identical to SEQ ID NO: 71974
  misc_feature 1..2757: note = Description of Artificial Sequence: Synthetic coding sequence
  source 1..2757: mol_type = other DNA

SEQ ID NO: 71977 - DNA, 4308 bp, synthetic construct
  misc_feature 1..4308: note = Description of Artificial Sequence: Synthetic coding sequence
  source 1..4308: mol_type = other DNA
atgagagagaagggcagaagaaagaagggcagaacctgggccgaggccgccaagaccgtgctggagaagtaccccaacacccccatgagccacaaggagatcctgcaggtgatccagagagagggcctgaaggagatcagaagcggcaccagccccctggcctgcctgaacgccatgctgcacaccaacagcagaggcgaggagggcatcttctacaaggtgcccggcagaatgggcgtgtacaccctgaagaaggacgtgcccgacggcgtgaaggagctgagcgagggcagcgaggagagcagcgacggccagagcgacagccagagcagcgagaacagcagcagcagcagcgacggcggcagcaacaaggagggcaagaagagcagatggaagagaaaggtgagcagcagcagcccccagagcggctgccccagccccaccatccccgccggcaaggtgatcagccccagccagaagcacagcaagaaggccctgaagcaggccctgaagcagcagcagcagaagaagcagcagcagcagtgcagacccagcatcagcatcagcagcaaccagcacctgagcctgaagaccgtgaaggccgccagcgacagcgtgcccgccaagcccgccacctgggagggcaagcagagcgacggccagaccggcagcccccagaacagcaacagcagcttcagcagcagcgtgaaggtggagaacaccctgctgggcctgggcaagaagagcttccagagaagcgagagactgcacaccagacagatgaagagaaccaagtgcgccgacatcgacgtggagacccccgacagcatcctggtgaacaccaacctgagagccctgatcaacaagcacaccttcagcgtgctgcccggcgactgccagcagagactgctgctgctgctgcccgaggtggacagacaggtgggccccgacggcctgatgaagctgaacggcagcgccctgaacaacgagttcttcaccagcgccgcccagggctggaaggagagactgagcgagggcgagttcacccccgagatgcaggtgagaatcagacaggagatcgagaaggagaagaaggtggagccctggaaggagcagttcttcgagagctactacggccagagcagcggcctgagcctggaggacagcaagaagctgaccgccagccccagcgaccccaaggtgaagaagacccccgccgagcagcccaagagcatgcccgtgagcgaggccagcctgatcagaatcgtgcccgtggtgagccagagcgagtgcaaggaggaggccctgcagatgagcagccccggcagaaaggaggagtgcgagagccagggcgaggtgcagcccaacttcagcaccagcagcgagcccctgctgagcagcgccctgaacacccacgagctgagcagcatcctgcccatcaagtgccccaaggacgaggacctgctggagcagaagcccgtgaccagcgccgagcaggagagcgagaagaaccacctgaccaccgccagcaactacaacaagagcgagagccaggagagcctggtgaccagccccagcaagcccaagagccccggcgtggagaagcccatcgtgaagcccaccgccggcgccggcccccaggagaccaacatgaaggagcccctggccaccctggtggaccagagccccgagagcctgaagagaaagagcagcctgacccaggaggaggcccccgtgagctgggagaagagacccagagtgaccgagaacagacagcaccagcagcccttccaggtgagcccccagcccttcctgaacagaggcgacagaatccaggtgagaaaggtgccccccctgaagatccccgtgagcagaatcagccccatgcccttccaccccagccaggtgagccccagagccagattccccgtgagcatcaccagccccaacagaaccggcgccagaaccctggccgacatcaaggccaaggcccagctggtgaaggcccagagagccgccgccgccgccgccgccgccgccgccgccgccgccagcgtgggcggcaccatccccggccccggccccggcggcggccagggccccggcgagggcggcgagggccagaccgccagaggcggcagccccggcagcgacagagtgagcgagaccggcaagggccccaccctggagctggccggcaccggcagcagaggcggcaccagagagctgctgccctgcggccccgagacccagccccagagcgagaccaagaccacccccagccaggcccagccccacagcgtgagcggcgcccagctgcagcagaccccccccgtgccccccacccccgccgtgagcggcgcctgcaccagcgtgcccagccccgcccacatcgagaagctggacaacgagaagctgaaccccaccagagccaccgccaccgtggccagcgtgagccacccccagggccccagcagctgcagacaggagaaggcccccagccccaccggccccgccctgatcagcggcgccagccccgtgcactgcgccgccgacggcaccgtggagctgaaggccggccccagcaagaacatccccaaccccagcgccagcagcaagaccgacgccagcgtgcccgtggccgtgacccccagccccctgaccagcctgctgaccaccgccaccctggagaagctgcccgtgccccaggtgagcgccaccaccgcccccgccggcagcgccccccccagcagcaccctgcccgccgccagcagcctgaagacccccggcaccagcctgaacatgaacggccccaccctgagacccaccagcagcatccccgccaacaaccccctggtgacccagctgctgcagggcaaggacgtgcccatggagcagatcctgcccaagcccctgaccaaggtggagatgaagaccgtgcccctgaccgccaaggaggagagaggcatgggcgccctgatcgccaccaacaccaccgagaacagcaccagagaggaggtgaacgagagacagagccaccccgccacccagcagcagctgggcaagaccctgcagagcaagcagctgccccaggtgcccagacccctgcagctgttcagcgccaaggagctgagagacagcagcatcgacacccaccagtaccacgagggcctgagcaaggccacccaggaccagatcctgcagaccctgatccagagagtgagaagacagaacctgctgagcgtggtgccccccagccagttcaacttcgcccacagcggcttccagctggaggacatcagcaccagccagagattcatgctgggcttcgccggcagaagaaccagcaagcccgccatggccggccactacctgctgaacatcagcacctacggcagaggcagcgagagcttcagaagaacccacagcgtgaaccccgaggacagattctgcctgagcagccccaccgaggccctgaagatgggctacaccgactgcaagaacgccaccggcgagagcagcagcagcaaggaggacgacaccgacgaggagagcaccggcgacgagcaggagagcgtgaccgtgaaggaggagccccaggtgagccagagcgccggcaagggcgacaccagcagcggcccccacagcagagagaccctgagcaccagcgactgcctggccagcaagaacgtgaaggccgagatccccctgaacgagcagaccaccctgagcaaggagaactacctgttcaccagaggccagaccttcgacgagaagaccctggccagagacctgatccaggccgcccagaagcagatggcccacgccgtgagaggcaaggccatcagaagcagccccgagctgttcagcagcaccgtgctgcccctgcccgccgacagccccacccaccagcccctgctgctgccccccctgcagacccccaagctgtacggcagccccacccagatcggccccagctacagaggcatgatcaacgtgagcaccagcagcgacatggaccacaacagcgccgtgcccggcagccaggtgagcagcaacgtgggcgacgtgatgagcttcagcgtgaccgtgaccaccatccccgccagccaggccatgaaccccagcagccacggccagaccatccccgtgcaggccttcagcgaggagaacagcatcgagggcacccccagcaagtgctactgcagactgaaggccatgatcatgtgcaagggctgcggcgccttctgccacgacgactgcatcggccccagcaagctgtgcgtgagctgcctggtggtgagatag

SEQ ID NO: 71978 - DNA, 6747 bp, synthetic construct
  misc_feature 1..6747: note = Description of Artificial Sequence: Synthetic coding sequence
  source 1..6747: mol_type = other DNA
atgaaggacaagagaaagaagaaggacagaacctgggccgaggccgccagactggccctggagaagcaccccaacagccccatgaccgccaagcagatcctggaggtgatccagaaggagggcctgaaggagaccagcggcaccagccccctggcctgcctgaacgccatgctgcacaccaacaccagaatcggcgacggcaccttcttcaagatccccggcaagagcggcctgtacgccctgaagaaggaggagagcagctgccccgccgacggcaccctggacctggtgtgcgagagcgagctggacggcaccgacatggccgaggccaacgcccacggcgaggagaacggcgtgtgcagcaagcaggtgaccgacgaggccagcagcaccagagacagcagcctgaccaacaccgccgtgcagagcaagctggtgagcagcttccagcagcacaccaagaaggccctgaagcaggccctgagacagcagcagaagagaagaaacggcgtgagcatgatggtgaacaagaccgtgcccagagtggtgctgacccccctgaaggtgagcgacgagcagagcgacagccccagcggcagcgagagcaagaacggcgaggccgacagcagcgacaaggagatgaagcacggccagaagagccccaccggcaagcagaccagccagcacctgaagagactgaagaagagcggcctgggccacctgaagtggaccaaggccgaggacatcgacatcgagacccccggcagcatcctggtgaacaccaacctgagagccctgatcaacaagcacaccttcgccagcctgccccagcacttccagcagtacctgctgctgctgctgcccgaggtggacagacagatgggcagcgacggcatcctgagactgagcaccagcgccctgaacaacgagttcttcgcctacgccgcccagggctggaagcagagactggccgagggcgagttcacccccgagatgcagctgagaatcagacaggagatcgagaaggagaagaagaccgagccctggaaggagaagttcttcgagagattctacggcgagaagctgggcatgagcagagaggagagcgtgaagctgaccaccggccccaacaacgccggcgcccagagcagcagcagctgcggcaccagcggcctgcccgtgagcgcccagaccgccctggccgagcagcagcccaagagcatgaagagccccgccagccccgagcccggcttctgcgccaccctgtgccccatggtggagatcccccccaaggacatcatggccgagctggagagcgaggacatcctgatccccgaggagagcgtgatccaggaggagatcgccgaggaggtggagaccagcatctgcgagtgccaggacgagaaccacaagaccatccccgagttcagcgaggaggccgagagcctgaccaacagccacgaggagccccagatcgccccccccgaggacaacctggagagctgcgtgatgatgaacgacgtgctggagaccctgccccacatcgaggtgaagatcgagggcaagagcgagagcccccaggaggagatgaccgtggtgatcgaccagctggaggtgtgcgacagcctgatccccagcaccagcagcatgacccacgtgagcgacaccgagcacaaggagagcgagaccgccgtggagaccagcacccccaagatcaagaccggcagcagcagcctggagggccagttccccaacgagggcatcgccatcgacatggagctgcagagcgaccccgaggagcagctgagcgagaacgcctgcatcagcgagaccagcttcagcagcgagagccccgagggcgcctgcaccagcctgcccagccccggcggcgagacccagagcaccagcgaggagagctgcacccccgccagcctggagaccaccttctgcagcgaggtgagcagcaccgagaacaccgacaagtacaaccagagaaacagcaccgacgagaacttccacgccagcctgatgagcgagatcagccccatcagcaccagccccgagatcagcgaggccagcctgatgagcaacctgcccctgaccagcgaggccagccccgtgagcaacctgcccctgaccagcgagaccagccccatgagcgacctgcccctgaccagcgagaccagcagcgtgagcagcatgctgctgaccagcgagaccaccttcgtgagcagcctgcccctgcccagcgagaccagccccatcagcaacagcagcatcaacgagagaatggcccaccagcagagaaagagccccagcgtgagcgaggagcccctgagcccccagaaggacgagagcagcgccaccgccaagcccctgggcgagaacctgaccagccagcagaagaacctgagcaacacccccgagcccatcatcatgagcagcagcagcatcgcccccgaggccttccccagcgaggacctgcacaacaagaccctgagccagcagacctgcaagagccacgtggacaccgagaagccctaccccgccagcatccccgagctggccagcaccgagatgatcaaggtgaagaaccacagcgtgctgcagagaaccgagaagaaggtgctgcccagccccctggagctgagcgtgttcagcgagggcaccgacaacaagggcaacgagctgcccagcgccaagctgcaggacaagcagtacatcagcagcgtggacaaggcccccttcagcgagggcagcagaaacaagacccacaagcagggcagcacccagagcagactggagaccagccacaccagcaagagcagcgagcccagcaagagccccgacggcatcagaaacgagagcagagacagcgagatcagcaagagaaagaccgccgagcagcacagcttcggcatctgcaaggagaagagagccagaatcgaggacgaccagagcaccagaaacatcagcagcagcagcccccccgagaaggagcagccccccagagaggagcccagagtgccccccctgaagatccagctgagcaagatcggcccccccttcatcatcaagagccagcccgtgagcaagcccgagagcagagccagcaccagcaccagcgtgagcggcggcagaaacaccggcgccagaaccctggccgacatcaaggccagagcccagcaggccagagcccagagagaggccgccgccgccgccgccgtggccgccgccgccagcatcgtgagcggcgccatgggcagccccggcgagggcggcaagaccagaaccctggcccacatcaaggagcagaccaaggccaagctgttcgccaagcaccaggccagagcccacctgttccagaccagcaaggagaccagactgcccccccccctgagcagcaaggagggcccccccaacctggaggtgagcagcacccccgagaccaagatggagggcagcaccggcgtgatcatcgtgaaccccaactgcagaagccccagcaacaagagcgcccacctgagagagaccaccaccgtgctgcagcagagcctgaaccccagcaagctgcccgagaccgccaccgacctgagcgtgcacagcagcgacgagaacatccccgtgagccacctgagcgagaagatcgtgagcagcaccagcagcgagaacagcagcgtgcccatgctgttcaacaagaacagcgtgcccgtgagcgtgtgcagcaccgccatcagcggcgccatcaaggagcaccccttcgtgagcagcgtggacaagagcagcgtgctgatgagcgtggacagcgccaacaccaccatcagcgcctgcaacatcagcatgctgaagaccatccagggcaccgacaccccctgcatcgccatcatccccaagtgcatcgagagcacccccatcagcgccaccaccgagggcagcagcatcagcagcagcatggacgacaagcagctgctgatcagcagcagcagcgccagcaacctggtgagcacccagtacaccagcgtgcccacccccagcatcggcaacaacctgcccaacctgagcaccagcagcgtgctgatcccccccatgggcatcaacaacagattccccagcgagaagatcgccatccccggcagcgaggagcaggccaccgtgagcatgggcaccaccgtgagagccgccctgagctgcagcgacagcgtggccgtgaccgacagcctggtggcccaccccaccgtggccatgttcaccggcaacatgctgaccatcaacagctacgacagcccccccaagctgagcgccgagagcctggacaagaacagcggccccagaaacagagccgacaacagcggcaagccccagcagccccccggcggcttcgcccccgccgccatcaacagaagcatcccctgcaaggtgatcgtggaccacagcaccaccctgaccagcagcctgagcctgaccgtgagcgtggagagcagcgaggccagcctggacctgcagggcagacccgtgagaaccgaggccagcgtgcagcccgtggcctgcccccaggtgagcgtgatcagcagacccgagcccgtggccaacgagggcatcgaccacagcagcaccttcatcgccgccagcgccgccaagcaggacagcaagaccctgcccgccacctgcaccagcctgagagagctgcccctggtgcccgacaagctgaacgagcccaccgcccccagccacaacttcgccgagcaggccagaggccccgcccccttcaagagcgaggccgacaccacctgcagcaaccagtacaaccccagcaacagaatctgctggaacgacgacggcatgagaagcaccggccagcccctggtgacccacagcggcagcagcaagcagaaggagtacctggagcagagctgccccaaggccatcaagaccgagcacgccaactacctgaacgtgagcgagctgcaccccagaaacctggtgaccaacgtggccctgcccgtgaagagcgagctgcacgaggccgacaagggcttcagaatggacaccgaggacttccccggccccgagctgcccccccccgccgccgagggcgccagcagcgtgcagcagacccagaacatgaaggccagcaccagcagccccatggaggaggccatcagcctggccaccgacgccctgaagagagtgcccggcgccggcagcagcggctgcagactgagcagcgtggaggccaacaaccccctggtgacccagctgctgcagggcaacctgcccctggagaaggtgctgccccagcccagactgggcgccaagctggagatcaacagactgcccctgcccctgcagaccaccagcgtgggcaagaccgcccccgagagaaacgtggagatcccccccagcagccccaaccccgacggcaagggctacctggccggcaccctggcccccctgcagatgagaaagagagagaaccaccccaagaagagagtggccagaaccgtgggcgagcacacccaggtgaagtgcgagcccggcaagctgctggtggagcccgacgtgaagggcgtgccctgcgtgatcagcagcggcatcagccagctgggccacagccagcccttcaagcaggagtggctgaacaagcacagcatgcagaacagaatcgtgcacagccccgaggtgaagcagcagaagagactgctgcccagctgcagcttccagcagaacctgttccacgtggacaagaacggcggcttccacaccgacgccggcaccagccacagacagcagttctaccagatgcccgtggccgccagaggccccatccccaccgccgccctgctgcaggccagcagcaagacccccgtgggctgcaacgccttcgccttcaacagacacctggagcagaagggcctgggcgaggtgagcctgagcagcgccccccaccagctgagactggccaacatgctgagccccaacatgcccatgaaggagggcgacgaggtgggcggcaccgcccacaccatgcccaacaaggccctggtgcacccccccccccccccccccccccccccccccccccccctggccctgcccccccccccccccccccccccccccctgcccccccccctgcccaacgccgaggtgcccagcgaccagaagcagccccccgtgaccatggagaccaccaagagactgagctggccccagagcaccggcatctgcagcaacatcaagagcgagcccctgagcttcgaggagggcctgagcagcagctgcgagctgggcatgaagcaggtgagctacgaccagaacgagatgaaggagcagctgaaggccttcgccctgaagagcgccgacttcagcagctacctgctgagcgagccccagaagcccttcacccagctggccgcccagaagatgcaggtgcagcagcagcagcagctgtgcggcaactaccccaccatccacttcggcagcaccagcttcaagagagccgccagcgccatcgagaagagcatcggcatcctgggcagcggcagcaaccccgccaccggcctgagcggccagaacgcccagatgcccgtgcagaacttcgccgacagcagcaacgccgacgagctggagctgaagtgcagctgcagactgaaggccatgatcgtgtgcaagggctgcggcgccttctgccacgacgactgcatcggccccagcaagctgtgcgtggcctgcctggtggtgagatag

SEQ ID NO: 71979 - DNA, 2307 bp, synthetic construct
  misc_feature 1..2307: note = Description of Artificial Sequence: Synthetic coding sequence
  source 1..2307: mol_type = other DNA
atgaacggcgacagcagagccgccgtggtgaccagccccccccccaccaccgccccccacaaggagagatacttcgacagagtggacgagaacaaccccgagtacctgagagagagaaacatggcccccgacctgagacaggacttcaacatgatggagcagaagaagagagtgagcatgatcctgcagagccccgccttctgcgaggagctggagagcatgatccaggagcagttcaagaagggcaagaaccccaccggcctgctggccctgcagcagatcgccgacttcatgaccaccaacgtgcccaacgtgtaccccgccgccccccagggcggcatggccgccctgaacatgagcctgggcatggtgacccccgtgaacgacctgagaggcagcgacagcatcgcctacgacaagggcgagaagctgctgagatgcaagctggccgccttctacagactggccgacctgttcggctggagccagctgatctacaaccacatcaccaccagagtgaacagcgagcaggagcacttcctgatcgtgcccttcggcctgctgtacagcgaggtgaccgccagcagcctggtgaagatcaacctgcagggcgacatcgtggacagaggcagcaccaacctgggcgtgaaccaggccggcttcaccctgcacagcgccatctacgccgccagacccgacgtgaagtgcgtggtgcacatccacacccccgccggcgccgccgtgagcgccatgaagtgcggcctgctgcccatcagccccgaggccctgagcctgggcgaggtggcctaccacgactaccacggcatcctggtggacgaggaggagaaggtgctgatccagaagaacctgggccccaagagcaaggtgctgatcctgagaaaccacggcctggtgagcgtgggcgagagcgtggaggaggccttctactacatccacaacctggtggtggcctgcgagatccaggtgagaaccctggccagcgccggcggccccgacaacctggtgctgctgaaccccgagaagtacaaggccaagagcagaagccccggcagccccgtgggcgagggcaccggcagcccccccaagtggcagatcggcgagcaggagttcgaggccctgatgagaatgctggacaacctgggctacagaaccggctacccctacagataccccgccctgagagagaagagcaagaagtacagcgacgtggaggtgcccgccagcgtgaccggctacagcttcgccagcgacggcgacagcggcacctgcagccccctgagacacagcttccagaagcagcagagagagaagaccagatggctgaacagcggcagaggcgacgaggccagcgaggagggccagaacggcagcagccccaagagcaagaccaaggtgtggaccaacatcacccacgaccacgtgaagcccctgctgcagagcctgagcagcggcgtgtgcgtgcccagctgcatcaccaactgcctgtggaccaaggaggacggccacagaaccagcaccagcgccgtgcccaacctgttcgtgcccctgaacaccaaccccaaggaggtgcaggagatgagaaacaagatcagagagcagaacctgcaggacatcaagaccgccggcccccagagccaggtgctgtgcggcgtggtgatggacagaagcctggtgcagggcgagctggtgaccgccagcaaggccatcatcgagaaggagtaccagccccacgtgatcgtgagcaccaccggccccaaccccttcaccaccctgaccgacagagagctggaggagtacagaagagaggtggagagaaagcagaagggcagcgaggagaacctggacgaggccagagagcagaaggagaagagcccccccgaccagcccgccgtgccccaccccccccccagcacccccatcaagctggaggaggacctggtgcccgagcccaccaccggcgacgacagcgacgccgccaccttcaagcccaccctgcccgacctgagccccgacgagcccagcgaggccctgggcttccccatgctggagaaggaggaggaggcccacagaccccccagccccaccgaggcccccaccgaggccagccccgagcccgcccccgaccccgcccccgtggccgaggaggccgcccccagcgccgtggaggagggcgccgccgccgaccccggcagcgacggcagccccggcaagagccccagcaagaagaagaagaagttcagaacccccagcttcctgaagaagagcaagaagaagagcgacagctag

SEQ ID NO: 71980 - DNA, 1989 bp, synthetic construct
  misc_feature 1..1989: note = Description of Artificial Sequence: Synthetic coding sequence
  source 1..1989: mol_type = other DNA
atgaacggcgacagcagagccgccgtggtgaccagccccccccccaccaccgccccccacaaggagagatacttcgacagagtggacgagaacaaccccgagtacctgagagagagaaacatggcccccgacctgagacaggacttcaacatgatggagcagaagaagagagtgagcatgatcctgcagagccccgccttctgcgaggagctggagagcatgatccaggagcagttcaagaagggcaagaaccccaccggcctgctggccctgcagcagatcgccgacttcatgaccaccaacgtgcccaacgtgtaccccgccgccccccagggcggcatggccgccctgaacatgagcctgggcatggtgacccccgtgaacgacctgagaggcagcgacagcatcgcctacgacaagggcgagaagctgctgagatgcaagctggccgccttctacagactggccgacctgttcggctggagccagctgatctacaaccacatcaccaccagagtgaacagcgagcaggagcacttcctgatcgtgcccttcggcctgctgtacagcgaggtgaccgccagcagcctggtgaagatcaacctgcagggcgacatcgtggacagaggcagcaccaacctgggcgtgaaccaggccggcttcaccctgcacagcgccatctacgccgccagacccgacgtgaagtgcgtggtgcacatccacacccccgccggcgccgccgtgagcgccatgaagtgcggcctgctgcccatcagccccgaggccctgagcctgggcgaggtggcctaccacgactaccacggcatcctggtggacgaggaggagaaggtgctgatccagaagaacctgggccccaagagcaaggtgctgatcctgagaaaccacggcctggtgagcgtgggcgagagcgtggaggaggccttctactacatccacaacctggtggtggcctgcgagatccaggtgagaaccctggccagcgccggcggccccgacaacctggtgctgctgaaccccgagaagtacaaggccaagagcagaagccccggcagccccgtgggcgagggcaccggcagcccccccaagtggcagatcggcgagcaggagttcgaggccctgatgagaatgctggacaacctgggctacagaaccggctacccctacagataccccgccctgagagagaagagcaagaagtacagcgacgtggaggtgcccgccagcgtgaccggctacagcttcgccagcgacggcgacagcggcacctgcagccccctgagacacagcttccagaagcagcagagagagaagaccagatggctgaacagcggcagaggcgacgaggccagcgaggagggccagaacggcagcagccccaagagcaagaccaagtggaccaaggaggacggccacagaaccagcaccagcgccgtgcccaacctgttcgtgcccctgaacaccaaccccaaggaggtgcaggagatgagaaacaagatcagagagcagaacctgcaggacatcaagaccgccggcccccagagccaggtgctgtgcggcgtggtgatggacagaagcctggtgcaggacgcccccctgagcgactgcaccgagaccatcgagggcctggagctgaccgagcagaccttcagccccgccaagagcctgagcttcagaaagggcgagctggtgaccgccagcaaggccatcatcgagaaggagtaccagccccacgtgatcgtgagcaccaccggccccaaccccttcaccaccctgaccgacagagagctggaggagtacagaagagaggtggagagaaagcagaagggcagcgaggagaacctggacgaggccagagagcagaaggagaagagcccccccgaccagcccgccgtgccccaccccccccccagcacccccatcaagctggaggagggcgacggctgcgccagagagtacctgctgccctag

SEQ ID NO: 71981 - DNA, 1989 bp, synthetic construct
  misc_feature 1..1989: note = Description of Artificial Sequence: Synthetic coding sequence
  source 1..1989: mol_type = other DNA
atgaacggcgacagcagagccgccgtggtgaccagccccccccccaccaccgccccccacaaggagagatacttcgacagagtggacgagaacaaccccgagtacctgagagagagaaacatggcccccgacctgagacaggacttcaacatgatggagcagaagaagagagtgagcatgatcctgcagagccccgccttctgcgaggagctggagagcatgatccaggagcagttcaagaagggcaagaaccccaccggcctgctggccctgcagcagatcgccgacttcatgaccaccaacgtgcccaacgtgtaccccgccgccccccagggcggcatggccgccctgaacatgagcctgggcatggtgacccccgtgaacgacctgagaggcagcgacagcatcgcctacgacaagggcgagaagctgctgagatgcaagctggccgccttctacagactggccgacctgttcggctggagccagctgatctacaaccacatcaccaccagagtgaacagcgagcaggagcacttcctgatcgtgcccttcggcctgctgtacagcgaggtgaccgccagcagcctggtgaagatcaacctgcagggcgacatcgtggacagaggcagcaccaacctgggcgtgaaccaggccggcttcaccctgcacagcgccatctacgccgccagacccgacgtgaagtgcgtggtgcacatccacacccccgccggcgccgccgtgagcgccatgaagtgcggcctgctgcccatcagccccgaggccctgagcctgggcgaggtggcctaccacgactaccacggcatcctggtggacgaggaggagaaggtgctgatccagaagaacctgggccccaagagcaaggtgctgatcctgagaaaccacggcctggtgagcgtgggcgagagcgtggaggaggccttctactacatccacaacctggtggtggcctgcgagatccaggtgagaaccctggccagcgccggcggccccgacaacctggtgctgctgaaccccgagaagtacaaggccaagagcagaagccccggcagccccgtgggcgagggcaccggcagcccccccaagtggcagatcggcgagcaggagttcgaggccctgatgagaatgctggacaacctgggctacagaaccggctacccctacagataccccgccctgagagagaagagcaagaagtacagcgacgtggaggtgcccgccagcgtgaccggctacagcttcgccagcgacggcgacagcggcacctgcagccccctgagacacagcttccagaagcagcagagagagaagaccagatggctgaacagcggcagaggcgacgaggccagcgaggagggccagaacggcagcagccccaagagcaagaccaaggtgtggaccaacatcacccacgaccacgtgaagcccctgctgcagagcctgagcagcggcgtgtgcgtgcccagctgcatcaccaactgcctgtggaccaaggaggacggccacagaaccagcaccagcgccgtgcccaacctgttcgtgcccctgaacaccaaccccaaggaggtgcaggagatgagaaacaagatcagagagcagaacctgcaggacatcaagaccgccggcccccagagccaggtgctgtgcggcgtggtgatggacagaagcctggtgcagggcgagctggtgaccgccagcaaggccatcatcgagaaggagtaccagccccacgtgatcgtgagcaccaccggccccaaccccttcaccaccctgaccgacagagagctggaggagtacagaagagaggtggagagaaagcagaagggcagcgaggagaacctggacgaggccagagagcagaaggagaagagcccccccgaccagcccgccgtgccccaccccccccccagcacccccatcaagctggaggagggcgacggctgcgccagagagtacctgctgccctag

SEQ ID NO: 71982 - DNA, 1203 bp, synthetic construct
  misc_feature 1..1203: note = Description of Artificial Sequence: Synthetic coding sequence
  source 1..1203: mol_type = other DNA
atgaacggcgacagcagagccgccgtggtgaccagccccccccccaccaccgccccccacaaggagagatacttcgacagagtggacgagaacaaccccgagtacctgagagagagaaacatggcccccgacctgagacaggacttcaacatgatggagcagaagaagagagtgagcatgatcctgcagagccccgccttctgcgaggagctggagagcatgatccaggagcagttcaagaagggcaagaaccccaccggcctgctggccctgcagcagatcgccgacttcatgaccaccaacgtgcccaacgtgtaccccgccgccccccagggcggcatggccgccctgaacatgagcctgggcatggtgacccccgtgaacgacctgagaggcagcgacagcatcgcctacgacaagggcgagaagctgctgagatgcaagctggccgccttctacagactggccgacctgttcggctggagccagctgatctacaaccacatcaccaccagagtgaacagcgagcaggagcacttcctgatcgtgcccttcggcctgctgtacagcgaggtgaccgccagcagcctggtgaagatcaacctgcagggcgacatcgtggacagaggcagcaccaacctgggcgtgaaccaggccggcttcaccctgcacagcgccatctacgccgccagacccgacgtgaagtgcgtggtgcacatccacacccccgccggcgccgccgtgagcgccatgaagtgcggcctgctgcccatcagccccgaggccctgagcctgggcgaggtggcctaccacgactaccacggcatcctggtggacgaggaggagaaggtgctgatccagaagaacctgggccccaagagcaaggtgctgatcctgagaaaccacggcctggtgagcgtgggcgagagcgtggaggaggccttctactacatccacaacctggtggtggcctgcgagatccaggtgagaaccctggccagcgccggcggccccgacaacctggtgctgctgaaccccgagaagtacaaggccaagagcagaagccccggcagccccgtgggcgagggcaccggcagcccccccaagtggcagatcggcgagcaggagttcgaggccctgatgagaatgctggacaacctgggctacagaaccagcagcagcggcagaagacaggacggctag

SEQ ID NO: 71983 - DNA, 1989 bp, synthetic construct; identical to SEQ ID NO: 71981
  misc_feature 1..1989: note = Description of Artificial Sequence: Synthetic coding sequence
  source 1..1989: mol_type = other DNA

SEQ ID NO: 71984 - DNA, 2214 bp, synthetic construct
  misc_feature 1..2214: note = Description of Artificial Sequence: Synthetic coding sequence
  source 1..2214: mol_type = other DNA
atgaacggcgacagcagagccgccgtggtgaccagccccccccccaccaccgccccccacaaggagagatacttcgacagagtggacgagaacaaccccgagtacctgagagagagaaacatggcccccgacctgagacaggacttcaacatgatggagcagaagaagagagtgagcatgatcctgcagagccccgccttctgcgaggagctggagagcatgatccaggagcagttcaagaagggcaagaaccccaccggcctgctggccctgcagcagatcgccgacttcatgaccaccaacgtgcccaacgtgtaccccgccgccccccagggcggcatggccgccctgaacatgagcctgggcatggtgacccccgtgaacgacctgagaggcagcgacagcatcgcctacgacaagggcgagaagctgctgagatgcaagctggccgccttctacagactggccgacctgttcggctggagccagctgatctacaaccacatcaccaccagagtgaacagcgagcaggagcacttcctgatcgtgcccttcggcctgctgtacagcgaggtgaccgccagcagcctggtgaagatcaacctgcagggcgacatcgtggacagaggcagcaccaacctgggcgtgaaccaggccggcttcaccctgcacagcgccatctacgccgccagacccgacgtgaagtgcgtggtgcacatccacacccccgccggcgccgccgtgagcgccatgaagtgcggcctgctgcccatcagccccgaggccctgagcctgggcgaggtggcctaccacgactaccacggcatcctggtggacgaggaggagaaggtgctgatccagaagaacctgggccccaagagcaaggtgctgatcctgagaaaccacggcctggtgagcgtgggcgagagcgtggaggaggccttctactacatccacaacctggtggtggcctgcgagatccaggtgagaaccctggccagcgccggcggccccgacaacctggtgctgctgaaccccgagaagtacaaggccaagagcagaagccccggcagccccgtgggcgagggcaccggcagcccccccaagtggcagatcggcgagcaggagttcgaggccctgatgagaatgctggacaacctgggctacagaaccggctacccctacagataccccgccctgagagagaagagcaagaagtacagcgacgtggaggtgcccgccagcgtgaccggctacagcttcgccagcgacggcgacagcggcacctgcagccccctgagacacagcttccagaagcagcagagagagaagaccagatggctgaacagcggcagaggcgacgaggccagcgaggagggccagaacggcagcagccccaagagcaagaccaagtggaccaaggaggacggccacagaaccagcaccagcgccgtgcccaacctgttcgtgcccctgaacaccaaccccaaggaggtgcaggagatgagaaacaagatcagagagcagaacctgcaggacatcaagaccgccggcccccagagccaggtgctgtgcggcgtggtgatggacagaagcctggtgcagggcgagctggtgaccgccagcaaggccatcatcgagaaggagtaccagccccacgtgatcgtgagcaccaccggccccaaccccttcaccaccctgaccgacagagagctggaggagtacagaagagaggtggagagaaagcagaagggcagcgaggagaacctggacgaggccagagagcagaaggagaagagcccccccgaccagcccgccgtgccccaccccccccccagcacccccatcaagctggaggaggacctggtgcccgagcccaccaccggcgacgacagcgacgccgccaccttcaagcccaccctgcccgacctgagccccgacgagcccagcgaggccctgggcttccccatgctggagaaggaggaggaggcccacagaccccccagccccaccgaggcccccaccgaggccagccccgagcccgcccccgaccccgcccccgtggccgaggaggccgcccccagcgccgtggaggagggcgccgccgccgaccccggcagcgacggcagccccggcaagagccccagcaagaagaagaagaagttcagaacccccagcttcctgaagaagagcaagaagaagagcgacagctag

SEQ ID NO: 71985 - DNA, 2214 bp, synthetic construct; identical to SEQ ID NO: 71984
  misc_feature 1..2214: note = Description of Artificial Sequence: Synthetic coding sequence
  source 1..2214: mol_type = other DNA

SEQ ID NO: 71986 - DNA, 414 bp, synthetic construct
  misc_feature 1..414: note = Description of Artificial Sequence: Synthetic coding sequence
  source 1..414: mol_type = other DNA
atgaacggcgacagcagagccgccgtggtgaccagccccccccccaccaccgccccccacaaggagagatacttcgacagagtggacgagaacaaccccgagtacctgagagagagaaacatggcccccgacctgagacaggacttcaacatgatggagcagaagaagagagtgagcatgatcctgcagagccccgccttctgcgaggagctggagagcatgatccaggagcagttcaagaagggcaagaaccccaccggcctgctggccctgcagcagatcgccgacttcatgaccaccaacgtgcccaacgtgtaccccgccgccccccagggcggcatggccgccctgaacatgagcctgggcatggtgacccccgtgaacgacctgagaggcagcgacagcatcgcctag

SEQ ID NO: 71987 - DNA, 1899 bp, synthetic construct
  misc_feature 1..1899: note = Description of Artificial Sequence: Synthetic coding sequence
  source 1..1899: mol_type = other DNA
atgaacggcgacagcagagccgccgtggtgaccagccccccccccaccaccgccccccacaaggagagatacttcgacagagtggacgagaacaaccccgagtacctgagagagagaaacatggcccccgacctgagacaggacttcaacatgatggagcagaagaagagagtgagcatgatcctgcagagccccgccttctgcgaggagctggagagcatgatccaggagcagttcaagaagggcaagaaccccaccggcctgctggccctgcagcagatcgccgacttcatgaccaccaacgtgcccaacgtgtaccccgccgccccccagggcggcatggccgccctgaacatgagcctgggcatggtgacccccgtgaacgacctgagaggcagcgacagcatcgcctacgacaagggcgagaagctgctgagatgcaagctggccgccttctacagactggccgacctgttcggctggagccagctgatctacaaccacatcaccaccagagtgaacagcgagcaggagcacttcctgatcgtgcccttcggcctgctgtacagcgaggtgaccgccagcagcctggtgaagatcaacctgcagggcgacatcgtggacagaggcagcaccaacctgggcgtgaaccaggccggcttcaccctgcacagcgccatctacgccgccagacccgacgtgaagtgcgtggtgcacatccacacccccgccggcgccgccgtgagcgccatgaagtgcggcctgctgcccatcagccccgaggccctgagcctgggcgaggtggcctaccacgactaccacggcatcctggtggacgaggaggagaaggtgctgatccagaagaacctgggccccaagagcaaggtgctgatcctgagaaaccacggcctggtgagcgtgggcgagagcgtggaggaggccttctactacatccacaacctggtggtggcctgcgagatccaggtgagaaccctggccagcgccggcggccccgacaacctggtgctgctgaaccccgagaagtacaaggccaagagcagaagccccggcagccccgtgggcgagggcaccggcagcccccccaagtggcagatcggcgagcaggagttcgaggccctgatgagaatgctggacaacctgggctacagaaccggctacccctacagataccccgccctgagagagaagagcaagaagtacagcgacgtggaggtgcccgccagcgtgaccggctacagcttcgccagcgacggcgacagcggcacctgcagccccctgagacacagcttccagaagcagcagagagagaagaccagatggctgaacagcggcagaggcgacgaggccagcgaggagggccagaacggcagcagccccaagagcaagaccaagtggaccaaggaggacggccacagaaccagcaccagcgccgtgcccaacctgttcgtgcccctgaacaccaaccccaaggaggtgcaggagatgagaaacaagatcagagagcagaacctgcaggacatcaagaccgccggcccccagagccaggtgctgtgcggcgtggtgatggacagaagcctggtgcagggcgagctggtgaccgccagcaaggccatcatcgagaaggagtaccagccccacgtgatcgtgagcaccaccggccccaaccccttcaccaccctgaccgacagagagctggaggagtacagaagagaggtggagagaaagcagaagggcagcgaggagaacctggacgaggccagagagcagaaggagaagagcccccccgaccagcccgccgtgccccaccccccccccagcacccccatcaagctggaggaggccggcgacggctgcgccagagagtacctgctgccctag

SEQ ID NO: 71988 - DNA, 1335 bp, synthetic construct
  misc_feature 1..1335: note = Description of Artificial Sequence: Synthetic coding sequence
  source 1..1335: mol_type = other DNA
tgagtgctgatcctgagaaaccacggcctggtgagcgtgggcgagagcgtggaggaggccttctactacatccacaacctggtggtggcctgcgagatccaggtgagaaccctggccagcgccggcggccccgacaacctggtgctgctgaaccccgagaagtacaaggccaagagcagaagccccggcagccccgtgggcgagggcaccggcagcccccccaagtggcagatcggcgagcaggagttcgaggccctgatgagaatgctggacaacctgggctacagaaccggctacccctacagataccccgccctgagagagaagagcaagaagtacagcgacgtggaggtgcccgccagcgtgaccggctacagcttcgccagcgacggcgacagcggcacctgcagccccctgagacacagcttccagaagcagcagagagagaagaccagatggctgaacagcggcagaggcgacgaggccagcgaggagggccagaacggcagcagccccaagagcaagaccaaggtgtggaccaacatcacccacgaccacgtgaagcccctgctgcagagcctgagcagcggcgtgtgcgtgcccagctgcatcaccaactgcctgtggaccaaggaggacggccacagaaccagcaccagcgccgtgcccaacctgttcgtgcccctgaacaccaaccccaaggaggtgcaggagatgagaaacaagatcagagagcagaacctgcaggacatcaagaccgccggcccccagagccaggtgctgtgcggcgtggtgatggacagaagcctggtgcagggcgagctggtgaccgccagcaaggccatcatcgagaaggagtaccagccccacgtgatcgtgagcaccaccggccccaaccccttcaccaccctgaccgacagagagctggaggagtacagaagagaggtggagagaaagcagaagggcagcgaggagaacctggacgaggccagagagcagaaggagaagagcccccccgaccagcccgccgtgccccaccccccccccagcacccccatcaagctggaggaggacctggtgcccgagcccaccaccggcgacgacagcgacgccgccaccttcaagcccaccctgcccgacctgagccccgacgagcccagcgaggccctgggcttccccatgctggagaaggaggaggaggcccacagaccccccagccccaccgaggcccccaccgaggccagccccgagcccgcccccgaccccgcccccgtggccgaggaggccgcccccagcgccgtggaggagggcgccgccgccgaccccggcagctag

SEQ ID NO: 71989 - DNA, 2181 bp, synthetic construct
  misc_feature 1..2181: note = Description of Artificial Sequence: Synthetic coding sequence
  source 1..2181: mol_type = other DNA
atgagcgaggagaccgtgcccgaggccgccagccccccccccccccagggccagccctacttcgacagattcagcgaggacgaccccgagtacatgagactgagaaacagagccgccgacctgagacaggacttcaacctgatggagcagaagaagagagtgaccatgatcctgcagagccccagcttcagagaggagctggagggcctgatccaggagcagatgaagaagggcaacaacagcagcaacatctgggccctgagacagatcgccgacttcatggccagcaccagccacgccgtgttccccaccagcagcatgaacgtgagcatgatgacccccatcaacgacctgcacaccgccgacagcctgaacctggccaagggcgagagactgatgagatgcaagatcagcagcgtgtacagactgctggacctgtacggctgggcccagctgagcgacacctacgtgaccctgagagtgagcaaggagcaggaccacttcctgatcagccccaagggcgtgagctgcagcgaggtgaccgccagcagcctgatcaaggtgaacatcctgggcgaggtggtggagaagggcagcagctgcttccccgtggacaccaccggcttctgcctgcacagcgccatctacgccgccagacccgacgtgagatgcatcatccacctgcacacccccgccaccgccgccgtgagcgccatgaagtggggcctgctgcccgtgagccacaacgccctgctggtgggcgacatggcctactacgacttcaacggcgagatggagcaggaggccgacagaatcaacctgcagaagtgcctgggccccacctgcaagatcctggtgctgagaaaccacggcgtggtggccctgggcgacaccgtggaggaggccttctacaagatcttccacctgcaggccgcctgcgagatccaggtgagcgccctgagcagcgccggcggcgtggagaacctgatcctgctggagcaggagaagcacagaccccacgaggtgggcagcgtgcagtgggccggcagcaccttcggccccatgcagaagagcagactgggcgagcacgagttcgaggccctgatgagaatgctggacaacctgggctacagaaccggctacacctacagacaccccttcgtgcaggagaagaccaagcacaagagcgaggtggagatccccgccaccgtgaccgccttcgtgttcgaggaggacggcgcccccgtgcccgccctgagacagcacgcccagaagcagcagaaggagaagaccagatggctgaacacccccaacacctacctgagagtgaacgtggccgacgaggtgcagagaagcatgggcagccccagacccaagaccacctggatgaaggccgacgaggtggagaagagcagcagcggcatgcccatcagaatcgagaaccccaaccagttcgtgcccctgtacaccgacccccaggaggtgctggagatgagaaacaagatcagagagcagaacagacaggacgtgaagagcgccggcccccagagccagctgctggccagcgtgatcgccgagaagagcagaagccccagcaccgagagccagctgatgagcaagggcgacgaggacaccaaggacgacagcgaggagaccgtgcccaaccccttcagccagctgaccgaccaggagctggaggagtacaagaaggaggtggagagaaagaagctggagctggacggcgagaaggagaccgcccccgaggagcccggcagccccgccaagagcgcccccgccagccccgtgcagagccccgccaaggaggccgagaccaagagccccctggtgagccccagcaagagcctggaggagggcaccaagaagaccgagaccagcaaggccgccaccaccgagcccgagaccacccagcccgagggcgtggtggtgaacggcagagaggaggagcagaccgccgaggagatcctgagcaagggcctgagccagatgaccaccagcgccgacaccgacgtggacaccagcaaggacaagaccgagagcgtgaccagcggccccatgagccccgagggcagccccagcaagagccccagcaagaagaagaagaagttcagaacccccagcttcctgaagaagagcaagaagaaggagaaggtggagagctag

SEQ ID NO: 71990 - DNA, 297 bp, synthetic construct
  misc_feature 1..297: note = Description of Artificial Sequence: Synthetic coding sequence
  source 1..297: mol_type = other DNA
atgagcgaggagaccgtgcccgaggccgccagccccccccccccccagggccagccctacttcgacagattcagcgaggacgaccccgagtacatgagactgagaaacagagccgccgacctgagacaggacttcaacctgatggagcagaagaagagagtgaccatgatcctgcagagccccagcttcagagaggagctggagggcctgatccaggagcagatgaagaaggagtacaagaaggaggtggagagaaagaagctggagctggacgcccccggctggttcagcagctag

SEQ ID NO: 71991 - DNA, 1764 bp, synthetic construct
  misc_feature 1..1764: note = Description of Artificial Sequence: Synthetic coding sequence
  source 1..1764: mol_type = other DNA
atgagcgaggagaccgtgcccgaggccgccagccccccccccccccagggccagccctacttcgacagattcagcgaggacgaccccgagtacatgagactgagaaacagagccgccgacctgagacaggacttcaacctgatggagcagaagaagagagtgaccatgatcctgcagagccccagcttcagagaggagctggagggcctgatccaggagcagatgaagaagggcaacaacagcagcaacatctgggccctgagacagatcgccgacttcatggccagcaccagccacgccgtgttccccaccagcagcatgaacgtgagcatgatgacccccatcaacgacctgcacaccgccgacagcctgaacctggccaagggcgagagactgatgagatgcaagatcagcagcgtgtacagactgctggacctgtacggctgggcccagctgagcgacacctacgtgaccctgagagtgagcaaggagcaggaccacttcctgatcagccccaagggcgtgagctgcagcgaggtgaccgccagcagcctgatcaaggtgaacatcctgggcgaggtggtggagaagggcagcagctgcttccccgtggacaccaccggcttctgcctgcacagcgccatctacgccgccagacccgacgtgagatgcatcatccacctgcacacccccgccaccgccgccgtgagcgccatgaagtggggcctgctgcccgtgagccacaacgccctgctggtgggcgacatggcctactacgacttcaacggcgagatggagcaggaggccgacagaatcaacctgcagaagtgcctgggccccacctgcaagatcctggtgctgagaaaccacggcgtggtggccctgggcgacaccgtggaggaggccttctacaagatcttccacctgcaggccgcctgcgagatccaggtgagcgccctgagcagcgccggcggcgtggagaacctgatcctgctggagcaggagaagcacagaccccacgaggtgggcagcgtgcagtgggccggcagcaccttcggccccatgcagaagagcagactgggcgagcacgagttcgaggccctgatgagaatgctggacaacctgggctacagaaccggctacacctacagacaccccttcgtgcaggagaagaccaagcacaagagcgaggtggagatccccgccaccgtgaccgccttcgtgttcgaggaggacggcgcccccgtgcccgccctgagacagcacgcccagaagcagcagaaggagaagaccagatggctgaacacccccaacacctacctgagagtgaacgtggccgacgaggtgcagagaagcatgggcagccccagacccaagaccacctggatgaaggccgacgaggtggagaagagcagcagcggcatgcccatcagaatcgagaaccccaaccagttcgtgcccctgtacaccgacccccaggaggtgctggagatgagaaacaagatcagagagcagaacagacaggacgtgaagagcgccggcccccagagccagctgctggccagcgtgatcgccgagaagagcagaagccccagcaccgagagccagctgatgagcaagggcgacgaggacaccaaggacgacagcgaggagaccgtgcccaaccccttcagccagctgaccgaccaggagctggaggagtacaagaaggaggtggagagaaagaagctggagctggacgcccccggctggttcagcagctag

SEQ ID NO: 71992 - DNA, 2181 bp, synthetic construct; identical to SEQ ID NO: 71989
  misc_feature 1..2181: note = Description of Artificial Sequence: Synthetic coding sequence
  source 1..2181: mol_type = other DNA

SEQ ID NO: 71993 - DNA, 2181 bp, synthetic construct; identical to SEQ ID NO: 71989
  misc_feature 1..2181: note = Description of Artificial Sequence: Synthetic coding sequence
  source 1..2181: mol_type = other DNA

SEQ ID NO: 71994 - DNA, 1680 bp, synthetic construct
  misc_feature 1..1680: note = Description of Artificial Sequence: Synthetic coding sequence
  source 1..1680: mol_type = other DNA
atgagcgaggagaccgtgcccgaggccgccagccccccccccccccagggccagccctacttcgacagattcagcgaggacgaccccgagtacatgagactgagaaacagagccgccgacctgagacaggacttcaacctgatggagcagaagaagagagtgaccatgatcctgcagagccccagcttcagagaggagctggagggcctgatccaggagcagatgaagaagggcaacaacagcagcaacatctgggccctgagacagatcgccgacttcatggccagcaccagccacgccgtgttccccaccagcagcatgaacgtgagcatgatgacccccatcaacgacctgcacaccgccgacagcctgaacctggccaagggcgagagactgatgagatgcaagatcagcagcgtgtacagactgctggacctgtacggctgggcccagctgagcgacacctacgtgaccctgagagtgagcaaggagcaggaccacttcctgatcagccccaagggcgtgagctgcagcgaggtgaccgccagcagcctgatcaaggtgaacatcctgggcgaggtggtggagaagggcagcagctgcttccccgtggacaccaccggcttctgcctgcacagcgccatctacgccgccagacccgacgtgagatgcatcatccacctgcacacccccgccaccgccgccgtgagcgccatgaagtggggcctgctgcccgtgagccacaacgccctgctggtgggcgacatggcctactacgacttcaacggcgagatggagcaggaggccgacagaatcaacctgcagaagtgcctgggccccacctgcaagatcctggtgctgagaaaccacggcgtggtggccctgggcgacaccgtggaggaggccttctacaagatcttccacctgcaggccgcctgcgagatccaggtgagcgccctgagcagcgccggcggcgtggagaacctgatcctgctggagcaggagaagcacagaccccacgaggtgggcagcgtgcagtgggccggcagcaccttcggccccatgcagaagagcagactgggcgagcacgagttcgaggccctgatgagaatgctggacaacctgggctacagaaccggctacacctacagacaccccttcgtgcaggagaagaccaagcacaagagcgaggtggagatccccgccaccgtgaccgccttcgtgttcgaggaggacggcgcccccgtgcccgccctgagacagcacgcccagaagcagcagaaggagaagaccagatggctgaacacccccaacacctacctgagagtgaacgtggccgacgaggtgcagagaagcatgggcagccccagacccaagaccacctggatgaaggccgacgaggtggagaagagcagcagcggcatgcccatcagaatcgagaaccccaaccagttcgtgcccctgtacaccgacccccaggaggtgctggagatgagaaacaagatcagagagcagaacagacaggacgtgaagagcgccggcccccagagccagctgctggccagcgtgatcgccgagaagagcagaagccccgtggagcagagactgcccctgaccggcggcgagacctgcctgcccagcggcagcagcgtgcccggcgccggcctgcaggacccctag

SEQ ID NO: 71995 - DNA, 681 bp, synthetic construct
  misc_feature 1..681: note = Description of Artificial Sequence: Synthetic coding sequence
  source 1..681: mol_type = other DNA
atgagcgaggagaccgtgcccgaggccgccagccccccccccccccagggccagccctacttcgacagattcagcgaggacgaccccgagtacatgagactgagaaacagagccgccgacctgagacaggacttcaacctgatggagcagaagaagagagtgaccatgatcctgcagagccccagcttcagagaggagctggagggcctgatccaggagcagatgaagaagggcaacaacagcagcaacatctgggccctgagacagatcgccgacttcatggccagcaccagccacgccgtgttccccaccagcagcatgaacgtgagcatgatgacccccatcaacgacctgcacaccgccgacagcctgaacctggccaagggcgagagactgatgagatgcaagatcagcagcgtgtacagactgctggacctgtacggctgggcccagctgagcgacacctacgtgaccctgagagtgagcaaggagcaggaccacttcctgatcagccccaagggcgtgagctgcagcgaggtgaccgccagcagcctgatcaaggtgaacatcctgggcgaggtggtggagaagggcagcagctgcttccccgtggacaccaccggcttctgcctgcacagcgccatctacgccgccagacccgacgtgagatgcatcatctag

SEQ ID NO: 71996 - DNA, 432 bp, synthetic construct
  misc_feature 1..432: note = Description of Artificial Sequence: Synthetic coding sequence
  source 1..432: mol_type = other DNA
atgagcgaggagaccgtgcccgaggccgccagccccccccccccccagggccagccctacttcgacagattcagcgaggacgaccccgagtacatgagactgagaaacagagccgccgacctgagacaggacttcaacctgatggagcagaagaagagagtgaccatgatcctgcagagccccagcttcagagaggagctggagggcctgatccaggagcagatgaagaagggcaacaacagcagcaacatctgggccctgagacagatcgccgacttcatggccagcaccagccacgccgtgttccccaccagcagcatgaacgtgagcatgatgacccccatcaacgacctgcacaccgccgacagcctgaacctggccaagggcgagagactgatgagatgcaagatcagcagcgtgtacagactgtag

SEQ ID NO: 71997 - DNA, 1728 bp, synthetic construct
  misc_feature 1..1728: note = Description of Artificial Sequence: Synthetic coding sequence
  source 1..1728: mol_type = other DNA
atgcccagaagaagagtgcccggcgccaactgcaagcccaccggcaagatgagcgaggagaccgtgcccgaggccgccagccccccccccccccagggccagccctacttcgacagattcagcgaggacgaccccgagtacatgagactgagaaacagagccgccgacctgagacaggacttcaacctgatggagcagaagaagagagtgaccatgatcctgcagagccccagcttcagagaggagctggagggcctgatccaggagcagatgaagaagggcaacaacagcagcaacatctgggccctgagacagatcgccgacttcatggccagcaccagccacgccgtgttccccaccagcagcatgaacgtgagcatgatgacccccatcaacgacctgcacaccgccgacagcctgaacctggccaagggcgagagactgatgagatgcaagatcagcagcgtgtacagactgctggacctgtacggctgggcccagctgagcgacacctacgtgaccctgagagtgagcaaggagcaggaccacttcctgatcagccccaagggcgtgagctgcagcgaggtgaccgccagcagcctgatcaaggtgaacatcctgggcgaggtggtggagaagggcagcagctgcttccccgtggacaccaccggcttctgcctgcacagcgccatctacgccgccagacccgacgtgagatgcatcatccacctgcacacccccgccaccgccgccgtgagcgccatgaagtggggcctgctgcccgtgagccacaacgccctgctggtgggcgacatggcctactacgacttcaacggcgagatggagcaggaggccgacagaatcaacctgcagaagtgcctgggccccacctgcaagatcctggtgctgagaaaccacggcgtggtggccctgggcgacaccgtggaggaggccttctacaagatcttccacctgcaggccgcctgcgagatccaggtgagcgccctgagcagcgccggcggcgtggagaacctgatcctgctggagcaggagaagcacagaccccacgaggtgggcagcgtgcagtgggccggcagcaccttcggccccatgcagaagagcagactgggcgagcacgagttcgaggccctgatgagaatgctggacaacctgggctacagaaccggctacacctacagacaccccttcgtgcaggagaagaccaagcacaagagcgaggtggagatccccgccaccgtgaccgccttcgtgttcgaggaggacggcgcccccgtgcccgccctgagacagcacgcccagaagcagcagaaggagaagaccagatggctgaacacccccaacacctacctgagagtgaacgtggccgacgaggtgcagagaagcatgggcagccccagacccaagaccacctggatgaaggccgacgaggtggagaagagcagcagcggcatgcccatcagaatcgagaaccccaaccagttcgtgcccctgtacaccgacccccaggaggtgctggagatgagaaacaagatcagagagcagaacagacaggacgtgaagagcgccggcccccagagccagctgctggccagcgtgatcgccgagaagagcagaagccccgtggagcagagactgcccctgaccggcggcgagacctgcctgcccagcggcagcagcgtgcccggcgccggcctgcaggacccctag

SEQ ID NO: 71998 - DNA, 54 bp, synthetic construct
  misc_feature 1..54: note = Description of Artificial Sequence: Synthetic coding sequence
  source 1..54: mol_type = other DNA
atgagcgaggagaccgtgcccgaggccgccagccccccccccccccagggctag

SEQ ID NO: 71999 - DNA, 846 bp, synthetic construct
  misc_feature 1..846: note = Description of Artificial Sequence: Synthetic coding sequence
  source 1..846: mol_type = other DNA
atgagcgaggagaccgtgcccgaggccgccagccccccccccccccagggccagccctacttcgacagattcagcgaggacgaccccgagtacatgagactgagaaacagagccgccgacctgagacaggacttcaacctgatggagcagaagaagagagtgaccatgatcctgcagagccccagcttcagagaggagctggagggcctgatccaggagcagatgaagaagggcaacaacagcagcaacatctgggccctgagacagatcgccgacttcatggccagcaccagccacgccgtgttccccaccagcagcatgaacgtgagcatgatgacccccatcaacgacctgcacaccgccgacagcctgaacctggccaagggcgagagactgatgagatgcaagatcagcagcgtgtacagactgctggacctgtacggctgggcccagctgagcgacacctacgtgaccctgagagtgagcaaggagcaggaccacttcctgatcagccccaagggcgtgagctgcagcgaggtgaccgccagcagcctggtgagcgaggtgctggagatgagaaacaagatcagagagcagaacagacaggacgtgaagagcgccggcccccagagccagctgctggccagcgtgatcgccgagaagagcagaagccccagcaccgagagccagctgatgagcaagggcgacgaggacaccaaggacgacagcgaggagaccgtgcccaaccccttcagccagctgaccgaccaggagctggaggagtacaagaaggaggtggagagaaagaagctggagctggacgcccccggctggttcagcagctag

SEQ ID NO: 72000 - DNA, 1932 bp, synthetic construct
  misc_feature 1..1932: note = Description of Artificial Sequence: Synthetic coding sequence
  source 1..1932: mol_type = other DNA
atgagcgaggagaccgtgcccgaggccgccagccccccccccccccagggccagccctacttcgacagattcagcgaggacgaccccgagtacatgagactgagaaacagagccgccgacctgagacaggacttcaacctgatggagcagaagaagagagtgaccatgatcctgcagagccccagcttcagagaggagctggagggcctgatccaggagcagatgaagaagggcaacaacagcagcaacatctgggccctgagacagatcgccgacttcatggccagcaccagccacgccgtgttccccaccagcagcatgaacgtgagcatgatgacccccatcaacgacctgcacaccgccgacagcctgaacctggccaagggcgagagactgatgagatgcaagatcagcagcgtgtacagactgctggacctgtacggctgggcccagctgagcgacacctacgtgaccctgagagtgagcaaggagcaggaccacttcctgatcagccccaagggcgtgagctgcagcgaggtgaccgccagcagcctgatcaaggtgaacatcctgggcgaggtggtggagaagggcagcagctgcttccccgtggacaccaccggcttctgcctgcacagcgccatctacgccgccagacccgacgtgagatgcatcatccacctgcacacccccgccaccgccgccgtgagcgccatgaagtggggcctgctgcccgtgagccacaacgccctgctggtgggcgacatggcctactacgacttcaacggcgagatggagcaggaggccgacagaatcaacctgcagaagtgcctgggccccacctgcaagatcctggtgctgagaaaccacggcgtggtggccctgggcgacaccgtggaggaggccttctacaagatcttccacctgcaggccgcctgcgagatccaggtgagcgccctgagcagcgccggcggcgtggagaacctgatcctgctggagcaggagaagcacagaccccacgaggtgggcagcgtgcagtgggccggcagcaccttcggccccatgcagaagagcagactgggcgagcacgagttcgaggccctgatgagaatgctggacaacctgggctacagaaccggctacacctacagacaccccttcgtgcaggagaagaccaagcacaagagcgaggtggagatccccgccaccgtgaccgccttcgtgttcgaggaggacggcgcccccgtgcccgccctgagacagcacgcccagaagcagcagaaggagaagaccagatggctgaacacccccaacacctacctgagagtgaacgtggccgacgaggtgcagagaagcatgggcagccccagacccaagaccacctggatgaaggccgacgaggtggagaagagcagcagcggcatgcccatcagaatcgagaaccccaaccagttcgtgcccctgtacaccgacccccaggaggtgctggagatgagaaacaagatcagagagcagaacagacaggacgtgaagagcgccggcccccagagccagctgctggccagcgtgatcgccgagaagagcagaagccccagcaccgagagccagctgatgagcaagggcgacgaggacaccaaggacgacagcgaggagaccgtgcccaaccccttcagccagctgaccgaccaggagctggaggagtacaagaaggaggtggagagaaagaagctggagctggacgagaccggccaggagagagagcccggcagcggccccgccgtgtgcgagttcttcagcgtggccctgcacatctggagcaacatcctggagagaaagaagctgccccagaagagcctggcccacctgcagagcctgcacctgctgctgcagtgcagagcccagagaagaagacagagacagagagccctgtag

SEQ ID NO: 72001 - DNA, 2025 bp, synthetic construct
  misc_feature 1..2025: note = Description of Artificial Sequence: Synthetic coding sequence
  source 1..2025: mol_type = other DNA
atgagcagcgacgccagccagggcgtgatcaccaccccccccccccccagcatgccccacaaggagagatacttcgacagaatcaacgagaacgaccccgagtacatcagagagagaaacatgagccccgacctgagacaggacttcaacatgatggagcagagaaagagagtgacccagatcctgcagagccccgccttcagagaggacctggagtgcctgatccaggagcagatgaagaagggccacaaccccaccggcctgctggccctgcagcagatcgccgactacatcatggccaacagcttcagcggcttcagcagcccccccctgagcctgggcatggtgacccccatcaacgacctgcccggcgccgacaccagcagctacgtgaagggcgagaagctgaccagatgcaagctggccagcctgtacagactggtggacctgttcggctgggcccacctggccaacacctacatcagcgtgagaatcagcaaggagcaggaccacatcatcatcatccccagaggcctgagcttcagcgaggccaccgccagcaacctggtgaaggtgaacatcatcggcgaggtggtggaccagggcagcaccaacctgaagatcgaccacaccggcttcagcccccacgccgccatctacagcaccagacccgacgtgaagtgcgtgatccacatccacaccctggccaccgccgccgtgagcagcatgaagtgcggcatcctgcccatcagccaggagagcctgctgctgggcgacgtggcctactacgactaccagggcagcctggaggagcaggaggagagaatccagctgcagaaggtgctgggccccagctgcaaggtgctggtgctgagaaaccacggcgtggtggccctgggcgagaccctggaggaggccttccactacatcttcaacgtgcagctggcctgcgagatccaggtgcaggccctggccggcgccggcggcgtggacaacctgcacgtgctggacttccagaagtacaaggccttcacctacaccgtggccgccagcggcggcggcggcgtgaacatgggcagccaccagaagtggaaggtgggcgagatcgagttcgagggcctgatgagaaccctggacaacctgggctacagaaccggctacgcctacagacaccccctgatcagagagaagcccagacacaagagcgacgtggagatccccgccaccgtgaccgccttcagcttcgaggacgacaccgtgcccctgagccccctgaagtacatggcccagagacagcagagagagaagaccagatggctgaacagccccaacacctacatgaaggtgaacgtgcccgaggagagcagaaacggcgagaccagccccagaaccaagatcacctggatgaaggccgaggacagcagcaaggtgagcggcggcacccccatcaagatcgaggaccccaaccagttcgtgcccctgaacaccaaccccaacgaggtgctggagaagagaaacaagatcagagagcagaacagatacgacctgaagaccgccggcccccagagccagctgctggccggcatcgtggtggacaagccccccagcaccatgcagttcgaggacgacgaccacggcccccccgccccccccaaccccttcagccacctgaccgagggcgagctggaggagtacaagagaaccatcgagagaaagcagcagggcctggaggagaaccacgagctgttcagcaagagcttcatcagcatggaggtgcccgtgatggtggtgaacggcaaggacgacatgcacgacgtggaggacgagctggccaagagagtgagcagactgagcaccagcaccaccatcgagaacatcgagatcaccatcaagagccccgagaagatcgaggaggtgctgagccccgagggcagccccagcaagagccccagcaagaagaagaagaagttcagaacccccagcttcctgaagaagaacaagaagaaggagaaggtggaggcctag

SEQ ID NO: 72002 - DNA, 2121 bp, synthetic construct
  misc_feature 1..2121: note = Description of Artificial Sequence: Synthetic coding sequence
  source 1..2121: mol_type = other DNA
atgagcagcgacgccagccagggcgtgatcaccaccccccccccccccagcatgccccacaaggagagatacttcgacagaatcaacgagaacgaccccgagtacatcagagagagaaacatgagccccgacctgagacaggacttcaacatgatggagcagagaaagagagtgacccagatcctgcagagccccgccttcagagaggacctggagtgcctgatccaggagcagatgaagaagggccacaaccccaccggcctgctggccctgcagcagatcgccgactacatcatggccaacagcttcagcggcttcagcagcccccccctgagcctgggcatggtgacccccatcaacgacctgcccggcgccgacaccagcagctacgtgaagggcgagaagctgaccagatgcaagctggccagcctgtacagactggtggacctgttcggctgggcccacctggccaacacctacatcagcgtgagaatcagcaaggagcaggaccacatcatcatcatccccagaggcctgagcttcagcgaggccaccgccagcaacctggtgaaggtgaacatcatcggcgaggtggtggaccagggcagcaccaacctgaagatcgaccacaccggcttcagcccccacgccgccatctacagcaccagacccgacgtgaagtgcgtgatccacatccacaccctggccaccgccgccgtgagcagcatgaagtgcggcatcctgcccatcagccaggagagcctgctgctgggcgacgtggcctactacgactaccagggcagcctggaggagcaggaggagagaatccagctgcagaaggtgctgggccccagctgcaaggtgctggtgctgagaaaccacggcgtggtggccctgggcgagaccctggaggaggccttccactacatcttcaacgtgcagctggcctgcgagatccaggtgcaggccctggccggcgccggcggcgtggacaacctgcacgtgctggacttccagaagtacaaggccttcacctacaccgtggccgccagcggcggcggcggcgtgaacatgggcagccaccagaagtggaaggtgggcgagatcgagttcgagggcctgatgagaaccctggacaacctgggctacagaaccggctacgcctacagacaccccctgatcagagagaagcccagacacaagagcgacgtggagatccccgccaccgtgaccgccttcagcttcgaggacgacaccgtgcccctgagccccctgaagtacatggcccagagacagcagagagagaagaccagatggctgaacagccccaacacctacatgaaggtgaacgtgcccgaggagagcagaaacggcgagaccagccccagaaccaagatcacctggatgaaggccgaggacagcagcaaggtgagcggcggcacccccatcaagatcgaggaccccaaccagttcgtgcccctgaacaccaaccccaacgaggtgctggagaagagaaacaagatcagagagcagaacagatacgacctgaagaccgccggcccccagagccagctgctggccggcatcgtggtggacaagccccccagcaccatgcagttcgaggacgacgaccacggcccccccgccccccccaaccccttcagccacctgaccgagggcgagctggaggagtacaagagaaccatcgagagaaagcagcagggcctggaggacgccgagcaggagctgctgagcgacgacgccagcagcgtgagccagatccagagccagacccagagcccccagaacgtgcccgagaagctggaggagaaccacgagctgttcagcaagagcttcatcagcatggaggtgcccgtgatggtggtgaacggcaaggacgacatgcacgacgtggaggacgagctggccaagagagtgagcagactgagcaccagcaccaccatcgagaacatcgagatcaccatcaagagccccgagaagatcgaggaggtgctgagccccgagggcagccccagcaagagccccagcaagaagaagaagaagttcagaacccccagcttcctgaagaagaacaagaagaaggagaaggtggaggcctag

SEQ ID NO: 72003 - DNA, 2025 bp, synthetic construct; identical to SEQ ID NO: 72001
  misc_feature 1..2025: note = Description of Artificial Sequence: Synthetic coding sequence
  source 1..2025: mol_type = other DNA

SEQ ID NO: 72004 - DNA, 543 bp, synthetic construct
  misc_feature 1..543: note = Description of Artificial Sequence: Synthetic coding sequence
  source 1..543: mol_type = other DNA
atggccgacagcgagctgcagctggtggagcagagaatcagaagcttccccgacttccccacccccggcgtggtgttcagagacatcagccccgtgctgaaggaccccgccagcttcagagccgccatcggcctgctggccagacacctgaaggccacccacggcggcagaatcgactacatcgccggcctggacagcagaggcttcctgttcggccccagcctggcccaggagctgggcctgggctgcgtgctgatcagaaagagaggcaagctgcccggccccaccctgtgggccagctacagcctggagtacggcaaggccgagctggagatccagaaggacgccctggagcccggccagagagtggtggtggtggacgacctgctggccaccggcggcaccatgaacgccgcctgcgagctgctgggcagactgcaggccgaggtgctggagtgcgtgagcctggtggagctgaccagcctgaagggcagagagaagctggcccccgtgcccttcttcagcctgctgcagtacgagtag

SEQ ID NO: 72005 - DNA, 405 bp, synthetic construct
  misc_feature 1..405: note = Description of Artificial Sequence: Synthetic coding sequence
  source 1..405: mol_type = other DNA
atggccgacagcgagctgcagctggtggagcagagaatcagaagcttccccgacttccccacccccggcgtggtgttcagagacatcagccccgtgctgaaggaccccgccagcttcagagccgccatcggcctgctggccagacacctgaaggccacccacggcggcagaatcgactacatcgccggcctggacagcagaggcttcctgttcggccccagcctggcccaggagctgggcctgggctgcgtgctgatcagaaagagaggcaagctgcccggccccaccctgtgggccagctacagcctggagtacggcaaggccgagctggagatccagaaggacgccctggagcccggccagagagtggtggtggtggacgacctgctggccaccggcgtgtag

SEQ ID NO: 72006 - DNA, 555 bp, synthetic construct
  misc_feature 1..555: note = Description of Artificial Sequence: Synthetic coding sequence
  source 1..555: mol_type = other DNA
atggacggcctgagacagagagtggagcacttcctggagcagagaaacctggtgaccgaggtgctgggcgccctggaggccaagaccggcgtggagaagagatacctggccgccggcgccgtgaccctgctgagcctgtacctgctgttcggctacggcgccagcctgctgtgcaacctgatcggcttcgtgtaccccgcctacgccagcatcaaggccatcgagagccccagcaaggacgacgacaccgtgtggctgacctactgggtggtgtacgccctgttcggcctggccgagttcttcagcgacctgctgctgagctggttccccttctactacgtgggcaagtgcgccttcctgctgttctgcatggcccccagaccctggaacggcgccctgatgctgtaccagagagtggtgagacccctgttcctgagacaccacggcgccgtggacagaatcatgaacgacctgagcggcagagccctggacgccgccgccggcatcaccagaaacgtgaagcccagccagaccccccagcccaaggacaagtag

SEQ ID NO: 72007 - DNA, 6090 bp, synthetic construct
  misc_feature 1..6090: note = Description of Artificial Sequence: Synthetic coding sequence
  source 1..6090: mol_type = other DNA
atggccagcagcgtggccccctacgagcagctggtgagacaggtggaggccctgaaggccgagaacagccacctgagacaggagctgagagacaacagcagccacctgagcaagctggagaccgagaccagcggcatgaaggaggtgctgaagcacctgcagggcaagctggagcaggaggccagagtgctggtgagcagcggccagaccgaggtgctggagcagctgaaggccctgcagatggacatcaccagcctgtacaacctgaagttccagccccccaccctgggccccgagcccgccgccagaacccccgagggcagccccgtgcacggcagcggccccagcaaggacagcttcggcgagctgagcagagccaccatcagactgctggaggagctggacagagagagatgcttcctgctgaacgagatcgagaaggaggagaaggagaagctgtggtactacagccagctgcagggcctgagcaagagactggacgagctgccccacgtggactacgagatgcacaagatgaccagagaccccctgaacctggccctgagaagatacgccggcatgaccctgaccaacctgaccttcggcgacgtggccaacaaggccaccctgtgcgccagaagaggctgcatggaggccatcgtggcccagctggccagcgacagcgaggagctgcaccaggtggtgagcagcatcctgagaaacctgagctggagagccgacatcaacagcaagaaggtgctgagagaggccggcagcgtgaccgccctggtgcagtgcgtgctgagagccaccaaggagagcaccctgaagagcgtgctgagcgccctgtggaacctgagcgcccacagcaccgagaacaaggccgccatctgccaggtggacggcgccctgggcttcctggtgagcaccctgacctacaagtgccagagcaacagcctggccatcatcgagagcggcggcggcatcctgagaaacgtgagcagcctggtggccaccagagaggactacagacaggtgctgagagaccacaactgcctgcagaccctgctgcagcacctgaccagccacagcctgaccatcgtgagcaacgcctgcggcaccctgtggaacctgagcgccagaagcgccagagaccaggagctgctgtgggacctgggcgccgtgggcatgctgagaaacctggtgcacagcaagcacaagatgatcgccatgggcagcgccgccgccctgagaaacctgctggcccacagacccgccaagcaccaggccgccgccaccgccgtgagccccggcagctgcgtgcccagcctgtacgtgagaaagcagagagccctggaggccgagctggacgccagacacctggcccaggccctggagcacctggagaagcagggcccccccgccgccgaggccgccaccaagaagcccctgccccccctgagacacctggacggcctggcccaggactacgccagcgacagcggctgcttcgacgacgacgacgcccccagcagcctggccgccgccgccgccaccggcgagcccgccagccccgccgccctgagcctgttcctgggcagccccttcctgcagggccaggccctggccagaaccccccccaccagaagaggcggcaaggaggccgagaaggacaccagcggcgaggccgccgtggccgccaaggccaaggccaagctggccctggccgtggccagaatcgaccagctggtggaggacatcagcgccctgcacaccagcagcgacgacagcttcagcctgagcagcggcgaccccggccaggaggcccccagagagggcagagcccagagctgcagcccctgcagaggccccgagggcggcagaagagaggccggcagcagagcccaccccctgctgagactgaaggccgcccacgccagcctgagcaacgacagcctgaacagcggcagcgccagcgacggctactgccccagagagcacatgctgccctgccccctggccgccctggccagcagaagagaggaccccagatgcggccagcccagacccagcagactggacctggacctgcccggctgccaggccgagccccccgccagagaggccaccagcgccgacgccagagtgagaaccatcaagctgagccccacctaccagcacgtgcccctgctggagggcgccagcagagccggcgccgagcccctggccggccccggcatcagccccggcgccagaaagcaggcctggctgcccgccgaccacctgagcaaggtgcccgagaagctggccgccgcccccctgagcgtggccagcaaggccctgcagaagctggccgcccaggagggccccctgagcctgagcagatgcagcagcctgagcagcctgagcagcgccggcagacccggccccagcgagggcggcgacctggacgacagcgacagcagcctggagggcctggaggaggccggccccagcgaggccgagctggacagcacctggagagcccccggcgccaccagcctgcccgtggccatccccgcccccagaagaaacagaggcagaggcctgggcgtggaggacgccacccccagcagcagcagcgagaactacgtgcaggagacccccctggtgctgagcagatgcagcagcgtgagcagcctgggcagcttcgagagccccagcatcgccagcagcatccccagcgagccctgcagcggccagggcagcggcaccatcagccccagcgagctgcccgacagccccggccagaccatgccccccagcagaagcaagaccccccccctggcccccgccccccagggcccccccgaggccacccagttcagcctgcagtgggagagctacgtgaagagattcctggacatcgccgactgcagagagagatgcagactgcccagcgagctggacgccggcagcgtgagattcaccgtggagaagcccgacgagaacttcagctgcgccagcagcctgagcgccctggccctgcacgagcactacgtgcagcaggacgtggagctgagactgctgcccagcgcctgccccgagagaggcggcggcgccggcggcgccggcctgcacttcgccggccacagaagaagagaggagggccccgcccccaccggcagcagacccagaggcgccgccgaccaggagctggagctgctgagagagtgcctgggcgccgccgtgcccgccagactgagaaaggtggccagcgccctggtgcccggcagaagagccctgcccgtgcccgtgtacatgctggtgcccgcccccgcccccgcccaggaggacgacagctgcaccgacagcgccgagggcacccccgtgaacttcagcagcgccgccagcctgagcgacgagaccctgcagggcccccccagagaccagcccggcggccccgccggcagacagagacccaccggcagacccaccagcgccagacaggccatgggccacagacacaaggccggcggcgccggcagaagcgccgagcagagcagaggcgccggcaagaacagagccggcctggagctgcccctgggcagaccccccagcgcccccgccgacaaggacggcagcaagcccggcagaaccagaggcgacggcgccctgcagagcctgtgcctgaccacccccaccgaggaggccgtgtactgcttctacggcaacgacagcgacgaggagccccccgccgccgcccccacccccacccacagaagaaccagcgccatccccagagccttcaccagagagagaccccagggcagaaaggaggcccccgcccccagcaaggccgcccccgccgcccccccccccgccagaacccagcccagcctgatcgccgacgagacccccccctgctacagcctgagcagcagcgccagcagcctgagcgagcccgagcccagcgagccccccgccgtgcaccccagaggcagagagcccgccgtgaccaaggaccccggccccggcggcggcagagacagcagccccagccccagagccgccgaggagctgctgcagagatgcatcagcagcgccctgcccagaagaagaccccccgtgagcggcctgagaagaagaaagcccagagccaccagactggacgagagacccgccgagggcagcagagagagaggcgaggaggccgccggcagcgacagagccagcgacctggacagcgtggagtggagagccatccaggagggcgccaacagcatcgtgacctggctgcaccaggccgccgccgccaccagagaggccagcagcgagagcgacagcatcctgagcttcgtgagcggcctgagcgtgggcagcaccctgcagccccccaagcacagaaagggcagacaggccgagggcgagatgggcagcgccagaagacccgagaagagaggcgccgccagcgtgaagaccagcggcagccccagaagccccgccggccccgagaagcccagaggcacccagaagaccacccccggcgtgcccgccgtgctgagaggcagaaccgtgatctacgtgcccagccccgcccccagagcccagcccaagggcacccccggccccagagccacccccagaaaggtggcccccccctgcctggcccagcccgccgcccccgccaaggtgcccagccccggccagcagagaagcagaagcctgcacagacccgccaagaccagcgagctggccaccctgagccagccccccagaagcgccaccccccccgccagactggccaagacccccagcagcagcagcagccagaccagccccgccagccagcccctgcccagaaagagaccccccgtgacccaggccgccggcgccctgcccggccccggcgccagccccgtgcccaagacccccgccagaaccctgctggccaagcagcacaagacccagagaagccccgtgagaatccccttcatgcagagacccgccagaagaggccccccccccctggccagagccgtgcccgagcccggccccagaggcagagccggcaccgaggccggccccggcgccagaggcggcagactgggcctggtgagagtggccagcgccctgagcagcggcagcgagagcagcgacagaagcggcttcagaagacagctgaccttcatcaaggagagccccggcctgagaagaagaagaagcgagctgagcagcgccgagagcgccgccagcgccccccagggcgccagccccagaagaggcagacccgccctgcccgccgtgttcctgtgcagcagcagatgcgaggagctgagagccgcccccagacagggccccgcccccgccagacagagaccccccgccgccagacccagccccggcgagagacccgccagaagaaccaccagcgagagccccagcagactgcccgtgagagcccccgccgccagacccgagaccgtgaagagatacgccagcctgccccacatcagcgtggccagaagacccgacggcgccgtgcccgccgcccccgccagcgccgacgccgccagaagaagcagcgacggcgagcccagacccctgcccagagtggccgcccccggcaccacctggagaagaatcagagacgaggacgtgccccacatcctgagaagcaccctgcccgccaccgccctgcccctgagaggcagcacccccgaggacgcccccgccggccccccccccagaaagaccagcgacgccgtggtgcagaccgaggaggtggccgcccccaagaccaacagcagcaccagccccagcctggagaccagagagccccccggcgcccccgccggcggccagctgagcctgctgggcagcgacgtggacggccccagcctggccaaggcccccatcagcgcccccttcgtgcacgagggcctgggcgtggccgtgggcggcttccccgccagcagacacggcagccccagcagaagcgccagagtgccccccttcaactacgtgcccagccccatggtggtggccgccaccaccgacagcgccgccgagaaggcccccgccaccgccagcgccaccctgctggagtag

SEQ ID NO: 72008 - DNA, 6912 bp, synthetic construct
  misc_feature 1..6912: note = Description of Artificial Sequence: Synthetic coding sequence
  source 1..6912: mol_type = other DNA
atggccagcagcgtggccccctacgagcagctggtgagacaggtggaggccctgaaggccgagaacagccacctgagacaggagctgagagacaacagcagccacctgagcaagctggagaccgagaccagcggcatgaaggaggtgctgaagcacctgcagggcaagctggagcaggaggccagagtgctggtgagcagcggccagaccgaggtgctggagcagctgaaggccctgcagatggacatcaccagcctgtacaacctgaagttccagccccccaccctgggccccgagcccgccgccagaacccccgagggcagccccgtgcacggcagcggccccagcaaggacagcttcggcgagctgagcagagccaccatcagactgctggaggagctggacagagagagatgcttcctgctgaacgagatcgagaaggaggagaaggagaagctgtggtactacagccagctgcagggcctgagcaagagactggacgagctgccccacgtggagacccagttcagcatgcagatggacctgatcagacagcagctggagttcgaggcccagcacatcagaagcctgatggaggagagattcggcaccagcgacgagatggtgcagagagcccagatcagagccagcagactggagcagatcgacaaggagctgctggaggcccaggacagagtgcagcagaccgagccccaggccctgctggccgtgaagagcgtgcccgtggacgaggaccccgagaccgaggtgcccacccaccccgaggacggcaccccccagcccggcaacagcaaggtggaggtggtgttctggctgctgagcatgctggccaccagagaccaggaggacaccgccagaaccctgctggccatgagcagcagccccgagagctgcgtggccatgagaagaagcggctgcctgcccctgctgctgcagatcctgcacggcaccgaggccgccgccggcggcagagccggcgcccccggcgcccccggcgccaaggacgccagaatgagagccaacgccgccctgcacaacatcgtgttcagccagcccgaccagggcctggccagaaaggagatgagagtgctgcacgtgctggagcagatcagagcctactgcgagacctgctgggactggctgcaggccagagacggcggccccgagggcggcggcgccggcagcgcccccatccccatcgagccccagatctgccaggccacctgcgccgtgatgaagctgagcttcgacgaggagtacagaagagccatgaacgagctgggcggcctgcaggccgtggccgagctgctgcaggtggactacgagatgcacaagatgaccagagaccccctgaacctggccctgagaagatacgccggcatgaccctgaccaacctgaccttcggcgacgtggccaacaaggccaccctgtgcgccagaagaggctgcatggaggccatcgtggcccagctggccagcgacagcgaggagctgcaccaggtggtgagcagcatcctgagaaacctgagctggagagccgacatcaacagcaagaaggtgctgagagaggccggcagcgtgaccgccctggtgcagtgcgtgctgagagccaccaaggagagcaccctgaagagcgtgctgagcgccctgtggaacctgagcgcccacagcaccgagaacaaggccgccatctgccaggtggacggcgccctgggcttcctggtgagcaccctgacctacaagtgccagagcaacagcctggccatcatcgagagcggcggcggcatcctgagaaacgtgagcagcctggtggccaccagagaggactacagacaggtgctgagagaccacaactgcctgcagaccctgctgcagcacctgaccagccacagcctgaccatcgtgagcaacgcctgcggcaccctgtggaacctgagcgccagaagcgccagagaccaggagctgctgtgggacctgggcgccgtgggcatgctgagaaacctggtgcacagcaagcacaagatgatcgccatgggcagcgccgccgccctgagaaacctgctggcccacagacccgccaagcaccaggccgccgccaccgccgtgagccccggcagctgcgtgcccagcctgtacgtgagaaagcagagagccctggaggccgagctggacgccagacacctggcccaggccctggagcacctggagaagcagggcccccccgccgccgaggccgccaccaagaagcccctgccccccctgagacacctggacggcctggcccaggactacgccagcgacagcggctgcttcgacgacgacgacgcccccagcagcctggccgccgccgccgccaccggcgagcccgccagccccgccgccctgagcctgttcctgggcagccccttcctgcagggccaggccctggccagaaccccccccaccagaagaggcggcaaggaggccgagaaggacaccagcggcgaggccgccgtggccgccaaggccaaggccaagctggccctggccgtggccagaatcgaccagctggtggaggacatcagcgccctgcacaccagcagcgacgacagcttcagcctgagcagcggcgaccccggccaggaggcccccagagagggcagagcccagagctgcagcccctgcagaggccccgagggcggcagaagagaggccggcagcagagcccaccccctgctgagactgaaggccgcccacgccagcctgagcaacgacagcctgaacagcggcagcgccagcgacggctactgccccagagagcacatgctgccctgccccctggccgccctggccagcagaagagaggaccccagatgcggccagcccagacccagcagactggacctggacctgcccggctgccaggccgagccccccgccagagaggccaccagcgccgacgccagagtgagaaccatcaagctgagccccacctaccagcacgtgcccctgctggagggcgccagcagagccggcgccgagcccctggccggccccggcatcagccccggcgccagaaagcaggcctggctgcccgccgaccacctgagcaaggtgcccgagaagctggccgccgcccccctgagcgtggccagcaaggccctgcagaagctggccgcccaggagggccccctgagcctgagcagatgcagcagcctgagcagcctgagcagcgccggcagacccggccccagcgagggcggcgacctggacgacagcgacagcagcctggagggcctggaggaggccggccccagcgaggccgagctggacagcacctggagagcccccggcgccaccagcctgcccgtggccatccccgcccccagaagaaacagaggcagaggcctgggcgtggaggacgccacccccagcagcagcagcgagaactacgtgcaggagacccccctggtgctgagcagatgcagcagcgtgagcagcctgggcagcttcgagagccccagcatcgccagcagcatccccagcgagccctgcagcggccagggcagcggcaccatcagccccagcgagctgcccgacagccccggccagaccatgccccccagcagaagcaagaccccccccctggcccccgccccccagggcccccccgaggccacccagttcagcctgcagtgggagagctacgtgaagagattcctggacatcgccgactgcagagagagatgcagactgcccagcgagctggacgccggcagcgtgagattcaccgtggagaagcccgacgagaacttcagctgcgccagcagcctgagcgccctggccctgcacgagcactacgtgcagcaggacgtggagctgagactgctgcccagcgcctgccccgagagaggcggcggcgccggcggcgccggcctgcacttcgccggccacagaagaagagaggagggccccgcccccaccggcagcagacccagaggcgccgccgaccaggagctggagctgctgagagagtgcctgggcgccgccgtgcccgccagactgagaaaggtggccagcgccctggtgcccggcagaagagccctgcccgtgcccgtgtacatgctggtgcccgcccccgcccccgcccaggaggacgacagctgcaccgacagcgccgagggcacccccgtgaacttcagcagcgccgccagcctgagcgacgagaccctgcagggcccccccagagaccagcccggcggccccgccggcagacagagacccaccggcagacccaccagcgccagacaggccatgggccacagacacaaggccggcggcgccggcagaagcgccgagcagagcagaggcgccggcaagaacagagccggcctggagctgcccctgggcagaccccccagcgcccccgccgacaaggacggcagcaagcccggcagaaccagaggcgacggcgccctgcagagcctgtgcctgaccacccccaccgaggaggccgtgtactgcttctacggcaacgacagcgacgaggagccccccgccgccgcccccacccccacccacagaagaaccagcgccatccccagagccttcaccagagagagaccccagggcagaaaggaggcccccgcccccagcaaggccgcccccgccgcccccccccccgccagaacccagcccagcctgatcgccgacgagacccccccctgctacagcctgagcagcagcgccagcagcctgagcgagcccgagcccagcgagccccccgccgtgcaccccagaggcagagagcccgccgtgaccaaggaccccggccccggcggcggcagagacagcagccccagccccagagccgccgaggagctgctgcagagatgcatcagcagcgccctgcccagaagaagaccccccgtgagcggcctgagaagaagaaagcccagagccaccagactggacgagagacccgccgagggcagcagagagagaggcgaggaggccgccggcagcgacagagccagcgacctggacagcgtggagtggagagccatccaggagggcgccaacagcatcgtgacctggctgcaccaggccgccgccgccaccagagaggccagcagcgagagcgacagcatcctgagcttcgtgagcggcctgagcgtgggcagcaccctgcagccccccaagcacagaaagggcagacaggccgagggcgagatgggcagcgccagaagacccgagaagagaggcgccgccagcgtgaagaccagcggcagccccagaagccccgccggccccgagaagcccagaggcacccagaagaccacccccggcgtgcccgccgtgctgagaggcagaaccgtgatctacgtgcccagccccgcccccagagcccagcccaagggcacccccggccccagagccacccccagaaaggtggcccccccctgcctggcccagcccgccgcccccgccaaggtgcccagccccggccagcagagaagcagaagcctgcacagacccgccaagaccagcgagctggccaccctgagccagccccccagaagcgccaccccccccgccagactggccaagacccccagcagcagcagcagccagaccagccccgccagccagcccctgcccagaaagagaccccccgtgacccaggccgccggcgccctgcccggccccggcgccagccccgtgcccaagacccccgccagaaccctgctggccaagcagcacaagacccagagaagccccgtgagaatccccttcatgcagagacccgccagaagaggccccccccccctggccagagccgtgcccgagcccggccccagaggcagagccggcaccgaggccggccccggcgccagaggcggcagactgggcctggtgagagtggccagcgccctgagcagcggcagcgagagcagcgacagaagcggcttcagaagacagctgaccttcatcaaggagagccccggcctgagaagaagaagaagcgagctgagcagcgccgagagcgccgccagcgccccccagggcgccagccccagaagaggcagacccgccctgcccgccgtgttcctgtgcagcagcagatgcgaggagctgagagccgcccccagacagggccccgcccccgccagacagagaccccccgccgccagacccagccccggcgagagacccgccagaagaaccaccagcgagagccccagcagactgcccgtgagagcccccgccgccagacccgagaccgtgaagagatacgccagcctgccccacatcagcgtggccagaagacccgacggcgccgtgcccgccgcccccgccagcgccgacgccgccagaagaagcagcgacggcgagcccagacccctgcccagagtggccgcccccggcaccacctggagaagaatcagagacgaggacgtgccccacatcctgagaagcaccctgcccgccaccgccctgcccctgagaggcagcacccccgaggacgcccccgccggccccccccccagaaagaccagcgacgccgtggtgcagaccgaggaggtggccgcccccaagaccaacagcagcaccagccccagcctggagaccagagagccccccggcgcccccgccggcggccagctgagcctgctgggcagcgacgtggacggccccagcctggccaaggcccccatcagcgcccccttcgtgcacgagggcctgggcgtggccgtgggcggcttccccgccagcagacacggcagccccagcagaagcgccagagtgccccccttcaactacgtgcccagccccatggtggtggccgccaccaccgacagcgccgccgagaaggcccccgccaccgccagcgccaccctgctggagtag

SEQ ID NO: 72009 - DNA, 1545 bp, synthetic construct
  misc_feature 1..1545: note = Description of Artificial Sequence: Synthetic coding sequence
  source 1..1545: mol_type = other DNA
atgagctggcccagaagactgctgctgagatacctgttccccgccctgctgctgcacggcctgggcgagggcagcgccctgctgcaccccgacagcagaagccaccccagaagcctggagaagagcgcctggagagccttcaaggagagccagtgccaccacatgctgaagcacctgcacaacggcgccagaatcaccgtgcagatgccccccaccatcgagggccactgggtgagcaccggctgcgaggtgagaagcggccccgagttcatcaccagaagctacagattctaccacaacaacaccttcaaggcctaccagttctactacggcagcaacagatgcaccaaccccacctacaccctgatcatcagaggcaagatcagactgagacaggccagctggatcatcagaggcggcaccgaggccgactaccagctgcacaacgtgcaggtgatctgccacaccgaggccgtggccgagaagctgggccagcaggtgaacagaacctgccccggcttcctggccgacggcggcccctgggtgcaggacgtggcctacgacctgtggagagaggagaacggctgcgagtgcaccaaggccgtgaacttcgccatgcacgagctgcagctgatcagagtggagaagcagtacctgcaccacaacctggaccacctggtggaggagctgttcctgggcgacatccacaccgacgccacccagagaatgttctacagacccagcagctaccagccccccctgcagaacgccaagaaccacgaccacgcctgcatcgcctgcagaatcatctacagaagcgacgagcaccacccccccatcctgccccccaaggccgacctgaccatcggcctgcacggcgagtgggtgagccagagatgcgaggtgagacccgaggtgctgttcctgaccagacacttcatcttccacgacaacaacaacacctgggagggccactactaccactacagcgaccccgtgtgcaagcaccccaccttcagcatctacgccagaggcagatacagcagaggcgtgctgagcagcagagtgatgggcggcaccgagttcgtgttcaaggtgaaccacatgaaggtgacccccatggacgccgccaccgccagcctgctgaacgtgttcaacggcaacgagtgcggcgccgagggcagctggcaggtgggcatccagcaggacgtgacccacaccaacggctgcgtggccctgggcatcaagctgccccacaccgagtacgagatcttcaagatggagcaggacgccagaggcagatacctgctgttcaacggccagagacccagcgacggcagcagccccgacagacccgagaagagagccaccagctaccagatgcccctggtgcagtgcgccagcagcagccccagagccgaggacctggccgaggacagcggcagcagcctgtacggcagagcccccggcagacacacctggagcctgctgctggccgccctggcctgcctggtgcccctgctgcactggaacatcagaagatag

SEQ ID NO: 72010 - DNA, 1698 bp, synthetic construct
  misc_feature 1..1698: note = Description of Artificial Sequence: Synthetic coding sequence
  source 1..1698: mol_type = other DNA
atgaagagaagatgcagctgcggcggcggcggcggccactgcagcagcgagagaagaagaaccagacccgaggccgagggcagagccagagcccagctgcccggccaccagatcggcgccagaagagccggcggccccagagccggcctggagatgagctggcccagaagactgctgctgagatacctgttccccgccctgctgctgcacggcctgggcgagggcagcgccctgctgcaccccgacagcagaagccaccccagaagcctggagaagagcgcctggagagccttcaaggagagccagtgccaccacatgctgaagcacctgcacaacggcgccagaatcaccgtgcagatgccccccaccatcgagggccactgggtgagcaccggctgcgaggtgagaagcggccccgagttcatcaccagaagctacagattctaccacaacaacaccttcaaggcctaccagttctactacggcagcaacagatgcaccaaccccacctacaccctgatcatcagaggcaagatcagactgagacaggccagctggatcatcagaggcggcaccgaggccgactaccagctgcacaacgtgcaggtgatctgccacaccgaggccgtggccgagaagctgggccagcaggtgaacagaacctgccccggcttcctggccgacggcggcccctgggtgcaggacgtggcctacgacctgtggagagaggagaacggctgcgagtgcaccaaggccgtgaacttcgccatgcacgagctgcagctgatcagagtggagaagcagtacctgcaccacaacctggaccacctggtggaggagctgttcctgggcgacatccacaccgacgccacccagagaatgttctacagacccagcagctaccagccccccctgcagaacgccaagaaccacgaccacgcctgcatcgcctgcagaatcatctacagaagcgacgagcaccacccccccatcctgccccccaaggccgacctgaccatcggcctgcacggcgagtgggtgagccagagatgcgaggtgagacccgaggtgctgttcctgaccagacacttcatcttccacgacaacaacaacacctgggagggccactactaccactacagcgaccccgtgtgcaagcaccccaccttcagcatctacgccagaggcagatacagcagaggcgtgctgagcagcagagtgatgggcggcaccgagttcgtgttcaaggtgaaccacatgaaggtgacccccatggacgccgccaccgccagcctgctgaacgtgttcaacggcaacgagtgcggcgccgagggcagctggcaggtgggcatccagcaggacgtgacccacaccaacggctgcgtggccctgggcatcaagctgccccacaccgagtacgagatcttcaagatggagcaggacgccagaggcagatacctgctgttcaacggccagagacccagcgacggcagcagccccgacagacccgagaagagagccaccagctaccagatgcccctggtgcagtgcgccagcagcagccccagagccgaggacctggccgaggacagcggcagcagcctgtacggcagagcccccggcagacacacctggagcctgctgctggccgccctggcctgcctggtgcccctgctgcactggaacatcagaagatag

SEQ ID NO: 72011 - DNA, 981 bp, synthetic construct
  misc_feature 1..981: note = Description of Artificial Sequence: Synthetic coding sequence
  source 1..981: mol_type = other DNA
atgccccccagcatcagcgccttccaggccgcctacatcggcatcgaggtgctgatcgccctggtgagcgtgcccggcaacgtgctggtgatctgggccgtgaaggtgaaccaggccctgagagacgccaccttctgcttcatcgtgagcctggccgtggccgacgtggccgtgggcgccctggtgatccccctggccatcctgatcaacatcggcccccagacctacttccacacctgcctgatggtggcctgccccgtgctgatcctgacccagagcagcatcctggccctgctggccatcgccgtggacagatacctgagagtgaagatccccctgagatacaagatggtggtgacccccagaagagccgccgtggccatcgccggctgctggatcctgagcttcgtggtgggcctgacccccatgttcggctggaacaacctgagcgccgtggagagagcctgggccgccaacggcagcatgggcgagcccgtgatcaagtgcgagttcgagaaggtgatcagcatggagtacatggtgtacttcaacttcttcgtgtgggtgctgccccccctgctgctgatggtgctgatctacctggaggtgttctacctgatcagaaagcagctgaacaagaaggtgagcgccagcagcggcgacccccagaagtactacggcaaggagctgaagatcgccaagagcctggccctgatcctgttcctgttcgccctgagctggctgcccctgcacatcctgaactgcatcaccctgttctgccccagctgccacaagcccagcatcctgacctacatcgccatcttcctgacccacggcaacagcgccatgaaccccatcgtgtacgccttcagaatccagaagttcagagtgaccttcctgaagatctggaacgaccacttcagatgccagcccgccccccccatcgacgaggacctgcccgaggagagacccgacgactag

SEQ ID NO: 72012 - DNA, 981 bp, synthetic construct; identical to SEQ ID NO: 72011
  misc_feature 1..981: note = Description of Artificial Sequence: Synthetic coding sequence
  source 1..981: mol_type = other DNA

SEQ ID NO: 72013 - DNA, 378 bp, synthetic construct
  misc_feature 1..378: note = Description of Artificial Sequence: Synthetic coding sequence
  source 1..378: mol_type = other DNA
atgccccccagcatcagcgccttccaggccgcctacatcggcatcgaggtgctgatcgccctggtgagcgtgcccggcaacgtgctggtgatctgggccgtgaaggtgaaccaggccctgagagacgccaccttctgcttcatcgtgagcctggccgtggccgacgtggccgtgggcgccctggtgatccccctggccatcctgatcaacatcggcccccagacctacttccacacctgcctgatggtggcctgccccgtgctgatcctgacccagagcagcatcctggccctgctggccatcgccgtggacagatacctgagagtgaagatccccctgagaagaatcagccagtgcatggccagcaccaagagctag

SEQ ID NO: 72014 - DNA, 981 bp, synthetic construct; identical to SEQ ID NO: 72011
  misc_feature 1..981: note = Description of Artificial Sequence: Synthetic coding sequence
  source 1..981: mol_type = other DNA

SEQ ID NO: 72015 - DNA, 1239 bp, synthetic construct
  misc_feature 1..1239: note = Description of Artificial Sequence: Synthetic coding sequence
  source 1..1239: mol_type = other DNA
atgcccatcatgggcagcagcgtgtacatcaccgtggagctggccatcgccgtgctggccatcctgggcaacgtgctggtgtgctgggccgtgtggctgaacagcaacctgcagaacgtgaccaactacttcgtggtgagcctggccgccgccgacatcgccgtgggcgtgctggccatccccttcgccatcaccatcagcaccggcttctgcgccgcctgccacggctgcctgttcatcgcctgcttcgtgctggtgctgacccagagcagcatcttcagcctgctggccatcgccatcgacagatacatcgccatcagaatccccctgagatacaacggcctggtgaccggcaccagagccaagggcatcatcgccatctgctgggtgctgagcttcgccatcggcctgacccccatgctgggctggaacaactgcggccagcccaaggagggcaagaaccacagccagggctgcggcgagggccaggtggcctgcctgttcgaggacgtggtgcccatgaactacatggtgtacttcaacttcttcgcctgcgtgctggtgcccctgctgctgatgctgggcgtgtacctgagaatcttcctggccgccagaagacagctgaagcagatggagagccagcccctgcccggcgagagagccagaagcaccctgcagaaggaggtgcacgccgccaagagcctggccatcatcgtgggcctgttcgccctgtgctggctgcccctgcacatcatcaactgcttcaccttcttctgccccgactgcagccacgcccccctgtggctgatgtacctggccatcgtgctgagccacaccaacagcgtggtgaaccccttcatctacgcctacagaatcagagagttcagacagaccttcagaaagatcatcagaagccacgtgctgagacagcaggagcccttcaaggccgccggcaccagcgccagagtgctggccgcccacggcagcgacggcgagcaggtgagcctgagactgaacggccacccccccggcgtgtgggccaacggcagcgccccccaccccgagagaagacccaacggctacgccctgggcctggtgagcggcggcagcgcccaggagagccagggcaacaccggcctgcccgacgtggagctgctgagccacgagctgaagggcgtgtgccccgagccccccggcctggacgaccccctggcccaggacggcgccggcgtgagctag

SEQ ID NO: 72016 - DNA, 1239 bp, synthetic construct; identical to SEQ ID NO: 72015
  misc_feature 1..1239: note = Description of Artificial Sequence: Synthetic coding sequence
  source 1..1239: mol_type = other DNA

SEQ ID NO: 72017 - DNA, 267 bp, synthetic construct
  misc_feature 1..267: note = Description of Artificial Sequence: Synthetic coding sequence
  source 1..267: mol_type = other DNA
atgcccatcatgggcagcagcgtgtacatcaccgtggagctggccatcgccgtgctggccatcctgggcaacgtgctggtgtgctgggccgtgtggctgaacagcaacctgcagaacgtgaccaactacttcgtggtgagcctggccgccgccgacatcgccgtgggcgtgctggccatccccttcgccatcaccatcagcaccggcttctgcgccgcctgccacggctgcctgttcatcgcctgcttcgtgctggtgctgacctag

SEQ ID NO: 72018 - DNA, 195 bp, synthetic construct
  misc_feature 1..195: note = Description of Artificial Sequence: Synthetic coding sequence
  source 1..195: mol_type = other DNA
atgcccatcatgggcagcagcgtgtacatcaccgtggagctggccatcgccgtgctggccatcctgggcaacgtgctggtgtgctgggccgtgtggctgaacagcaacctgcagaacgtgaccaactacttcgtggtgagcctggccgccgccgacatcgccgtgggcgtgctggccatccccttcgccatctag

SEQ ID NO: 72019 - DNA, 231 bp, synthetic construct
  misc_feature 1..231: note = Description of Artificial Sequence: Synthetic coding sequence
  source 1..231: mol_type = other DNA
atgcccatcatgggcagcagcgtgtacatcaccgtggagctggccatcgccgtgctggccatcctgggcaacgtgctggtgtgctgggccgtgtggctgaacagcaacctgcagaacgtgaccaactacttcgtggtgagcctggccgccgccgacatcgccgtgggcgtgctggccatccccttcgccatcaccatcagcaccggcttctgcgccgcctgccacggctag

SEQ ID NO: 72020 - DNA, 1098 bp, synthetic construct
  misc_feature 1..1098: note = Description of Artificial Sequence: Synthetic coding sequence
  source 1..1098: mol_type = other DNA
atgcccatcatgggcagcagcgtgtacatcaccgtggagctggccatcgccgtgctggccatcctgggcaacgtgctggtgtgctgggccgtgtggctgaacagcaacctgcagaacgtgaccaactacttcgtggtgagcctggccgccgccgacatcgccgtgggcgtgctggccatccccttcgccatcaccatcagcaccggcttctgcgccgcctgccacggctgcctgttcatcgcctgcttcgtgctggtgctgacccagagcagcatcttcagcctgctggccatcgccatcgacagatacatcgccatcagaatccccctgagatacaacggcctggtgaccggcaccagagccaagggcatcatcgccatctgctgggtgctgagcttcgccatcggcctgacccccatgctgggctggaacaactgcggccagcccaaggagggcaagaaccacagccagggctgcggcgagggccaggtggcctgcctgttcgaggacgtggtgcccatgaactacatggtgtacttcaacttcttcgcctgcgtgctggtgcccctgctgctgatgctgggcgtgtacctgagaatcttcctggccgccagaagacagctgaagcagatggagagccagcccctgcccggcgagagagccagaagcaccctgcagaaggaggtgcacgccgccaagagcctggccatcatcgtgggcctgttcgccctgtgctggctgcccctgcacatcatcaactgcttcaccttcttctgccccgactgcagccacgcccccctgtggctgatgtacctggccatcgtgctgagccacaccaacagcgtggtgaaccccttcatctacgcctacagaatcagagagttcagacagaccttcagaaagatcatcagaagccacgtgctgagacagcaggagcccttcaaggccgccggcaccagcgccagagtgctggccgcccacggcagcgacggcgagcaggtgagcctgagactgaacggccacccccccggcgtgtgggccaacggcagcgccccccaccccgagagaagacccaacggctacgccctgggcctgtag

SEQ ID NO: 72021 - DNA, 1239 bp, synthetic construct; identical to SEQ ID NO: 72015
  misc_feature 1..1239: note = Description of Artificial Sequence: Synthetic coding sequence
  source 1..1239: mol_type = other DNA

SEQ ID NO: 72022 - DNA, 999 bp, synthetic construct
  misc_feature 1..999: note = Description of Artificial Sequence: Synthetic coding sequence
  source 1..999: mol_type = other DNA
atgctgctggagacccaggacgccctgtacgtggccctggagctggtgatcgccgccctgagcgtggccggcaacgtgctggtgtgcgccgccgtgggcaccgccaacaccctgcagacccccaccaactacttcctggtgagcctggccgccgccgacgtggccgtgggcctgttcgccatccccttcgccatcaccatcagcctgggcttctgcaccgacttctacggctgcctgttcctggcctgcttcgtgctggtgctgacccagagcagcatcttcagcctgctggccgtggccgtggacagatacctggccatctgcgtgcccctgagatacaagagcctggtgaccggcaccagagccagaggcgtgatcgccgtgctgtgggtgctggccttcggcatcggcctgacccccttcctgggctggaacagcaaggacagcgccaccaacaactgcaccgagccctgggacggcaccaccaacgagagctgctgcctggtgaagtgcctgttcgagaacgtggtgcccatgagctacatggtgtacttcaacttcttcggctgcgtgctgccccccctgctgatcatgctggtgatctacatcaagatcttcctggtggcctgcagacagctgcagagaaccgagctgatggaccacagcagaaccaccctgcagagagagatccacgccgccaagagcctggccatgatcgtgggcatcttcgccctgtgctggctgcccgtgcacgccgtgaactgcgtgaccctgttccagcccgcccagggcaagaacaagcccaagtgggccatgaacatggccatcctgctgagccacgccaacagcgtggtgaaccccatcgtgtacgcctacagaaacagagacttcagatacaccttccacaagatcatcagcagatacctgctgtgccaggccgacgtgaagagcggcaacggccaggccggcgtgcagcccgccctgggcgtgggcctgtag

SEQ ID NO: 72023 - DNA, 957 bp, synthetic construct
  misc_feature 1..957: note = Description of Artificial Sequence: Synthetic coding sequence
  source 1..957: mol_type = other DNA
atgcccaacaacagcaccgccctgagcctggccaacgtgacctacatcaccatggagatcttcatcggcctgtgcgccatcgtgggcaacgtgctggtgatctgcgtggtgaagctgaaccccagcctgcagaccaccaccttctacttcatcgtgagcctggccctggccgacatcgccgtgggcgtgctggtgatgcccctggccatcgtggtgagcctgggcatcaccatccacttctacagctgcctgttcatgacctgcctgctgctgatcttcacccacgccagcatcatgagcctgctggccatcgccgtggacagatacctgagagtgaagctgaccgtgagatacaagagagtgaccacccacagaagaatctggctggccctgggcctgtgctggctggtgagcttcctggtgggcctgacccccatgttcggctggaacatgaagctgaccagcgagtaccacagaaacgtgaccttcctgagctgccagttcgtgagcgtgatgagaatggactacatggtgtacttcagcttcctgacctggatcttcatccccctggtggtgatgtgcgccatctacctggacatcttctacatcatcagaaacaagctgagcctgaacctgagcaacagcaaggagaccggcgccttctacggcagagagttcaagaccgccaagagcctgttcctggtgctgttcctgttcgccctgagctggctgcccctgagcatcatcaactgcatcatctacttcaacggcgaggtgccccagctggtgctgtacatgggcatcctgctgagccacgccaacagcatgatgaaccccatcgtgtacgcctacaagatcaagaagttcaaggagacctacctgctgatcctgaaggcctgcgtggtgtgccaccccagcgacagcctggacaccagcatcgagaagaacagcgagtag

SEQ ID NO: 72024 - DNA, 537 bp, synthetic construct
  misc_feature 1..537: note = Description of Artificial Sequence: Synthetic coding sequence
  source 1..537: mol_type = other DNA
atggagggcagccccgccggccccatcgagcagaaggaggccagatgggagagcagctgggaggagcagcccgactggaccctgggctgcctgagccccgagagccacaccaaccacgtggccctgagagacaccggcaaccagctgatcgtgaccatgagctgcctgaccaaggaggacaccggctggtactggtgcggcatccagagagacttcgccagagacgacatggacttcaccgagctgatcgtgaccgacgacaagggcaccctggccaacgacttctggagcggcaaggacctgagcggcaacaagaccagaagctgcaaggcccccaaggtggtgagaaaggccgacagaagcagaaccagcatcctgatcatctgcatcctgatcaccggcctgggcatcatcagcgtgatcagccacctgaccaagagaagaagaagccagagaaacagaagagtgggcaacaccctgaagcccttcagcagagtgctgacccccaaggagatggcccccaccgagcagatgtag

SEQ ID NO: 72025 - DNA, 1044 bp, synthetic construct
  misc_feature 1..1044: note = Description of Artificial Sequence: Synthetic coding sequence
  source 1..1044: mol_type = other DNA
atgcccaacaacagcaccgccctgagcctggccaacgtgacctacatcaccatggagatcttcatcggcctgtgcgccatcgtgggcaacgtgctggtgatctgcgtggtgaagctgaaccccagcctgcagaccaccaccttctacttcatcgtgagcctggccctggccgacatcgccgtgggcgtgctggtgatgcccctggccatcgtggtgagcctgggcatcaccatccacttctacagctgcctgttcatgacctgcctgctgctgatcttcacccacgccagcatcatgagcctgctggccatcgccgtggacagatacctgagagtgaagctgaccgtgagattcagaatccccggcctgcccggctgcatcctgagcttccagctgaaggtgtgcttcctgcccgtgatgtggctgttcatcctgctgagcctggccctgatcagcgacgccatggtgatggacgagaaggtgaagagaagcttcgtgctggacaccgccagcgccatctgcaactacaacgcccactacaagaaccaccccaagtactggtgcagaggctacttcagagactactgcaacatcatcgccttcagccccaacagcaccaaccacgtggccctgagagacaccggcaaccagctgatcgtgaccatgagctgcctgaccaaggaggacaccggctggtactggtgcggcatccagagagacttcgccagagacgacatggacttcaccgagctgatcgtgaccgacgacaagggcaccctggccaacgacttctggagcggcaaggacctgagcggcaacaagaccagaagctgcaaggcccccaaggtggtgagaaaggccgacagaagcagaaccagcatcctgatcatctgcatcctgatcaccggcctgggcatcatcagcgtgatcagccacctgaccaagagaagaagaagccagagaaacagaagagtgggcaacaccctgaagcccttcagcagagtgctgacccccaaggagatggcccccaccgagcagatgtag

SEQ ID NO: 72026 - DNA, 801 bp, synthetic construct
  misc_feature 1..801: note = Description of Artificial Sequence: Synthetic coding sequence
  source 1..801: mol_type = other DNA
atggagggcagccccgccggccccatcgagcagaaggaggccagatgggagagcagctgggaggagcagcccgactggaccctgggctgcctgagccccgagagccagttcagaatccccggcctgcccggctgcatcctgagcttccagctgaaggtgtgcttcctgcccgtgatgtggctgttcatcctgctgagcctggccctgatcagcgacgccatggtgatggacgagaaggtgaagagaagcttcgtgctggacaccgccagcgccatctgcaactacaacgcccactacaagaaccaccccaagtactggtgcagaggctacttcagagactactgcaacatcatcgccttcagccccaacagcaccaaccacgtggccctgagagacaccggcaaccagctgatcgtgaccatgagctgcctgaccaaggaggacaccggctggtactggtgcggcatccagagagacttcgccagagacgacatggacttcaccgagctgatcgtgaccgacgacaagggcaccctggccaacgacttctggagcggcaaggacctgagcggcaacaagaccagaagctgcaaggcccccaaggtggtgagaaaggccgacagaagcagaaccagcatcctgatcatctgcatcctgatcaccggcctgggcatcatcagcgtgatcagccacctgaccaagagaagaagaagccagagaaacagaagagtgggcaacaccctgaagcccttcagcagagtgctgacccccaaggagatggcccccaccgagcagatgtag

SEQ ID NO: 72027 - DNA, 624 bp, synthetic construct
  misc_feature 1..624: note = Description of Artificial Sequence: Synthetic coding sequence
  source 1..624: mol_type = other DNA
tgaccccaggccctgcagggcccccccagcagcaacgacgccatggtgatggacgagaaggtgaagagaagcttcgtgctggacaccgccagcgccatctgcaactacaacgcccactacaagaaccaccccaagtactggtgcagaggctacttcagagactactgcaacatcatcgccttcagccccaacagcaccaaccacgtggccctgagagacaccggcaaccagctgatcgtgaccatgagctgcctgaccaaggaggacaccggctggtactggtgcggcatccagagagacttcgccagagacgacatggacttcaccgagctgatcgtgaccgacgacaagggcaccctggccaacgacttctggagcggcaaggacctgagcggcaacaagaccagaagctgcaaggcccccaaggtggtgagaaaggccgacagaagcagaaccagcatcctgatcatctgcatcctgatcaccggcctgggcatcatcagcgtgatcagccacctgaccaagagaagaagaagccagagaaacagaagagtgggcaacaccctgaagcccttcagcagagtgctgacccccaaggagatggcccccaccgagcagatgtag

SEQ ID NO: 72028 - DNA, 348 bp, synthetic construct
  misc_feature 1..348: note = Description of Artificial Sequence: Synthetic coding sequence
  source 1..348: mol_type = other DNA
tgacccagcagccacgtggccctgcacagcaccctgctgggcagccacttcagcaccaaccacgtggccctgagagacaccggcaaccagctgatcgtgaccatgagctgcctgaccaaggaggacaccggctggtactggtgcggcatccagagagacttcgccagagacgacatggacttcaccgagctgatcgtgaccgacgacaagggcaccctggccaacgacttctggagcggcaaggacctgagcggcaacaagaccagaagctgcaaggcccccaaggtggtgagaaaggccgacagaagcagaaccagcatcctgatcatctgcatcctgatcacctag

SEQ ID NO: 72029 - DNA, 519 bp, synthetic construct
  misc_feature 1..519: note = Description of Artificial Sequence: Synthetic coding sequence
  source 1..519: mol_type = other DNA
ggccccatcgagcagaaggaggccagatgggagagcagctgggaggagcagcccgactggaccctgggctgcctgagccccgagagccacaccaaccacgtggccctgagagacaccggcaaccagctgatcgtgaccatgagctgcctgaccaaggaggacaccggctggtactggtgcggcatccagagagacttcgccagagacgacatggacttcaccgagctgatcgtgaccgacgacaagggcaccctggccaacgacttctggagcggcaaggacctgagcggcaacaagaccagaagctgcaaggcccccaaggtggtgagaaaggccgacagaagcagaaccagcatcctgatcatctgcatcctgatcaccggcctgggcatcatcagcgtgatcagccacctgaccaagagaagaagaagccagagaaacagaagagtgggcaacaccctgaagcccttcagcagagtgctgacccccaaggagatggcccccaccgagcagatgtag

SEQ ID NO: 72030 - DNA, 1092 bp, synthetic construct
  misc_feature 1..1092: note = Description of Artificial Sequence: Synthetic coding sequence
  source 1..1092: mol_type = other DNA
atggcccagacccccgccttcgacaagcccaaggtggagctgcacgtgcacctggacggcagcatcaagcccgagaccatcctgtactacggcagaagaagaggcatcgccctgcccgccaacaccgccgagggcctgctgaacgtgatcggcatggacaagcccctgaccctgcccgacttcctggccaagttcgactactacatgcccgccatcgccggctgcagagaggccatcaagagaatcgcctacgagttcgtggagatgaaggccaaggagggcgtggtgtacgtggaggtgagatacagcccccacctgctggccaacagcaaggtggagcccatcccctggaaccaggccgagggcgacctgacccccgacgaggtggtggccctggtgggccagggcctgcaggagggcgagagagacttcggcgtgaaggccagaagcatcctgtgctgcatgagacaccagcccaactggagccccaaggtggtggagctgtgcaagaagtaccagcagcagaccgtggtggccatcgacctggccggcgacgagaccatccccggcagcagcctgctgcccggccacgtgcaggcctaccaggaggccgtgaagagcggcatccacagaaccgtgcacgccggcgaggtgggcagcgccgaggtggtgaaggaggccgtggacatcctgaagaccgagagactgggccacggctaccacaccctggaggaccaggccctgtacaacagactgagacaggagaacatgcacttcgagatctgcccctggagcagctacctgaccggcgcctggaagcccgacaccgagcacgccgtgatcagactgaagaacgaccaggccaactacagcctgaacaccgacgaccccctgatcttcaagagcaccctggacaccgactaccagatgaccaagagagacatgggcttcaccgaggaggagttcaagagactgaacatcaacgccgccaagagcagcttcctgcccgaggacgagaagagagagctgctggacctgctgtacaaggcctacggcatgccccccagcgccagcgccggccagaacctgtag

SEQ ID NO: 72031 - DNA, 1731 bp, synthetic construct
  misc_feature 1..1731: note = Description of Artificial Sequence: Synthetic coding sequence
  source 1..1731: mol_type = other DNA
atggccagcaacaaccactggttccagagcagccaggtgcccagcttcgcccagatgctgaagaagaacctgcccgtgcagcccgccaccaagaccatcaccacccccaccggctggagcagcgagagctacggcctgagcaagatggccagcaaggtgacccaggtgaccggcaacttccccgagcccctgctgagcaagaacctgagcagcatcagcaaccccgtgctgccccccaagaagatccccaaggagttcatcatgaagtacaagagaggcgagatcaaccccgtgagcgccctgcaccagttcgcccagatgcagagagtgcagctggacctgaaggagaccgtgaccaccggcaacgtgatgggcccctacttcgccttctgcgccgtggtggacggcatccagtacaagaccggcctgggccagaacaagaaggagagcagaagcaacgccgccaagctggccctggacgagctgctgcagctggacgagcccgagcccagaatcctggagaccagcggccccccccccttccccgccgagcccgtggtgctgagcgagctggcctacgtgagcaaggtgcactacgagggcagacacatccagtacgccaagatcagccagatcgtgaaggagagattcaaccagctgatcagcaacagaagcgagtacctgaagtacagcagcagcctggccgccttcatcatcgagagagccggccagcacgaggtggtggccatcggcaccggcgagtacaactacagccaggacatcaagcccgacggcagagtgctgcacgacacccacgccgtggtgaccgccagaagaagcctgctgagatacttctacagacagctgctgctgttctacagcaagaaccccgccatgatggagaagagcatcttctgcaccgagcccaccagcaacctgctgaccctgaagcagaacatcaacatctgcctgtacatgaaccagctgcccaagggcagcgcccagatcaagagccagctgagactgaacccccacagcatcagcgccttcgaggccaacgaggagctgtgcctgcacgtggccgtggagggcaagatctacctgaccgtgtactgccccaaggacggcgtgaacagaatcagcagcatgagcagcagcgacaagctgaccagatgggaggtgctgggcgtgcagggcgccctgctgagccacttcatccagcccgtgtacatcagcagcatcctgatcggcgacggcaactgcagcgacaccagaggcctggagatcgccatcaagcagagagtggacgacgccctgaccagcaagctgcccatgttctacctggtgaacagaccccacatcagcctggtgcccagcgcctaccccctgcagatgaacctggagtacaagttcctgagcctgaactgggcccagggcgacgtgagcctggagatcgtggacggcctgagcggcaagatcaccgagagcagccccttcaagagcggcatgagcatggccagcagactgtgcaaggccgccatgctgagcagattcaacctgctggccaaggaggccaagaaggagctgctggaggccggcacctaccacgccgccaagtgcatgagcgccagctaccaggaggccaagtgcaagctgaagagctacctgcagcagcacggctacggcagctggatcgtgaagagcccctgcatcgagcagttcaacatgtag

SEQ ID NO: 72032 - DNA, 1698 bp, synthetic construct
  misc_feature 1..1698: note = Description of Artificial Sequence: Synthetic coding sequence
  source 1..1698: mol_type = other DNA
atggccagcaacaaccactggttccagagcagccaggtgcccagcttcgcccagatgctgaagaagaacctgcccgtgcagcccgccaccaagaccatcaccacccccaccggctggagcagcgagagctacggcctgagcaagatggccagcaaggtgacccaggtgaccggcaacttccccgagcccctgctgagcaagaacctgagcagcatcagcaaccccgtgctgccccccaagaagatccccaaggagttcatcatgaagtacaagagaggcgagatcaaccccgtgagcgccctgcaccagttcgcccagatgcagagagtgcagctggacctgaaggagaccgtgaccaccggcaacgtgatgggcccctacttcgccttctgcgccgtggtggacggcatccagtacaagaccggcctgggccagaacaagaaggagagcagaagcaacgccgccaagctggccctggacgagctgctgcagctggacgagcccgagcccagaatcctggagaccagcggccccccccccttccccgccgagcccgtggtgctgagcgagctggcctacgtgagcaaggtgcactacgagggcagacacatccagtacgccaagatcagccagatcgtgaaggagagattcaaccagctgatcagcaacagaagcgagtacctgaagtacagcagcagcctggccgccttcatcatcgagagagccggccagcacgaggtggtggccatcggcaccggcgagtacaactacagccaggacatcaagcccgacggcagagtgctgcacgacacccacgccgtggtgaccgccagaagaagcctgctgagcaagaaccccgccatgatggagaagagcatcttctgcaccgagcccaccagcaacctgctgaccctgaagcagaacatcaacatctgcctgtacatgaaccagctgcccaagggcagcgcccagatcaagagccagctgagactgaacccccacagcatcagcgccttcgaggccaacgaggagctgtgcctgcacgtggccgtggagggcaagatctacctgaccgtgtactgccccaaggacggcgtgaacagaatcagcagcatgagcagcagcgacaagctgaccagatgggaggtgctgggcgtgcagggcgccctgctgagccacttcatccagcccgtgtacatcagcagcatcctgatcggcgacggcaactgcagcgacaccagaggcctggagatcgccatcaagcagagagtggacgacgccctgaccagcaagctgcccatgttctacctggtgaacagaccccacatcagcctggtgcccagcgcctaccccctgcagatgaacctggagtacaagttcctgagcctgaactgggcccagggcgacgtgagcctggagatcgtggacggcctgagcggcaagatcaccgagagcagccccttcaagagcggcatgagcatggccagcagactgtgcaaggccgccatgctgagcagattcaacctgctggccaaggaggccaagaaggagctgctggaggccggcacctaccacgccgccaagtgcatgagcgccagctaccaggaggccaagtgcaagctgaagagctacctgcagcagcacggctacggcagctggatcgtgaagagcccctgcatcgagcagttcaacatgtag

SEQ ID NO: 72033 - DNA, 726 bp, synthetic construct
  misc_feature 1..726: note = Description of Artificial Sequence: Synthetic coding sequence
  source 1..726: mol_type = other DNA
atggccagcaacaaccactggttccagagcagccaggtgcccagcttcgcccagatgctgaagaagaacctgcccgtgcagcccgccaccaagaccatcaccacccccaccggctggagcagcgagagctacggcctgagcaagatggccagcaaggtgacccaggtgaccggcaacttccccgagcccctgctgagcaagaacctgagcagcatcagcaaccccgtgctgccccccaagaagatccccaaggagttcatcatgaagtacaagagaggcgagatcaaccccgtgagcgccctgcaccagttcgcccagatgcagagagtgcagctggacctgaaggagaccgtgaccaccggcaacgtgatgggcccctacttcgccttctgcgccgtggtggacggcatccagtacaagaccggcctgggccagaacaagaaggagagcagaagcaacgccgccaagctggccctggacgagctgctgcagctggacgagcccgagcccagaatcctggagaccagcggccccccccccttccccgccgagcccgtggtgctgagcgagctggcctacgtgagcaaggtgcactacgagggcagacacatccagtacgccaagatcagccagatcgtgaaggagagattcaaccagctgatcagcaacagaagcgagtacctgaagtacagcagcagcctggccgccttcatcatcgagagatag

SEQ ID NO: 72034 - DNA, 471 bp, synthetic construct
  misc_feature 1..471: note = Description of Artificial Sequence: Synthetic coding sequence
  source 1..471: mol_type = other DNA
atggccagcaacaaccactggttccagagcagccaggtgcccagcttcgcccagatgctgaagaagaacctgcccgtgcagcccgccaccaagaccatcaccacccccaccggctggagcagcgagagctacggcctgagcaagatggccagcaaggtgacccaggtgaccggcaacttccccgagcccctgctgagcaagaacctgagcagcatcagcaaccccgtgctgccccccaagaagatccccaaggagttcatcatgaagtacaagagaggcgagatcaaccccgtgagcgccctgcaccagttcgcccagatgcagagagtgcagctggacctgaaggagaccgtgaccaccggcaacgtgatgggcccctacttcgccttctgcgccgtggtggacggcatccagtacaagaccggcctgggccagaacaagaaggagagcagaagcaacgccgccaagtag

SEQ ID NO: 72035 - DNA, 1677 bp, synthetic construct
  misc_feature 1..1677: note = Description of Artificial Sequence: Synthetic coding sequence
  source 1..1677: mol_type = other DNA
atgctgaagaagaacctgcccgtgcagcccgccaccaagaccatcaccacccccaccggctggagcagcgagagctacggcctgagcaagatggccagcaaggtgacccaggtgaccggcaacttccccgagcccctgctgagcaagaacctgagcagcatcagcaaccccgtgctgccccccaagaagatccccaaggagttcatcatgaagtacaagagaggcgagatcaaccccgtgagcgccctgcaccagttcgcccagatgcagagagtgcagctggacctgaaggagaccgtgaccaccggcaacgtgatgggcccctacttcgccttctgcgccgtggtggacggcatccagtacaagaccggcctgggccagaacaagaaggagagcagaagcaacgccgccaagctggccctggacgagctgctgcagctggacgagcccgagcccagaatcctggagaccagcggccccccccccttccccgccgagcccgtggtgctgagcgagctggcctacgtgagcaaggtgcactacgagggcagacacatccagtacgccaagatcagccagatcgtgaaggagagattcaaccagctgatcagcaacagaagcgagtacctgaagtacagcagcagcctggccgccttcatcatcgagagagccggccagcacgaggtggtggccatcggcaccggcgagtacaactacagccaggacatcaagcccgacggcagagtgctgcacgacacccacgccgtggtgaccgccagaagaagcctgctgagatacttctacagacagctgctgctgttctacagcaagaaccccgccatgatggagaagagcatcttctgcaccgagcccaccagcaacctgctgaccctgaagcagaacatcaacatctgcctgtacatgaaccagctgcccaagggcagcgcccagatcaagagccagctgagactgaacccccacagcatcagcgccttcgaggccaacgaggagctgtgcctgcacgtggccgtggagggcaagatctacctgaccgtgtactgccccaaggacggcgtgaacagaatcagcagcatgagcagcagcgacaagctgaccagatgggaggtgctgggcgtgcagggcgccctgctgagccacttcatccagcccgtgtacatcagcagcatcctgatcggcgacggcaactgcagcgacaccagaggcctggagatcgccatcaagcagagagtggacgacgccctgaccagcaagctgcccatgttctacctggtgaacagaccccacatcagcctggtgcccagcgcctaccccctgcagatgaacctggagtacaagttcctgagcctgaactgggcccagggcgacgtgagcctggagatcgtggacggcctgagcggcaagatcaccgagagcagccccttcaagagcggcatgagcatggccagcagactgtgcaaggccgccatgctgagcagattcaacctgctggccaaggaggccaagaaggagctgctggaggccggcacctaccacgccgccaagtgcatgagcgccagctaccaggaggccaagtgcaagctgaagagctacctgcagcagcacggctacggcagctggatcgtgaagagcccctgcatcgagcagttcaacatgtag

SEQ ID NO: 72036 - DNA, 3810 bp, synthetic construct
  misc_feature 1..3810: note = Description of Artificial Sequence: Synthetic coding sequence
  source 1..3810: mol_type = other DNA
atgatgagccccatctgcgaccagaccatcgacagcagactgaaggtggagaaggccacctggtggggcagagtgggcggcggcagcagaccccactggcagagccccggcgtgagaccctgccccgaggaggtgcaggaccccggctacagcctgagcggctactacacccaccccttccagggctacgagcacagacagctgagataccagcagcccggccccggcagcagccccagcagcttcctgctgaagcagatcgagttcctgaagggccagctgcccgaggcccccgtgatcggcaagcagacccccagcctgccccccagcctgcccggcctgagacccagattccccgtgctgctggccagcagcaccagaggcagacaggtggacatcagaggcgtgcccagaggcgtgcacctgagaagccagggcctgcagagaggcttccagcaccccagccccagaggcagaagcctgccccagagaggcgtggactgcctgagcagccacttccaggagctgagcatctaccaggaccaggagcagagaatcctgaagttcctggaggagctgggcgagggcaaggccaccaccgcccacgacctgagcggcaagctgggcacccccaagaaggagatcaacagagtgctgtacagcctggccaagaagggcaagctgcagaaggaggccggcaccccccccctgtggaagatcgccgtgagcacccaggcctggaaccagcacagcggcgtggtgagacccgacggccacagccagggcgcccccaacagcgaccccagcctggagcccgaggacagaaacagcaccagcgtgagcgaggacctgctggagcccttcatcgccgtgagcgcccaggcctggaaccagcacagcggcgtggtgagacccgacagccacagccagggcagccccaacagcgaccccggcctggagcccgaggacagcaacagcaccagcgccctggaggaccccctggagttcctggacatggccgagatcaaggagaagatctgcgactacctgttcaacgtgagcgacagcagcgccctgaacctggccaagaacatcggcctgaccaaggccagagacatcaacgccgtgctgatcgacatggagagacagggcgacgtgtacagacagggcaccaccccccccatctggcacctgaccgacaagaagagagagagaatgcagatcaagagaaacaccaacagcgtgcccgagaccgcccccgccgccatccccgagaccaagagaaacgccgagttcctgacctgcaacatccccaccagcaacgccagcaacaacatggtgaccaccgagaaggtggagaacggccaggagcccgtgatcaagctggagaacagacaggaggccagacccgagcccgccagactgaagccccccgtgcactacaacggccccagcaaggccggctacgtggacttcgagaacggccagtgggccaccgacgacatccccgacgacctgaacagcatcagagccgcccccggcgagttcagagccatcatggagatgcccagcttctacagccacggcctgcccagatgcagcccctacaagaagctgaccgagtgccagctgaagaaccccatcagcggcctgctggagtacgcccagttcgccagccagacctgcgagttcaacatgatcgagcagagcggccccccccacgagcccagattcaagttccaggtggtgatcaacggcagagagttcccccccgccgaggccggcagcaagaaggtggccaagcaggacgccgccatgaaggccatgaccatcctgctggaggaggccaaggccaaggacagcggcaagagcgaggagagcagccactacagcaccgagaaggagagcgagaagaccgccgagagccagacccccacccccagcgccaccagcttcttcagcggcaagagccccgtgaccaccctgctggagtgcatgcacaagctgggcaacagctgcgagttcagactgctgagcaaggagggccccgcccacgagcccaagttccagtactgcgtggccgtgggcgcccagaccttccccagcgtgagcgcccccagcaagaaggtggccaagcagatggccgccgaggaggccatgaaggccctgcacggcgaggccaccaacagcatggccagcgacaaccagcccgagggcatgatcagcgagagcctggacaacctggagagcatgatgcccaacaaggtgagaaagatcggcgagctggtgagatacctgaacaccaaccccgtgggcggcctgctggagtacgccagaagccacggcttcgccgccgagttcaagctggtggaccagagcggccccccccacgagcccaagttcgtgtaccaggccaaggtgggcggcagatggttccccgccgtgtgcgcccacagcaagaagcagggcaagcaggaggccgccgacgccgccctgagagtgctgatcggcgagaacgagaaggccgagagaatgggcttcaccgaggtgacccccgtgaccggcgccagcctgagaagaaccatgctgctgctgagcagaagccccgaggcccagcccaagaccctgcccctgaccggcagcaccttccacgaccagatcgccatgctgagccacagatgcttcaacaccctgaccaacagcttccagcccagcctgctgggcagaaagatcctggccgccatcatcatgaagaaggacagcgaggacatgggcgtggtggtgagcctgggcaccggcaacagatgcgtgaagggcgacagcctgagcctgaagggcgagaccgtgaacgactgccacgccgagatcatcagcagaagaggcttcatcagattcctgtacagcgagctgatgaagtacaacagccagaccgccaaggacagcatcttcgagcccgccaagggcggcgagaagctgcagatcaagaagaccgtgagcttccacctgtacatcagcaccgccccctgcggcgacggcgccctgttcgacaagagctgcagcgacagagccatggagagcaccgagagcagacactaccccgtgttcgagaaccccaagcagggcaagctgagaaccaaggtggagaacggcgagggcaccatccccgtggagagcagcgacatcgtgcccacctgggacggcatcagactgggcgagagactgagaaccatgagctgcagcgacaagatcctgagatggaacgtgctgggcctgcagggcgccctgctgacccacttcctgcagcccatctacctgaagagcgtgaccctgggctacctgttcagccagggccacctgaccagagccatctgctgcagagtgaccagagacggcagcgccttcgaggacggcctgagacaccccttcatcgtgaaccaccccaaggtgggcagagtgagcatctacgacagcaagagacagagcggcaagaccaaggagaccagcgtgaactggtgcctggccgacggctacgacctggagatcctggacggcaccagaggcaccgtggacggccccagaaacgagctgagcagagtgagcaagaagaacatcttcctgctgttcaagaagctgtgcagcttcagatacagaagagacctgctgagactgagctacggcgaggccaagaaggccgccagagactacgagaccgccaagaactacttcaagaagggcctgaaggacatgggctacggcaactggatcagcaagccccaggaggagaagaacttctacctgtgccccgtgtag

SEQ ID NO: 72037 - DNA, 159 bp, synthetic construct
  misc_feature 1..159: note = Description of Artificial Sequence: Synthetic coding sequence
  source 1..159: mol_type = other DNA
atggccaacgagcacaccctgatccaccccgccagcatcgaggaccccctggaggccagacccatgagcgacgaggaccccgaggacgaggacgccctgcccgccagatggaagaaggagatgggcagaaagagaaagagaaccatcgccaccctgtag

SEQ ID NO: 72038 - DNA, 2106 bp, synthetic construct
  misc_feature 1..2106: note = Description of Artificial Sequence: Synthetic coding sequence
  source 1..2106: mol_type = other DNA
atggacatcgaggacgaggagaacatgagcagcagcagcaccgacgtgaaggagaacagaaacctggacaacgtgagccccaaggacggcagcacccccggccccggcgagggcagccagctgagcaacggcggcggcggcggccccggcagaaagagacccctggaggagggcagcaacggccacagcaagtacagactgaagaagagaagaaagacccccggccccgtgctgcccaagaacgccctgatgcagctgaacgagatcaagcccggcctgcagtacaccctgctgagccagaccggccccgtgcacgcccccctgttcgtgatgagcgtggaggtgaacggccaggtgttcgagggcagcggccccaccaagaagaaggccaagctgcacgccgccgagaaggccctgagaagcttcgtgcagttccccaacgccagcgaggcccacctggccatgggcagaaccctgagcgtgaacaccgacttcaccagcgaccaggccgacttccccgacaccctgttcaacggcttcgagacccccgacaaggccgagccccccttctacgtgggcagcaacggcgacgacagcttcagcagcagcggcgacctgagcctgagcgccagccccgtgcccgccagcctggcccagccccccctgcccgtgctgccccccttccccccccccagcggcaagaaccccgtgatgatcctgaacgagctgagacccggcctgaagtacgacttcctgagcgagagcggcgagagccacgccaagagcttcgtgatgagcgtggtggtggacggccagttcttcgagggcagcggcagaaacaagaagctggccaaggccagagccgcccagagcgccctggccgccatcttcaacctgcacctggaccagacccccagcagacagcccatccccagcgagggcctgcagctgcacctgccccaggtgctggccgacgccgtgagcagactggtgctgggcaagttcggcgacctgaccgacaacttcagcagcccccacgccagaagaaaggtgctggccggcgtggtgatgaccaccggcaccgacgtgaaggacgccaaggtgatcagcgtgagcaccggcaccaagtgcatcaacggcgagtacatgagcgacagaggcctggccctgaacgactgccacgccgagatcatcagcagaagaagcctgctgagattcctgtacacccagctggagctgtacctgaacaacaaggacgaccagaagagaagcatcttccagaagagcgagagaggcggcttcagactgaaggagaacgtgcagttccacctgtacatcagcaccagcccctgcggcgacgccagaatcttcagcccccacgagcccatcctggaggagcccgccgacagacaccccaacagaaaggccagaggccagctgagaaccaagatcgagagcggcgagggcaccatccccgtgagaagcaacgccagcatccagacctgggacggcgtgctgcagggcgagagactgctgaccatgagctgcagcgacaagatcgccagatggaacgtggtgggcatccagggcagcctgctgagcatcttcgtggagcccatctacttcagcagcatcatcctgggcagcctgtaccacggcgaccacctgagcagagccatgtaccagagaatcagcaacatcgaggacctgccccccctgtacaccctgaacaagcccctgctgagcggcatcagcaacgccgaggccagacagcccggcaaggcccccaacttcagcgtgaactggaccgtgggcgacagcgccatcgaggtgatcaacgccaccaccggcaaggacgagctgggcagagccagcagactgtgcaagcacgccctgtactgcagatggatgagagtgcacggcaaggtgcccagccacctgctgagaagcaagatcaccaagcccaacgtgtaccacgagagcaagctggccgccaaggagtaccaggccgccaaggccagactgttcaccgccttcatcaaggccggcctgggcgcctgggtggagaagcccaccgagcaggaccagttcagcctgaccccctag

SEQ ID NO: 72039 - DNA, 2226 bp, synthetic construct
  misc_feature 1..2226: note = Description of Artificial Sequence: Synthetic coding sequence
  source 1..2226: mol_type = other DNA
atggacatcgaggacgaggagaacatgagcagcagcagcaccgacgtgaaggagaacagaaacctggacaacgtgagccccaaggacggcagcacccccggccccggcgagggcagccagctgagcaacggcggcggcggcggccccggcagaaagagacccctggaggagggcagcaacggccacagcaagtacagactgaagaagagaagaaagacccccggccccgtgctgcccaagaacgccctgatgcagctgaacgagatcaagcccggcctgcagtacaccctgctgagccagaccggccccgtgcacgcccccctgttcgtgatgagcgtggaggtgaacggccaggtgttcgagggcagcggccccaccaagaagaaggccaagctgcacgccgccgagaaggccctgagaagcttcgtgcagttccccaacgccagcgaggcccacctggccatgggcagaaccctgagcgtgaacaccgacttcaccagcgaccaggccgacttccccgacaccctgttcaacggcttcgagacccccgacaaggccgagccccccttctacgtgggcagcaacggcgacgacagcttcagcagcagcggcgacctgagcctgagcgccagccccgtgcccgccagcctggcccagccccccctgcccgtgctgccccccttccccccccccagcggcaagaaccccgtgatgatcctgaacgagctgagacccggcctgaagtacgacttcctgagcgagagcggcgagagccacgccaagagcttcgtgatgagcgtggtggtggacggccagttcttcgagggcagcggcagaaacaagaagctggccaaggccagagccgcccagagcgccctggccgccatcttcaacctgcacctggaccagacccccagcagacagcccatccccagcgagggcctgcagctgcacctgccccaggtgctggccgacgccgtgagcagactggtgctgggcaagttcggcgacctgaccgacaacttcagcagcccccacgccagaagaaaggtgctggccggcgtggtgatgaccaccggcaccgacgtgaaggacgccaaggtgatcagcgtgagcaccggcaccaagtgcatcaacggcgagtacatgagcgacagaggcctggccctgaacgactgccacgccgagatcatcagcagaagaagcctgctgagattcctgtacacccagctggagctgtacctgaacaacaaggacgaccagaagagaagcatcttccagaagagcgagagaggcggcttcagactgaaggagaacgtgcagttccacctgtacatcagcaccagcccctgcggcgacgccagaatcttcagcccccacgagcccatcctggagggcagcagaagctacacccaggccggcgtgcagtggtgcaaccacggcagcctgcagcccagaccccccggcctgctgagcgaccccagcaccagcaccttccagggcgccggcaccaccgagcccgccgacagacaccccaacagaaaggccagaggccagctgagaaccaagatcgagagcggcgagggcaccatccccgtgagaagcaacgccagcatccagacctgggacggcgtgctgcagggcgagagactgctgaccatgagctgcagcgacaagatcgccagatggaacgtggtgggcatccagggcagcctgctgagcatcttcgtggagcccatctacttcagcagcatcatcctgggcagcctgtaccacggcgaccacctgagcagagccatgtaccagagaatcagcaacatcgaggacctgccccccctgtacaccctgaacaagcccctgctgagcggcatcagcaacgccgaggccagacagcccggcaaggcccccaacttcagcgtgaactggaccgtgggcgacagcgccatcgaggtgatcaacgccaccaccggcaaggacgagctgggcagagccagcagactgtgcaagcacgccctgtactgcagatggatgagagtgcacggcaaggtgcccagccacctgctgagaagcaagatcaccaagcccaacgtgtaccacgagagcaagctggccgccaaggagtaccaggccgccaaggccagactgttcaccgccttcatcaaggccggcctgggcgcctgggtggagaagcccaccgagcaggaccagttcagcctgaccccctag

SEQ ID NO: 72040 - DNA, 2145 bp, synthetic construct
  misc_feature 1..2145: note = Description of Artificial Sequence: Synthetic coding sequence
  source 1..2145: mol_type = other DNA
atggacatcgaggacgaggagaacatgagcagcagcagcaccgacgtgaaggagaacagaaacctggacaacgtgagccccaaggacggcagcacccccggccccggcgagggcagccagctgagcaacggcggcggcggcggccccggcagaaagagacccctggaggagggcagcaacggccacagcaagtacagactgaagaagagaagaaagacccccggccccgtgctgcccaagaacgccctgatgcagctgaacgagatcaagcccggcctgcagtacaccctgctgagccagaccggccccgtgcacgcccccctgttcgtgatgagcgtggaggtgaacggccaggtgttcgagggcagcggccccaccaagaagaaggccaagctgcacgccgccgagaaggccctgagaagcttcgtgcagttccccaacgccagcgaggcccacctggccatgggcagaaccctgagcgtgaacaccgacttcaccagcgaccaggccgacttccccgacaccctgttcaacggcttcgagacccccgacaaggccgagccccccttctacgtgggcagcaacggcgacgacagcttcagcagcagcggcgacctgagcctgagcgccagccccgtgcccgccagcctggcccagccccccctgcccgtgctgccccccttccccccccccagcggcaagaaccccgtgatgatcctgaacgagctgagacccggcctgaagtacgacttcctgagcgagagcggcgagagccacgccaagagcttcgtgatgagcgtggtggtggacggccagttcttcgagggcagcggcagaaacaagaagctggccaaggccagagccgcccagagcgccctggccgccatcttcaacctgcacctggaccagacccccagcagacagcccatccccagcgagggcctgcagctgcacctgccccaggtgctggccgacgccgtgagcagactggtgctgggcaagttcggcgacctgaccgacaacttcagcagcccccacgccagaagaaaggtgctggccggcgtggtgatgaccaccggcaccgacgtgaaggacgccaaggtgatcagcgtgagcaccggcaccaagtgcatcaacggcgagtacatgagcgacagaggcctggccctgaacgactgccacgccgagatcatcagcagaagaagcctgctgagattcctgtacacccagctggagctgtacctgaacaacaaggacgaccagaagagaagcatcttccagaagagcgagagaggcggcttcagactgaaggagaacgtgcagttccacctgtacatcagcaccagcccctgcggcgacgccagaatcttcagcccccacgagcccatcctggagggcagcagaagctacacccaggccggcgtgcagtggtgcaaccacggcagcctgcagcccagaccccccggcctgctgagcgaccccagcaccagcaccttccagggcgccggcaccaccgagcccgccgacagacaccccaacagaaaggccagaggccagctgagaaccaagatcgagagcggcgagggcaccatccccgtgagaagcaacgccagcatccagacctgggacggcgtgctgcagggcgagagactgctgaccatgagctgcagcgacaagatcgccagatggaacgtggtgggcatccagggcagcctgctgagcatcttcgtggagcccatctacttcagcagcatcatcctgggcagcctgtaccacggcgaccacctgagcagagccatgtaccagagaatcagcaacatcgaggacctgccccccctgtacaccctgaacaagcccctgctgagcggcatcagcaacgccgaggccagacagcccggcaaggcccccaacttcagcgtgaactggaccgtgggcgacagcgccatcgaggtgatcaacgccaccaccggcaaggacgagctgggcagagccagcagactgtgcaagcacgccctgtactgcagatggatgagagtgcacggcaaggtgcccagccacctgctgagaagcaagatcaccaagcccaacgtgtaccacgagagcaagctggccgccaaggagtaccaggccgccaaggtgcactag

SEQ ID NO: 72041 - DNA, 39 bp, synthetic construct
  misc_feature 1..39: note = Description of Artificial Sequence: Synthetic coding sequence
  source 1..39: mol_type = other DNA
atggacatcgaggacgaggagaacatgagcttcagctag

SEQ ID NO: 72042 - DNA, 426 bp, synthetic construct
  misc_feature 1..426: note = Description of Artificial Sequence: Synthetic coding sequence
  source 1..426: mol_type = other DNA
atggacatcgaggacgaggagaacatgagcagcagcagcaccgacgtgaaggagaacagaaacctggacaacgtgagccccaaggacggcagcacccccggccccggcgagggcagccagctgagcaacggcggcggcggcggccccggcagaaagagacccctggaggagggcagcaacggccacagcaagtacagactgaagaagagaagaaagacccccggccccgtgctgcccaagaacgccctgatgcagctgaacgagatcaagcccggcctgcagtacaccctgctgagccagaccggccccgtgcacgcccccctgttcgtgatgagcgtggaggtgaacggccaggtgttcgagggcagcggccccaccaagaagaaggccaagctgcacgccgccgagaaggccctgagaagctag

SEQ ID NO: 72043 - DNA, 2226 bp, synthetic construct; identical to SEQ ID NO: 72039
  misc_feature 1..2226: note = Description of Artificial Sequence: Synthetic coding sequence
  source 1..2226: mol_type = other DNA

SEQ ID NO: 72044 - DNA, 2226 bp, synthetic construct; identical to SEQ ID NO: 72039
  misc_feature 1..2226: note = Description of Artificial Sequence: Synthetic coding sequence
  source 1..2226: mol_type = other DNA

SEQ ID NO: 72045 - DNA, 2097 bp, synthetic construct
  misc_feature 1..2097: note = Description of Artificial Sequence: Synthetic coding sequence
  source 1..2097: mol_type = other DNA
atggacatcgaggacgaggagaacatgagcagcagcagcaccgacgtgaaggagaacagaaacctggacaacgtgagccccaaggacggcagcacccccggccccggcgagggcagccagctgagcaacggcggcggcggcggccccggcagaaagagacccctggaggagggcagcaacggccacagcaagtacagactgaagaagagaagaaagacccccggccccgtgctgcccaagaacgccctgatgcagctgaacgagatcaagcccggcctgcagtacaccctgctgagccagaccggccccgtgcacgcccccctgttcgtgatgagcgtggaggtgaacggccaggtgttcgagggcagcggccccaccaagaagaaggccaagctgcacgccgccgagaaggccctgagaagcttcgtgcagttccccaacgccagcgaggcccacctggccatgggcagaaccctgagcgtgaacaccgacttcaccagcgaccaggccgacttccccgacaccctgttcaacggcttcgagacccccgacaaggccgagccccccttctacgtgggcagcaacggcgacgacagcttcagcagcagcggcgacctgagcctgagcgccagccccgtgcccgccagcctggcccagccccccctgcccgtgctgccccccttccccccccccagcggcaagaaccccgtgatgatcctgaacgagctgagacccggcctgaagtacgacttcctgagcgagagcggcgagagccacgccaagagcttcgtgatgagcgtggtggtggacggccagttcttcgagggcagcggcagaaacaagaagctggccaaggccagagccgcccagagcgccctggccgccatcttcaacctgcacctggaccagacccccagcagacagcccatccccagcgagggcctgcagctgcacctgccccaggtgctggccgacgccgtgagcagactggtgctgggcaagttcggcgacctgaccgacaacttcagcagcccccacgccagaagaaaggtgctggccggcgtggtgatgaccaccggcaccgacgtgaaggacgccaaggtgatcagcgtgagcaccggcaccaagtgcatcaacggcgagtacatgagcgacagaggcctggccctgaacgactgccacgccgagatcatcagcagaagaagcctgctgagattcctgtacacccagctggagctgtacctgaacaacaaggacgaccagaagagaagcatcttccagaagagcgagagaggcggcttcagactgaaggagaacgtgcagttccacctgtacatcagcaccagcccctgcggcgacgccagaatcttcagcccccacgagcccatcctggagggcagcagaagctacacccaggccggcgtgcagtggtgcaaccacggcagcctgcagcccagaccccccggcctgctgagcgaccccagcaccagcaccttccagggcgccggcaccaccgagcccgccgacagacaccccaacagaaaggccagaggccagctgagaaccaagatcgagagcggcgagggcaccatccccgtgagaagcaacgccagcatccagacctgggacggcgtgctgcagggcgagagactgctgaccatgagctgcagcgacaagatcgccagatggaacgtggtgggcatccagggcagcctgctgagcatcttcgtggagcccatctacttcagcagcatcatcctgggcagcctgtaccacggcgaccacctgagcagagccatgtaccagagaatcagcaacatcgaggacctgccccccctgtacaccctgaacaagcccctgctgagcggcatcagcaacgccgaggccagacagcccggcaaggcccccaacttcagcgtgaactggaccgtgggcgacagcgccatcgaggtgatcaacgccaccaccggcaaggacgagctgggcagagccagcagactgtgcaagcacgccctgtactgcagatgggcctgcgccagacagggcagcctgcccctgaccaccctgcaggactaccaggcccagagagtgccctag

SEQ ID NO: 72046 - DNA, 426 bp, synthetic construct
  misc_feature 1..426: note = Description of Artificial Sequence: Synthetic coding sequence
  source 1..426: mol_type = other DNA
atgagccacagaatggagggcgtgggccagctgcccgccagctacagacacaacagacccctgctgagcggcgtgagcgacgccgaggccagacagcccggcaagagcccccccttcagcatgaactgggtggtgggcagcgccgacctggagatcatcaacgccaccaccggcagaagaagctgcggcggccccagcagactgtgcaagcacgtgctgagcgccagatgggccagactgtacggcagactgagcaccagaacccccagccccggcgacacccccagcatgtactgcgaggccaagctgggcgcccacacctaccagagcgtgaagcagcagctgttcaaggccttccagaaggccggcctgggcacctgggtgagaaagccccccgagcagcagcagttcctgctgaccctgtag

SEQ ID NO: 72047 - DNA, 747 bp, synthetic construct
  misc_feature 1..747: note = Description of Artificial Sequence: Synthetic coding sequence
  source 1..747: mol_type = other DNA
atgggcctgtggagccccgtgcccggcaacagcgtgcccagagcccccgtgatggccggcctgggcctgggccacagccagggcgccccccagggcccccacgacggcaagaccgacagaagcagcggccccggcagaagaagaaccgagagaaccagactgcccggcctgctgggcggcgcccccctgaccgccggcagcccccacagatggaacgtgctgggcctgcagggcgccctgctgagccacttcgtggagcccgtgtacctgcagagcatcgtggtgggcagcctgcaccacaccggccacctggccagagtgatgagccacagaatggagggcgtgggccagctgcccgccagctacagacacaacagacccctgctgagcggcgtgagcgacgccgaggccagacagcccggcaagagcccccccttcagcatgaactgggtggtgggcagcgccgacctggagatcatcaacgccaccaccggcagaagaagctgcggcggccccagcagactgtgcaagcacgtgctgagcgccagatgggccagactgtacggcagactgagcaccagaacccccagccccggcgacacccccagcatgtactgcgaggccaagctgggcgcccacacctaccagagcgtgaagcagcagctgttcaaggccttccagaaggccggcctgggcacctgggtgagaaagccccccgagcagcagcagttcctgctgaccctgtag

SEQ ID NO: 72048 - DNA, 2220 bp, synthetic construct
  misc_feature 1..2220: note = Description of Artificial Sequence: Synthetic coding sequence
  source 1..2220: mol_type = other DNA
atggccagcgtgctgggcagcggcagaggcagcggcggcctgagcagccagctgaagtgcaagagcaagagaagaagaagaagaagaagcaagagaaaggacaaggtgagcatcctgagcaccttcctggcccccttcaagcacctgagccccggcatcaccaacaccgaggacgacgacaccctgagcaccagcagcgccgaggtgaaggagaacagaaacgtgggcaacctggccgccagacccccccccagcggcgacagagccagaggcggcgcccccggcgccaagagaaagagacccctggaggagggcaacggcggccacctgtgcaagctgcagctggtgtggaagaagctgagctggagcgtggcccccaagaacgccctggtgcagctgcacgagctgagacccggcctgcagtacagaaccgtgagccagaccggccccgtgcacgcccccgtgttcgccgtggccgtggaggtgaacggcctgaccttcgagggcaccggccccaccaagaagaaggccaagatgagagccgccgagctggccctgagaagcttcgtgcagttccccaacgcctgccaggcccacctggccatgggcggcggccccggccccggcaccgacttcaccagcgaccaggccgacttccccgacaccctgttccaggagttcgagccccccgcccccagacccggcctggccggcggcagacccggcgacgccgccctgctgagcgccgcctacggcagaagaagactgctgtgcagagccctggacctggtgggccccacccccgccacccccgccgcccccggcgagagaaaccccgtggtgctgctgaacagactgagagccggcctgagatacgtgtgcctggccgagcccgccgagagaagagccagaagcttcgtgatggccgtgagcgtggacggcagaaccttcgagggcagcggcagaagcaagaagctggccagaggccaggccgcccaggccgccctgcaggagctgttcgacatccagatgcccggccacgcccccggcagagccagaagaacccccatgccccaggagttcgccgacagcatcagccagctggtgacccagaagttcagagaggtgaccaccgacctgacccccatgcacgccagacacaaggccctggccggcatcgtgatgaccaagggcctggacgccagacaggcccaggtggtggccctgagcagcggcaccaagtgcatcagcggcgagcacctgagcgaccagggcctggtggtgaacgactgccacgccgaggtggtggccagaagagccttcctgcacttcctgtacacccagctggagctgcacctgagcaagagaagagaggacagcgagagaagcatcttcgtgagactgaaggagggcggctacagactgagagagaacatcctgttccacctgtacgtgagcaccagcccctgcggcgacgccagactgcacagcccctacgagatcaccaccgacctgcacagcagcaagcacctggtgagaaagttcagaggccacctgagaaccaagatcgagagcggcgagggcaccgtgcccgtgagaggccccagcgccgtgcagacctgggacggcgtgctgctgggcgagcagctgatcaccatgagctgcaccgacaagatcgccagatggaacgtgctgggcctgcagggcgccctgctgagccacttcgtggagcccgtgtacctgcagagcatcgtggtgggcagcctgcaccacaccggccacctggccagagtgatgagccacagaatggagggcgtgggccagctgcccgccagctacagacacaacagacccctgctgagcggcgtgagcgacgccgaggccagacagcccggcaagagcccccccttcagcatgaactgggtggtgggcagcgccgacctggagatcatcaacgccaccaccggcagaagaagctgcggcggccccagcagactgtgcaagcacgtgctgagcgccagatgggccagactgtacggcagactgagcaccagaacccccagccccggcgacacccccagcatgtactgcgaggccaagctgggcgcccacacctaccagagcgtgaagcagcagctgttcaaggccttccagaaggccggcctgggcacctgggtgagaaagccccccgagcagcagcagttcctgctgaccctgtag

SEQ ID NO: 72049 - DNA, 1509 bp, synthetic construct
  misc_feature 1..1509: note = Description of Artificial Sequence: Synthetic coding sequence
  source 1..1509: mol_type = other DNA
atgtggaccgccgacgagatcgcccagctgtgctacgagcactacggcatcagactgcccaagaagggcaagcccgagcccaaccacgagtggaccctgctggccgccgtggtgaagatccagagccccgccgacaaggcctgcgacacccccgacaagcccgtgcaggtgaccaaggaggtggtgagcatgggcaccggcaccaagtgcatcggccagagcaagatgagaaagaacggcgacatcctgaacgacagccacgccgaggtgatcgccagaagaagcttccagagatacctgctgcaccagctgcagctggccgccaccctgaaggaggacagcatcttcgtgcccggcacccagaagggcgtgtggaagctgagaagagacctgatcttcgtgttcttcagcagccacaccccctgcggcgacgccagcatcatccccatgctggagttcgaggaccagccctgctgccccgtgttcagaaactgggcccacaacagcagcgtggaggccagcagcaacctggaggcccccggcaacgagagaaagtgcgaggaccccgacagccccgtgaccaagaagatgagactggagcccggcaccgccgccagagaggtgaccaacggcgccgcccaccaccagagcttcggcaagcagaagagcggccccatcagccccggcatccacagctgcgacctgaccgtggagggcctggccaccgtgaccagaatcgcccccggcagcgccaaggtgatcgacgtgtacagaaccggcgccaagtgcgtgcccggcgaggccggcgacagcggcaagcccggcgccgccttccaccaggtgggcctgctgagagtgaagcccggcagaggcgacagaaccagaagcatgagctgcagcgacaagatggccagatggaacgtgctgggctgccagggcgccctgctgatgcacctgctggaggagcccatctacctgagcgccgtggtgatcggcaagtgcccctacagccaggaggccatgcagagagccctgatcggcagatgccagaacgtgagcgccctgcccaagggcttcggcgtgcaggagctgaagatcctgcagagcgacctgctgttcgagcagagcagaagcgccgtgcaggccaagagagccgacagccccggcagactggtgccctgcggcgccgccatcagctggagcgccgtgcccgagcagcccctggacgtgaccgccaacggcttcccccagggcaccaccaagaagaccatcggcagcctgcaggccagaagccagatcagcaaggtggagctgttcagaagcttccagaagctgctgagcagaatcgccagagacaagtggccccacagcctgagagtgcagaagctggacacctaccaggagtacaaggaggccgccagcagctaccaggaggcctggagcaccctgagaaagcaggtgttcggcagctggatcagaaacccccccgactaccaccagttcaagtag

SEQ ID NO: 72050 - DNA, 1422 bp, synthetic construct
  misc_feature 1..1422: note = Description of Artificial Sequence: Synthetic coding sequence
  source 1..1422: mol_type = other DNA
atgtggaccctgctggccgccgtggtgaagatccagagccccgccgacaaggcctgcgacacccccgacaagcccgtgcaggtgaccaaggaggtggtgagcatgggcaccggcaccaagtgcatcggccagagcaagatgagaaagaacggcgacatcctgaacgacagccacgccgaggtgatcgccagaagaagcttccagagatacctgctgcaccagctgcagctggccgccaccctgaaggaggacagcatcttcgtgcccggcacccagaagggcgtgtggaagctgagaagagacctgatcttcgtgttcttcagcagccacaccccctgcggcgacgccagcatcatccccatgctggagttcgaggaccagccctgctgccccgtgttcagaaactgggcccacaacagcagcgtggaggccagcagcaacctggaggcccccggcaacgagagaaagtgcgaggaccccgacagccccgtgaccaagaagatgagactggagcccggcaccgccgccagagaggtgaccaacggcgccgcccaccaccagagcttcggcaagcagaagagcggccccatcagccccggcatccacagctgcgacctgaccgtggagggcctggccaccgtgaccagaatcgcccccggcagcgccaaggtgatcgacgtgtacagaaccggcgccaagtgcgtgcccggcgaggccggcgacagcggcaagcccggcgccgccttccaccaggtgggcctgctgagagtgaagcccggcagaggcgacagaaccagaagcatgagctgcagcgacaagatggccagatggaacgtgctgggctgccagggcgccctgctgatgcacctgctggaggagcccatctacctgagcgccgtggtgatcggcaagtgcccctacagccaggaggccatgcagagagccctgatcggcagatgccagaacgtgagcgccctgcccaagggcttcggcgtgcaggagctgaagatcctgcagagcgacctgctgttcgagcagagcagaagcgccgtgcaggccaagagagccgacagccccggcagactggtgccctgcggcgccgccatcagctggagcgccgtgcccgagcagcccctggacgtgaccgccaacggcttcccccagggcaccaccaagaagaccatcggcagcctgcaggccagaagccagatcagcaaggtggagctgttcagaagcttccagaagctgctgagcagaatcgccagagacaagtggccccacagcctgagagtgcagaagctggacacctaccaggagtacaaggaggccgccagcagctaccaggaggcctggagcaccctgagaaagcaggtgttcggcagctggatcagaaacccccccgactaccaccagttcaagtag

SEQ ID NO: 72051 - DNA, 1089 bp, synthetic construct
  misc_feature 1..1089: note = Description of Artificial Sequence: Synthetic coding sequence
  source 1..1089: mol_type = other DNA
atggccgccgccgaggaggagcccaagcccaagaagctgaaggtggaggccccccaggccctgagagagaacatcctgttcggcatgggcaaccccctgctggacatcagcgccgtggtggacaaggacttcctggacaagtacagcctgaagcccaacgaccagatcctggccgaggacaagcacaaggagctgttcgacgagctggtgaagaagttcaaggtggagtaccacgccggcggcagcacccagaacagcatcaaggtggcccagtggatgatccagcagccccacaaggccgccaccttcttcggctgcatcggcatcgacaagttcggcgagatcctgaagagaaaggccgccgaggcccacgtggacgcccactactacgagcagaacgagcagcccaccggcacctgcgccgcctgcatcaccggcgacaacagaagcctgatcgccaacctggccgccgccaactgctacaagaaggagaagcacctggacctggagaagaactggatgctggtggagaaggccagagtgtgctacatcgccggcttcttcctgaccgtgagccccgagagcgtgctgaaggtggcccaccacgccagcgagaacaacagaatcttcaccctgaacctgagcgcccccttcatcagccagttctacaaggagagcctgatgaaggtgatgccctacgtggacatcctgttcggcaacgagaccgaggccgccaccttcgccagagagcagggcttcgagaccaaggacatcaaggagatcgccaagaagacccaggccctgcccaagatgaacagcaagagacagagaatcgtgatcttcacccagggcagagacgacaccatcatggccaccgagagcgaggtgaccgccttcgccgtgctggaccaggaccagaaggagatcatcgacaccaacggcgccggcgacgccttcgtgggcggcttcctgagccagctggtgagcgacaagcccctgaccgagtgcatcagagccggccactacgccgccagcatcatcatcagaagaaccggctgcaccttccccgagaagcccgacttccactag

SEQ ID NO: 72052 - DNA, 1038 bp, synthetic construct
  misc_feature 1..1038: note = Description of Artificial Sequence: Synthetic coding sequence
  source 1..1038: mol_type = other DNA
atgaccagcgtgagagagaacatcctgttcggcatgggcaaccccctgctggacatcagcgccgtggtggacaaggacttcctggacaagtacagcctgaagcccaacgaccagatcctggccgaggacaagcacaaggagctgttcgacgagctggtgaagaagttcaaggtggagtaccacgccggcggcagcacccagaacagcatcaaggtggcccagtggatgatccagcagccccacaaggccgccaccttcttcggctgcatcggcatcgacaagttcggcgagatcctgaagagaaaggccgccgaggcccacgtggacgcccactactacgagcagaacgagcagcccaccggcacctgcgccgcctgcatcaccggcgacaacagaagcctgatcgccaacctggccgccgccaactgctacaagaaggagaagcacctggacctggagaagaactggatgctggtggagaaggccagagtgtgctacatcgccggcttcttcctgaccgtgagccccgagagcgtgctgaaggtggcccaccacgccagcgagaacaacagaatcttcaccctgaacctgagcgcccccttcatcagccagttctacaaggagagcctgatgaaggtgatgccctacgtggacatcctgttcggcaacgagaccgaggccgccaccttcgccagagagcagggcttcgagaccaaggacatcaaggagatcgccaagaagacccaggccctgcccaagatgaacagcaagagacagagaatcgtgatcttcacccagggcagagacgacaccatcatggccaccgagagcgaggtgaccgccttcgccgtgctggaccaggaccagaaggagatcatcgacaccaacggcgccggcgacgccttcgtgggcggcttcctgagccagctggtgagcgacaagcccctgaccgagtgcatcagagccggccactacgccgccagcatcatcatcagaagaaccggctgcaccttccccgagaagcccgacttccactag

SEQ ID NO: 72053 - DNA, 918 bp, synthetic construct
  misc_feature 1..918: note = Description of Artificial Sequence: Synthetic coding sequence
  source 1..918: mol_type = other DNA
atggccgccgccgaggaggagcccaagcccaagaagctgaaggtggaggccccccaggccctgagagagaacatcctgttcggcatgggcaaccccctgctggacatcagcgccgtggtggacaaggacttcctggacaagtacagcctgaagcccaacgaccagatcctggccgaggacaagcacaaggagctgttcgacgagctggtgaagaagttcaaggtggagtaccacgccggcggcagcacccagaacagcatcaaggtggcccagtggatgatccagcagccccacaaggccgccaccttcttcggctgcatcggcatcgacaagttcggcgagatcctgaagagaaaggccgccgaggcccacgtggacgcccactactacgagcagaacgagcagcccaccggcacctgcgccgcctgcatcaccggcgacaacagaagcctgatcgccaacctggccgccgccaactgctacaagaaggagaagcacctggacctggagaagaactggatgctggtggagaaggccagagtgtgctacatcgccgaggccgccaccttcgccagagagcagggcttcgagaccaaggacatcaaggagatcgccaagaagacccaggccctgcccaagatgaacagcaagagacagagaatcgtgatcttcacccagggcagagacgacaccatcatggccaccgagagcgaggtgaccgccttcgccgtgctggaccaggaccagaaggagatcatcgacaccaacggcgccggcgacgccttcgtgggcggcttcctgagccagctggtgagcgacaagcccctgaccgagtgcatcagagccggccactacgccgccagcatcatcatcagaagaaccggctgcaccttccccgagaagcccgacttccactag

SEQ ID NO: 72054 - DNA, 984 bp, synthetic construct
  misc_feature 1..984: note = Description of Artificial Sequence: Synthetic coding sequence
  source 1..984: mol_type = other DNA
atgaccagcgtgagagagaacatcctgttcggcatgggcaaccccctgctggacatcagcgccgtggtggacaaggacttcctggacaagttcgacgagctggtgaagaagttcaaggtggagtaccacgccggcggcagcacccagaacagcatcaaggtggcccagtggatgatccagcagccccacaaggccgccaccttcttcggctgcatcggcatcgacaagttcggcgagatcctgaagagaaaggccgccgaggcccacgtggacgcccactactacgagcagaacgagcagcccaccggcacctgcgccgcctgcatcaccggcgacaacagaagcctgatcgccaacctggccgccgccaactgctacaagaaggagaagcacctggacctggagaagaactggatgctggtggagaaggccagagtgtgctacatcgccggcttcttcctgaccgtgagccccgagagcgtgctgaaggtggcccaccacgccagcgagaacaacagaatcttcaccctgaacctgagcgcccccttcatcagccagttctacaaggagagcctgatgaaggtgatgccctacgtggacatcctgttcggcaacgagaccgaggccgccaccttcgccagagagcagggcttcgagaccaaggacatcaaggagatcgccaagaagacccaggccctgcccaagatgaacagcaagagacagagaatcgtgatcttcacccagggcagagacgacaccatcatggccaccgagagcgaggtgaccgccttcgccgtgctggaccaggaccagaaggagatcatcgacaccaacggcgccggcgacgccttcgtgggcggcttcctgagccagctggtgagcgacaagcccctgaccgagtgcatcagagccggccactacgccgccagcatcatcatcagaagaaccggctgcaccttccccgagaagcccgacttccactag

SEQ ID NO: 72055 - DNA, 2244 bp, synthetic construct
  misc_feature 1..2244: note = Description of Artificial Sequence: Synthetic coding sequence
  source 1..2244: mol_type = other DNA
atgcccctgttcaagctgcccgccgaggagaagcagatcgacgacgccatgagaaacttcgccgagaaggtgttcgccagcgaggtgaaggacgagggcggcagacaggagatcagccccttcgacgtggacgagatctgccccatcagccaccacgagatgcaggcccacatcttccacctggagaccctgagcaccagcaccgaggccagaagaaagaagagattccagggcagaaagaccgtgaacctgagcatccccctgagcgagaccagcagcaccaagctgagccacatcgacgagtacatcagcagcagccccacctaccagaccgtgcccgacttccagagagtgcagatcaccggcgactacgccagcggcgtgaccgtggaggacttcgagatcgtgtgcaagggcctgtacagagccctgtgcatcagagagaagtacatgcagaagagcttccagagattccccaagacccccagcaagtacctgagaaacatcgacggcgaggcctgggtggccaacgagagcttctaccccgtgttcaccccccccgtgaagaagggcgaggaccccttcagaaccgacaacctgcccgagaacctgggctaccacctgaagatgaaggacggcgtggtgtacgtgtaccccaacgaggccgccgtgagcaaggacgagcccaagcccctgccctaccccaacctggacaccttcctggacgacatgaacttcctgctggccctgatcgcccagggccccgtgaagacctacacccacagaagactgaagttcctgagcagcaagttccaggtgcaccagatgctgaacgagatggacgagctgaaggagctgaagaacaacccccacagagacttctacaactgcagaaaggtggacacccacatccacgccgccgcctgcatgaaccagaagcacctgctgagattcatcaagaagagctaccagatcgacgccgacagagtggtgtacagcaccaaggagaagaacctgaccctgaaggagctgttcgccaagctgaagatgcacccctacgacctgaccgtggacagcctggacgtgcacgccggcagacagaccttccagagattcgacaagttcaacgacaagtacaaccccgtgggcgccagcgagctgagagacctgtacctgaagaccgacaactacatcaacggcgagtacttcgccaccatcatcaaggaggtgggcgccgacctggtggaggccaagtaccagcacgccgagcccagactgagcatctacggcagaagccccgacgagtggagcaagctgagcagctggttcgtgtgcaacagaatccactgccccaacatgacctggatgatccaggtgcccagaatctacgacgtgttcagaagcaagaacttcctgccccacttcggcaagatgctggagaacatcttcatgcccgtgttcgaggccaccatcaacccccaggccgaccccgagctgagcgtgttcctgaagcacatcaccggcttcgacagcgtggacgacgagagcaagcacagcggccacatgttcagcagcaagagccccaagccccaggagtggaccctggagaagaaccccagctacacctactacgcctactacatgtacgccaacatcatggtgctgaacagcctgagaaaggagagaggcatgaacaccttcctgttcagaccccactgcggcgaggccggcgccctgacccacctgatgaccgccttcatgatcgccgacgacatcagccacggcctgaacctgaagaagagccccgtgctgcagtacctgttcttcctggcccagatccccatcgccatgagccccctgagcaacaacagcctgttcctggagtacgccaagaaccccttcctggacttcctgcagaagggcctgatgatcagcctgagcaccgacgaccccatgcagttccacttcaccaaggagcccctgatggaggagtacgccatcgccgcccaggtgttcaagctgagcacctgcgacatgtgcgaggtggccagaaacagcgtgctgcagtgcggcatcagccacgaggagaaggtgaagttcctgggcgacaactacctggaggagggccccgccggcaacgacatcagaagaaccaacgtggcccagatcagaatggcctacagatacgagacctggtgctacgagctgaacctgatcgccgagggcctgaagagcaccgagtag

SEQ ID NO: 72056 - DNA, 2343 bp, synthetic construct
  misc_feature 1..2343: note = Description of Artificial Sequence: Synthetic coding sequence
  source 1..2343: mol_type = other DNA
atgaacgtgagaatcttctacagcgtgagccagagcccccacagcctgctgagcctgctgttctactgcgccatcctggagagcagaatcagcgccaccatgcccctgttcaagctgcccgccgaggagaagcagatcgacgacgccatgagaaacttcgccgagaaggtgttcgccagcgaggtgaaggacgagggcggcagacaggagatcagccccttcgacgtggacgagatctgccccatcagccaccacgagatgcaggcccacatcttccacctggagaccctgagcaccagcaccgaggccagaagaaagaagagattccagggcagaaagaccgtgaacctgagcatccccctgagcgagaccagcagcaccaagctgagccacatcgacgagtacatcagcagcagccccacctaccagaccgtgcccgacttccagagagtgcagatcaccggcgactacgccagcggcgtgaccgtggaggacttcgagatcgtgtgcaagggcctgtacagagccctgtgcatcagagagaagtacatgcagaagagcttccagagattccccaagacccccagcaagtacctgagaaacatcgacggcgaggcctgggtggccaacgagagcttctaccccgtgttcaccccccccgtgaagaagggcgaggaccccttcagaaccgacaacctgcccgagaacctgggctaccacctgaagatgaaggacggcgtggtgtacgtgtaccccaacgaggccgccgtgagcaaggacgagcccaagcccctgccctaccccaacctggacaccttcctggacgacatgaacttcctgctggccctgatcgcccagggccccgtgaagacctacacccacagaagactgaagttcctgagcagcaagttccaggtgcaccagatgctgaacgagatggacgagctgaaggagctgaagaacaacccccacagagacttctacaactgcagaaaggtggacacccacatccacgccgccgcctgcatgaaccagaagcacctgctgagattcatcaagaagagctaccagatcgacgccgacagagtggtgtacagcaccaaggagaagaacctgaccctgaaggagctgttcgccaagctgaagatgcacccctacgacctgaccgtggacagcctggacgtgcacgccggcagacagaccttccagagattcgacaagttcaacgacaagtacaaccccgtgggcgccagcgagctgagagacctgtacctgaagaccgacaactacatcaacggcgagtacttcgccaccatcatcaaggaggtgggcgccgacctggtggaggccaagtaccagcacgccgagcccagactgagcatctacggcagaagccccgacgagtggagcaagctgagcagctggttcgtgtgcaacagaatccactgccccaacatgacctggatgatccaggtgcccagaatctacgacgtgttcagaagcaagaacttcctgccccacttcggcaagatgctggagaacatcttcatgcccgtgttcgaggccaccatcaacccccaggccgaccccgagctgagcgtgttcctgaagcacatcaccggcttcgacagcgtggacgacgagagcaagcacagcggccacatgttcagcagcaagagccccaagccccaggagtggaccctggagaagaaccccagctacacctactacgcctactacatgtacgccaacatcatggtgctgaacagcctgagaaaggagagaggcatgaacaccttcctgttcagaccccactgcggcgaggccggcgccctgacccacctgatgaccgccttcatgatcgccgacgacatcagccacggcctgaacctgaagaagagccccgtgctgcagtacctgttcttcctggcccagatccccatcgccatgagccccctgagcaacaacagcctgttcctggagtacgccaagaaccccttcctggacttcctgcagaagggcctgatgatcagcctgagcaccgacgaccccatgcagttccacttcaccaaggagcccctgatggaggagtacgccatcgccgcccaggtgttcaagctgagcacctgcgacatgtgcgaggtggccagaaacagcgtgctgcagtgcggcatcagccacgaggagaaggtgaagttcctgggcgacaactacctggaggagggccccgccggcaacgacatcagaagaaccaacgtggcccagatcagaatggcctacagatacgagacctggtgctacgagctgaacctgatcgccgagggcctgaagagcaccgagtag

SEQ ID NO: 72057 - DNA, 2331 bp, synthetic construct
  misc_feature 1..2331: note = Description of Artificial Sequence: Synthetic coding sequence
  source 1..2331: mol_type = other DNA
atgaacgtgagaatcttctacagcgtgagccagagcccccacagcctgctgagcctgctgttctactgcgccatcctggagagcagaatcagcgccaccatgcccctgttcaagctgcccgagatcgacgacgccatgagaaacttcgccgagaaggtgttcgccagcgaggtgaaggacgagggcggcagacaggagatcagccccttcgacgtggacgagatctgccccatcagccaccacgagatgcaggcccacatcttccacctggagaccctgagcaccagcaccgaggccagaagaaagaagagattccagggcagaaagaccgtgaacctgagcatccccctgagcgagaccagcagcaccaagctgagccacatcgacgagtacatcagcagcagccccacctaccagaccgtgcccgacttccagagagtgcagatcaccggcgactacgccagcggcgtgaccgtggaggacttcgagatcgtgtgcaagggcctgtacagagccctgtgcatcagagagaagtacatgcagaagagcttccagagattccccaagacccccagcaagtacctgagaaacatcgacggcgaggcctgggtggccaacgagagcttctaccccgtgttcaccccccccgtgaagaagggcgaggaccccttcagaaccgacaacctgcccgagaacctgggctaccacctgaagatgaaggacggcgtggtgtacgtgtaccccaacgaggccgccgtgagcaaggacgagcccaagcccctgccctaccccaacctggacaccttcctggacgacatgaacttcctgctggccctgatcgcccagggccccgtgaagacctacacccacagaagactgaagttcctgagcagcaagttccaggtgcaccagatgctgaacgagatggacgagctgaaggagctgaagaacaacccccacagagacttctacaactgcagaaaggtggacacccacatccacgccgccgcctgcatgaaccagaagcacctgctgagattcatcaagaagagctaccagatcgacgccgacagagtggtgtacagcaccaaggagaagaacctgaccctgaaggagctgttcgccaagctgaagatgcacccctacgacctgaccgtggacagcctggacgtgcacgccggcagacagaccttccagagattcgacaagttcaacgacaagtacaaccccgtgggcgccagcgagctgagagacctgtacctgaagaccgacaactacatcaacggcgagtacttcgccaccatcatcaaggaggtgggcgccgacctggtggaggccaagtaccagcacgccgagcccagactgagcatctacggcagaagccccgacgagtggagcaagctgagcagctggttcgtgtgcaacagaatccactgccccaacatgacctggatgatccaggtgcccagaatctacgacgtgttcagaagcaagaacttcctgccccacttcggcaagatgctggagaacatcttcatgcccgtgttcgaggccaccatcaacccccaggccgaccccgagctgagcgtgttcctgaagcacatcaccggcttcgacagcgtggacgacgagagcaagcacagcggccacatgttcagcagcaagagccccaagccccaggagtggaccctggagaagaaccccagctacacctactacgcctactacatgtacgccaacatcatggtgctgaacagcctgagaaaggagagaggcatgaacaccttcctgttcagaccccactgcggcgaggccggcgccctgacccacctgatgaccgccttcatgatcgccgacgacatcagccacggcctgaacctgaagaagagccccgtgctgcagtacctgttcttcctggcccagatccccatcgccatgagccccctgagcaacaacagcctgttcctggagtacgccaagaaccccttcctggacttcctgcagaagggcctgatgatcagcctgagcaccgacgaccccatgcagttccacttcaccaaggagcccctgatggaggagtacgccatcgccgcccaggtgttcaagctgagcacctgcgacatgtgcgaggtggccagaaacagcgtgctgcagtgcggcatcagccacgaggagaaggtgaagttcctgggcgacaactacctggaggagggccccgccggcaacgacatcagaagaaccaacgtggcccagatcagaatggcctacagatacgagacctggtgctacgagctgaacctgatcgccgagggcctgaagagcaccgagtag

SEQ ID NO: 72058 - DNA, 2640 bp, synthetic construct
  misc_feature 1..2640: note = Description of Artificial Sequence: Synthetic coding sequence
  source 1..2640: mol_type = other DNA
atgagaaacagaggccagggcctgttcagactgagaagcagatgcttcctgcaccagagcctgcccctgggcgccggcagaagaaagggcctggacgtggccgagcccggccccagcagatgcagaagcgacagccccgccgtggccgccgtggtgcccgccatggccagctaccccagcggcagcggcaagcccaaggccaagtaccccttcaagaagagagccagcctgcaggccagcaccgccgcccccgaggccagaggcggcctgggcgccccccccctgcagagcgccagaagcctgcccggccccgccccctgcctgaagcacttccccctggacctgagaaccagcatggacggcaagtgcaaggagatcgccgaggagctgttcaccagaagcctggccgagagcgagctgagaagcgccccctacgagttccccgaggagagccccatcgagcagctggaggagagaagacagagactggagagacagatcagccaggacgtgaagctggagcccgacatcctgctgagagccaagcaggacttcctgaagaccgacagcgacagcgacctgcagctgtacaaggagcagggcgagggccagggcgacagaagcctgagagagagagacgtgctggagagagagttccagagagtgaccatcagcggcgaggagaagtgcggcgtgcccttcaccgacctgctggacgccgccaagagcgtggtgagagccctgttcatcagagagaagtacatggccctgagcctgcagagcttctgccccaccaccagaagatacctgcagcagctggccgagaagcccctggagaccagaacctacgagcagggccccgacacccccgtgagcgccgacgcccccgtgcacccccccgccctggagcagcacccctacgagcactgcgagcccagcaccatgcccggcgacctgggcctgggcctgagaatggtgagaggcgtggtgcacgtgtacaccagaagagagcccgacgagcactgcagcgaggtggagctgccctaccccgacctgcaggagttcgtggccgacgtgaacgtgctgatggccctgatcatcaacggccccatcaagagcttctgctacagaagactgcagtacctgagcagcaagttccagatgcacgtgctgctgaacgagatgaaggagctggccgcccagaagaaggtgccccacagagacttctacaacatcagaaaggtggacacccacatccacgccagcagctgcatgaaccagaagcacctgctgagattcatcaagagagccatgaagagacacctggaggagatcgtgcacgtggagcagggcagagagcagaccctgagagaggtgttcgagagcatgaacctgaccgcctacgacctgagcgtggacaccctggacgtgcacgccgacagaaacaccttccacagattcgacaagttcaacgccaagtacaaccccatcggcgagagcgtgctgagagagatcttcatcaagaccgacaacagagtgagcggcaagtacttcgcccacatcatcaaggaggtgatgagcgacctggaggagagcaagtaccagaacgccgagctgagactgagcatctacggcagaagcagagacgagtgggacaagctggccagatgggccgtgatgcacagagtgcacagccccaacgtgagatggctggtgcaggtgcccagactgttcgacgtgtacagaaccaagggccagctggccaacttccaggagatgctggagaacatcttcctgcccctgttcgaggccaccgtgcaccccgccagccaccccgagctgcacctgttcctggagcacgtggacggcttcgacagcgtggacgacgagagcaagcccgagaaccacgtgttcaacctggagagccccctgcccgaggcctgggtggaggaggacaaccccccctacgcctactacctgtactacaccttcgccaacatggccatgctgaaccacctgagaagacagagaggcttccacaccttcgtgctgagaccccactgcggcgaggccggccccatccaccacctggtgagcgccttcatgctggccgagaacatcagccacggcctgctgctgagaaaggcccccgtgctgcagtacctgtactacctggcccagatcggcatcgccatgagccccctgagcaacaacagcctgttcctgagctaccacagaaaccccctgcccgagtacctgagcagaggcctgatggtgagcctgagcaccgacgaccccctgcagttccacttcaccaaggagcccctgatggaggagtacagcatcgccacccaggtgtggaagctgagcagctgcgacatgtgcgagctggccagaaacagcgtgctgatgagcggcttcagccacaaggtgaagagccactggctgggccccaactacaccaaggagggccccgagggcaacgacatcagaagaaccaacgtgcccgacatcagagtgggctacagatacgagaccctgtgccaggagctggccctgatcacccaggccgtgcagagcgagatgctggagaccatccccgaggaggccggcatcaccatgagccccggcccccagtag

SEQ ID NO: 72059 - DNA, 2397 bp, synthetic construct
  misc_feature 1..2397: note = Description of Artificial Sequence: Synthetic coding sequence
  source 1..2397: mol_type = other DNA
atggccagcgaggccagaggcggcctgggcgccccccccctgcagagcgccagaagcctgcccggccccgccccctgcctgaagcacttccccctggacctgagaaccagcatggacggcaagtgcaaggagatcgccgaggagctgttcaccagaagcctggccgagagcgagctgagaagcgccccctacgagttccccgaggagagccccatcgagcagctggaggagagaagacagagactggagagacagatcagccaggacgtgaagctggagcccgacatcctgctgagagccaagcaggacttcctgaagaccgacagcgacagcgacctgcagctgtacaaggagcagggcgagggccagggcgacagaagcctgagagagagagacgtgctggagagagagttccagagagtgaccatcagcggcgaggagaagtgcggcgtgcccttcaccgacctgctggacgccgccaagagcgtggtgagagccctgttcatcagagagaagtacatggccctgagcctgcagagcttctgccccaccaccagaagatacctgcagcagctggccgagaagcccctggagaccagaacctacgagcagggccccgacacccccgtgagcgccgacgcccccgtgcacccccccgccctggagcagcacccctacgagcactgcgagcccagcaccatgcccggcgacctgggcctgggcctgagaatggtgagaggcgtggtgcacgtgtacaccagaagagagcccgacgagcactgcagcgaggtggagctgccctaccccgacctgcaggagttcgtggccgacgtgaacgtgctgatggccctgatcatcaacggccccatcaagagcttctgctacagaagactgcagtacctgagcagcaagttccagatgcacgtgctgctgaacgagatgaaggagctggccgcccagaagaaggtgccccacagagacttctacaacatcagaaaggtggacacccacatccacgccagcagctgcatgaaccagaagcacctgctgagattcatcaagagagccatgaagagacacctggaggagatcgtgcacgtggagcagggcagagagcagaccctgagagaggtgttcgagagcatgaacctgaccgcctacgacctgagcgtggacaccctggacgtgcacgccgacagaaacaccttccacagattcgacaagttcaacgccaagtacaaccccatcggcgagagcgtgctgagagagatcttcatcaagaccgacaacagagtgagcggcaagtacttcgcccacatcatcaaggaggtgatgagcgacctggaggagagcaagtaccagaacgccgagctgagactgagcatctacggcagaagcagagacgagtgggacaagctggccagatgggccgtgatgcacagagtgcacagccccaacgtgagatggctggtgcaggtgcccagactgttcgacgtgtacagaaccaagggccagctggccaacttccaggagatgctggagaacatcttcctgcccctgttcgaggccaccgtgcaccccgccagccaccccgagctgcacctgttcctggagcacgtggacggcttcgacagcgtggacgacgagagcaagcccgagaaccacgtgttcaacctggagagccccctgcccgaggcctgggtggaggaggacaaccccccctacgcctactacctgtactacaccttcgccaacatggccatgctgaaccacctgagaagacagagaggcttccacaccttcgtgctgagaccccactgcggcgaggccggccccatccaccacctggtgagcgccttcatgctggccgagaacatcagccacggcctgctgctgagaaaggcccccgtgctgcagtacctgtactacctggcccagatcggcatcgccatgagccccctgagcaacaacagcctgttcctgagctaccacagaaaccccctgcccgagtacctgagcagaggcctgatggtgagcctgagcaccgacgaccccctgcagttccacttcaccaaggagcccctgatggaggagtacagcatcgccacccaggtgtggaagctgagcagctgcgacatgtgcgagctggccagaaacagcgtgctgatgagcggcttcagccacaaggtgaagagccactggctgggccccaactacaccaaggagggccccgagggcaacgacatcagaagaaccaacgtgcccgacatcagagtgggctacagatacgagaccctgtgccaggagctggccctgatcacccaggccgtgcagagcgagatgctggagaccatccccgaggaggccggcatcaccatgagccccggcccccagtag

SEQ ID NO: 72060 - DNA, 2415 bp, synthetic construct
  misc_feature 1..2415: note = Description of Artificial Sequence: Synthetic coding sequence
  source 1..2415: mol_type = other DNA
atgtggcagagccaggcccccgccggcgccgcccagaccccccccctgagccccccctggagccagccctggcaccccatccacctggccctggccagccccagacccaacatccccctgagaagcggccccgcctgcagaccccccctgcagctgcaggagctgttcaccagaagcctggccgagagcgagctgagaagcgccccctacgagttccccgaggagagccccatcgagcagctggaggagagaagacagagactggagagacagatcagccaggacgtgaagctggagcccgacatcctgctgagagccaagcaggacttcctgaagaccgacagcgacagcgacctgcagctgtacaaggagcagggcgagggccagggcgacagaagcctgagagagagagacgtgctggagagagagttccagagagtgaccatcagcggcgaggagaagtgcggcgtgcccttcaccgacctgctggacgccgccaagagcgtggtgagagccctgttcatcagagagaagtacatggccctgagcctgcagagcttctgccccaccaccagaagatacctgcagcagctggccgagaagcccctggagaccagaacctacgagcagggccccgacacccccgtgagcgccgacgcccccgtgcacccccccgccctggagcagcacccctacgagcactgcgagcccagcaccatgcccggcgacctgggcctgggcctgagaatggtgagaggcgtggtgcacgtgtacaccagaagagagcccgacgagcactgcagcgaggtggagctgccctaccccgacctgcaggagttcgtggccgacgtgaacgtgctgatggccctgatcatcaacggccccatcaagagcttctgctacagaagactgcagtacctgagcagcaagttccagatgcacgtgctgctgaacgagatgaaggagctggccgcccagaagaaggtgccccacagagacttctacaacatcagaaaggtggacacccacatccacgccagcagctgcatgaaccagaagcacctgctgagattcatcaagagagccatgaagagacacctggaggagatcgtgcacgtggagcagggcagagagcagaccctgagagaggtgttcgagagcatgaacctgaccgcctacgacctgagcgtggacaccctggacgtgcacgccgacagaaacaccttccacagattcgacaagttcaacgccaagtacaaccccatcggcgagagcgtgctgagagagatcttcatcaagaccgacaacagagtgagcggcaagtacttcgcccacatcatcaaggaggtgatgagcgacctggaggagagcaagtaccagaacgccgagctgagactgagcatctacggcagaagcagagacgagtgggacaagctggccagatgggccgtgatgcacagagtgcacagccccaacgtgagatggctggtgcaggtgcccagactgttcgacgtgtacagaaccaagggccagctggccaacttccaggagatgctggagaacatcttcctgcccctgttcgaggccaccgtgcaccccgccagccaccccgagctgcacctgttcctggagcacgtggacggcttcgacagcgtggacgacgagagcaagcccgagaaccacgtgttcaacctggagagccccctgcccgaggcctgggtggaggaggacaaccccccctacgcctactacctgtactacaccttcgccaacatggccatgctgaaccacctgagaagacagagaggcttccacaccttcgtgctgagaccccactgcggcgaggccggccccatccaccacctggtgagcgccttcatgctggccgagaacatcagccacggcctgctgctgagaaaggcccccgtgctgcagtacctgtactacctggcccagatcggcatcgccatgagccccctgagcaacaacagcctgttcctgagctaccacagaaaccccctgcccgagtacctgagcagaggcctgatggtgagcctgagcaccgacgaccccctgcagttccacttcaccaaggagcccctgatggaggagtacagcatcgccacccaggtgtggaagctgagcagctgcgacatgtgcgagctggccagaaacagcgtgctgatgagcggcttcagccacaaggtgaagagccactggctgggccccaactacaccaaggagggccccgagggcaacgacatcagaagaaccaacgtgcccgacatcagagtgggctacagatacgagaccctgtgccaggagctggccctgatcacccaggccgtgcagagcgagatgctggagaccatccccgaggaggccggcatcaccatgagccccggcccccagtag

SEQ ID NO: 72061 - DNA, 2283 bp, synthetic construct
  misc_feature 1..2283: note = Description of Artificial Sequence: Synthetic coding sequence
  source 1..2283: mol_type = other DNA
atgctgaccttcctgcccagcccccaggagctgttcaccagaagcctggccgagagcgagctgagaagcgccccctacgagttccccgaggagagccccatcgagcagctggaggagagaagacagagactggagagacagatcagccaggacgtgaagctggagcccgacatcctgctgagagccaagcaggacttcctgaagaccgacagcgacagcgacctgcagctgtacaaggagcagggcgagggccagggcgacagaagcctgagagagagagacgtgctggagagagagttccagagagtgaccatcagcggcgaggagaagtgcggcgtgcccttcaccgacctgctggacgccgccaagagcgtggtgagagccctgttcatcagagagaagtacatggccctgagcctgcagagcttctgccccaccaccagaagatacctgcagcagctggccgagaagcccctggagaccagaacctacgagcagggccccgacacccccgtgagcgccgacgcccccgtgcacccccccgccctggagcagcacccctacgagcactgcgagcccagcaccatgcccggcgacctgggcctgggcctgagaatggtgagaggcgtggtgcacgtgtacaccagaagagagcccgacgagcactgcagcgaggtggagctgccctaccccgacctgcaggagttcgtggccgacgtgaacgtgctgatggccctgatcatcaacggccccatcaagagcttctgctacagaagactgcagtacctgagcagcaagttccagatgcacgtgctgctgaacgagatgaaggagctggccgcccagaagaaggtgccccacagagacttctacaacatcagaaaggtggacacccacatccacgccagcagctgcatgaaccagaagcacctgctgagattcatcaagagagccatgaagagacacctggaggagatcgtgcacgtggagcagggcagagagcagaccctgagagaggtgttcgagagcatgaacctgaccgcctacgacctgagcgtggacaccctggacgtgcacgccgacagaaacaccttccacagattcgacaagttcaacgccaagtacaaccccatcggcgagagcgtgctgagagagatcttcatcaagaccgacaacagagtgagcggcaagtacttcgcccacatcatcaaggaggtgatgagcgacctggaggagagcaagtaccagaacgccgagctgagactgagcatctacggcagaagcagagacgagtgggacaagctggccagatgggccgtgatgcacagagtgcacagccccaacgtgagatggctggtgcaggtgcccagactgttcgacgtgtacagaaccaagggccagctggccaacttccaggagatgctggagaacatcttcctgcccctgttcgaggccaccgtgcaccccgccagccaccccgagctgcacctgttcctggagcacgtggacggcttcgacagcgtggacgacgagagcaagcccgagaaccacgtgttcaacctggagagccccctgcccgaggcctgggtggaggaggacaaccccccctacgcctactacctgtactacaccttcgccaacatggccatgctgaaccacctgagaagacagagaggcttccacaccttcgtgctgagaccccactgcggcgaggccggccccatccaccacctggtgagcgccttcatgctggccgagaacatcagccacggcctgctgctgagaaaggcccccgtgctgcagtacctgtactacctggcccagatcggcatcgccatgagccccctgagcaacaacagcctgttcctgagctaccacagaaaccccctgcccgagtacctgagcagaggcctgatggtgagcctgagcaccgacgaccccctgcagttccacttcaccaaggagcccctgatggaggagtacagcatcgccacccaggtgtggaagctgagcagctgcgacatgtgcgagctggccagaaacagcgtgctgatgagcggcttcagccacaaggtgaagagccactggctgggccccaactacaccaaggagggccccgagggcaacgacatcagaagaaccaacgtgcccgacatcagagtgggctacagatacgagaccctgtgccaggagctggccctgatcacccaggccgtgcagagcgagatgctggagaccatccccgaggaggccggcatcaccatgagccccggcccccagtag

SEQ ID NO: 72062 - skipped

SEQ ID NO: 72063 - DNA, 2640 bp, synthetic construct; identical to SEQ ID NO: 72058
  misc_feature 1..2640: note = Description of Artificial Sequence: Synthetic coding sequence
  source 1..2640: mol_type = other DNA

SEQ ID NO: 72064 - DNA, 312 bp, synthetic construct
  misc_feature 1..312: note = Description of Artificial Sequence: Synthetic coding sequence
  source 1..312: mol_type = other DNA
atggccagcgaggccagaggcggcctgggcgccccccccctgcagagcgccagaagcctgcccggccccgccccctgcctgaagcacttccccctggacctgagaaccagcatggacggcaagtgcaaggagatcgccgaggagctgttcaccagaagcctggccgagagcgagctgagaagcgccccctacgagttccccgaggagagccccatcgagcagctggaggagagaagacagagactggagagacagatcagccaggacgtgaagctggagcccgacatcctgctgagagccaagcaggactag

SEQ ID NO: 72065 - DNA, 2304 bp, synthetic construct
  misc_feature 1..2304: note = Description of Artificial Sequence: Synthetic coding sequence
  source 1..2304: mol_type = other DNA
atgcccagacagttccccaagctgaacatcagcgaggtggacgagcaggtgagactgctggccgagaaggtgttcgccaaggtgctgagagaggaggacagcaaggacgccctgagcctgttcaccgtgcccgaggactgccccatcggccagaaggaggccaaggagagagagctgcagaaggagctggccgagcagaagagcgtggagaccgccaagagaaagaagagcttcaagatgatcagaagccagagcctgagcctgcagatgcccccccagcaggactggaagggcccccccgccgccagccccgccatgagccccaccacccccgtggtgaccggcgccaccagcctgcccacccccgccccctacgccatgcccgagttccagagagtgaccatcagcggcgactactgcgccggcatcaccctggaggactacgagcaggccgccaagagcctggccaaggccctgatgatcagagagaagtacgccagactggcctaccacagattccccagaatcaccagccagtacctgggccaccccagagccgacaccgccccccccgaggagggcctgcccgacttccaccccccccccctgccccaggaggacccctactgcctggacgacgccccccccaacctggactacctggtgcacatgcagggcggcatcctgttcgtgtacgacaacaagaagatgctggagcaccaggagccccacagcctgccctaccccgacctggagacctacaccgtggacatgagccacatcctggccctgatcaccgacggccccaccaagacctactgccacagaagactgaacttcctggagagcaagttcagcctgcacgagatgctgaacgagatgagcgagttcaaggagctgaagagcaacccccacagagacttctacaacgtgagaaaggtggacacccacatccacgccgccgcctgcatgaaccagaagcacctgctgagattcatcaagcacacctaccagaccgagcccgacagaaccgtggccgagaagagaggcagaaagatcaccctgagacaggtgttcgacggcctgcacatggacccctacgacctgaccgtggacagcctggacgtgcacgccggcagacagaccttccacagattcgacaagttcaacagcaagtacaaccccgtgggcgccagcgagctgagagacctgtacctgaagaccgagaactacctgggcggcgagtacttcgccagaatggtgaaggaggtggccagagagctggaggagagcaagtaccagtacagcgagcccagactgagcatctacggcagaagccccgaggagtggcccaacctggcctactggttcatccagcacaaggtgtacagccccaacatgagatggatcatccaggtgcccagaatctacgacatcttcagaagcaagaagctgctgcccaacttcggcaagatgctggagaacatcttcctgcccctgttcaaggccaccatcaacccccaggaccacagagagctgcacctgttcctgaagtacgtgaccggcttcgacagcgtggacgacgagagcaagcacagcgaccacatgttcagcgacaagagccccaaccccgacgtgtggaccagcgagcagaaccccccctacagctactacctgtactacatgtacgccaacatcatggtgctgaacaacctgagaagagagagaggcctgagcaccttcctgttcagaccccactgcggcgaggccggcagcatcacccacctggtgagcgccttcctgaccgccgacaacatcagccacggcctgctgctgaagaagagccccgtgctgcagtacctgtactacctggcccagatccccatcgccatgagccccctgagcaacaacagcctgttcctggagtacagcaagaaccccctgagagagttcctgcacaagggcctgcacgtgagcctgagcaccgacgaccccatgcagttccactacaccaaggaggccctgatggaggagtacgccatcgccgcccaggtgtggaagctgagcacctgcgacctgtgcgagatcgccagaaacagcgtgctgcagagcggcctgagccaccaggagaagcagaagttcctgggccagaactactacaaggagggccccgagggcaacgacatcagaaagaccaacgtggcccagatcagaatggccttcagatacgagaccctgtgcaacgagctgagcttcctgagcgacgccatgaagagcgaggagatcaccgccctgaccaactag

SEQ ID NO: 72066 - DNA, 2331 bp, synthetic construct
  misc_feature 1..2331: note = Description of Artificial Sequence: Synthetic coding sequence
  source 1..2331: mol_type = other DNA
atggccctgagcagcgagcccgccgagatgcccagacagttccccaagctgaacatcagcgaggtggacgagcaggtgagactgctggccgagaaggtgttcgccaaggtgctgagagaggaggacagcaaggacgccctgagcctgttcaccgtgcccgaggactgccccatcggccagaaggaggccaaggagagagagctgcagaaggagctggccgagcagaagagcgtggagaccgccaagagaaagaagagcttcaagatgatcagaagccagagcctgagcctgcagatgcccccccagcaggactggaagggcccccccgccgccagccccgccatgagccccaccacccccgtggtgaccggcgccaccagcctgcccacccccgccccctacgccatgcccgagttccagagagtgaccatcagcggcgactactgcgccggcatcaccctggaggactacgagcaggccgccaagagcctggccaaggccctgatgatcagagagaagtacgccagactggcctaccacagattccccagaatcaccagccagtacctgggccaccccagagccgacaccgccccccccgaggagggcctgcccgacttccaccccccccccctgccccaggaggacccctactgcctggacgacgccccccccaacctggactacctggtgcacatgcagggcggcatcctgttcgtgtacgacaacaagaagatgctggagcaccaggagccccacagcctgccctaccccgacctggagacctacaccgtggacatgagccacatcctggccctgatcaccgacggccccaccaagacctactgccacagaagactgaacttcctggagagcaagttcagcctgcacgagatgctgaacgagatgagcgagttcaaggagctgaagagcaacccccacagagacttctacaacgtgagaaaggtggacacccacatccacgccgccgcctgcatgaaccagaagcacctgctgagattcatcaagcacacctaccagaccgagcccgacagaaccgtggccgagaagagaggcagaaagatcaccctgagacaggtgttcgacggcctgcacatggacccctacgacctgaccgtggacagcctggacgtgcacgccggcagacagaccttccacagattcgacaagttcaacagcaagtacaaccccgtgggcgccagcgagctgagagacctgtacctgaagaccgagaactacctgggcggcgagtacttcgccagaatggtgaaggaggtggccagagagctggaggagagcaagtaccagtacagcgagcccagactgagcatctacggcagaagccccgaggagtggcccaacctggcctactggttcatccagcacaaggtgtacagccccaacatgagatggatcatccaggtgcccagaatctacgacatcttcagaagcaagaagctgctgcccaacttcggcaagatgctggagaacatcttcctgcccctgttcaaggccaccatcaacccccaggaccacagagagctgcacctgttcctgaagtacgtgaccggcttcgacagcgtggacgacgagagcaagcacagcgaccacatgttcagcgacaagagccccaaccccgacgtgtggaccagcgagcagaaccccccctacagctactacctgtactacatgtacgccaacatcatggtgctgaacaacctgagaagagagagaggcctgagcaccttcctgttcagaccccactgcggcgaggccggcagcatcacccacctggtgagcgccttcctgaccgccgacaacatcagccacggcctgctgctgaagaagagccccgtgctgcagtacctgtactacctggcccagatccccatcgccatgagccccctgagcaacaacagcctgttcctggagtacagcaagaaccccctgagagagttcctgcacaagggcctgcacgtgagcctgagcaccgacgaccccatgcagttccactacaccaaggaggccctgatggaggagtacgccatcgccgcccaggtgtggaagctgagcacctgcgacctgtgcgagatcgccagaaacagcgtgctgcagagcggcctgagccaccaggagaagcagaagttcctgggccagaactactacaaggagggccccgagggcaacgacatcagaaagaccaacgtggcccagatcagaatggccttcagatacgagaccctgtgcaacgagctgagcttcctgagcgacgccatgaagagcgaggagatcaccgccctgaccaactag

SEQ ID NO: 72067 - DNA, 1827 bp, synthetic construct
  misc_feature 1..1827: note = Description of Artificial Sequence: Synthetic coding sequence
  source 1..1827: mol_type = other DNA
atgatcagagagaagtacgccagactggcctaccacagattccccagaatcaccagccagtacctgggccaccccagagccgacaccgccccccccgaggagggcctgcccgacttccaccccccccccctgccccaggaggacccctactgcctggacgacgccccccccaacctggactacctggtgcacatgcagggcggcatcctgttcgtgtacgacaacaagaagatgctggagcaccaggagccccacagcctgccctaccccgacctggagacctacaccgtggacatgagccacatcctggccctgatcaccgacggccccaccaagacctactgccacagaagactgaacttcctggagagcaagttcagcctgcacgagatgctgaacgagatgagcgagttcaaggagctgaagagcaacccccacagagacttctacaacgtgagaaaggtggacacccacatccacgccgccgcctgcatgaaccagaagcacctgctgagattcatcaagcacacctaccagaccgagcccgacagaaccgtggccgagaagagaggcagaaagatcaccctgagacaggtgttcgacggcctgcacatggacccctacgacctgaccgtggacagcctggacgtgcacgccggcagacagaccttccacagattcgacaagttcaacagcaagtacaaccccgtgggcgccagcgagctgagagacctgtacctgaagaccgagaactacctgggcggcgagtacttcgccagaatggtgaaggaggtggccagagagctggaggagagcaagtaccagtacagcgagcccagactgagcatctacggcagaagccccgaggagtggcccaacctggcctactggttcatccagcacaaggtgtacagccccaacatgagatggatcatccaggtgcccagaatctacgacatcttcagaagcaagaagctgctgcccaacttcggcaagatgctggagaacatcttcctgcccctgttcaaggccaccatcaacccccaggaccacagagagctgcacctgttcctgaagtacgtgaccggcttcgacagcgtggacgacgagagcaagcacagcgaccacatgttcagcgacaagagccccaaccccgacgtgtggaccagcgagcagaaccccccctacagctactacctgtactacatgtacgccaacatcatggtgctgaacaacctgagaagagagagaggcctgagcaccttcctgttcagaccccactgcggcgaggccggcagcatcacccacctggtgagcgccttcctgaccgccgacaacatcagccacggcctgctgctgaagaagagccccgtgctgcagtacctgtactacctggcccagatccccatcgccatgagccccctgagcaacaacagcctgttcctggagtacagcaagaaccccctgagagagttcctgcacaagggcctgcacgtgagcctgagcaccgacgaccccatgcagttccactacaccaaggaggccctgatggaggagtacgccatcgccgcccaggtgtggaagctgagcacctgcgacctgtgcgagatcgccagaaacagcgtgctgcagagcggcctgagccaccaggagaagcagaagttcctgggccagaactactacaaggagggccccgagggcaacgacatcagaaagaccaacgtggcccagatcagaatggccttcagatacgagaccctgtgcaacgagctgagcttcctgagcgacgccatgaagagcgaggagatcaccgccctgaccaactag

SEQ ID NO: 72068 - DNA, 804 bp, synthetic construct
  misc_feature 1..804: note = Description of Artificial Sequence: Synthetic coding sequence
  source 1..804: mol_type = other DNA
atgcccagacagttccccaagctgaacatcagcgaggtggacgagcaggtgagactgctggccgagaaggtgttcgccaaggtgctgagagaggaggacagcaaggacgccctgagcctgttcaccgtgcccgaggactgccccatcggccagaaggaggccaaggagagagagctgcagaaggagctggccgagcagaagagcgtggagaccgccaagagaaagaagagcttcaagatgatcagaagccagagcctgagcctgcagatgcccccccagcaggactggaagggcccccccgccgccagccccgccatgagccccaccacccccgtggtgaccggcgccaccagcctgcccacccccgccccctacgccatgcccgagttccagagagtgaccatcagcggcgactactgcgccggcatcaccctggaggactacgagcaggccgccaagagcctggccaaggccctgatgatcagagagaagtacgccagactggcctaccacagattccccagaatcaccagccagtacctgggccaccccagagccgacaccgccccccccgaggagggcctgcccgacttccaccccccccccctgccccaggaggacccctactgcctggacgacgccccccccaacctggactacctggtgcacatgcagggcggcatcctgttcgtgtacgacaacaagaagatgctggagcaccaggagccccacagcctgccctaccccgacctggagacctacaccgtggacatgagccacatcctggccctgatcaccgactag

SEQ ID NO: 72069 - DNA, 2325 bp, synthetic construct
  misc_feature 1..2325: note = Description of Artificial Sequence: Synthetic coding sequence
  source 1..2325: mol_type = other DNA
atggagcccggcagcgccgagatgcccagacagttccccaagctgaacatcagcgaggtggacgagcaggtgagactgctggccgagaaggtgttcgccaaggtgctgagagaggaggacagcaaggacgccctgagcctgttcaccgtgcccgaggactgccccatcggccagaaggaggccaaggagagagagctgcagaaggagctggccgagcagaagagcgtggagaccgccaagagaaagaagagcttcaagatgatcagaagccagagcctgagcctgcagatgcccccccagcaggactggaagggcccccccgccgccagccccgccatgagccccaccacccccgtggtgaccggcgccaccagcctgcccacccccgccccctacgccatgcccgagttccagagagtgaccatcagcggcgactactgcgccggcatcaccctggaggactacgagcaggccgccaagagcctggccaaggccctgatgatcagagagaagtacgccagactggcctaccacagattccccagaatcaccagccagtacctgggccaccccagagccgacaccgccccccccgaggagggcctgcccgacttccaccccccccccctgccccaggaggacccctactgcctggacgacgccccccccaacctggactacctggtgcacatgcagggcggcatcctgttcgtgtacgacaacaagaagatgctggagcaccaggagccccacagcctgccctaccccgacctggagacctacaccgtggacatgagccacatcctggccctgatcaccgacggccccaccaagacctactgccacagaagactgaacttcctggagagcaagttcagcctgcacgagatgctgaacgagatgagcgagttcaaggagctgaagagcaacccccacagagacttctacaacgtgagaaaggtggacacccacatccacgccgccgcctgcatgaaccagaagcacctgctgagattcatcaagcacacctaccagaccgagcccgacagaaccgtggccgagaagagaggcagaaagatcaccctgagacaggtgttcgacggcctgcacatggacccctacgacctgaccgtggacagcctggacgtgcacgccggcagacagaccttccacagattcgacaagttcaacagcaagtacaaccccgtgggcgccagcgagctgagagacctgtacctgaagaccgagaactacctgggcggcgagtacttcgccagaatggtgaaggaggtggccagagagctggaggagagcaagtaccagtacagcgagcccagactgagcatctacggcagaagccccgaggagtggcccaacctggcctactggttcatccagcacaaggtgtacagccccaacatgagatggatcatccaggtgcccagaatctacgacatcttcagaagcaagaagctgctgcccaacttcggcaagatgctggagaacatcttcctgcccctgttcaaggccaccatcaacccccaggaccacagagagctgcacctgttcctgaagtacgtgaccggcttcgacagcgtggacgacgagagcaagcacagcgaccacatgttcagcgacaagagccccaaccccgacgtgtggaccagcgagcagaaccccccctacagctactacctgtactacatgtacgccaacatcatggtgctgaacaacctgagaagagagagaggcctgagcaccttcctgttcagaccccactgcggcgaggccggcagcatcacccacctggtgagcgccttcctgaccgccgacaacatcagccacggcctgctgctgaagaagagccccgtgctgcagtacctgtactacctggcccagatccccatcgccatgagccccctgagcaacaacagcctgttcctggagtacagcaagaaccccctgagagagttcctgcacaagggcctgcacgtgagcctgagcaccgacgaccccatgcagttccactacaccaaggaggccctgatggaggagtacgccatcgccgcccaggtgtggaagctgagcacctgcgacctgtgcgagatcgccagaaacagcgtgctgcagagcggcctgagccaccaggagaagcagaagttcctgggccagaactactacaaggagggccccgagggcaacgacatcagaaagaccaacgtggcccagatcagaatggccttcagatacgagaccctgtgcaacgagctgagcttcctgagcgacgccatgaagagcgaggagatcaccgccctgaccaactag

SEQ ID NO: 72070 - DNA, 2304 bp, synthetic construct; identical to SEQ ID NO: 72065
  misc_feature 1..2304: note = Description of Artificial Sequence: Synthetic coding sequence
  source 1..2304: mol_type = other DNA

SEQ ID NO: 72071 - DNA, 336 bp, synthetic construct
  misc_feature 1..336: note = Description of Artificial Sequence: Synthetic coding sequence
  source 1..336: mol_type = other DNA
atgcccagacagttccccaagctgaacatcagcgaggtggacgagcaggtgagactgctggccgagaaggtgttcgccaaggtgctgagagaggaggacagcaaggacgccctgagcctgttcaccgtgcccgaggactgccccatcggccagaaggaggccaaggagagagagctgcagaaggagctggccgagcagaagagcgtggagaccgccaagagaaagaagagcttcaagatgatcagaagccagagcctgagcctgcagatgcccccccagcaggactggaagggcccccccgccgccagccccgccatgagccccaccaccccctag

SEQ ID NO: 72072 - DNA, 426 bp, synthetic construct
  misc_feature 1..426: note = Description of Artificial Sequence: Synthetic coding sequence
  source 1..426: mol_type = other DNA
atggccagacccctgtgcaccctgctgctgctgatggccaccctggccggcgccctggccagcagcagcaaggaggagaacagaatcatccccggcggcatctacgacgccgacctgaacgacgagtgggtgcagagagccctgcacttcgccatcagcgagtacaacaaggccaccgaggacgagtactacagaagacccctgcaggtgctgagagccagagagcagaccttcggcggcgtgaactacttcttcgacgtggaggtgggcagaaccatctgcaccaagagccagcccaacctggacacctgcgccttccacgagcagcccgagctgcagaagaagcagctgtgcagcttcgagatctacgaggtgccctgggaggacagaatgagcctggtgaacagcagatgccaggaggcctag

SEQ ID NO: 72073 - DNA, 1215 bp, synthetic construct
  misc_feature 1..1215: note = Description of Artificial Sequence: Synthetic coding sequence
  source 1..1215: mol_type = other DNA
atgcccggcctgatgagaatgagagagagatacagcgccagcaagcccctgaagggcgccagaatcgccggctgcctgcacatgaccgtggagaccgccgtgctgatcgagaccctggtgaccctgggcgccgaggtgcagtggagcagctgcaacatcttcagcacccaggaccacgccgccgccgccatcgccaaggccggcatccccgtgtacgcctggaagggcgagaccgacgaggagtacctgtggtgcatcgagcagaccctgtacttcaaggacggccccctgaacatgatcctggacgacggcggcgacctgaccaacctgatccacaccaagtacccccagctgctgcccggcatcagaggcatcagcgaggagaccaccaccggcgtgcacaacctgtacaagatgatggccaacggcatcctgaaggtgcccgccatcaacgtgaacgacagcgtgaccaagagcaagttcgacaacctgtacggctgcagagagagcctgatcgacggcatcaagagagccaccgacgtgatgatcgccggcaaggtggccgtggtggccggctacggcgacgtgggcaagggctgcgcccaggccctgagaggcttcggcgccagagtgatcatcaccgagatcgaccccatcaacgccctgcaggccgccatggagggctacgaggtgaccaccatggacgaggcctgccaggagggcaacatcttcgtgaccaccaccggctgcatcgacatcatcctgggcagacacttcgagcagatgaaggacgacgccatcgtgtgcaacatcggccacttcgacgtggagatcgacgtgaagtggctgaacgagaacgccgtggagaaggtgaacatcaagccccaggtggacagatacagactgaagaacggcagaagaatcatcctgctggccgagggcagactggtgaacctgggctgcgccatgggccaccccagcttcgtgatgagcaacagcttcaccaaccaggtgatggcccagatcgagctgtggacccaccccgacaagtaccccgtgggcgtgcacttcctgcccaagaagctggacgaggccgtggccgaggcccacctgggcaagctgaacgtgaagctgaccaagctgaccgagaagcaggcccagtacctgggcatgagctgcgacggccccttcaagcccgaccactacagatactag

SEQ ID NO: 72074 - DNA, 798 bp, synthetic construct
  misc_feature 1..798: note = Description of Artificial Sequence: Synthetic coding sequence
  source 1..798: mol_type = other DNA
atgttcgtgagcaagagaagattcatcctgaagacctgcggcaccaccctgctgctgaaggccctggtgcccctgctgaagctggccagagactacagcggcttcgacagcatccagagcttcttctacagcagaaagaacttcatgaagcccagccaccagggctacccccacagaaacttccaggaggagatcgagttcctgaacgccatcttccccaacggcgccgcctactgcatgggcagaatgaacagcgactgctggtacctgtacaccctggacttccccgagagcagagtgatcagccagcccgaccagaccctggagatcctgatgagcgagctggaccccgccgtgatggaccagttctacatgaaggacggcgtgaccgccaaggacgtgaccagagagagcggcatcagagacctgatccccggcagcgtgatcgacgccaccatgttcaacccctgcggctacagcatgaacggcatgaagagcgacggcacctactggaccatccacatcacccccgagcccgagttcagctacgtgagcttcgagaccaacctgagccagaccagctacgacgacctgatcagaaaggtggtggaggtgttcaagcccggcaagttcgtgaccaccctgttcgtgaaccagagcagcaagtgcagaaccgtgctggccagcccccagaagatcgagggcttcaagagactggactgccagagcgccatgttcaacgactacaacttcgtgttcaccagcttcgccaagaagcagcagcagcagcagagctag

SEQ ID NO: 72075 - DNA, 918 bp, synthetic construct
  misc_feature 1..918: note = Description of Artificial Sequence: Synthetic coding sequence
  source 1..918: mol_type = other DNA
atggaggccgcccacttcttcgagggcaccgagaagctgctggaggtgtggttcagcagacagcagcccgacgccaaccagggcagcggcgacctgagaaccatccccagcgagagcagcatgttcgtgagcaagagaagattcatcctgaagacctgcggcaccaccctgctgctgaaggccctggtgcccctgctgaagctggccagagactacagcggcttcgacagcatccagagcttcttctacagcagaaagaacttcatgaagcccagccaccagggctacccccacagaaacttccaggaggagatcgagttcctgaacgccatcttccccaacggcgccgcctactgcatgggcagaatgaacagcgactgctggtacctgtacaccctggacttccccgagagcagagtgatcagccagcccgaccagaccctggagatcctgatgagcgagctggaccccgccgtgatggaccagttctacatgaaggacggcgtgaccgccaaggacgtgaccagagagagcggcatcagagacctgatccccggcagcgtgatcgacgccaccatgttcaacccctgcggctacagcatgaacggcatgaagagcgacggcacctactggaccatccacatcacccccgagcccgagttcagctacgtgagcttcgagaccaacctgagccagaccagctacgacgacctgatcagaaaggtggtggaggtgttcaagcccggcaagttcgtgaccaccctgttcgtgaaccagagcagcaagtgcagaaccgtgctggccagcccccagaagatcgagggcttcaagagactggactgccagagcgccatgttcaacgactacaacttcgtgttcaccagcttcgccaagaagcagcagcagcagcagagctag

SEQ ID NO: 72076 - DNA, 561 bp, synthetic construct
  misc_feature 1..561: note = Description of Artificial Sequence: Synthetic coding sequence
  source 1..561: mol_type = other DNA
atgggcagaatgaacagcgactgctggtacctgtacaccctggacttccccgagagcagagtgatcagccagcccgaccagaccctggagatcctgatgagcgagctggaccccgccgtgatggaccagttctacatgaaggacggcgtgaccgccaaggacgtgaccagagagagcggcatcagagacctgatccccggcagcgtgatcgacgccaccatgttcaacccctgcggctacagcatgaacggcatgaagagcgacggcacctactggaccatccacatcacccccgagcccgagttcagctacgtgagcttcgagaccaacctgagccagaccagctacgacgacctgatcagaaaggtggtggaggtgttcaagcccggcaagttcgtgaccaccctgttcgtgaaccagagcagcaagtgcagaaccgtgctggccagcccccagaagatcgagggcttcaagagactggactgccagagcgccatgttcaacgactacaacttcgtgttcaccagcttcgccaagaagcagcagcagcagcagagctag

SEQ ID NO: 72077 - DNA, 1005 bp, synthetic construct
  misc_feature 1..1005: note = Description of Artificial Sequence: Synthetic coding sequence
  source 1..1005: mol_type = other DNA
atggaggccgcccacttcttcgagggcaccgagaagctgctggaggtgtggttcagcagacagcagcccgacgccaaccagggcagcggcgacctgagaaccatccccagaagcgagtgggacatcctgctgaaggacgtgcagtgcagcatcatcagcgtgaccaagaccgacaagcaggaggcctacgtgctgagcgagagcagcatgttcgtgagcaagagaagattcatcctgaagacctgcggcaccaccctgctgctgaaggccctggtgcccctgctgaagctggccagagactacagcggcttcgacagcatccagagcttcttctacagcagaaagaacttcatgaagcccagccaccagggctacccccacagaaacttccaggaggagatcgagttcctgaacgccatcttccccaacggcgccgcctactgcatgggcagaatgaacagcgactgctggtacctgtacaccctggacttccccgagagcagagtgatcagccagcccgaccagaccctggagatcctgatgagcgagctggaccccgccgtgatggaccagttctacatgaaggacggcgtgaccgccaaggacgtgaccagagagagcggcatcagagacctgatccccggcagcgtgatcgacgccaccatgttcaacccctgcggctacagcatgaacggcatgaagagcgacggcacctactggaccatccacatcacccccgagcccgagttcagctacgtgagcttcgagaccaacctgagccagaccagctacgacgacctgatcagaaaggtggtggaggtgttcaagcccggcaagttcgtgaccaccctgttcgtgaaccagagcagcaagtgcagaaccgtgctggccagcccccagaagatcgagggcttcaagagactggactgccagagcgccatgttcaacgactacaacttcgtgttcaccagcttcgccaagaagcagcagcagcagcagagctag

SEQ ID NO: 72078 - DNA, 645 bp, synthetic construct
  misc_feature 1..645: note = Description of Artificial Sequence: Synthetic coding sequence
  source 1..645: mol_type = other DNA
atggaggccgcccacttcttcgagggcaccgagaagctgctggaggtgtggttcagcagacagcagcccgacgccaaccagggcagcggcgacctgagaaccatccccagatacctgtacaccctggacttccccgagagcagagtgatcagccagcccgaccagaccctggagatcctgatgagcgagctggaccccgccgtgatggaccagttctacatgaaggacggcgtgaccgccaaggacgtgaccagagagagcggcatcagagacctgatccccggcagcgtgatcgacgccaccatgttcaacccctgcggctacagcatgaacggcatgaagagcgacggcacctactggaccatccacatcacccccgagcccgagttcagctacgtgagcttcgagaccaacctgagccagaccagctacgacgacctgatcagaaaggtggtggaggtgttcaagcccggcaagttcgtgaccaccctgttcgtgaaccagagcagcaagtgcagaaccgtgctggccagcccccagaagatcgagggcttcaagagactggactgccagagcgccatgttcaacgactacaacttcgtgttcaccagcttcgccaagaagcagcagcagcagcagagctag

SEQ ID NO: 72079 - DNA, 3360 bp, synthetic construct
  misc_feature 1..3360: note = Description of Artificial Sequence: Synthetic coding sequence
  source 1..3360: mol_type = other DNA
atggccggcgcccccagaggcggcggcggcggcggcggcggcgccggcgagcccggcggcgccgagagagccgccggcaccagcagaagaagaggcctgagagcctgcgacgaggagttcgcctgccccgagctggaggccctgttcagaggctacaccctgagactggagcaggccgccaccctgaaggccctggccgtgctgagcctgctggccggcgccctggccctggccgagctgctgggcgcccccggccccgcccccggcctggccaagggcagccaccccgtgcactgcgtgctgttcctggccctgctggtggtgaccaacgtgagaagcctgcaggtgccccagctgcagcaggtgggccagctggccctgctgttcagcctgaccttcgccctgctgtgctgccccttcgccctgggcggccccgccagaggcagcgccggcgccgccggcggccccgccaccgccgagcagggcgtgtggcagctgctgctggtgaccttcgtgagctacgccctgctgcccgtgagaagcctgctggccatcggcttcggcctggtggtggccgccagccacctgctggtgaccgccaccctggtgcccgccaagagacccagactgtggagaaccctgggcgccaacgccctgctgttcgtgggcgtgaacatgtacggcgtgttcgtgagaatcctgaccgagagaagccagagaaaggccttcctgcaggccagaagctgcatcgaggacagactgagactggaggacgagaacgagaagcaggagagactgctgatgagcctgctgcccagaaacgtggccatggagatgaaggaggacttcctgaagccccccgagagaatcttccacaagatctacatccagagacacgacaacgtgagcatcctgttcgccgacatcgtgggcttcaccggcctggccagccagtgcaccgcccaggagctggtgaagctgctgaacgagctgttcggcaagttcgacgagctggccaccgagaaccactgcagaagaatcaagatcctgggcgactgctactactgcgtgagcggcctgacccagcccaagaccgaccacgcccactgctgcgtggagatgggcctggacatgatcgacaccatcaccagcgtggccgaggccaccgaggtggacctgaacatgagagtgggcctgcacaccggcagagtgctgtgcggcgtgctgggcctgagaaagtggcagtacgacgtgtggagcaacgacgtgaccctggccaacgtgatggaggccgccggcctgcccggcaaggtgcacatcaccaagaccaccctggcctgcctgaacggcgactacgaggtggagcccggctacggccacgagagaaacagcttcctgaagacccacaacatcgagaccttcttcatcgtgcccagccacagaagaaagatcttccccggcctgatcctgagcgacatcaagcccgccaagagaatgaagttcaagaccgtgtgctacctgctggtgcagctgatgcactgcagaaagatgttcaaggccgagatccccttcagcaacgtgatgacctgcgaggacgacgacaagagaagagccctgagaaccgccagcgagaagctgagaaacagaagcagcttcagcaccaacgtggtgtacaccacccccggcaccagagtgaacagatacatcagcagactgctggaggccagacagaccgagctggagatggccgacctgaacttcttcaccctgaagtacaagcacgtggagagagagcagaagtaccaccagctgcaggacgagtacttcaccagcgccgtggtgctgaccctgatcctggccgccctgttcggcctggtgtacctgctgatcttcccccagagcgtggtggtgctgctgctgctggtgttctgcatctgcttcctggtggcctgcgtgctgtacctgcacatcaccagagtgcagtgcttccccggctgcctgaccatccagatcagaaccgtgctgtgcatcttcatcgtggtgctgatctacagcgtggcccagggctgcgtggtgggctgcctgccctgggcctggagcagcaagcccaacagcagcctggtggtgctgagcagcggcggccagagaaccgccctgcccaccctgccctgcgagagcacccaccacgccctgctgtgctgcctggtgggcaccctgcccctggccatcttcttcagagtgagcagcctgcccaagatgatcctgctgagcggcctgaccaccagctacatcctggtgctggagctgagcggctacaccagaaccggcggcggcgccgtgagcggcagaagctacgagcccatcgtggccatcctgctgttcagctgcgccctggccctgcacgccagacaggtggacatcagactgagactggactacctgtgggccgcccaggccgaggaggagagagaggacatggagaaggtgaagctggacaacagaagaatcctgttcaacctgctgcccgcccacgtggcccagcacttcctgatgagcaaccccagaaacatggacctgtactaccagagctacagccaggtgggcgtgatgttcgccagcatccccaacttcaacgacttctacatcgagctggacggcaacaacatgggcgtggagtgcctgagactgctgaacgagatcatcgccgacttcgacgagctgatggagaaggacttctacaaggacatcgagaagatcaagaccatcggcagcacctacatggccgccgtgggcctggcccccaccagcggcaccaaggccaagaagagcatcagcagccacctgagcaccctggccgacttcgccatcgagatgttcgacgtgctggacgagatcaactaccagagctacaacgacttcgtgctgagagtgggcatcaacgtgggccccgtggtggccggcgtgatcggcgccagaagaccccagtacgacatctggggcaacaccgtgaacgtggccagcagaatggacagcaccggcgtgcagggcagaatccaggtgaccgaggaggtgcacagactgctgagaagatgcccctaccacttcgtgtgcagaggcaaggtgagcgtgaagggcaagggcgagatgctgacctacttcctggagggcagaaccgacggcaacggcagccagatcagaagcctgggcctggacagaaagatgtgccccttcggcagagccggcctgcagggcagaagaccccccgtgtgccccatgcccggcgtgagcgtgagagccggcctgcccccccacagccccggccagtacctgcccagcgccgccgccggcaaggaggcctag

SEQ ID NO: 72080 - DNA, 3174 bp, synthetic construct
  misc_feature 1..3174: note = Description of Artificial Sequence: Synthetic coding sequence
  source 1..3174: mol_type = other DNA
atggccggcgcccccagaggcggcggcggcggcggcggcggcgccggcgagcccggcggcgccgagagagccgccggcaccagcagaagaagaggcctgagagcctgcgacgaggagttcgcctgccccgagctggaggccctgttcagaggctacaccctgagactggagcaggccgccaccctgaaggccctggccgtgctgagcctgctggccggcgccctggccctggccgagctgctgggcgcccccggccccgcccccggcctggccaagggcagccaccccgtgcactgcgtgctgttcctggccctgctggtggtgaccaacgtgagaagcctgcaggtgccccagctgcagcaggtgggccagctggccctgctgttcagcctgaccttcgccctgctgtgctgccccttcgccctgggcggccccgccagaggcagcgccggcgccgccggcggccccgccaccgccgagcagggcgtgtggcagctgctgctggtgaccttcgtgagctacgccctgctgcccgtgagaagcctgctggccatcggcttcggcctggtggtggccgccagccacctgctggtgaccgccaccctggtgcccgccaagagacccagactgtggagaaccctgggcgccaacgccctgctgttcgtgggcgtgaacatgtacggcgtgttcgtgagaatcctgaccgagagaagccagagaaaggccttcctgcaggccagaagctgcatcgaggacagactgagactggaggacgagaacgagaagcaggagagactgctgatgagcctgctgcccagaaacgtggccatggagatgaaggaggacttcctgaagccccccgagagaatcttccacaagatctacatccagagacacgacaacgtgagcatcctgttcgccgacatcgtgggcttcaccggcctggccagccagtgcaccgcccaggagctggtgaagctgctgaacgagctgttcggcaagttcgacgagctggccaccgagaaccactgcagaagaatcaagatcctgggcgactgctactactgcgtgagcggcctgacccagcccaagaccgaccacgcccactgctgcgtggagatgggcctggacatgatcgacaccatcaccagcgtggccgaggccaccgaggtggacctgaacatgagagtgggcctgcacaccggcagagtgctgtgcggcgtgctgggcctgagaaagtggcagtacgacgtgtggagcaacgacgtgaccctggccaacgtgatggaggccgccggcctgcccggcaaggtgcacatcaccaagaccaccctggcctgcctgaacggcgactacgaggtggagcccggctacggccacgagagaaacagcttcctgaagacccacaacatcgagaccttcttcatcgtgcccagccacagaagaaagatcttccccggcctgatcctgagcgacatcaagcccgccaagagaatgaagttcaagaccgtgtgctacctgctggtgcagctgatgcactgcagaaagatgttcaaggccgagatccccttcagcaacgtgatgacctgcgaggacgacgacaagagaagagccctgagaaccgccagcgagaagctgagaaacagaagcagcttcagcaccaacgtggtgtacaccacccccggcaccagagtgaacagatacatcagcagactgctggaggccagacagaccgagctggagatggccgacctgaacttcttcaccctgaagtacaagcacgtggagagagagcagaagtaccaccagctgcaggacgagtacttcaccagcgccgtggtgctgaccctgatcctggccgccctgttcggcctggtgtacctgctgatcttcccccagagcgtggtggtgctgctgctgctggtgttctgcatctgcttcctggtggcctgcgtgctgtacctgcacatcaccagagtgcagtgcttccccggctgcctgaccatccagatcagaaccgtgctgtgcatcttcatcgtggtgctgatctacagcgtggcccagggctgcgtggtgggctgcctgccctgggcctggagcagcaagcccaacagcagcctggtggtgctgagcagcggcggccagagaaccgccctgcccaccctgccctgcgagagcacccaccacgccctgctgtgctgcctggtgggcaccctgcccctggccatcttcttcagagtgagcagcctgcccaagatgatcctgctgagcggcctgaccaccagctacatcctggtgctggagctgagcggctacaccagaaccggcggcggcgccgtgagcggcagaagctacgagcccatcgtggccatcctgctgttcagctgcgccctggccctgcacgccagacaggtggacatcagactgagactggactacctgtgggccgcccaggccgaggaggagagagaggacatggagaaggtgaagctggacaacagaagaatcctgttcaacctgctgcccgcccacgtggcccagcacttcctgatgagcaaccccagaaacatggacctgtactaccagagctacagccaggtgggcgtgatgttcgccagcatccccaacttcaacgacttctacatcgagctggacggcaacaacatgggcgtggagtgcctgagactgctgaacgagatcatcgccgacttcgacgagctgatggagaaggacttctacaaggacatcgagaagatcaagaccatcggcagcacctacatggccgccgtgggcctggcccccaccagcggcaccaaggccaagaagagcatcagcagccacctgagcaccctggccgacttcgccatcgagatgttcgacgtgctggacgagatcaactaccagagctacaacgacttcgtgctgagagtgggcatcaacgtgggccccgtggtggccggcgtgatcggcgccagaagaccccagtacgacatctggggcaacaccgtgaacgtggccagcagaatggacagcaccggcgtgcagggcagaatccaggtgaccgaggaggtgcacagactgctgagaagatgcccccccctgtgcgtgcccagacagagccagtgccagggccagagaagagacgtggacatcctgagcagaagacaggactag

SEQ ID NO: 72081 - DNA, 3276 bp, synthetic construct
  misc_feature 1..3276: note = Description of Artificial Sequence: Synthetic coding sequence
  source 1..3276: mol_type = other DNA
atgtggcaggaggccatgagaagaagaagatacctgagagacagaagcgaggaggccgccggcggcggcgacggcctgcccagaagcagagactggctgtacgagagctactactgcatgagccagcagcaccccctgatcgtgttcctgctgctgatcgtgatgggcagctgcctggccctgctggccgtgttcttcgccctgggcctggaggtggaggaccacgtggccttcctgatcaccgtgcccaccgccctggccatcttcttcgccatcttcatcctggtgtgcatcgagagcgtgttcaagaagctgctgagactgttcagcctggtgatctggatctgcctggtggccatgggctacctgttcatgtgcttcggcggcaccgtgagcccctgggaccaggtgagcttcttcctgttcatcatcttcgtggtgtacaccatgctgcccttcaacatgagagacgccatcatcgccagcgtgctgaccagcagcagccacaccatcgtgctgagcgtgtgcctgagcgccacccccggcggcaaggagcacctggtgtggcagatcctggccaacgtgatcatcttcatctgcggcaacctggccggcgcctaccacaagcacctgatggagctggccctgcagcagacctaccaggacacctgcaactgcatcaagagcagaatcaagctggagttcgagaagagacagcaggagagactgctgctgagcctgctgcccgcccacatcgccatggagatgaaggccgagatcatccagagactgcagggccccaaggccggccagatggagaacaccaacaacttccacaacctgtacgtgaagagacacaccaacgtgagcatcctgtacgccgacatcgtgggcttcaccagactggccagcgactgcagccccggcgagctggtgcacatgctgaacgagctgttcggcaagttcgaccagatcgccaaggagaacgagtgcatgagaatcaagatcctgggcgactgctactactgcgtgagcggcctgcccatcagcctgcccaaccacgccaagaactgcgtgaagatgggcctggacatgtgcgaggccatcaagaaggtgagagacgccaccggcgtggacatcaacatgagagtgggcgtgcacagcggcaacgtgctgtgcggcgtgatcggcctgcagaagtggcagtacgacgtgtggagccacgacgtgaccctggccaaccacatggaggccggcggcgtgcccggcagagtgcacatcagcagcgtgaccctggagcacctgaacggcgcctacaaggtggaggagggcgacggcgacatcagagacccctacctgaagcagcacctggtgaagacctacttcgtgatcaaccccaagggcgagagaagaagcccccagcacctgttcagacccagacacaccctggacggcgccaagatgagagccagcgtgagaatgaccagatacctggagagctggggcgccgccaagcccttcgcccacctgcaccacagagacagcatgaccaccgagaacggcaagatcagcaccaccgacgtgcccatgggccagcacaacttccagaacagaaccctgagaaccaagagccagaagaagagattcgaggaggagctgaacgagagaatgatccaggccatcgacggcatcaacgcccagaagcagtggctgaagagcgaggacatccagagaatcagcctgctgttctacaacaaggtgctggagaaggagtacagagccaccgccctgcccgccttcaagtactacgtgacctgcgcctgcctgatcttcttctgcatcttcatcgtgcagatcctggtgctgcccaagaccagcgtgctgggcatcagcttcggcgccgccttcctgctgctggccttcatcctgttcgtgtgcttcgccggccagctgctgcagtgcagcaagaaggccagccccctgctgatgtggctgctgaagagcagcggcatcatcgccaacagaccctggcccagaatcagcctgaccatcatcaccaccgccatcatcctgatgatggccgtgttcaacatgttcttcctgagcgacagcgaggagaccatcccccccaccgccaacaccaccaacaccagcttcagcgccagcaacaaccaggtggccatcctgagagcccagaacctgttcttcctgccctacttcatctacagctgcatcctgggcctgatcagctgcagcgtgttcctgagagtgaactacgagctgaagatgctgatcatgatggtggccctggtgggctacaacaccatcctgctgcacacccacgcccacgtgctgggcgactacagccaggtgctgttcgagagacccggcatctggaaggacctgaagaccatgggcagcgtgagcctgagcatcttcttcatcaccctgctggtgctgggcagacagaacgagtactactgcagactggacttcctgtggaagaacaagttcaagaaggagagagaggagatcgagaccatggagaacctgaacagagtgctgctggagaacgtgctgcccgcccacgtggccgagcacttcctggccagaagcctgaagaacgaggagctgtaccaccagagctacgactgcgtgtgcgtgatgttcgccagcatccccgacttcaaggagttctacaccgagagcgacgtgaacaaggagggcctggagtgcctgagactgctgaacgagatcatcgccgacttcgacgacctgctgagcaagcccaagttcagcggcgtggagaagatcaagaccatcggcagcacctacatggccgccaccggcctgagcgccgtgcccagccaggagcacagccaggagcccgagagacagtacatgcacatcggcaccatggtggagttcgccttcgccctggtgggcaagctggacgccatcaacaagcacagcttcaacgacttcaagctgagagtgggcatcaaccacggccccgtgatcgccggcgtgatcggcgcccagaagccccagtacgacatctggggcaacaccgtgaacgtggccagcagaatggacagcaccggcgtgctggacaagatccaggtgaccgaggagaccagcctggtgctgcagaccctgggctacacctgcacctgcagaggcatcatcaacgtgaagggcaagggcgacctgaagacctacttcgtgaacaccgagatgagcagaagcctgagccagagcaacgtggccagctag

SEQ ID NO: 72082 - DNA, 612 bp, synthetic construct
  misc_feature 1..612: note = Description of Artificial Sequence: Synthetic coding sequence
  source 1..612: mol_type = other DNA
atggagaacctgaacagagtgctgctggagaacgtgctgcccgcccacgtggccgagcacttcctggccagaagcctgaagaacgaggagctgtaccaccagagctacgactgcgtgtgcgtgatgttcgccagcatccccgacttcaaggagttctacaccgagagcgacgtgaacaaggagggcctggagtgcctgagactgctgaacgagatcatcgccgacttcgacgacctgctgagcaagcccaagttcagcggcgtggagaagatcaagaccatcggcagcacctacatggccgccaccggcctgagcgccgtgcccagccaggagcacagccaggagcccgagagacagtacatgcacatcggcaccatggtggagttcgccttcgccctggtgggcaagctggacgccatcaacaagcacagcttcaacgacttcaagctgagagtgggcgtgaccgaggagaccagcctggtgctgcagaccctgggctacacctgcacctgcagaggcatcatcaacgtgaagggcaagggcgacctgaagacctacttcgtgaacaccgagatgagcagaagcctgagccagagcaacgtggccagctag

SEQ ID NO: 72083 - DNA, 2736 bp, synthetic construct
  misc_feature 1..2736: note = Description of Artificial Sequence: Synthetic coding sequence
  source 1..2736: mol_type = other DNA
atggacctgagatgggccagagacctgcacctgagagaggccagcagaagcgtggccttcaccaccctgagactgggcgccgtgaccaccggcctgctgaccttcagagagcccggcgacaaggagaagagcggcaagggcctgggcaagagatggagaatccagagagaggagagccaggagagactgctgctgagcctgctgcccgcccacatcgccatggagatgaaggccgagatcatccagagactgcagggccccaaggccggccagatggagaacaccaacaacttccacaacctgtacgtgaagagacacaccaacgtgagcatcctgtacgccgacatcgtgggcttcaccagactggccagcgactgcagccccggcgagctggtgcacatgctgaacgagctgttcggcaagttcgaccagatcgccaaggagaacgagtgcatgagaatcaagatcctgggcgactgctactactgcgtgagcggcctgcccatcagcctgcccaaccacgccaagaactgcgtgaagatgggcctggacatgtgcgaggccatcaagaaggtgagagacgccaccggcgtggacatcaacatgagagtgggcgtgcacagcggcaacgtgctgtgcggcgtgatcggcctgcagaagtggcagtacgacgtgtggagccacgacgtgaccctggccaaccacatggaggccggcggcgtgcccggcagagtgcacatcagcagcgtgaccctggagcacctgaacggcgcctacaaggtggaggagggcgacggcgacatcagagacccctacctgaagcagcacctggtgaagacctacttcgtgatcaaccccaagggcgagagaagaagcccccagcacctgttcagacccagacacaccctggacggcgccaagatgagagccagcgtgagaatgaccagatacctggagagctggggcgccgccaagcccttcgcccacctgcaccacagagacagcatgaccaccgagaacggcaagatcagcaccaccgacgtgcccatgggccagcacaacttccagaacagaaccctgagaaccaagagccagaagaagagattcgaggaggagctgaacgagagaatgatccaggccatcgacggcatcaacgcccagaagcagtggctgaagagcgaggacatccagagaatcagcctgctgttctacaacaaggtgctggagaaggagtacagagccaccgccctgcccgccttcaagtactacgtgacctgcgcctgcctgatcttcttctgcatcttcatcgtgcagatcctggtgctgcccaagaccagcgtgctgggcatcagcttcggcgccgccttcctgctgctggccttcatcctgttcgtgtgcttcgccggccagctgctgcagtgcagcaagaaggccagccccctgctgatgtggctgctgaagagcagcggcatcatcgccaacagaccctggcccagaatcagcctgaccatcatcaccaccgccatcatcctgatgatggccgtgttcaacatgttcttcctgagcgacagcgaggagaccatcccccccaccgccaacaccaccaacaccagcttcagcgccagcaacaaccaggtggccatcctgagagcccagaacctgttcttcctgccctacttcatctacagctgcatcctgggcctgatcagctgcagcgtgttcctgagagtgaactacgagctgaagatgctgatcatgatggtggccctggtgggctacaacaccatcctgctgcacacccacgcccacgtgctgggcgactacagccaggtgctgttcgagagacccggcatctggaaggacctgaagaccatgggcagcgtgagcctgagcatcttcttcatcaccctgctggtgctgggcagacagaacgagtactactgcagactggacttcctgtggaagaacaagttcaagaaggagagagaggagatcgagaccatggagaacctgaacagagtgctgctggagaacgtgctgcccgcccacgtggccgagcacttcctggccagaagcctgaagaacgaggagctgtaccaccagagctacgactgcgtgtgcgtgatgttcgccagcatccccgacttcaaggagttctacaccgagagcgacgtgaacaaggagggcctggagtgcctgagactgctgaacgagatcatcgccgacttcgacgacctgctgagcaagcccaagttcagcggcgtggagaagatcaagaccatcggcagcacctacatggccgccaccggcctgagcgccgtgcccagccaggagcacagccaggagcccgagagacagtacatgcacatcggcaccatggtggagttcgccttcgccctggtgggcaagctggacgccatcaacaagcacagcttcaacgacttcaagctgagagtgggcatcaaccacggccccgtgatcgccggcgtgatcggcgcccagaagccccagtacgacatctggggcaacaccgtgaacgtggccagcagaatggacagcaccggcgtgctggacaagatccaggtgaccgaggagaccagcctggtgctgcagaccctgggctacacctgcacctgcagaggcatcatcaacgtgaagggcaagggcgacctgaagacctacttcgtgaacaccgagatgagcagaagcctgagccagagcaacgtggccagctag

SEQ ID NO: 72084 - DNA, 2775 bp, synthetic construct
  misc_feature 1..2775: note = Description of Artificial Sequence: Synthetic coding sequence
  source 1..2775: mol_type = other DNA
atgctgcccttcaacatgagagacgccatcatcgccagcgtgctgaccagcagcagccacaccatcgtgctgagcgtgtgcctgagcgccacccccggcggcaaggagcacctggtgtggcagatcctggccaacgtgatcatcttcatctgcggcaacctggccggcgcctaccacaagcacctgatggagctggccctgcagcagacctaccaggacacctgcaactgcatcaagagcagaatcaagctggagttcgagaagagacagcaggagagactgctgctgagcctgctgcccgcccacatcgccatggagatgaaggccgagatcatccagagactgcagggccccaaggccggccagatggagaacaccaacaacttccacaacctgtacgtgaagagacacaccaacgtgagcatcctgtacgccgacatcgtgggcttcaccagactggccagcgactgcagccccggcgagctggtgcacatgctgaacgagctgttcggcaagttcgaccagatcgccaaggagaacgagtgcatgagaatcaagatcctgggcgactgctactactgcgtgagcggcctgcccatcagcctgcccaaccacgccaagaactgcgtgaagatgggcctggacatgtgcgaggccatcaagaaggtgagagacgccaccggcgtggacatcaacatgagagtgggcgtgcacagcggcaacgtgctgtgcggcgtgatcggcctgcagaagtggcagtacgacgtgtggagccacgacgtgaccctggccaaccacatggaggccggcggcgtgcccggcagagtgcacatcagcagcgtgaccctggagcacctgaacggcgcctacaaggtggaggagggcgacggcgacatcagagacccctacctgaagcagcacctggtgaagacctacttcgtgatcaaccccaagggcgagagaagaagcccccagcacctgttcagacccagacacaccctggacggcgccaagcccttcgcccacctgcaccacagagacagcatgaccaccgagaacggcaagatcagcaccaccgacgtgcccatgggccagcacaacttccagaacagaaccctgagaaccaagagccagaagaagagattcgaggaggagctgaacgagagaatgatccaggccatcgacggcatcaacgcccagaagcagtggctgaagagcgaggacatccagagaatcagcctgctgttctacaacaaggtgctggagaaggagtacagagccaccgccctgcccgccttcaagtactacgtgacctgcgcctgcctgatcttcttctgcatcttcatcgtgcagatcctggtgctgcccaagaccagcgtgctgggcatcagcttcggcgccgccttcctgctgctggccttcatcctgttcgtgtgcttcgccggccagctgctgcagtgcagcaagaaggccagccccctgctgatgtggctgctgaagagcagcggcatcatcgccaacagaccctggcccagaatcagcctgaccatcatcaccaccgccatcatcctgatgatggccgtgttcaacatgttcttcctgagcgacagcgaggagaccatcccccccaccgccaacaccaccaacaccagcttcagcgccagcaacaaccaggtggccatcctgagagcccagaacctgttcttcctgccctacttcatctacagctgcatcctgggcctgatcagctgcagcgtgttcctgagagtgaactacgagctgaagatgctgatcatgatggtggccctggtgggctacaacaccatcctgctgcacacccacgcccacgtgctgggcgactacagccaggtgctgttcgagagacccggcatctggaaggacctgaagaccatgggcagcgtgagcctgagcatcttcttcatcaccctgctggtgctgggcagacagaacgagtactactgcagactggacttcctgtggaagaacaagttcaagaaggagagagaggagatcgagaccatggagaacctgaacagagtgctgctggagaacgtgctgcccgcccacgtggccgagcacttcctggccagaagcctgaagaacgaggagctgtaccaccagagctacgactgcgtgtgcgtgatgttcgccagcatccccgacttcaaggagttctacaccgagagcgacgtgaacaaggagggcctggagtgcctgagactgctgaacgagatcatcgccgacttcgacgacctgctgagcaagcccaagttcagcggcgtggagaagatcaagaccatcggcagcacctacatggccgccaccggcctgagcgccgtgcccagccaggagcacagccaggagcccgagagacagtacatgcacatcggcaccatggtggagttcgccttcgccctggtgggcaagctggacgccatcaacaagcacagcttcaacgacttcaagctgagagtgggcatcaaccacggccccgtgatcgccggcgtgatcggcgcccagaagccccagtacgacatctggggcaacaccgtgaacgtggccagcagaatggacagcaccggcgtgctggacaagatccaggtgaccgaggagaccagcctggtgctgcagaccctgggctacacctgcacctgcagaggcatcatcaacgtgaagggcaagggcgacctgaagacctacttcgtgaacaccgagatgagcagaagcctgagccagagcaacgtggccagctag

SEQ ID NO: 72085 - DNA, 3435 bp, synthetic construct
  misc_feature 1..3435: note = Description of Artificial Sequence: Synthetic coding sequence
  source 1..3435: mol_type = other DNA
atgcccagaaaccagggcttcagcgagcccgagtacagcgccgagtacagcgccgagtacagcgtgagcctgcccagcgaccccgacagaggcgtgggcagaacccacgagatcagcgtgagaaacagcggcagctgcctgtgcctgcccagattcatgagactgaccttcgtgcccgagagcctggagaacctgtaccagacctacttcaagagacagagacacgagaccctgctggtgctggtggtgttcgccgccctgttcgactgctacgtggtggtgatgtgcgccgtggtgttcagcagcgacaagctggccagcctggccgtggccggcatcggcctggtgctggacatcatcctgttcgtgctgtgcaagaagggcctgctgcccgacagagtgaccagaagagtgctgccctacgtgctgtggctgctgatcaccgcccagatcttcagctacctgggcctgaacttcgccagagcccacgccgccagcgacaccgtgggctggcaggtgttcttcgtgttcagcttcttcatcaccctgcccctgagcctgagccccatcgtgatcatcagcgtggtgagctgcgtggtgcacaccctggtgctgggcgtgaccgtggcccagcagcagcaggaggagctgaagggcatgcagctgctgagagagatcctggccaacgtgttcctgtacctgtgcgccatcgccgtgggcatcatgagctactacatggccgacagaaagcacagaaaggccttcctggaggccagacagagcctggaggtgaagatgaacctggaggagcagagccagcagcaggagaacctgatgctgagcatcctgcccaagcacgtggccgacgagatgctgaaggacatgaagaaggacgagagccagaaggaccagcagcagttcaacaccatgtacatgtacagacacgagaacgtgagcatcctgttcgccgacatcgtgggcttcacccagctgagcagcgcctgcagcgcccaggagctggtgaagctgctgaacgagctgttcgccagattcgacaagctggccgccaagtaccaccagctgagaatcaagatcctgggcgactgctactactgcatctgcggcctgcccgactacagagaggaccacgccgtgtgcagcatcctgatgggcctggccatggtggaggccatcagctacgtgagagagaagaccaagaccggcgtggacatgagagtgggcgtgcacaccggcaccgtgctgggcggcgtgctgggccagaagagatggcagtacgacgtgtggagcaccgacgtgaccgtggccaacaagatggaggccggcggcatccccggcagagtgcacatcagccagagcaccatggactgcctgaagggcgagttcgacgtggagcccggcgacggcggcagcagatgcgactacctggaggagaagggcatcgagacctacctgatcatcgccagcaagcccgaggtgaagaagaccgccacccagaacggcctgaacggcagcgccctgcccaacggcgcccccgccagcagcaagagcagcagccccgccctgatcgagaccaaggagcccaacggcagcgcccacagcagcggcagcaccagcgagaagcccgaggagcaggacgcccaggccgacaaccccagcttccccaaccccagaagaagactgagactgcaggacctggccgacagagtggtggacgccagcgaggacgagcacgagctgaaccagctgctgaacgaggccctgctggagagagagagcgcccaggtggtgaagaagagaaacaccttcctgctgagcatgagattcatggaccccgagatggagaccagatacagcgtggagaaggagaagcagagcggcgccgccttcagctgcagctgcgtggtgctgctgtgcaccgccctggtggagatcctgatcgacccctggctgatgaccaactacgtgaccttcatggtgggcgagatcctgctgctgatcctgaccatctgcagcctggccgccatcttccccagagccttccccaagaagctggtggccttcagcacctggatcgacagaaccagatgggccagaaacacctgggccatgctggccatcttcatcctggtgatggccaacgtggtggacatgctgagctgcctgcagtactacaccggccccagcaacgccaccgccggcatggagaccgagggcagctgcctggagaaccccaagtactacaactacgtggccgtgctgagcctgatcgccaccatcatgctggtgcaggtgagccacatggtgaagctgaccctgatgctgctggtggccggcgccgtggccaccatcaacctgtacgcctggagacccgtgttcgacgagtacgaccacaagagattcagagagcacgacctgcccatggtggccctggagcagatgcagggcttcaaccccggcctgaacggcaccgacagactgcccctggtgcccagcaagtacagcatgaccgtgatggtgttcctgatgatgctgagcttctactacttcagcagacacgtggagaagctggccagaaccctgttcctgtggaagatcgaggtgcacgaccagaaggagagagtgtacgagatgagaagatggaacgaggccctggtgaccaacatgctgcccgagcacgtggccagacacttcctgggcagcaagaagagagacgaggagctgtacagccagacctacgacgagatcggcgtgatgttcgccagcctgcccaacttcgccgacttctacaccgaggagagcatcaacaacggcggcatcgagtgcctgagattcctgaacgagatcatcagcgacttcgacagcctgctggacaaccccaagttcagagtgatcaccaagatcaagaccatcggcagcacctacatggccgccagcggcgtgacccccgacgtgaacaccaacggcttcgccagcagcaacaaggaggacaagagcgagagagagagatggcagcacctggccgacctggccgacttcgccctggccatgaaggacaccctgaccaacatcaacaaccagagcttcaacaacttcatgctgagaatcggcatgaacaagggcggcgtgctggccggcgtgatcggcgccagaaagccccactacgacatctggggcaacaccgtgaacgtggccagcagaatggagagcaccggcgtgatgggcaacatccaggtggtggaggagacccaggtgatcctgagagagtacggcttcagattcgtgagaagaggccccatcttcgtgaagggcaagggcgagctgctgaccttcttcctgaagggcagagacaagctggccaccttccccaacggccccagcgtgaccctgccccaccaggtggtggacaacagctag

SEQ ID NO: 72086 - DNA, 3360 bp, synthetic construct
  misc_feature 1..3360: note = Description of Artificial Sequence: Synthetic coding sequence
  source 1..3360: mol_type = other DNA
atgcccagaaaccagggcttcagcgagcccgagtacagcgccgagtacagcgccgagtacagcgtgagcctgcccagattcatgagactgaccttcgtgcccgagagcctggagaacctgtaccagacctacttcaagagacagagacacgagaccctgctggtgctggtggtgttcgccgccctgttcgactgctacgtggtggtgatgtgcgccgtggtgttcagcagcgacaagctggccagcctggccgtggccggcatcggcctggtgctggacatcatcctgttcgtgctgtgcaagaagggcctgctgcccgacagagtgaccagaagagtgctgccctacgtgctgtggctgctgatcaccgcccagatcttcagctacctgggcctgaacttcgccagagcccacgccgccagcgacaccgtgggctggcaggtgttcttcgtgttcagcttcttcatcaccctgcccctgagcctgagccccatcgtgatcatcagcgtggtgagctgcgtggtgcacaccctggtgctgggcgtgaccgtggcccagcagcagcaggaggagctgaagggcatgcagctgctgagagagatcctggccaacgtgttcctgtacctgtgcgccatcgccgtgggcatcatgagctactacatggccgacagaaagcacagaaaggccttcctggaggccagacagagcctggaggtgaagatgaacctggaggagcagagccagcagcaggagaacctgatgctgagcatcctgcccaagcacgtggccgacgagatgctgaaggacatgaagaaggacgagagccagaaggaccagcagcagttcaacaccatgtacatgtacagacacgagaacgtgagcatcctgttcgccgacatcgtgggcttcacccagctgagcagcgcctgcagcgcccaggagctggtgaagctgctgaacgagctgttcgccagattcgacaagctggccgccaagtaccaccagctgagaatcaagatcctgggcgactgctactactgcatctgcggcctgcccgactacagagaggaccacgccgtgtgcagcatcctgatgggcctggccatggtggaggccatcagctacgtgagagagaagaccaagaccggcgtggacatgagagtgggcgtgcacaccggcaccgtgctgggcggcgtgctgggccagaagagatggcagtacgacgtgtggagcaccgacgtgaccgtggccaacaagatggaggccggcggcatccccggcagagtgcacatcagccagagcaccatggactgcctgaagggcgagttcgacgtggagcccggcgacggcggcagcagatgcgactacctggaggagaagggcatcgagacctacctgatcatcgccagcaagcccgaggtgaagaagaccgccacccagaacggcctgaacggcagcgccctgcccaacggcgcccccgccagcagcaagagcagcagccccgccctgatcgagaccaaggagcccaacggcagcgcccacagcagcggcagcaccagcgagaagcccgaggagcaggacgcccaggccgacaaccccagcttccccaaccccagaagaagactgagactgcaggacctggccgacagagtggtggacgccagcgaggacgagcacgagctgaaccagctgctgaacgaggccctgctggagagagagagcgcccaggtggtgaagaagagaaacaccttcctgctgagcatgagattcatggaccccgagatggagaccagatacagcgtggagaaggagaagcagagcggcgccgccttcagctgcagctgcgtggtgctgctgtgcaccgccctggtggagatcctgatcgacccctggctgatgaccaactacgtgaccttcatggtgggcgagatcctgctgctgatcctgaccatctgcagcctggccgccatcttccccagagccttccccaagaagctggtggccttcagcacctggatcgacagaaccagatgggccagaaacacctgggccatgctggccatcttcatcctggtgatggccaacgtggtggacatgctgagctgcctgcagtactacaccggccccagcaacgccaccgccggcatggagaccgagggcagctgcctggagaaccccaagtactacaactacgtggccgtgctgagcctgatcgccaccatcatgctggtgcaggtgagccacatggtgaagctgaccctgatgctgctggtggccggcgccgtggccaccatcaacctgtacgcctggagacccgtgttcgacgagtacgaccacaagagattcagagagcacgacctgcccatggtggccctggagcagatgcagggcttcaaccccggcctgaacggcaccgacagactgcccctggtgcccagcaagtacagcatgaccgtgatggtgttcctgatgatgctgagcttctactacttcagcagacacgtggagaagctggccagaaccctgttcctgtggaagatcgaggtgcacgaccagaaggagagagtgtacgagatgagaagatggaacgaggccctggtgaccaacatgctgcccgagcacgtggccagacacttcctgggcagcaagaagagagacgaggagctgtacagccagacctacgacgagatcggcgtgatgttcgccagcctgcccaacttcgccgacttctacaccgaggagagcatcaacaacggcggcatcgagtgcctgagattcctgaacgagatcatcagcgacttcgacagcctgctggacaaccccaagttcagagtgatcaccaagatcaagaccatcggcagcacctacatggccgccagcggcgtgacccccgacgtgaacaccaacggcttcgccagcagcaacaaggaggacaagagcgagagagagagatggcagcacctggccgacctggccgacttcgccctggccatgaaggacaccctgaccaacatcaacaaccagagcttcaacaacttcatgctgagaatcggcatgaacaagggcggcgtgctggccggcgtgatcggcgccagaaagccccactacgacatctggggcaacaccgtgaacgtggccagcagaatggagagcaccggcgtgatgggcaacatccaggtggtggaggagacccaggtgatcctgagagagtacggcttcagattcgtgagaagaggccccatcttcgtgaagggcaagggcgagctgctgaccttcttcctgaagggcagagacaagctggccaccttccccaacggccccagcgtgaccctgccccaccaggtggtggacaacagctag

SEQ ID NO: 72087 - DNA, 339 bp, synthetic construct
  misc_feature 1..339: note = Description of Artificial Sequence: Synthetic coding sequence
  source 1..339: mol_type = other DNA
atgcccagaaaccagggcttcagcgagcccgagtacagcgccgagtacagcgccgagtacagcgtgagcctgcccagcgaccccgacagaggcgtgggcagaacccacgagatcagcgtgagaaacagcggcagctgcctgtgcctgcccagattcatgagactgaccttcgtgcccgagagcctggagaacctgtaccagacctacttcaagagacagagacacgagaccctgctggtgctggtggtgttcgccgccctgttcgactgctacgtggtggtgatgtgcgccgtggtgttcagcagcgacaagctggccagcctggccgtggccggctag

SEQ ID NO: 72088 - DNA, 3234 bp, synthetic construct
  misc_feature 1..3234: note = Description of Artificial Sequence: Synthetic coding sequence
  source 1..3234: mol_type = other DNA
atggccagactgttcagccccagacccccccccagcgaggacctgttctacgagacctactacagcctgagccagcagtaccccctgctgctgctgctgctgggcatcgtgctgtgcgccctggccgccctgctggccgtggcctgggccagcggcagagagctgaccagcgaccccagcttcctgaccaccgtgctgtgcgccctgggcggcttcagcctgctgctgggcctggccagcagagagcagagactgcagagatggaccagacccctgagcggcctggtgtgggtggccctgctggccctgggccacgccttcctgttcaccggcggcgtggtgagcgcctgggaccaggtgagctacttcctgttcgtgatcttcaccgcctacgccatgctgcccctgggcatgagagacgccgccgtggccggcctggccagcagcctgagccacctgctggtgctgggcctgtacctgggcccccagcccgacagcagacccgccctgctgccccagctggccgccaacgccgtgctgttcctgtgcggcaacgtggccggcgtgtaccacaaggccctgatggagagagccctgagagccaccttcagagaggccctgagcagcctgcacagcagaagaagactggacaccgagaagaagcaccaggagcacctgctgctgagcatcctgcccgcctacctggccagagagatgaaggccgagatcatggccagactgcaggccggccagggcagcagacccgagagcaccaacaacttccacagcctgtacgtgaagagacaccagggcgtgagcgtgctgtacgccgacatcgtgggcttcaccagactggccagcgagtgcagccccaaggagctggtgctgatgctgaacgagctgttcggcaagttcgaccagatcgccaaggagcacgagtgcatgagaatcaagatcctgggcgactgctactactgcgtgagcggcctgcccctgagcctgcccgaccacgccatcaactgcgtgagaatgggcctggacatgtgcagagccatcagaaagctgagagccgccaccggcgtggacatcaacatgagagtgggcgtgcacagcggcagcgtgctgtgcggcgtgatcggcctgcagaagtggcagtacgacgtgtggagccacgacgtgaccctggccaaccacatggaggccggcggcgtgcccggcagagtgcacatcaccggcgccaccctggccctgctggccggcgcctacgccgtggaggacgccggcatggagcacagagacccctacctgagagagctgggcgagcccacctacctggtgatcgaccccagagccgaggaggaggacgagaagggcaccgccggcggcctgctgagcagcctggagggcctgaagatgagacccagcctgctgatgaccagatacctggagagctggggcgccgccaagcccttcgcccacctgagccacggcgacagccccgtgagcaccagcacccccctgcccgagaagaccctggccagcttcagcacccagtggagcctggacagaagcagaacccccagaggcctggacgacgagctggacaccggcgacgccaagttcttccaggtgatcgagcagctgaacagccagaagcagtggaagcagagcaaggacttcaaccccctgaccctgtacttcagagagaaggagatggagaaggagtacagactgagcgccatccccgccttcaagtactacgaggcctgcaccttcctggtgttcctgagcaacttcatcatccagatgctggtgaccaacagaccccccgccctggccatcacctacagcatcaccttcctgctgttcctgctgatcctgttcgtgtgcttcagcgaggacctgatgagatgcgtgctgaagggccccaagatgctgcactggctgcccgccctgagcggcctggtggccaccagacccggcctgagaatcgccctgggcaccgccaccatcctgctggtgttcgccatggccatcaccagcctgttcttcttccccaccagcagcgactgccccttccaggcccccaacgtgagcagcatgatcagcaacctgagctgggagctgcccggcagcctgcccctgatcagcgtgccctacagcatgcactgctgcaccctgggcttcctgagctgcagcctgttcctgcacatgagcttcgagctgaagctgctgctgctgctgctgtggctggccgccagctgcagcctgttcctgcacagccacgcctggctgagcgagtgcctgatcgtgagactgtacctgggccccctggacagcagacccggcgtgctgaaggagcccaagctgatgggcgccatcagcttcttcatcttcttcttcaccctgctggtgctggccagacagaacgagtactactgcagactggacttcctgtggaagaagaagctgagacaggagagagaggagaccgagaccatggagaacctgaccagactgctgctggagaacgtgctgcccgcccacgtggccccccagttcatcggccagaacagaagaaacgaggacctgtaccaccagagctacgagtgcgtgtgcgtgctgttcgccagcgtgcccgacttcaaggagttctacagcgagagcaacatcaaccacgagggcctggagtgcctgagactgctgaacgagatcatcgccgacttcgacgagctgctgagcaagcccaagttcagcggcgtggagaagatcaagaccatcggcagcacctacatggccgccaccggcctgaacgccaccagcggccaggacgcccagcaggacgccgagagaagctgcagccacctgggcaccatggtggagttcgccgtggccctgggcagcaagctggacgtgatcaacaagcacagcttcaacaacttcagactgagagtgggcctgaaccacggccccgtggtggccggcgtgatcggcgcccagaagccccagtacgacatctggggcaacaccgtgaacgtggccagcagaatggagagcaccggcgtgctgggcaagatccaggtgaccgaggagaccgcctgggccctgcagagcctgggctacacctgctacagcagaggcgtgatcaaggtgaagggcaagggccagctgtgcacctacttcctgaacaccgacctgaccagaaccggcccccccagcgccaccctgggctag

SEQ ID NO: 72089 - DNA, 1260 bp, synthetic construct
  misc_feature 1..1260: note = Description of Artificial Sequence: Synthetic coding sequence
  source 1..1260: mol_type = other DNA
atgagcagaggcaccagagagagcgcctgctgcatgctgaccagctgggccagcagaggctggcccgccagcgtgcccctgagaagctggtgcagctgcagcatgagcagcctggccagcagcaccagactgcccagaaagctgagagccgccaccggcgtggacatcaacatgagagtgggcgtgcacagcggcagcgtgctgtgcggcgtgatcggcctgcagaagtggcagtacgacgtgtggagccacgacgtgaccctggccaaccacatggaggccggcggcgtgcccggcagagtgcacatcaccggcgccaccctggccctgctggccggcgcctacgccgtggaggacgccggcatggagcacagagacccctacctgagagagctgggcgagcccacctacctggtgatcgaccccagagccgaggaggaggacgagaagggcaccgccggcggcctgctgagcagcctggagggcctgaagatgagacccagcctgctgatgaccagatacctggagagctggggcgccgccaagcccttcgcccacctgagccacggcgacagccccgtgagcaccagcacccccctgcccgagaagaccctggccagcttcagcacccagtggagcctggacagaagcagaacccccagaggcctggacgacgagctggacaccggcgacgccaagttcttccaggtgatcgagcagctgaacagccagaagcagtggaagcagagcaaggacttcaaccccctgaccctgtacttcagagagaaggagatggagaaggagtacagactgagcgccatccccgccttcaagtactacgaggcctgcaccttcctggtgttcctgagcaacttcatcatccagatgctggtgaccaacagaccccccgccctggccatcacctacagcatcaccttcctgctgttcctgctgatcctgttcgtgtgcttcagcgaggacctgatgagatgcgtgctgaagggccccaagatgctgcactggctgcccgccctgagcggcctggtggccaccagacccggcctgagaatcgccctgggcaccgccaccatcctgctggtgttcgccatggccatcaccagcctgttcttcttccccaccagcagcgactgccccttccaggcccccaacgtgagcagcatgatcagcaacctgagctgggagctgcccggcagcctgcccctgatcagcgtgcccgtgagcgtgcccacctgcccctag

SEQ ID NO: 72090 - DNA, 3234 bp, synthetic construct; identical to SEQ ID NO: 72088
  misc_feature 1..3234: note = Description of Artificial Sequence: Synthetic coding sequence
  source 1..3234: mol_type = other DNA

SEQ ID NO: 72091 - DNA, 3234 bp, synthetic construct; identical to SEQ ID NO: 72088
  misc_feature 1..3234: note = Description of Artificial Sequence: Synthetic coding sequence
  source 1..3234: mol_type = other DNA

SEQ ID NO: 72092 - DNA, 348 bp, synthetic construct
  misc_feature 1..348: note = Description of Artificial Sequence: Synthetic coding sequence
  source 1..348: mol_type = other DNA
atggccagactgttcagccccagacccccccccagcgaggacctgttctacgagacctactacagcctgagccagcagtaccccctgctgctgctgctgctgggcatcgtgctgtgcgccctggccgccctgctggccgtggcctgggccagcggcagagagctgaccagcgaccccagcttcctgaccaccgtgctgtgcgccctgggcggcttcagcctgctgctgggcctggccagcagagagcagagactgcagagatggaccagacccctgagcggcctggtgtgggtggccctgctggccctgggccacgccttcctgttcaccggcggcgtggtgagctag

SEQ ID NO: 72093 - DNA, 2736 bp, synthetic construct
  misc_feature 1..2736: note = Description of Artificial Sequence: Synthetic coding sequence
  source 1..2736: mol_type = other DNA
atgaagagccagaaggagggctgctgcagcagaggcgacctgagcatccagaccggccccggcggcgagtgggcccccagaagactggtgagcaacgtgctgatcttcagctgcaccaacatcgtgggcgtgtgcacccactaccccgccgaggtgagccagagacaggccttccaggagaccagagagtgcatccaggccagactgcacagccagagagagaaccagcagcaggagagactgctgctgagcgtgctgcccagacacgtggccatggagatgaaggccgacatcaacgccaagcaggaggacatgatgttccacaagatctacatccagaagcacgacaacgtgagcatcctgttcgccgacatcgagggcttcaccagcctggccagccagtgcaccgcccaggagctggtgatgaccctgaacgagctgttcgccagattcgacaagctggccgccgagaaccactgcctgagaatcaagatcctgggcgactgctactactgcgtgagcggcctgcccgaggccagagccgaccacgcccactgctgcgtggagatgggcatggacatgatcgaggccatcagcctggtgagagaggtgaccggcgtgaacgtgaacatgagagtgggcatccacagcggcagagtgcactgcggcgtgctgggcctgagaaagtggcagttcgacgtgtggagcaacgacgtgaccctggccaaccacatggaggccggcggcaaggccggcagaatccacatcaccaaggccaccctgaactacctgaacggcgactacgaggtggagcccggctgcggcggcgagagaaacgcctacctgaaggagcacagcatcgagaccttcctgatcctgagatgcacccagaagagaaaggaggagaaggccatgatcgccaagatgaacagacagagaaccaacagcatcggccacaaccccccccactggggcgccgagagacccttctacaaccacctgggcggcaaccaggtgagcaaggagatgaagagaatgggcttcgaggaccccaaggacaagaacgcccaggagagcgccaaccccgaggacgaggtggacgagttcctgggcagagccatcgacgccagaagcatcgacagactgagaagcgagcacgtgagaaagttcctgctgaccttcagagagcccgacctggagaagaagtacagcaagcaggtggacgacagattcggcgcctacgtggcctgcgccagcctggtgttcctgttcatctgcttcgtgcagatcaccatcgtgccccacagcatcttcatgctgagcttctacctgacctgcagcctgctgctgaccctggtggtgttcgtgagcgtgatctacagctgcgtgaagctgttccccagccccctgcagaccctgagcagaaagatcgtgagaagcaagatgaacagcaccctggtgggcgtgttcaccatcaccctggtgttcctggccgccttcgtgaacatgttcacctgcaacagcagagacctgctgggctgcctggcccaggagcacaacatcagcgccagccaggtgaacgcctgccacgtggccgagagcgccgtgaactacagcctgggcgacgagcagggcttctgcggcagcccctggcccaactgcaacttccccgagtacttcacctacagcgtgctgctgagcctgctggcctgcagcgtgttcctgcagatcagctgcatcggcaagctggtgctgatgctggccatcgagctgatctacgtgctgatcgtggaggtgcccggcgtgaccctgttcgacaacgccgacctgctggtgaccgccaacgccatcgacttcttcaacaacggcaccagccagtgccccgagcacgccaccaaggtggccctgaaggtggtgacccccatcatcatcagcgtgttcgtgctggccctgtacctgcacgcccagcaggtggagagcaccgccagactggacttcctgtggaagctgcaggccaccgaggagaaggaggagatggaggagctgcaggcctacaacagaagactgctgcacaacatcctgcccaaggacgtggccgcccacttcctggccagagagagaagaaacgacgagctgtactaccagagctgcgagtgcgtggccgtgatgttcgccagcatcgccaacttcagcgagttctacgtggagctggaggccaacaacgagggcgtggagtgcctgagactgctgaacgagatcatcgccgacttcgacgagatcatcagcgaggacagattcagacagctggagaagatcaagaccatcggcagcacctacatggccgccagcggcctgaacgacagcacctacgacaaggtgggcaagacccacatcaaggccctggccgacttcgccatgaagctgatggaccagatgaagtacatcaacgagcacagcttcaacaacttccagatgaagatcggcctgaacatcggccccgtggtggccggcgtgatcggcgccagaaagccccagtacgacatctggggcaacaccgtgaacgtggccagcagaatggacagcaccggcgtgcccgacagaatccaggtgaccaccgacatgtaccaggtgctggccgccaacacctaccagctggagtgcagaggcgtggtgaaggtgaagggcaagggcgagatgatgacctacttcctgaacggcggcccccccctgagctag

SEQ ID NO: 72094 - DNA, 3786 bp, synthetic construct
  misc_feature 1..3786: note = Description of Artificial Sequence: Synthetic coding sequence
  source 1..3786: mol_type = other DNA
atgagcggcagcaagagcgtgagcccccccggctacgccgcccagaagaccgccgcccccgcccccagaggcggccccgagcacagaagcgcctggggcgaggccgacagcagagccaacggctacccccacgcccccggcggcagcgccagaggcagcaccaagaagcccggcggcgccgtgaccccccagcagcagcagagactggccagcagatggagaagcgacgacgacgacgacccccccctgagcggcgacgaccccctggccggcggcttcggcttcagcttcagaagcaagagcgcctggcaggagagaggcggcgacgactgcggcagaggcagcagaagacagagaagaggcgccgccagcggcggcagcaccagagccccccccgccggcggcggcggcggcagcgccgccgccgccgccagcgccggcggcaccgaggtgagacccagaagcgtggaggtgggcctggaggagagaagaggcaagggcagagccgccgacgagctggaggccggcgccgtggagggcggcgagggcagcggcgacggcggcagcagcgccgacagcggcagcggcgccggccccggcgccgtgctgagcctgggcgcctgctgcctggccctgctgcagatcttcagaagcaagaagttccccagcgacaagctggagagactgtaccagagatacttcttcagactgaaccagagcagcctgaccatgctgatggccgtgctggtgctggtgtgcctggtgatgctggccttccacgccgccagaccccccctgcagctgccctacctggccgtgctggccgccgccgtgggcgtgatcctgatcatggccgtgctgtgcaacagagccgccttccaccaggaccacatgggcctggcctgctacgccctgatcgccgtggtgctggccgtgcaggtggtgggcctgctgctgccccagcccagaagcgccagcgagggcatctggtggaccgtgttcttcatctacaccatctacaccctgctgcccgtgagaatgagagccgccgtgctgagcggcgtgctgctgagcgccctgcacctggccatcgccctgagaaccaacgcccaggaccagttcctgctgaagcagctggtgagcaacgtgctgatcttcagctgcaccaacatcgtgggcgtgtgcacccactaccccgccgaggtgagccagagacaggccttccaggagaccagagagtgcatccaggccagactgcacagccagagagagaaccagcagcaggagagactgctgctgagcgtgctgcccagacacgtggccatggagatgaaggccgacatcaacgccaagcaggaggacatgatgttccacaagatctacatccagaagcacgacaacgtgagcatcctgttcgccgacatcgagggcttcaccagcctggccagccagtgcaccgcccaggagctggtgatgaccctgaacgagctgttcgccagattcgacaagctggccgccgagaaccactgcctgagaatcaagatcctgggcgactgctactactgcgtgagcggcctgcccgaggccagagccgaccacgcccactgctgcgtggagatgggcatggacatgatcgaggccatcagcctggtgagagaggtgaccggcgtgaacgtgaacatgagagtgggcatccacagcggcagagtgcactgcggcgtgctgggcctgagaaagtggcagttcgacgtgtggagcaacgacgtgaccctggccaaccacatggaggccggcggcaaggccggcagaatccacatcaccaaggccaccctgaactacctgaacggcgactacgaggtggagcccggctgcggcggcgagagaaacgcctacctgaaggagcacagcatcgagaccttcctgatcctgagatgcacccagaagagaaaggaggagaaggccatgatcgccaagatgaacagacagagaaccaacagcatcggccacaaccccccccactggggcgccgagagacccttctacaaccacctgggcggcaaccaggtgagcaaggagatgaagagaatgggcttcgaggaccccaaggacaagaacgcccaggagagcgccaaccccgaggacgaggtggacgagttcctgggcagagccatcgacgccagaagcatcgacagactgagaagcgagcacgtgagaaagttcctgctgaccttcagagagcccgacctggagaagaagtacagcaagcaggtggacgacagattcggcgcctacgtggcctgcgccagcctggtgttcctgttcatctgcttcgtgcagatcaccatcgtgccccacagcatcttcatgctgagcttctacctgacctgcagcctgctgctgaccctggtggtgttcgtgagcgtgatctacagctgcgtgaagctgttccccagccccctgcagaccctgagcagaaagatcgtgagaagcaagatgaacagcaccctggtgggcgtgttcaccatcaccctggtgttcctggccgccttcgtgaacatgttcacctgcaacagcagagacctgctgggctgcctggcccaggagcacaacatcagcgccagccaggtgaacgcctgccacgtggccgagagcgccgtgaactacagcctgggcgacgagcagggcttctgcggcagcccctggcccaactgcaacttccccgagtacttcacctacagcgtgctgctgagcctgctggcctgcagcgtgttcctgcagatcagctgcatcggcaagctggtgctgatgctggccatcgagctgatctacgtgctgatcgtggaggtgcccggcgtgaccctgttcgacaacgccgacctgctggtgaccgccaacgccatcgacttcttcaacaacggcaccagccagtgccccgagcacgccaccaaggtggccctgaaggtggtgacccccatcatcatcagcgtgttcgtgctggccctgtacctgcacgcccagcaggtggagagcaccgccagactggacttcctgtggaagctgcaggccaccgaggagaaggaggagatggaggagctgcaggcctacaacagaagactgctgcacaacatcctgcccaaggacgtggccgcccacttcctggccagagagagaagaaacgacgagctgtactaccagagctgcgagtgcgtggccgtgatgttcgccagcatcgccaacttcagcgagttctacgtggagctggaggccaacaacgagggcgtggagtgcctgagactgctgaacgagatcatcgccgacttcgacgagatcatcagcgaggacagattcagacagctggagaagatcaagaccatcggcagcacctacatggccgccagcggcctgaacgacagcacctacgacaaggtgggcaagacccacatcaaggccctggccgacttcgccatgaagctgatggaccagatgaagtacatcaacgagcacagcttcaacaacttccagatgaagatcggcctgaacatcggccccgtggtggccggcgtgatcggcgccagaaagccccagtacgacatctggggcaacaccgtgaacgtggccagcagaatggacagcaccggcgtgcccgacagaatccaggtgaccaccgacatgtaccaggtgctggccgccaacacctaccagctggagtgcagaggcgtggtgaaggtgaagggcaagggcgagatgatgacctacttcctgaacggcggcccccccctgagctag

SEQ ID NO: 72095 - DNA, 2760 bp, synthetic construct
  misc_feature 1..2760: note = Description of Artificial Sequence: Synthetic coding sequence
  source 1..2760: mol_type = other DNA
atggcccccagcagattcagaacccagctggagctggtgagcaacgtgctgatcttcagctgcaccaacatcgtgggcgtgtgcacccactaccccgccgaggtgagccagagacaggccttccaggagaccagagagtgcatccaggccagactgcacagccagagagagaaccagcagcaggagagactgctgctgagcgtgctgcccagacacgtggccatggagatgaaggccgacatcaacgccaagcaggaggacatgatgttccacaagatctacatccagaagcacgacaacgtgagcatcctgttcgccgacatcgagggcttcaccagcctggccagccagtgcaccgcccaggagctggtgatgaccctgaacgagctgttcgccagattcgacaagctggccgccgagaaccactgcctgagaatcaagatcctgggcgactgctactactgcgtgagcggcctgcccgaggccagagccgaccacgcccactgctgcgtggagatgggcatggacatgatcgaggccatcagcctggtgagagaggtgaccggcgtgaacgtgaacatgagagtgggcatccacagcggcagagtgcactgcggcgtgctgggcctgagaaagtggcagttcgacgtgtggagcaacgacgtgaccctggccaaccacatggaggccggcggcaaggccggcagaatccacatcaccaaggccaccctgaactacctgaacggcgactacgaggtggagcccggctgcggcggcgagagaaacgcctacctgaaggagcacagcatcgagaccttcctgatcctgagatgcacccagaagagaaaggaggagaaggccatgatcgccaagatgaacagacagagaaccaacagcatcggccacaaccccccccactggggcgccgagagacccttctacaaccacctgggcggcaaccaggtgagcaaggagatgaagagaatgggcttcgaggaccccaaggacaagaacgcccaggagagcgccaaccccgaggacgaggtggacgagttcctgggcagagccatcgacgccagaagcatcgacagactgagaagcgagcacgtgagaaagttcctgctgaccttcagagagcccgacctggagaagaagtacagcaagcaggtggacgacagattcggcgcctacgtggcctgcgccagcctggtgttcctgttcatctgcttcgtgcagatcaccatcgtgccccacagcatcttcatgctgagcttctacctgacctgcagcctgctgctgaccctggtggtgttcgtgagcgtgatctacagctgcgtgaagctgttccccagccccctgcagaccctgagcagaaagatcgtgagaagcaagatgaacagcaccctggtgggcgtgttcaccatcaccctggtgttcctggccgccttcgtgaacatgttcacctgcaacagcagagacctgctgggctgcctggcccaggagcacaacatcagcgccagccaggtgaacgcctgccacgtggccgagagcgccgtgaactacagcctgggcgacgagcagggcttctgcggcagcccctggcccaactgcaacttccccgagtacttcacctacagcgtgctgctgagcctgctggcctgcagcgtgttcctgcagatcagctgcatcggcaagctggtgctgatgctggccatcgagctgatctacgtgctgatcgtggaggtgcccggcgtgaccctgttcgacaacgccgacctgctggtgaccgccaacgccatcgacttcttcaacaacggcaccagccagtggagcctgtgcgagaacctgagacacagaagaatggaggccggcacctacttccccagcggcgtgaaggagcagagccccgagcacgccaccaaggtggccctgaaggtggtgacccccatcatcatcagcgtgttcgtgctggccctgtacctgcacgcccagcaggtggagagcaccgccagactggacttcctgtggaagctgcaggccaccgaggagaaggaggagatggaggagctgcaggcctacaacagaagactgctgcacaacatcctgcccaaggacgtggccgcccacttcctggccagagagagaagaaacgacgagctgtactaccagagctgcgagtgcgtggccgtgatgttcgccagcatcgccaacttcagcgagttctacgtggagctggaggccaacaacgagggcgtggagtgcctgagactgctgaacgagatcatcgccgacttcgacgagatcatcagcgaggacagattcagacagctggagaagatcaagaccatcggcagcacctacatggccgccagcggcctgaacgacagcacctacgacaaggtgggcaagacccacatcaaggccctggccgacttcgccatgaagctgatggaccagatgaagtacatcaacgagcacagcttcaacaacttccagatgaagatcggcctgaacatcggccccgtggtggccggcgtgatcggcgccagaaagccccagtacgacatctggggcaacaccgtgaacgtggccagcagaatggacagcaccggcgtgcccgacagaatccaggtgaccaccgacatgtaccaggtgctggccgccaacacctaccagctggagtgcagaggcgtggtgaaggtgaagggcaagggcgagatgatgacctacttcctgaacggcggcccccccctgagctag

SEQ ID NO: 72096 - DNA, 3507 bp, synthetic construct
  misc_feature 1..3507: note = Description of Artificial Sequence: Synthetic coding sequence
  source 1..3507: mol_type = other DNA
atgagctggttcagcggcctgctggtgcccaaggtggacgagagaaagaccgcctggggcgagagaaacggccagaagagaagcagaagaagaggcaccagagccggcggcttctgcacccccagatacatgagctgcctgagagacgccgagccccccagccccacccccgccggcccccccagatgcccctggcaggacgacgccttcatcagaagaggcggccccggcaagggcaaggagctgggcctgagagccgtggccctgggcttcgaggacaccgaggtgaccaccaccgccggcggcaccgccgaggtggcccccgacgccgtgcccagaagcggcagaagctgctggagaagactggtgcaggtgttccagagcaagcagttcagaagcgccaagctggagagactgtaccagagatacttcttccagatgaaccagagcagcctgaccctgctgatggccgtgctggtgctgctgaccgccgtgctgctggccttccacgccgcccccgccagaccccagcccgcctacgtggccctgctggcctgcgccgccgccctgttcgtgggcctgatggtggtgtgcaacagacacagcttcagacaggacagcatgtgggtggtgagctacgtggtgctgggcatcctggccgccgtgcaggtgggcggcgccctggccgccgaccccagaagccccagcgccggcctgtggtgccccgtgttcttcgtgtacatcgcctacaccctgctgcccatcagaatgagagccgccgtgctgagcggcctgggcctgagcaccctgcacctgatcctggcctggcagctgaacagaggcgacgccttcctgtggaagcagctgggcgccaacgtgctgctgttcctgtgcaccaacgtgatcggcatctgcacccactaccccgccgaggtgagccagagacaggccttccaggagaccagaggctacatccaggccagactgcacctgcagcacgagaacagacagcaggagagactgctgctgagcgtgctgccccagcacgtggccatggagatgaaggaggacatcaacaccaagaaggaggacatgatgttccacaagatctacatccagaagcacgacaacgtgagcatcctgttcgccgacatcgagggcttcaccagcctggccagccagtgcaccgcccaggagctggtgatgaccctgaacgagctgttcgccagattcgacaagctggccgccgagaaccactgcctgagaatcaagatcctgggcgactgctactactgcgtgagcggcctgcccgaggccagagccgaccacgcccactgctgcgtggagatgggcgtggacatgatcgaggccatcagcctggtgagagaggtgaccggcgtgaacgtgaacatgagagtgggcatccacagcggcagagtgcactgcggcgtgctgggcctgagaaagtggcagttcgacgtgtggagcaacgacgtgaccctggccaaccacatggaggccggcggcagagccggcagaatccacatcaccagagccaccctgcagtacctgaacggcgactacgaggtggagcccggcagaggcggcgagagaaacgcctacctgaaggagcagcacatcgagaccttcctgatcctgggcgccagccagaagagaaaggaggagaaggccatgctggccaagctgcagagaaccagagccaacagcatggagggcctgatgcccagatgggtgcccgacagagccttcagcagaaccaaggacagcaaggccttcagacagatgggcatcgacgacagcagcaaggacaacagaggcacccaggacgccctgaaccccgaggacgaggtggacgagttcctgagcagagccatcgacgccagaagcatcgaccagctgagaaaggaccacgtgagaagattcctgctgaccttccagagagaggacctggagaagaagtacagcagaaaggtggaccccagattcggcgcctacgtggcctgcgccctgctggtgttctgcttcatctgcttcatccagctgctgatcttcccccacagcaccctgatgctgggcatctacgccagcatcttcctgctgctgctgatcaccgtgctgatctgcgccgtgtacagctgcggcagcctgttccccaaggccctgcagagactgagcagaagcatcgtgagaagcagagcccacagcaccgccgtgggcatcttcagcgtgctgctggtgttcaccagcgccatcgccaacatgttcacctgcaaccacacccccatcagaagctgcgccgccagaatgctgaacctgacccccgccgacatcaccgcctgccacctgcagcagctgaactacagcctgggcctggacgcccccctgtgcgagggcaccatgcccacctgcagcttccccgagtacttcatcggcaacatgctgctgagcctgctggccagcagcgtgttcctgcacatcagcagcatcggcaagctggccatgatcttcgtgctgggcctgatctacctggtgctgctgctgctgggcccccccgccaccatcttcgacaactacgacctgctgctgggcgtgcacggcctggccagcagcaacgagaccttcgacggcctggactgccccgccgccggcagagtggccctgaagtacatgacccccgtgatcctgctggtgttcgccctggccctgtacctgcacgcccagcaggtggagagcaccgccagactggacttcctgtggaagctgcaggccaccggcgagaaggaggagatggaggagctgcaggcctacaacagaagactgctgcacaacatcctgcccaaggacgtggccgcccacttcctggccagagagagaagaaacgacgagctgtactaccagagctgcgagtgcgtggccgtgatgttcgccagcatcgccaacttcagcgagttctacgtggagctggaggccaacaacgagggcgtggagtgcctgagactgctgaacgagatcatcgccgacttcgacgagatcatcagcgaggagagattcagacagctggagaagatcaagaccatcggcagcacctacatggccgccagcggcctgaacgccagcacctacgaccaggtgggcagaagccacatcaccgccctggccgactacgccatgagactgatggagcagatgaagcacatcaacgagcacagcttcaacaacttccagatgaagatcggcctgaacatgggccccgtggtggccggcgtgatcggcgccagaaagccccagtacgacatctggggcaacaccgtgaacgtgagcagcagaatggacagcaccggcgtgcccgacagaatccaggtgaccaccgacctgtaccaggtgctggccgccaagggctaccagctggagtgcagaggcgtggtgaaggtgaagggcaagggcgagatgaccacctacttcctgaacggcggccccagcagctag

SEQ ID NO: 72097 - DNA, 3348 bp, synthetic construct
  misc_feature 1..3348: note = Description of Artificial Sequence: Synthetic coding sequence
  source 1..3348: mol_type = other DNA
atgagctggttcagcggcctgctggtgcccaaggtggacgagagaaagaccgcctggggcgagagaaacggccagaagagaagcagaagaagaggcaccagagccggcggcttctgcacccccagatacatgagctgcctgagagacgccgagccccccagccccacccccgccggcccccccagatgcccctggcaggacgacgccttcatcagaagaggcggccccggcaagggcaaggagctgggcctgagagccgtggccctgggcttcgaggacaccgaggtgaccaccaccgccggcggcaccgccgaggtggcccccgacgccgtgcccagaagcggcagaagctgctggagaagactggtgcaggtgttccagagcaagcagttcagaagcgccaagctggagagactgtaccagagatacttcttccagatgaaccagagcagcctgaccctgctgatggccgtgctggtgctgctgaccgccgtgctgctggccttccacgccgcccccgccagaccccagcccgcctacgtggccctgctggcctgcgccgccgccctgttcgtgggcctgatggtggtgtgcaacagacacagcttcagacaggacagcatgtgggtggtgagctacgtggtgctgggcatcctggccgccgtgcaggtgggcggcgccctggccgccgaccccagaagccccagcgccggcctgtggtgccccgtgttcttcgtgtacatcgcctacaccctgctgcccatcagaatgagagccgccgtgctgagcggcctgggcctgagcaccctgcacctgatcctggcctggcagctgaacagaggcgacgccttcctgtggaagcagctgggcgccaacgtgctgctgttcctgtgcaccaacgtgatcggcatctgcacccactaccccgccgaggtgagccagagacaggccttccaggagaccagaggctacatccaggccagactgcacctgcagcacgagaacagacagcaggagagactgctgctgagcgtgctgccccagcacgtggccatggagatgaaggaggacatcaacaccaagaaggaggacatgatgttccacaagatctacatccagaagcacgacaacgtgagcatcctgttcgccgacatcgagggcttcaccagcctggccagccagtgcaccgcccaggagctggtgatgaccctgaacgagctgttcgccagattcgacaagctggccgccgagaaccactgcctgagaatcaagatcctgggcgactgctactactgcgtgagcggcctgcccgaggccagagccgaccacgcccactgctgcgtggagatgggcgtggacatgatcgaggccatcagcctggtgagagaggtgaccggcgtgaacgtgaacatgagagtgggcatccacagcggcagagtgcactgcggcgtgctgggcctgagaaagtggcagttcgacgtgtggagcaacgacgtgaccctggccaaccacatggaggccggcggcagagccggcagaatccacatcaccagagccaccctgcagtacctgaacggcgactacgaggtggagcccggcagaggcggcgagagaaacgcctacctgaaggagcagcacatcgagaccttcctgatcctgggcgccagccagaagagaaaggaggagaaggccatgctggccaagctgcagagaaccagagccaacagcatggagggcctgatgcccagatgggtgcccgacagagccttcagcagaaccaaggacagcaaggccttcagacagatgggcatcgacgacagcagcaaggacaacagaggcacccaggacgccctgaaccccgaggacgaggtggacgagttcctgagcagagccatcgacgccagaagcatcgaccagctgagaaaggaccacgtgagaagattcctgctgaccttccagagagaggacctggagaagaagtacagcagaaaggtggaccccagattcggcgcctacgtggcctgcgccctgctggtgttctgcttcatctgcttcatccagctgctgatcttcccccacagcaccctgatgctgggcatctacgccagcatcttcctgctgctgctgatcaccgtgctgatctgcgccgtgtacagctgcggcagcctgttccccaaggccctgcagagactgagcagaagcatcgtgagaagcagagcccacagcaccgccgtgggcatcttcagcgtgctgctggtgttcaccagcgccatcgccaacatgtacttcatcggcaacatgctgctgagcctgctggccagcagcgtgttcctgcacatcagcagcatcggcaagctggccatgatcttcgtgctgggcctgatctacctggtgctgctgctgctgggcccccccgccaccatcttcgacaactacgacctgctgctgggcgtgcacggcctggccagcagcaacgagaccttcgacggcctggactgccccgccgccggcagagtggccctgaagtacatgacccccgtgatcctgctggtgttcgccctggccctgtacctgcacgcccagcaggtggagagcaccgccagactggacttcctgtggaagctgcaggccaccggcgagaaggaggagatggaggagctgcaggcctacaacagaagactgctgcacaacatcctgcccaaggacgtggccgcccacttcctggccagagagagaagaaacgacgagctgtactaccagagctgcgagtgcgtggccgtgatgttcgccagcatcgccaacttcagcgagttctacgtggagctggaggccaacaacgagggcgtggagtgcctgagactgctgaacgagatcatcgccgacttcgacgagatcatcagcgaggagagattcagacagctggagaagatcaagaccatcggcagcacctacatggccgccagcggcctgaacgccagcacctacgaccaggtgggcagaagccacatcaccgccctggccgactacgccatgagactgatggagcagatgaagcacatcaacgagcacagcttcaacaacttccagatgaagatcggcctgaacatgggccccgtggtggccggcgtgatcggcgccagaaagccccagtacgacatctggggcaacaccgtgaacgtgagcagcagaatggacagcaccggcgtgcccgacagaatccaggtgaccaccgacctgtaccaggtgctggccgccaagggctaccagctggagtgcagaggcgtggtgaaggtgaagggcaagggcgagatgaccacctacttcctgaacggcggccccagcagctag

SEQ ID NO: 72098 - DNA, 3348 bp, synthetic construct; identical to SEQ ID NO: 72097
  misc_feature 1..3348: note = Description of Artificial Sequence: Synthetic coding sequence
  source 1..3348: mol_type = other DNA

SEQ ID NO: 72099 - DNA, 3243 bp, synthetic construct
  misc_feature 1..3243: note = Description of Artificial Sequence: Synthetic coding sequence
  source 1..3243: mol_type = other DNA
atgcccgccaagggcagatacttcctgaacgagggcgaggagggccccgaccaggacgccctgtacgagaagtaccagctgaccagccagcacggccccctgctgctgaccctgctgctggtggccgccaccgcctgcgtggccctgatcatcatcgccttcagccagggcgaccccagcagacaccaggccatcctgggcatggccttcctggtgctggccgtgttcgccgccctgagcgtgctgatgtacgtggagtgcctgctgagaagatggctgagagccctggccctgctgacctgggcctgcctggtggccctgggctacgtgctggtgttcgacgcctggaccaaggccgcctgcgcctgggagcaggtgcccttcttcctgttcatcgtgttcgtggtgtacaccctgctgcccttcagcatgagaggcgccgtggccgtgggcgccgtgagcaccgccagccacctgctggtgctgggcagcctgatgggcggcttcaccacccccagcgtgagagtgggcctgcagctgctggccaacgccgtgatcttcctgtgcggcaacctgaccggcgccttccacaagcaccagatgcaggacgccagcagagacctgttcacctacaccgtgaagtgcatccagatcagaagaaagctgagaatcgagaagagacagcaggagaacctgctgctgagcgtgctgcccgcccacatcagcatgggcatgaagctggccatcatcgagagactgaaggagcacggcgacagaagatgcatgcccgacaacaacttccacagcctgtacgtgaagagacaccagaacgtgagcatcctgtacgccgacatcgtgggcttcacccagctggccagcgactgcagccccaaggagctggtggtggtgctgaacgagctgttcggcaagttcgaccagatcgccaaggccaacgagtgcatgagaatcaagatcctgggcgactgctactactgcgtgagcggcctgcccgtgagcctgcccacccacgccagaaactgcgtgaagatgggcctggacatgtgccaggccatcaagcaggtgagagaggccaccggcgtggacatcaacatgagagtgggcatccacagcggcaacgtgctgtgcggcgtgatcggcctgagaaagtggcagtacgacgtgtggagccacgacgtgagcctggccaacagaatggaggccgccggcgtgcccggcagagtgcacatcaccgaggccaccctgaagcacctggacaaggcctacgaggtggaggacggccacggccagcagagagacccctacctgaaggagatgaacatcagaacctacctggtgatcgaccccagaagccagcagccccccccccccagccagcacctgcccagacccaagggcgacgccgccctgaagatgagagccagcgtgagaatgaccagatacctggagagctggggcgccgccagacccttcgcccacctgaaccacagagagagcgtgagcagcggcgagacccacgtgcccaacggcagaagacccaagagcgtgccccagagacacagaagaacccccgacagaagcatgagccccaagggcagaagcgaggacgacagctacgacgacgagatgctgagcgccatcgagggcctgagcagcaccagaccctgctgcagcaagagcgacgacttctacaccttcggcagcatcttcctggagaagggcttcgagagagagtacagactggcccccatccccagagccagacacgacttcgcctgcgccagcctgatcttcgtgtgcatcctgctggtgcacgtgctgctgatgcccagaaccgccgccctgggcgtgagcttcggcctggtggcctgcgtgctgggcctggtgctgggcctgtgcttcgccaccaagttcagcagatgctgccccgccagaggcaccctgtgcaccatcagcgagagagtggagacccagcccctgctgagactgaccctggccgtgctgaccatcggcagcctgctgaccgtggccatcatcaacctgcccctgatgcccttccaggtgcccgagctgcccgtgggcaacgagaccggcctgctggccgccagcagcaagaccagagccctgtgcgagcccctgccctactacacctgcagctgcgtgctgggcttcatcgcctgcagcgtgttcctgagaatgagcctggagcccaaggtggtgctgctgaccgtggccctggtggcctacctggtgctgttcaacctgagcccctgctggcagtgggactgctgcggccagggcctgggcaacctgaccaagcccaacggcaccaccagcggcacccccagctgcagctggaaggacctgaagaccatgaccaacttctacctggtgctgttctacatcaccctgctgaccctgagcagacagatcgactactactgcagactggactgcctgtggaagaagaagttcaagaaggagcacgaggagttcgagaccatggagaacgtgaacagactgctgctggagaacgtgctgcccgcccacgtggccgcccacttcatcggcgacaagctgaacgaggactggtaccaccagagctacgactgcgtgtgcgtgatgttcgccagcgtgcccgacttcaaggtgttctacaccgagtgcgacgtgaacaaggagggcctggagtgcctgagactgctgaacgagatcatcgccgacttcgacgagctgctgctgaagcccaagttcagcggcgtggagaagatcaagaccatcggcagcacctacatggccgccgccggcctgagcgtggccagcggccacgagaaccaggagctggagagacagcacgcccacatcggcgtgatggtggagttcagcatcgccctgatgagcaagctggacggcatcaacagacacagcttcaacagcttcagactgagagtgggcatcaaccacggccccgtgatcgccggcgtgatcggcgccagaaagccccagtacgacatctggggcaacaccgtgaacgtggccagcagaatggagagcaccggcgagctgggcaagatccaggtgaccgaggagacctgcaccatcctgcagggcctgggctacagctgcgagtgcagaggcctgatcaacgtgaagggcaagggcgagctgagaacctacttcgtgtgcaccgacaccgccaagttccagggcctgggcctgaactag

SEQ ID NO: 72100 - DNA, 3243 bp, synthetic construct; identical to SEQ ID NO: 72099
  misc_feature 1..3243: note = Description of Artificial Sequence: Synthetic coding sequence
  source 1..3243: mol_type = other DNA

SEQ ID NO: 72101 - DNA, 1302 bp, synthetic construct
  misc_feature 1..1302: note = Description of Artificial Sequence: Synthetic coding sequence
  source 1..1302: mol_type = other DNA
atgcccgccaagggcagatacttcctgaacgagggcgaggagggccccgaccaggacgccctgtacgagaagtaccagctgaccagccagcacggccccctgctgctgaccctgctgctggtggccgccaccgcctgcgtggccctgatcatcatcgccttcagccagggcgaccccagcagacaccaggccatcctgggcatggccttcctggtgctggccgtgttcgccgccctgagcgtgctgatgtacgtggagtgcctgctgagaagatggctgagagccctggccctgctgacctgggcctgcctggtggccctgggctacgtgctggtgttcgacgcctggaccaaggccgcctgcgcctgggagcaggtgcccttcttcctgttcatcgtgttcgtggtgtacaccctgctgcccttcagcatgagaggcgccgtggccgtgggcgccgtgagcaccgccagccacctgctggtgctgggcagcctgatgggcggcttcaccacccccagcgtgagagtgggcctgcagctgctggccaacgccgtgatcttcctgtgcggcaacctgaccggcgccttccacaagcaccagatgcaggacgccagcagagacctgttcacctacaccgtgaagtgcatccagatcagaagaaagctgagaatcgagaagagacagcaggagaacctgctgctgagcgtgctgcccgcccacatcagcatgggcatgaagctggccatcatcgagagactgaaggagcacggcgacagaagatgcatgcccgacaacaacttccacagcctgtacgtgaagagacaccagaacgtgagcatcctgtacgccgacatcgtgggcttcacccagctggccagcgactgcagccccaaggagctggtggtggtgctgaacgagctgttcggcaagttcgaccagatcgccaaggccaacgagtgcatgagaatcaagatcctgggcgactgctactactgcgtgagcggcctgcccgtgagcctgcccacccacgccagaaactgcgtgaagatgggcctggacatgtgccaggccatcaagcaggtgagagaggccaccggcgtggacatcaacatgagagtgggcatccacagcggcaacgtgctgtgcggcgtgatcggcctgagaaagtggcagtacgacgtgtggagccacgacgtgagcctggccaacagaatggaggccgccggcgtgcccggcagagtgcacatcaccgaggccaccctgaagcacctggacaaggccctgctgctgcaggtgagatag

SEQ ID NO: 72102 - DNA, 2205 bp, synthetic construct
  misc_feature 1..2205: note = Description of Artificial Sequence: Synthetic coding sequence
  source 1..2205: mol_type = other DNA
atgcccgccaagggcagatacttcctgaacgagggcgaggagggccccgaccaggacgccctgtacgagaagtaccagctgaccagccagcacggccccctgctgctgaccctgctgctggtggccgccaccgcctgcgtggccctgatcatcatcgccttcagccagggcgaccccagcagacaccaggccatcctgggcatggccttcctggtgctggccgtgttcgccgccctgagcgtgctgatgtacgtggagtgcctgctgagaagatggctgagagccctggccctgctgacctgggcctgcctggtggccctgggctacgtgctggtgttcgacgcctggaccaaggccgcctgcgcctgggagcaggtgcccttcttcctgttcatcgtgttcgtggtgtacaccctgctgcccttcagcatgagaggcgccgtggccgtgggcgccgtgagcaccgccagccacctgctggtgctgggcagcctgatgggcggcttcaccacccccagcgtgagagtgggcctgcagctgctggccaacgccgtgatcttcctgtgcggcaacctgaccggcgccttccacaagcaccagatgcaggacgccagcagagacctgttcacctacaccgtgaagtgcatccagatcagaagaaagctgagaatcgagaagagacagcaggagaacctgctgctgagcgtgctgcccgcccacatcagcatgggcatgaagctggccatcatcgagagactgaaggagcacggcgacagaagatgcatgcccgacaacaacttccacagcctgtacgtgaagagacaccagaacgtgagcatcctgtacgccgacatcgtgggcttcacccagctggccagcgactgcagccccaaggagctggtggtggtgctgaacgagctgttcggcaagttcgaccagatcgccaaggccaacgagtgcatgagaatcaagatcctgggcgactgctactactgcgtgagcggcctgcccgtgagcctgcccacccacgccagaaactgcgtgaagatgggcctggacatgtgccaggccatcaagcaggtgagagaggccaccggcgtggacatcaacatgagagtgggcatccacagcggcaacgtgctgtgcggcgtgatcggcctgagaaagtggcagtacgacgtgtggagccacgacgtgagcctggccaacagaatggaggccgccggcgtgcccggcagagtgcacatcaccgaggccaccctgaagcacctggacaaggcctacgaggtggaggacggccacggccagcagagagacccctacctgaaggagatgaacatcagaacctacctggtgatcgaccccagaagccagcagccccccccccccagccagcacctgcccagacccaagggcgacgccgccctgaagatgagagccagcgtgagaatgaccagatacctggagagctggggcgccgccagacccttcgcccacctgaaccacagagagagcgtgagcagcggcgagacccacgtgcccaacggcagaagacccaagagcgtgccccagagacacagaagaacccccgacagaagcatgagccccaagggcagaagcgaggacgacagctacgacgacgagatgctgagcgccatcgagggcctgagcagcaccagaccctgctgcagcaagagcgacgacttctacaccttcggcagcatcttcctggagaagggcttcgagagagagtacagactggcccccatccccagagccagacacgacttcgcctgcgccagcctgatcttcgtgtgcatcctgctggtgcacgtgctgctgatgcccagaaccgccgccctgggcgtgagcttcggcctggtggcctgcgtgctgggcctggtgctgggcctgtgcttcgccaccaagttcagcagatgctgccccgccagaggcaccctgtgcaccatcagcgagagagtggagacccagcccctgctgagactgaccctggccgtgctgaccatcggcagcctgctgaccgtggccatcatcaacctgcccctgatgcccttccaggtgcccgagctgcccgtgggcaacgagaccggcctgctggccgccagcagcaagaccagagccctgtgcgagcccctgccccacctgcacaccgtgttcagcagactgaacgagctgaccagctag

SEQ ID NO: 72103 - DNA, 3756 bp, synthetic construct
  misc_feature 1..3756: note = Description of Artificial Sequence: Synthetic coding sequence
  source 1..3756: mol_type = other DNA
atggagctgagcgacgtgagatgcctgaccggcagcgaggagctgtacaccatccaccccaccccccccgccggcgacggcagaagcgccagcagaccccagagactgctgtggcagaccgccgtgagacacatcaccgagcagagattcatccacggccacagaggcggcagcggcagcggcagcggcggcagcggcaaggccagcgaccccgccggcggcggccccaaccaccacgccccccagctgagcggcgacagcgccctgcccctgtacagcctgggccccggcgagagagcccacagcacctgcggcaccaaggtgttccccgagagaagcggcagcggcagcgccagcggcagcggcggcggcggcgacctgggcttcctgcacctggactgcgcccccagcaacagcgacttcttcctgaacggcggctacagctacagaggcgtgatcttccccaccctgagaaacagcttcaagagcagagacctggagagactgtaccagagatacttcctgggccagagaagaaagagcgaggtggtgatgaacgtgctggacgtgctgaccaagctgaccctgctggtgctgcacctgagcctggccagcgcccccatggaccccctgaagggcatcctgctgggcttcttcaccggcatcgaggtggtgatctgcgccctggtggtggtgagaaaggacaccaccagccacacctacctgcagtacagcggcgtggtgacctgggtggccatgaccacccagatcctggccgccggcctgggctacggcctgctgggcgacggcatcggctacgtgctgttcaccctgttcgccacctacagcatgctgcccctgcccctgacctgggccatcctggccggcctgggcaccagcctgctgcaggtgatcctgcaggtggtgatccccagactggccgtgatcagcatcaaccaggtggtggcccaggccgtgctgttcatgtgcatgaacaccgccggcatcttcatcagctacctgagcgacagagcccagagacaggccttcctggagaccagaagatgcgtggaggccagactgagactggagaccgagaaccagagacaggagagactggtgctgagcgtgctgcccagattcgtggtgctggagatgatcaacgacatgaccaacgtggaggacgagcacctgcagcaccagttccacagaatctacatccacagatacgagaacgtgagcatcctgttcgccgacgtgaagggcttcaccaacctgagcaccaccctgagcgcccaggagctggtgagaatgctgaacgagctgttcgccagattcgacagactggcccacgagcaccactgcctgagaatcaagatcctgggcgactgctactactgcgtgagcggcctgcccgagcccagacaggaccacgcccactgctgcgtggagatgggcctgagcatgatcaagaccatcagatacgtgagaagcagaaccaagcacgacgtggacatgagaatcggcatccacagcggcagcgtgctgtgcggcgtgctgggcctgagaaagtggcagttcgacgtgtggagctgggacgtggacatcgccaacaagctggagagcggcggcatccccggcagaatccacatcagcaaggccaccctggactgcctgaacggcgactacaacgtggaggagggccacggcaaggagagaaacgagttcctgagaaagcacaacatcgagacctacctgatcaagcagcccgaggacagcctgctgagcctgcccgaggacatcgtgaaggagagcgtgagcagcagcgacagaagaaacagcggcgccaccttcaccgagggcagctggagccccgagctgcccttcgacaacatcgtgggcaagcagaacaccctggccgccctgaccagaaacagcatcaacctgctgcccaaccacctggcccaggccctgcacgtgcagagcggccccgaggagatcaacaagagaatcgagcacaccatcgacctgagaagcggcgacaagctgagaagagagcacatcaagcccttcagcctgatgttcaaggacagcagcctggagcacaagtacagccagatgagagacgaggtgttcaagagcaacctggtgtgcgccttcatcgtgctgctgttcatcaccgccatccagagcctgctgcccagcagcagagtgatgcccatgaccatccagttcagcatcctgatcatgctgcacagcgccctggtgctgatcaccaccgccgaggactacaagtgcctgcccctgatcctgagaaagacctgctgctggatcaacgagacctacctggccagaaacgtgatcatcttcgccagcatcctgatcaacttcctgggcgccatcctgaacatcctgtggtgcgacttcgacaagagcatccccctgaagaacctgaccttcaacagcagcgccgtgttcaccgacatctgcagctaccccgagtacttcgtgttcaccggcgtgctggccatggtgacctgcgccgtgttcctgagactgaacagcgtgctgaagctggccgtgctgctgatcatgatcgccatctacgccctgctgaccgagaccgtgtacgccggcctgttcctgagatacgacaacctgaaccacagcggcgaggacttcctgggcaccaaggaggtgagcctgctgctgatggccatgttcctgctggccgtgttctaccacggccagcagctggagtacaccgccagactggacttcctgtggagagtgcaggccaaggaggagatcaacgagatgaaggagctgagagagcacaacgagaacatgctgagaaacatcctgcccagccacgtggccagacacttcctggagaaggacagagacaacgaggagctgtacagccagagctacgacgccgtgggcgtgatgttcgccagcatccccggcttcgccgacttctacagccagaccgagatgaacaaccagggcgtggagtgcctgagactgctgaacgagatcatcgccgacttcgacgagctgctgggcgaggacagattccaggacatcgagaagatcaagaccatcggcagcacctacatggccgtgagcggcctgagccccgagaagcagcagtgcgaggacaagtggggccacctgtgcgccctggccgacttcagcctggccctgaccgagagcatccaggagatcaacaagcacagcttcaacaacttcgagctgagaatcggcatcagccacggcagcgtggtggccggcgtgatcggcgccaagaagccccagtacgacatctggggcaagaccgtgaacctggccagcagaatggacagcaccggcgtgagcggcagaatccaggtgcccgaggagacctacctgatcctgaaggaccagggcttcgccttcgactacagaggcgagatctacgtgaagggcatcagcgagcaggagggcaagatcaagacctacttcctgctgggcagagtgcagcccaaccccttcatcctgccccccagaagactgcccggccagtacagcctggccgccgtggtgctgggcctggtgcagagcctgaacagacagagacagaagcagctgctgaacgagaacaacaacaccggcatcatcaagggccactacaacagaagaaccctgctgagccccagcggcaccgagcccggcgcccaggccgagggcaccgacaagagcgacctgccctag

SEQ ID NO: 72104 - DNA, 4062 bp, synthetic construct
  misc_feature 1..4062: note = Description of Artificial Sequence: Synthetic coding sequence
  source 1..4062: mol_type = other DNA
atggccagccccccccaccagcagctgctgcaccaccacagcaccgaggtgagctgcgacagcagcggcgacagcaacagcgtgagagtgaagatcaaccccaagcagctgagcagcaacagccaccccaagcactgcaagtacagcatcagcagcagctgcagcagcagcggcgacagcggcggcgtgcccagaagagtgggcggcggcggcagactgagaagacagaagaagctgccccagctgttcgagagagccagcagcagatggtgggaccccaagttcgacagcgtgaacctggaggaggcctgcctggagagatgcttcccccagacccagagaagattcagatacgccctgttctacatcggcttcgcctgcctgctgtggagcatctacttcgccgtgcacatgagaagcagactgatcgtgatggtggcccccgccctgtgcttcctgctggtgtgcgtgggcttcttcctgttcaccttcaccaagctgtacgccagacactacgcctggaccagcctggccctgaccctgctggtgttcgccctgaccctggccgcccagttccaggtgctgacccccgtgagcggcagaggcgacagcagcaacctgaccgccaccgccagacccaccgacacctgcctgagccaggtgggcagcttcagcatgtgcatcgaggtgctgttcctgctgtacaccgtgatgcacctgcccctgtacctgagcctgtgcctgggcgtggcctacagcgtgctgttcgagaccttcggctaccacttcagagacgaggcctgcttccccagccccggcgccggcgccctgcactgggagctgctgagcagaggcctgctgcacggctgcatccacgccatcggcgtgcacctgttcgtgatgagccaggtgagaagcagaagcaccttcctgaaggtgggccagagcatcatgcacggcaaggacctggaggtggagaaggccctgaaggagagaatgatccacagcgtgatgcccagaatcatcgccgacgacctgatgaagcagggcgacgaggagagcgagaacagcgtgaagagacacgccaccagcagccccaagaacagaaagaagaagagcagcatccagaaggcccccatcgccttcagacccttcaagatgcagcagatcgaggaggtgagcatcctgttcgccgacatcgtgggcttcaccaagatgagcgccaacaagagcgcccacgccctggtgggcctgctgaacgacctgttcggcagattcgacagactgtgcgaggagaccaagtgcgagaagatcagcaccctgggcgactgctactactgcgtggccggctgccccgagcccagagccgaccacgcctactgctgcatcgagatgggcctgggcatgatcaaggccatcgagcagttctgccaggagaagaaggagatggtgaacatgagagtgggcgtgcacaccggcaccgtgctgtgcggcatcctgggcatgagaagattcaagttcgacgtgtggagcaacgacgtgaacctggccaacctgatggagcagctgggcgtggccggcaaggtgcacatcagcgaggccaccgccaagtacctggacgacagatacgagatggaggacggcaaggtgatcgagagactgggccagagcgtggtggccgaccagctgaagggcctgaagacctacctgatcagcggccagagagccaaggagagcagatgcagctgcgccgaggccctgctgagcggcttcgaggtgatcgacggcagccaggtgagcagcggccccagaggccagggcaccgccagcagcggcaacgtgagcgacctggcccagaccgtgaagaccttcgacaacctgaagacctgccccagctgcggcatcaccttcgcccccaagagcgaggccggcgccgagggcggcgccccccagaacggctgccaggacgagcacaagaacagcaccaaggccagcggcggccccaaccccaagacccagaacggcctgctgagccccccccaggaggagaagctgaccaacagccagaccagcctgtgcgagatcctgcaggagaagggcagatgggccggcgtgagcctggaccagagcgccctgctgcccctgagattcaagaacatcagagagaagaccgacgcccacttcgtggacgtgatcaaggaggacagcctgatgaaggactacttcttcaagccccccatcaaccagttcagcctgaacttcctggaccaggagctggagagaagctacagaaccagctaccaggaggaggtgatcaagaacagccccgtgaagaccttcgccagccccaccttcagcagcctgctggacgtgttcctgagcaccaccgtgttcctgaccctgagcaccacctgcttcctgaagtacgaggccgccaccgtgccccccccccccgccgccctggccgtgttcagcgccgccctgctgctggaggtgctgagcctggccgtgagcatcagaatggtgttcttcctggaggacgtgatggcctgcaccaagagactgctggagtggatcgccggctggctgcccagacactgcatcggcgccatcctggtgagcctgcccgccctggccgtgtacagccacgtgaccagcgagtacgagaccaacatccacttccccgtgttcaccggcagcgccgccctgatcgccgtggtgcactactgcaacttctgccagctgagcagctggatgagaagcagcctggccaccgtggtgggcgccggccccctgctgctgctgtacgtgagcctgtgccccgacagcagcgtgctgaccagccccctggacgccgtgcagaacttcagcagcgagagaaacccctgcaacagcagcgtgcccagagacctgagaagacccgccagcctgatcggccaggaggtggtgctggtgttcttcctgctgctgctgctggtgtggttcctgaacagagagttcgaggtgagctacagactgcactaccacggcgacgtggaggccgacctgcacagaaccaagatccagagcatgagagaccaggccgactggctgctgagaaacatcatcccctaccacgtggccgagcagctgaaggtgagccagacctacagcaagaaccacgacagcggcggcgtgatcttcgccagcatcgtgaacttcagcgagttctacgaggagaactacgagggcggcaaggagtgctacagagtgctgaacgagctgatcggcgacttcgacgagctgctgagcaagcccgactacagcagcatcgagaagatcaagaccatcggcgccacctacatggccgccagcggcctgaacaccgcccaggcccaggacggcagccacccccaggagcacctgcagatcctgttcgagttcgccaaggagatgatgagagtggtggacgacttcaacaacaacatgctgtggttcaacttcaagctgagagtgggcttcaaccacggccccctgaccgccggcgtgatcggcaccaccaagctgctgtacgacatctggggcgacaccgtgaacatcgccagcagaatggacaccaccggcgtggagtgcagaatccaggtgagcgaggagagctacagagtgctgagcaagatgggctacgacttcgactacagaggcaccgtgaacgtgaagggcaagggccagatgaagacctacctgtaccccaagtgcaccgaccacagagtgatcccccagcaccagctgagcatcagccccgacatcagagtgcaggtggacggcagcatcggcagaagccccaccgacgagatcgccaacctggtgcccagcgtgcagtacgtggacaagaccagcctgggcagcgacagcagcacccaggccaaggacgcccacctgagccccaagagaccctggaaggagcccgtgaaggccgaggagagaggcagattcggcaaggccatcgagaaggacgactgcgacgagaccggcatcgaggaggccaacgagctgaccaagctgaacgtgagcaagagcgtgtag

SEQ ID NO: 72105 - DNA, 531 bp, synthetic construct
  misc_feature 1..531: note = Description of Artificial Sequence: Synthetic coding sequence
  source 1..531: mol_type = other DNA
atgaccatgtgcagcggcgccagactggccctgctggtgtacggcatcatcatgcacagcagcgtgtacagcagccccgccgccgccggcctgagattccccggcatcagacccgaggaggaggcctacggcgaggacggcaaccccctgcccgacttcgacggcagcgagccccccggcgccggcagccccgccagcgcccccagagccgccgccgcctggtacagacccgccggcagaagagacgtggcccacggcatcctgaacgaggcctacagaaaggtgctggaccagctgagcgccggcaagcacctgcagagcctggtggccagaggcgtgggcggcagcctgggcggcggcgccggcgacgacgccgagcccctgagcaagagacacagcgacggcatcttcaccgacagctacagcagatacagaaagcagatggccgtgaagaagtacctggccgccgtgctgggcaagagatacaagcagagagtgaagaacaagggcagaagaatcgcctacctgtag

SEQ ID NO: 72106 - DNA, 531 bp, synthetic construct; identical to SEQ ID NO: 72105
  misc_feature 1..531: note = Description of Artificial Sequence: Synthetic coding sequence
  source 1..531: mol_type = other DNA

SEQ ID NO: 72107 - DNA, 948 bp, synthetic construct
  misc_feature 1..948: note = Description of Artificial Sequence: Synthetic coding sequence
  source 1..948: mol_type = other DNA
atgctgaccaagagagccctgcagaagccctgcagcgacagattcctgagaaccgcccagatcaacagaagcagaagacccgtgaccagcgtgaccagcggcagcagcagcagaagcagagccagcccccacagacccctgttcctgagcagcgccagcctgagcgccccccccagcctgagagtgaccctgccccccggcagcgccagactgcagaccttcgagcagaacaccagcctgggcaagagagtgccccagctgctgctgctgctgcccctggtgcccgccgccagcgcccagacccccacccccgacggcgacgccagcagagtggtgacccccgcccaggagctggaggaggccctgtgcccccccagctacctggccgccctgctggccgccggcggcgtggagggcatgaccatgtgcagcggcgccagactggccctgctggtgtacggcatcatcatgcacagcagcgtgtacagcagccccgccgccgccggcctgagattccccggcatcagacccgaggaggaggcctacggcgaggacggcaaccccctgcccgacttcgacggcagcgagccccccggcgccggcagccccgccagcgcccccagagccgccgccgcctggtacagacccgccggcagaagagacgtggcccacggcatcctgaacgaggcctacagaaaggtgctggaccagctgagcgccggcaagcacctgcagagcctggtggccagaggcgtgggcggcagcctgggcggcggcgccggcgacgacgccgagcccctgagcaagagacacagcgacggcatcttcaccgacagctacagcagatacagaaagcagatggccgtgaagaagtacctggccgccgtgctgggcaagagatacaagcagagagtgaagaacaagggcagaagaatcgcctacctgtag

SEQ ID NO: 72108 - DNA, 531 bp, synthetic construct; identical to SEQ ID NO: 72105
  misc_feature 1..531: note = Description of Artificial Sequence: Synthetic coding sequence
  source 1..531: mol_type = other DNA

SEQ ID NO: 72109 - DNA, 1407 bp, synthetic construct
  misc_feature 1..1407: note = Description of Artificial Sequence: Synthetic coding sequence
  source 1..1407: mol_type = other DNA
atggccggcgtggtgcacgtgagcctggccgccctgctgctgctgcccatggcccccgccatgcacagcgactgcatcttcaagaaggagcaggccatgtgcctggagaagatccagagagccaacgagctgatgggcttcaacgacagcagccccggctgccccggcatgtgggacaacatcacctgctggaagcccgcccacgtgggcgagatggtgctggtgagctgccccgagctgttcagaatcttcaaccccgaccaggtgtgggagaccgagaccatcggcgagagcgacttcggcgacagcaacagcctggacctgagcgacatgggcgtggtgagcagaaactgcaccgaggacggctggagcgagcccttcccccactacttcgacgcctgcggcttcgacgagtacgagagcgagaccggcgaccaggactactactacctgagcgtgaaggccctgtacaccgtgggctacagcaccagcctggtgaccctgaccaccgccatggtgatcctgtgcagattcagaaagctgcactgcaccagaaacttcatccacatgaacctgttcgtgagcttcatgctgagagccatcagcgtgttcatcaaggactggatcctgtacgccgagcaggacagcaaccactgcttcatcagcaccgtggagtgcaaggccgtgatggtgttcttccactactgcgtggtgagcaactacttctggctgttcatcgagggcctgtacctgttcaccctgctggtggagaccttcttccccgagagaagatacttctactggtacaccatcatcggctggggcacccccaccgtgtgcgtgaccgtgtgggccaccctgagactgtacttcgacgacaccggctgctgggacatgaacgacagcaccgccctgtggtgggtgatcaagggccccgtggtgggcagcatcatggtgaacttcgtgctgttcatcggcatcatcgtgatcctggtgcagaagctgcagagccccgacatgggcggcaacgagagcagcatctacctgagactggccagaagcaccctgctgctgatccccctgttcggcatccactacaccgtgttcgccttcagccccgagaacgtgagcaagagagagagactggtgttcgagctgggcctgggcagcttccagggcttcgtggtggccgtgctgtactgcttcctgaacggcgaggtgcaggccgagatcaagagaaagtggagaagctggaaggtgaacagatacttcgccgtggacttcaagcacagacaccccagcctggccagcagcggcgtgaacggcggcacccagctgagcatcctgagcaagagcagcagccagatcagaatgagcggcctgcccgccgacaacctggccacctag

SEQ ID NO: 72110 - DNA, 594 bp, synthetic construct
  misc_feature 1..594: note = Description of Artificial Sequence: Synthetic coding sequence
  source 1..594: mol_type = other DNA
atggtgttcttccactactgcgtggtgagcaactacttctggctgttcatcgagggcctgtacctgttcaccctgctggtggagaccttcttccccgagagaagatacttctactggtacaccatcatcggctggggcacccccaccgtgtgcgtgaccgtgtgggccaccctgagactgtacttcgacgacaccggctgctgggacatgaacgacagcaccgccctgtggtgggtgatcaagggccccgtggtgggcagcatcatggtgaacttcgtgctgttcatcggcatcatcgtgatcctggtgcagaagctgcagagccccgacatgggcggcaacgagagcagcatctacctgaccaacctgagccccagagtgcccaagaaggccagagaggaccccctgcccgtgcccagcgaccagcacagcctgcccttcctgagctgcgtgcagaagtgctactgcaagccccagagagcccagcagcacagctgcaagatgagcgagctgagcaccatcaccctgagactggccagaagcaccctgctgctgatccccctgttcggcatccactacaccgtgttcgcctag

SEQ ID NO: 72111 - DNA, 1491 bp, synthetic construct
  misc_feature 1..1491: note = Description of Artificial Sequence: Synthetic coding sequence
  source 1..1491: mol_type = other DNA
atggccggcgtggtgcacgtgagcctggccgccctgctgctgctgcccatggcccccgccatgcacagcgactgcatcttcaagaaggagcaggccatgtgcctggagaagatccagagagccaacgagctgatgggcttcaacgacagcagccccggctgccccggcatgtgggacaacatcacctgctggaagcccgcccacgtgggcgagatggtgctggtgagctgccccgagctgttcagaatcttcaaccccgaccaggtgtgggagaccgagaccatcggcgagagcgacttcggcgacagcaacagcctggacctgagcgacatgggcgtggtgagcagaaactgcaccgaggacggctggagcgagcccttcccccactacttcgacgcctgcggcttcgacgagtacgagagcgagaccggcgaccaggactactactacctgagcgtgaaggccctgtacaccgtgggctacagcaccagcctggtgaccctgaccaccgccatggtgatcctgtgcagattcagaaagctgcactgcaccagaaacttcatccacatgaacctgttcgtgagcttcatgctgagagccatcagcgtgttcatcaaggactggatcctgtacgccgagcaggacagcaaccactgcttcatcagcaccgtggagtgcaaggccgtgatggtgttcttccactactgcgtggtgagcaactacttctggctgttcatcgagggcctgtacctgttcaccctgctggtggagaccttcttccccgagagaagatacttctactggtacaccatcatcggctggggcacccccaccgtgtgcgtgaccgtgtgggccaccctgagactgtacttcgacgacaccggctgctgggacatgaacgacagcaccgccctgtggtgggtgatcaagggccccgtggtgggcagcatcatggtgaacttcgtgctgttcatcggcatcatcgtgatcctggtgcagaagctgcagagccccgacatgggcggcaacgagagcagcatctacttcagctgcgtgcagaagtgctactgcaagccccagagagcccagcagcacagctgcaagatgagcgagctgagcaccatcaccctgagactggccagaagcaccctgctgctgatccccctgttcggcatccactacaccgtgttcgccttcagccccgagaacgtgagcaagagagagagactggtgttcgagctgggcctgggcagcttccagggcttcgtggtggccgtgctgtactgcttcctgaacggcgaggtgcaggccgagatcaagagaaagtggagaagctggaaggtgaacagatacttcgccgtggacttcaagcacagacaccccagcctggccagcagcggcgtgaacggcggcacccagctgagcatcctgagcaagagcagcagccagatcagaatgagcggcctgcccgccgacaacctggccacctag

SEQ ID NO: 72112 - DNA, 1575 bp, synthetic construct
  misc_feature 1..1575: note = Description of Artificial Sequence: Synthetic coding sequence
  source 1..1575: mol_type = other DNA
atggccggcgtggtgcacgtgagcctggccgccctgctgctgctgcccatggcccccgccatgcacagcgactgcatcttcaagaaggagcaggccatgtgcctggagaagatccagagagccaacgagctgatgggcttcaacgacagcagccccggctgccccggcatgtgggacaacatcacctgctggaagcccgcccacgtgggcgagatggtgctggtgagctgccccgagctgttcagaatcttcaaccccgaccaggtgtgggagaccgagaccatcggcgagagcgacttcggcgacagcaacagcctggacctgagcgacatgggcgtggtgagcagaaactgcaccgaggacggctggagcgagcccttcccccactacttcgacgcctgcggcttcgacgagtacgagagcgagaccggcgaccaggactactactacctgagcgtgaaggccctgtacaccgtgggctacagcaccagcctggtgaccctgaccaccgccatggtgatcctgtgcagattcagaaagctgcactgcaccagaaacttcatccacatgaacctgttcgtgagcttcatgctgagagccatcagcgtgttcatcaaggactggatcctgtacgccgagcaggacagcaaccactgcttcatcagcaccgtggagtgcaaggccgtgatggtgttcttccactactgcgtggtgagcaactacttctggctgttcatcgagggcctgtacctgttcaccctgctggtggagaccttcttccccgagagaagatacttctactggtacaccatcatcggctggggcacccccaccgtgtgcgtgaccgtgtgggccaccctgagactgtacttcgacgacaccggctgctgggacatgaacgacagcaccgccctgtggtgggtgatcaagggccccgtggtgggcagcatcatggtgaacttcgtgctgttcatcggcatcatcgtgatcctggtgcagaagctgcagagccccgacatgggcggcaacgagagcagcatctacctgaccaacctgagccccagagtgcccaagaaggccagagaggaccccctgcccgtgcccagcgaccagcacagcctgcccttcctgagctgcgtgcagaagtgctactgcaagccccagagagcccagcagcacagctgcaagatgagcgagctgagcaccatcaccctgagactggccagaagcaccctgctgctgatccccctgttcggcatccactacaccgtgttcgccttcagccccgagaacgtgagcaagagagagagactggtgttcgagctgggcctgggcagcttccagggcttcgtggtggccgtgctgtactgcttcctgaacggcgaggtgcaggccgagatcaagagaaagtggagaagctggaaggtgaacagatacttcgccgtggacttcaagcacagacaccccagcctggccagcagcggcgtgaacggcggcacccagctgagcatcctgagcaagagcagcagccagatcagaatgagcggcctgcccgccgacaacctggccacctag

SEQ ID NO: 72113 - DNA, 225 bp, synthetic construct
  misc_feature 1..225: note = Description of Artificial Sequence: Synthetic coding sequence
  source 1..225: mol_type = other DNA
atggccggcgtggtgcacgtgagcctggccgccctgctgctgctgcccatggcccccgccatgcacagcgactgcatcttcaagaaggagcaggccatgtgcctggagaagatccagagagccaacgagctgatgggcttcaacgacagcagccccggctgccccggcatgtgggacaacatcacctgctggaagcccgcccacgtgggcgagatggtgctgtag

SEQ ID NO: 72114 - DNA, 447 bp, synthetic construct
  misc_feature 1..447: note = Description of Artificial Sequence: Synthetic coding sequence
  source 1..447: mol_type = other DNA
tgagccaccctgagactgtacttcgacgacaccggctgctgggacatgaacgacagcaccgccctgtggtgggtgatcaagggccccgtggtgggcagcatcatggtgaacttcgtgctgttcatcggcatcatcgtgatcctggtgcagaagctgcagagccccgacatgggcggcaacgagagcagcatctacctgaccaacctgagccccagagtgcccaagaaggccagagaggaccccctgcccgtgcccagcgaccagcacagcctgcccttcctgagactggccagaagcaccctgctgctgatccccctgttcggcatccactacaccgtgttcgccttcagccccgagaacgtgagcaagagagagagactggtgttcgagctgggcctgggcagcttccagggcttcgtggtggccgtgctgtactgcttcctgtag

SEQ ID NO: 72115 - DNA, 1344 bp, synthetic construct
  misc_feature 1..1344: note = Description of Artificial Sequence: Synthetic coding sequence
  source 1..1344: mol_type = other DNA
atggccggcgtggtgcacgtgagcctggccgccctgctgctgctgcccatggcccccgccatgcacagcgactgcatcttcaagaaggagcaggccatgtgcctggagaagatccagagagccaacgagctgatgggcttcaacgacagcagccccggctgccccggcatgtgggacaacatcacctgctggaagcccgcccacgtgggcgagatggtgctggtgagctgccccgagctgttcagaatcttcaaccccgaccaggacatgggcgtggtgagcagaaactgcaccgaggacggctggagcgagcccttcccccactacttcgacgcctgcggcttcgacgagtacgagagcgagaccggcgaccaggactactactacctgagcgtgaaggccctgtacaccgtgggctacagcaccagcctggtgaccctgaccaccgccatggtgatcctgtgcagattcagaaagctgcactgcaccagaaacttcatccacatgaacctgttcgtgagcttcatgctgagagccatcagcgtgttcatcaaggactggatcctgtacgccgagcaggacagcaaccactgcttcatcagcaccgtggagtgcaaggccgtgatggtgttcttccactactgcgtggtgagcaactacttctggctgttcatcgagggcctgtacctgttcaccctgctggtggagaccttcttccccgagagaagatacttctactggtacaccatcatcggctggggcacccccaccgtgtgcgtgaccgtgtgggccaccctgagactgtacttcgacgacaccggctgctgggacatgaacgacagcaccgccctgtggtgggtgatcaagggccccgtggtgggcagcatcatggtgaacttcgtgctgttcatcggcatcatcgtgatcctggtgcagaagctgcagagccccgacatgggcggcaacgagagcagcatctacctgagactggccagaagcaccctgctgctgatccccctgttcggcatccactacaccgtgttcgccttcagccccgagaacgtgagcaagagagagagactggtgttcgagctgggcctgggcagcttccagggcttcgtggtggccgtgctgtactgcttcctgaacggcgaggtgcaggccgagatcaagagaaagtggagaagctggaaggtgaacagatacttcgccgtggacttcaagcacagacaccccagcctggccagcagcggcgtgaacggcggcacccagctgagcatcctgagcaagagcagcagccagatcagaatgagcggcctgcccgccgacaacctggccacctag

SEQ ID NO: 72116 - DNA, 705 bp, synthetic construct
  misc_feature 1..705: note = Description of Artificial Sequence: Synthetic coding sequence
  source 1..705: mol_type = other DNA
atggaccccggcctgcagcaggccctgaacggcatggccccccccggcgacaccgccatgcacgtgcccgccggcagcgtggccagccacctgggcaccaccagcagaagctacttctacctgaccaccgccaccctggccctgtgcctggtgttcaccgtggccaccatcatggtgctggtggtgcagagaaccgacagcatccccaacagccccgacaacgtgcccctgaagggcggcaactgcagcgaggacctgctgtgcatcctgaagagagcccccttcaagaagagctgggcctacctgcaggtggccaagcacctgaacaagaccaagctgagctggaacaaggacggcatcctgcacggcgtgagataccaggacggcaacctggtgatccagttccccggcctgtacttcatcatctgccagctgcagttcctggtgcagtgccccaacaacagcgtggacctgaagctggagctgctgatcaacaagcacatcaagaagcaggccctggtgaccgtgtgcgagagcggcatgcagaccaagcacgtgtaccagaacctgagccagttcctgctggactacctgcaggtgaacaccaccatcagcgtgaacgtggacaccttccagtacatcgacaccagcaccttccccctggagaacgtgctgagcatcttcctgtacagcaacagcgactag

SEQ ID NO: 72117 - DNA, 585 bp, synthetic construct
  misc_feature 1..585: note = Description of Artificial Sequence: Synthetic coding sequence
  source 1..585: mol_type = other DNA
atggaggagaagctgaagaagaccaagatcatcttcgtggtgggcggccccggcagcggcaagggcacccagtgcgagaagatcgtgcagaagtacggctacacccacctgagcaccggcgacctgctgagaagcgaggtgagcagcggcagcgccagaggcaagaagctgagcgagatcatggagaagggccagctggtgcccctggagaccgtgctggacatgctgagagacgccatggtggccaaggtgaacaccagcaagggcttcctgatcgacggctaccccagagaggtgcagcagggcgaggagttcgagagaagaatcggccagcccaccctgctgctgtacgtggacgccggccccgagaccatgacccagagactgctgaagagaggcgagaccagcggcagagtggacgacaacgaggagaccatcaagaagagactggagacctactacaaggccaccgagcccgtgatcgccttctacgagaagagaggcatcgtgagaaaggtgaacgccgagggcagcgtggacagcgtgttcagccaggtgtgcacccacctggacgccctgaagtag

SEQ ID NO: 72118 - DNA, 585 bp, synthetic construct; identical to SEQ ID NO: 72117
  misc_feature 1..585: note = Description of Artificial Sequence: Synthetic coding sequence
  source 1..585: mol_type = other DNA

SEQ ID NO: 72119 - DNA, 720 bp, synthetic construct
  misc_feature 1..720: note = Description of Artificial Sequence: Synthetic coding sequence
  source 1..720: mol_type = other DNA
atggcccccagcgtgcccgccgccgagcccgagtaccccaagggcatcagagccgtgctgctgggcccccccggcgccggcaagggcacccaggcccccagactggccgagaacttctgcgtgtgccacctggccaccggcgacatgctgagagccatggtggccagcggcagcgagctgggcaagaagctgaaggccaccatggacgccggcaagctggtgagcgacgagatggtggtggagctgatcgagaagaacctggagacccccctgtgcaagaacggcttcctgctggacggcttccccagaaccgtgagacaggccgagatgctggacgacctgatggagaagagaaaggagaagctggacagcgtgatcgagttcagcatccccgacagcctgctgatcagaagaatcaccggcagactgatccaccccaagagcggcagaagctaccacgaggagttcaacccccccaaggagcccatgaaggacgacatcaccggcgagcccctgatcagaagaagcgacgacaacgagaaggccctgaagatcagactgcaggcctaccacacccagaccacccccctgatcgagtactacagaaagagaggcatccacagcgccatcgacgccagccagacccccgacgtggtgttcgccagcatcctggccgccttcagcaaggccacctgcaaggacctggtgatgttcatctag

SEQ ID NO: 72120 - DNA, 699 bp, synthetic construct
  misc_feature 1..699: note = Description of Artificial Sequence: Synthetic coding sequence
  source 1..699: mol_type = other DNA
atggcccccagcgtgcccgccgccgagcccgagtaccccaagggcatcagagccgtgctgctgggcccccccggcgccggcaagggcacccaggcccccagactggccgagaacttctgcgtgtgccacctggccaccggcgacatgctgagagccatggtggccagcggcagcgagctgggcaagaagctgaaggccaccatggacgccggcaagctggtgagcgacgagatggtggtggagctgatcgagaagaacctggagacccccctgtgcaagaacggcttcctgctggacggcttccccagaaccgtgagacaggccgagatgctggacgacctgatggagaagagaaaggagaagctggacagcgtgatcgagttcagcatccccgacagcctgctgatcagaagaatcaccggcagactgatccaccccaagagcggcagaagctaccacgaggagttcaacccccccaaggagcccatgaaggacgacatcaccggcgagcccctgatcagaagaagcgacgacaacgagaaggccctgaagatcagactgcaggcctaccacacccagaccacccccctgatcgagtactacagaaagagaggcatccacagcgccatcgacgccagccagacccccgacgtggtgttcgccagcatcctggccgccttcagcaaggccaccagctag

SEQ ID NO: 72121 - DNA, 609 bp, synthetic construct
  misc_feature 1..609: note = Description of Artificial Sequence: Synthetic coding sequence
  source 1..609: mol_type = other DNA
atggcccccagcgtgcccgccgccgagcccgagtaccccaagggcatcagagccgtgctgctgggcccccccggcgccggcaagggcacccaggcccccagactggccgagaacttctgcgtgtgccacctggccaccggcgacatgctgagagccatggtggccagcggcagcgagctgggcaagaagctgaaggccaccatggacgccggcaagctggtgagcgacgagatggtggtggagctgatcgagaagaacctggagacccccctgtgcaagaacggcttcctgctggacggcttccccagaaccgtgagacaggccgagatgctggacgacctgatggagaagagaaaggagaagctggacagcgtgatcgagttcagcatccccgacagcctgctgatcagaagaatcaccggcagactgatccaccccaagagcggcagaagctaccacgaggagttcaacccccccaaggagcccatgaaggacgacatcaccggcgagcccctgatcagaagaagcgtgatcggccaggccaagagaagcttcctgagactggccaagatcagcttcgacgtgctgatcaagaaggccctggcctag

SEQ ID NO: 72122 - DNA, 474 bp, synthetic construct
  misc_feature 1..474: note = Description of Artificial Sequence: Synthetic coding sequence
  source 1..474: mol_type = other DNA
atgaccagactggccctgcacgagctgaagaacctgacccagtacagctggctgctggacggcttccccagaaccctgccccaggccgaggccctggacagagcctaccagatcgacaccgtgatcaacctgaacgtgcccttcgaggtgatcaagcagagactgaccgccagatggatccaccccgccagcggcagagtgtacaacatcgagttcaacccccccaagaccgtgggcatcgacgacctgaccggcgagcccctgatccagagagaggacgacaagcccgagaccgtgatcaagagactgaaggcctacgaggaccagaccaagcccgtgctggagtactaccagaagaagggcgtgctggagaccttcagcggcaccgagaccaacaagatctggccctacgtgtacgccttcctgcagaccaaggtgccccagagaagccagaaggccagcgtgaccccctag

SEQ ID NO: 72123 - DNA, 684 bp, synthetic construct
  misc_feature 1..684: note = Description of Artificial Sequence: Synthetic coding sequence
  source 1..684: mol_type = other DNA
atgggcgccagcgccagactgctgagagccgtgatcatgggcgcccccggcagcggcaagggcaccgtgagcagcagaatcaccacccacttcgagctgaagcacctgagcagcggcgacctgctgagagacaacatgctgagaggcaccgagatcggcgtgctggccaaggccttcatcgaccagggcaagctgatccccgacgacgtgatgaccagactggccctgcacgagctgaagaacctgacccagtacagctggctgctggacggcttccccagaaccctgccccaggccgaggccctggacagagcctaccagatcgacaccgtgatcaacctgaacgtgcccttcgaggtgatcaagcagagactgaccgccagatggatccaccccgccagcggcagagtgtacaacatcgagttcaacccccccaagaccgtgggcatcgacgacctgaccggcgagcccctgatccagagagaggacgacaagcccgagaccgtgatcaagagactgaaggcctacgaggaccagaccaagcccgtgctggagtactaccagaagaagggcgtgctggagaccttcagcggcaccgagaccaacaagatctggccctacgtgtacgccttcctgcagaccaaggtgccccagagaagccagaaggccagcgtgaccccctag

SEQ ID NO: 72124 - DNA, 564 bp, synthetic construct
  misc_feature 1..564: note = Description of Artificial Sequence: Synthetic coding sequence
  source 1..564: mol_type = other DNA
atgggcgccagcgccagactgctgagagccgtgatcatgggcgcccccggcagcggcaagggcaccgtgagcagcagaatcaccacccacttcgagctgaagcacctgagcagcggcgacctgctgagagacaacatgctgagaggcaccggcttccccagaaccctgccccaggccgaggccctggacagagcctaccagatcgacaccgtgatcaacctgaacgtgcccttcgaggtgatcaagcagagactgaccgccagatggatccaccccgccagcggcagagtgtacaacatcgagttcaacccccccaagaccgtgggcatcgacgacctgaccggcgagcccctgatccagagagaggacgacaagcccgagaccgtgatcaagagactgaaggcctacgaggaccagaccaagcccgtgctggagtactaccagaagaagggcgtgctggagaccttcagcggcaccgagaccaacaagatctggccctacgtgtacgccttcctgcagaccaaggtgccccagagaagccagaaggccagcgtgaccccctag

SEQ ID NO: 72125 - DNA, 474 bp, synthetic construct; identical to SEQ ID NO: 72122
  misc_feature 1..474: note = Description of Artificial Sequence: Synthetic coding sequence
  source 1..474: mol_type = other DNA

SEQ ID NO: 72126 - DNA, 1611 bp, synthetic construct
  misc_feature 1..1611: note = Description of Artificial Sequence: Synthetic coding sequence
  source 1..1611: mol_type = other DNA
atgtgcagcaagcccgaggaccccgtggagtacctggagagctgcctgcagaaggtgaaggagctgggcggctgcgacaaggtgaagtgggacaccttcgtgagccaggagaagaagaccctgccccccctgaacggcggccagagcagaagaagcttcctgagaaacgtgatgcccgagaacagcaacttcccctacagaagatacgacagactgccccccatccaccagttcagcatcgagagcgacaccgacctgagcgagaccgccgagctgatcgaggagtacgaggtgttcgaccccaccagacccagacccaagatcatcctggtgatcggcggccccggcagcggcaagggcacccagagcctgaagatcgccgagagatacggcttccagtacatcagcgtgggcgagctgctgagaaagaagatccacagcaccagcagcaacagaaagtggagcctgatcgccaagatcatcaccaccggcgagctggccccccaggagaccaccatcaccgagatcaagcagaagctgatgcagatccccgacgaggagggcatcgtgatcgacggcttccccagagacgtggcccaggccctgagcttcgaggaccagatctgcacccccgacctggtggtgttcctggcctgcgccaaccagagactgaaggagagactgctgaagagagccgagcagcagggcagacccgacgacaacgtgaaggccacccagagaagactgatgaacttcaagcagaacgccgcccccctggtgaagtacttccaggagaagggcctgatcatgaccttcgacgccgacagagacgaggacgaggtgttctacgacatcagcatggccgtggacaacaagctgttccccaacaaggaggccgccgccggcagcagcgacctggaccccagcatgatcctggacaccggcgagatcatcgacaccggcagcgactacgaggaccagggcgacgaccagctgaacgtgttcggcgaggacaccatgggcggcttcatggaggacctgagaaagtgcaagatcatcttcatcatcggcggccccggcagcggcaagggcacccagtgcgagaagctggtggagaagtacggcttcacccacctgagcaccggcgagctgctgagagaggagctggccagcgagagcgagagaagcaagctgatcagagacatcatggagagaggcgacctggtgcccagcggcatcgtgctggagctgctgaaggaggccatggtggccagcctgggcgacaccagaggcttcctgatcgacggctaccccagagaggtgaagcagggcgaggagttcggcagaagaatcggcgacccccagctggtgatctgcatggactgcagcgccgacaccatgaccaacagactgctgcagagaagcagaagcagcctgcccgtggacgacaccaccaagaccatcgccaagagactggaggcctactacagagccagcatccccgtgatcgcctactacgagaccaagacccagctgcacaagatcaacgccgagggcacccccgaggacgtgttcctgcagctgtgcaccgccatcgacagcatcttctag

SEQ ID NO: 72127 - DNA, 1689 bp, synthetic construct
  misc_feature 1..1689: note = Description of Artificial Sequence: Synthetic coding sequence
  source 1..1689: mol_type = other DNA
atgaacaccaacgacgccaaggagtacctggccagaagagagatcccccagctgttcgagagcctgctgaacggcctgatgtgcagcaagcccgaggaccccgtggagtacctggagagctgcctgcagaaggtgaaggagctgggcggctgcgacaaggtgaagtgggacaccttcgtgagccaggagaagaagaccctgccccccctgaacggcggccagagcagaagaagcttcctgagaaacgtgatgcccgagaacagcaacttcccctacagaagatacgacagactgccccccatccaccagttcagcatcgagagcgacaccgacctgagcgagaccgccgagctgatcgaggagtacgaggtgttcgaccccaccagacccagacccaagatcatcctggtgatcggcggccccggcagcggcaagggcacccagagcctgaagatcgccgagagatacggcttccagtacatcagcgtgggcgagctgctgagaaagaagatccacagcaccagcagcaacagaaagtggagcctgatcgccaagatcatcaccaccggcgagctggccccccaggagaccaccatcaccgagatcaagcagaagctgatgcagatccccgacgaggagggcatcgtgatcgacggcttccccagagacgtggcccaggccctgagcttcgaggaccagatctgcacccccgacctggtggtgttcctggcctgcgccaaccagagactgaaggagagactgctgaagagagccgagcagcagggcagacccgacgacaacgtgaaggccacccagagaagactgatgaacttcaagcagaacgccgcccccctggtgaagtacttccaggagaagggcctgatcatgaccttcgacgccgacagagacgaggacgaggtgttctacgacatcagcatggccgtggacaacaagctgttccccaacaaggaggccgccgccggcagcagcgacctggaccccagcatgatcctggacaccggcgagatcatcgacaccggcagcgactacgaggaccagggcgacgaccagctgaacgtgttcggcgaggacaccatgggcggcttcatggaggacctgagaaagtgcaagatcatcttcatcatcggcggccccggcagcggcaagggcacccagtgcgagaagctggtggagaagtacggcttcacccacctgagcaccggcgagctgctgagagaggagctggccagcgagagcgagagaagcaagctgatcagagacatcatggagagaggcgacctggtgcccagcggcatcgtgctggagctgctgaaggaggccatggtggccagcctgggcgacaccagaggcttcctgatcgacggctaccccagagaggtgaagcagggcgaggagttcggcagaagaatcggcgacccccagctggtgatctgcatggactgcagcgccgacaccatgaccaacagactgctgcagagaagcagaagcagcctgcccgtggacgacaccaccaagaccatcgccaagagactggaggcctactacagagccagcatccccgtgatcgcctactacgagaccaagacccagctgcacaagatcaacgccgagggcacccccgaggacgtgttcctgcagctgtgcaccgccatcgacagcatcttctag

SEQ ID NO: 72128 - DNA, 531 bp, synthetic construct
  misc_feature 1..531: note = Description of Artificial Sequence: Synthetic coding sequence
  source 1..531: mol_type = other DNA
atgtgcagcaagcccgaggaccccgtggagtacctggagagctgcctgcagaaggtgaaggagctgggcggctgcgacaaggtgaagtgggacaccttcgtgagccaggagaagaagaccctgccccccctgaacggcggccagagcagaagaagcttcctgagaaacgtgatgcccgagaacagcaacttcccctacagaagatacgacagactgccccccatccaccagttcagcatcgagagcgacaccgacctgagcgagaccgccgagctgatcgaggagtacgaggtgttcgaccccaccagacccagacccaagatcatcctggtgatcggcggccccggcagcggcaagggcacccagagcctgaagatcgccgagagatacggcttccagtacatcagcgtgggcgagctgctgagaaagaagatccacagcaccagcagcaacagaaagtggagcctgatcgccaagatcatcaccaccggcgagctggccccccaggagaccaccatcaccgagatctag

SEQ ID NO: 72129 - DNA, 1647 bp, synthetic construct
  misc_feature 1..1647: note = Description of Artificial Sequence: Synthetic coding sequence
  source 1..1647: mol_type = other DNA
atggccaagttcatgacccccgtgatccaggacaaccccagcggctggggcccctgcgccgtgcccgagcagttcagagacatgccctaccagcccttcagcaagggcgacagactgggcaaggtggccgactggaccggcgccacctaccaggacaagagatacaccaacaagtacagcagccagttcggcggcggcagccagtacgcctacttccacgaggaggacgagagcagcttccagctggtggacaccgccagaacccagaagaccgcctaccagagaaacagaatgagattcgcccagagaaacctgagaagagacaaggacagaagaaacatgctgcagttcaacctgcagatcctgcccaagagcgccaagcagaaggagagagagagaatcagactgcagaagaagttccagaagcagttcggcgtgagacagaagtgggaccagaagagccagaagcccagagacagcagcgtggaggtgagaagcgactgggaggtgaaggaggagatggacttcccccagctgatgaagatgagatacctggaggtgagcgagccccaggacatcgagtgctgcggcgccctggagtactacgacaaggccttcgacagaatcaccaccagaagcgagaagcccctgagaagcatcaagagaatcttccacaccgtgaccaccaccgacgaccccgtgatcagaaagctggccaagacccagggcaacgtgttcgccaccgacgccatcctggccaccctgatgagctgcaccagaagcgtgtacagctgggacatcgtggtgcagagagtgggcagcaagctgttcttcgacaagagagacaacagcgacttcgacctgctgaccgtgagcgagaccgccaacgagcccccccaggacgagggcaacagcttcaacagccccagaaacctggccatggaggccacctacatcaaccacaacttcagccagcagtgcctgagaatgggcaaggagagatacaacttccccaaccccaaccccttcgtggaggacgacatggacaagaacgagatcgccagcgtggcctacagatacagaagatggaagctgggcgacgacatcgacctgatcgtgagatgcgagcacgacggcgtgatgaccggcgccaacggcgaggtgagcttcatcaacatcaagaccctgaacgagtgggacagcagacactgcaacggcgtggactggagacagaagctggacagccagagaggcgccgtgatcgccaccgagctgaagaacaacagctacaagctggccagatggacctgctgcgccctgctggccggcagcgagtacctgaagctgggctacgtgagcagataccacgtgaaggacagcagcagacacgtgatcctgggcacccagcagttcaagcccaacgagttcgccagccagatcaacctgagcgtggagaacgcctggggcatcctgagatgcgtgatcgacatctgcatgaagctggaggagggcaagtacctgatcctgaaggaccccaacaagcaggtgatcagagtgtacagcctgcccgacggcaccttcagcagcgacgaggacgaggaggaggaggaggaggaggaggaggaggaggaggaggaggagacctag

SEQ ID NO: 72130 - DNA, 1278 bp, synthetic construct
  misc_feature 1..1278: note = Description of Artificial Sequence: Synthetic coding sequence
  source 1..1278: mol_type = other DNA
atggccgccggcggcgaccacggcagccccgacagctacagaagccccctggccagcagatacgccagccccgagatgtgcttcgtgttcagcgacagatacaagttcagaacctggagacagctgtggctgtggctggccgaggccgagcagaccctgggcctgcccatcaccgacgagcagatccaggagatgaagagcaacctggagaacatcgacttcaagatggccgccgaggaggagaagagactgagacacgacgtgatggcccacgtgcacaccttcggccactgctgccccaaggccgccggcatcatccacctgggcgccaccagctgctacgtgggcgacaacaccgacctgatcatcctgagaaacgccctggacctgctgctgcccaagctggccagagtgatcagcagactggccgacttcgccaaggagagagccagcctgcccaccctgggcttcacccacttccagcccgcccagctgaccaccgtgggcaagagatgctgcctgtggatccaggacctgtgcatggacctgcagaacctgaagagagtgagagacgacctgagattcagaggcgtgaagggcaccaccggcacccaggccagcttcctgcagctgttcgagggcgacgaccacaaggtggagcagctggacaagatggtgaccgagaaggccggcttcaagagagccttcatcatcaccggccagacctacaccagaaaggtggacatcgaggtgctgagcgtgctggccagcctgggcgccagcgtgcacaagatctgcaccgacatcagactgctggccaacctgaaggagatggaggagcccttcgagaagcagcagatcggcagcagcgccatgccctacaagagaaaccccatgagaagcgagagatgctgcagcctggccagacacctgatgaccctggtgatggaccccctgcagaccgccagcgtgcagtggttcgagagaaccctggacgacagcgccaacagaagaatctgcctggccgaggccttcctgaccgccgacaccatcctgaacaccctgcagaacatcagcgagggcctggtggtgtaccccaaggtgatcgagagaagaatcagacaggagctgcccttcatggccaccgagaacatcatcatggccatggtgaaggccggcggcagcagacaggtgcagagattcctggaggaggaggtgtaccccctgctgaagccctacgagagcgtgatgaaggtgaaggccgagctgtgcctgtag

SEQ ID NO: 72131 - DNA, 1497 bp, synthetic construct
  misc_feature 1..1497: note = Description of Artificial Sequence: Synthetic coding sequence
  source 1..1497: mol_type = other DNA
atggccgccggcggcgaccacggcagccccgacagctacagaagccccctggccagcagatacgccagccccgagatgtgcttcgtgttcagcgacagatacaagttcagaacctggagacagctgtggctgtggctggccgaggccgagcagaccctgggcctgcccatcaccgacgagcagatccaggagatgaagagcaacctggagaacatcgacttcaagatggccgccgaggaggagaagagactgagacacgacgtgatggcccacgtgcacaccttcggccactgctgccccaaggccgccggcatcatccacctgggcgccaccagctgctacgtgggcgacaacaccagcctgatcctgagcagaggcgtgatcaaggcctactgcaacctgagactgcccggcagcgacagcagccccgtgagcgtgagccagctggccagagtgatcagcagactggccgacttcgccaaggagagagccagcctgcccaccctgggcttcacccacttccagcccgcccagctgaccaccgtgggcaagagatgctgcctgtggatccaggacctgtgcatggacctgcagaacctgaagagagtgagagacgacctgagattcagaggcgtgaagggcaccaccggcacccaggccagcttcctgcagctgttcgagggcgacgaccacaaggtggagcagctggacaagatggtgaccgagaaggccggcttcaagagagccttcatcatcaccggccagacctacaccagaaaggtggacatcgaggtgctgagcgtgctggccagcctgggcgccagcgtgcacaagatctgcaccgacatcagactgctggccaacctgaaggagatggaggagcccttcgagaagcagcagatcggcagcagcgccatgccctacaagagaaaccccatgagaagcgagagatgctgcagcctggccagacacctgatgaccctggtgatggaccccctgcagaccgccagcgtgcagtggttcgagagaaccctggacgacagcgccaacagaagaatctgcctggccgaggccttcctgaccgccgacaccatcctgaacaccctgcagaacatcagcgagggcctggtggtgtaccccaaggtgatcgagagaagaatcagacaggagctgcccttcatggccaccgagaacatcatcatggccatggtgaaggccggcggcagcagacaggactgccacgagaagatcagagtgctgagccagcaggccgccagcgtggtgaagcaggagggcggcgacaacgacctgatcgagagaatccaggtggacgcctacttcagccccatccacagccagctggaccacctgctggaccccagcagcttcaccggcagagccagccagcaggtgcagagattcctggaggaggaggtgtaccccctgctgaagccctacgagagcgtgatgaaggtgaaggccgagctgtgcctgtag

SEQ ID NO: 72132 - DNA, 915 bp, synthetic construct
  misc_feature 1..915: note = Description of Artificial Sequence: Synthetic coding sequence
  source 1..915: mol_type = other DNA
atggacctgcagaacctgaagagagtgagagacgacctgagattcagaggcgtgaagggcaccaccggcacccaggccagcttcctgcagctgttcgagggcgacgaccacaaggtggagcagctggacaagatggtgaccgagaaggccggcttcaagagagccttcatcatcaccggccagacctacaccagaaaggtggacatcgaggtgctgagcgtgctggccagcctgggcgccagcgtgcacaagatctgcaccgacatcagactgctggccaacctgaaggagatggaggagcccttcgagaagcagcagatcggcagcagcgccatgccctacaagagaaaccccatgagaagcgagagatgctgcagcctggccagacacctgatgaccctggtgatggaccccctgcagaccgccagcgtgcagtggttcgagagaaccctggacgacagcgccaacagaagaatctgcctggccgaggccttcctgaccgccgacaccatcctgaacaccctgcagaacatcagcgagggcctggtggtgtaccccaaggtgatcgagagaagaatcagacaggagctgcccttcatggccaccgagaacatcatcatggccatggtgaaggccggcggcagcagacaggactgccacgagaagatcagagtgctgagccagcaggccgccagcgtggtgaagcaggagggcggcgacaacgacctgatcgagagaatccaggtggacgcctacttcagccccatccacagccagctggaccacctgctggaccccagcagcttcaccggcagagccagccagcaggtgcagagattcctggaggaggaggtgtaccccctgctgaagccctacgagagcgtgatgaaggtgaaggccgagctgtgcctgtag

SEQ ID NO: 72133 - DNA, 384 bp, synthetic construct
  misc_feature 1..384: note = Description of Artificial Sequence: Synthetic coding sequence
  source 1..384: mol_type = other DNA
atggccgccggcggcgaccacggcagccccgacagctacagaagccccctggccagcagatacgccagccccgagatgtgcttcgtgttcagcgacagatacaagttcagaacctggagacagctgtggctgtggctggccgaggccgagcagaccctgggcctgcccatcaccgacgagcagatccaggagatgaagagcaacctggagaacatcgacttcaagatggccgccgaggaggagaagagactgagacacgacgtgatggcccacgtgcacaccttcggccactgctgccccaaggccgccggcatcatccacctgggcgccaccagctgctacgtgggcgacaacaccgtgggcgcctgcgtggtgtacacctag

SEQ ID NO: 72134 - DNA, 1371 bp, synthetic construct
  misc_feature 1..1371: note = Description of Artificial Sequence: Synthetic coding sequence
  source 1..1371: mol_type = other DNA
atggccttcgccgagacctaccccgccgccagcagcctgcccaacggcgactgcggcagacccagagccagacccggcggcaacagagtgaccgtggtgctgggcgcccagtggggcgacgagggcaagggcaaggtggtggacctgctggcccaggacgccgacatcgtgtgcagatgccagggcggcaacaacgccggccacaccgtggtggtggacagcgtggagtacgacttccacctgctgcccagcggcatcatcaaccccaacgtgaccgccttcatcggcaacggcgtggtgatccacctgcccggcctgttcgaggaggccgagaagaacgtgcagaagggcaagggcctggagggctgggagaagagactgatcatcagcgacagagcccacatcgtgttcgacttccaccaggccgccgacggcatccaggagcagcagagacaggagcaggccggcaagaacctgggcaccaccaagaagggcatcggccccgtgtacagcagcaaggccgccagaagcggcctgagaatgtgcgacctggtgagcgacttcgacggcttcagcgagagattcaaggtgctggccaaccagtacaagagcatctaccccaccctggagatcgacatcgagggcgagctgcagaagctgaagggctacatggagaagatcaagcccatggtgagagacggcgtgtacttcctgtacgaggccctgcacggcccccccaagaagatcctggtggagggcgccaacgccgccctgctggacatcgacttcggcacctaccccttcgtgaccagcagcaactgcaccgtgggcggcgtgtgcaccggcctgggcatgcccccccagaacgtgggcgaggtgtacggcgtggtgaaggcctacaccaccagagtgggcatcggcgccttccccaccgagcaggacaacgagatcggcgagctgctgcagaccagaggcagagagttcggcgtgaccaccggcagaaagagaagatgcggctggctggacctggtgctgctgaagtacgcccacatgatcaacggcttcaccgccctggccctgaccaagctggacatcctggacatgttcaccgagatcaaggtgggcgtggcctacaagctggacggcgagatcatcccccacatccccgccaaccaggaggtgctgaacaaggtggaggtgcagtacaagaccctgcccggctggaacaccgacatcagcaacgccagagccttcaaggagctgcccgtgaacgcccagaactacgtgagattcatcgaggacgagctgcagatccccgtgaagtggatcggcgtgggcaagagcagagagagcatgatccagctgttctag

SEQ ID NO: 72135 - DNA, 1308 bp, synthetic construct
  misc_feature 1..1308: note = Description of Artificial Sequence: Synthetic coding sequence
  source 1..1308: mol_type = other DNA
atggccttcgccgagacctaccccgccgccagcagcctgcccaacggcgactgcgacgagggcaagggcaaggtggtggacctgctggcccaggacgccgacatcgtgtgcagatgccagggcggcaacaacgccggccacaccgtggtggtggacagcgtggagtacgacttccacctgctgcccagcggcatcatcaaccccaacgtgaccgccttcatcggcaacggcgtggtgatccacctgcccggcctgttcgaggaggccgagaagaacgtgcagaagggcaagggcctggagggctgggagaagagactgatcatcagcgacagagcccacatcgtgttcgacttccaccaggccgccgacggcatccaggagcagcagagacaggagcaggccggcaagaacctgggcaccaccaagaagggcatcggccccgtgtacagcagcaaggccgccagaagcggcctgagaatgtgcgacctggtgagcgacttcgacggcttcagcgagagattcaaggtgctggccaaccagtacaagagcatctaccccaccctggagatcgacatcgagggcgagctgcagaagctgaagggctacatggagaagatcaagcccatggtgagagacggcgtgtacttcctgtacgaggccctgcacggcccccccaagaagatcctggtggagggcgccaacgccgccctgctggacatcgacttcggcacctaccccttcgtgaccagcagcaactgcaccgtgggcggcgtgtgcaccggcctgggcatgcccccccagaacgtgggcgaggtgtacggcgtggtgaaggcctacaccaccagagtgggcatcggcgccttccccaccgagcaggacaacgagatcggcgagctgctgcagaccagaggcagagagttcggcgtgaccaccggcagaaagagaagatgcggctggctggacctggtgctgctgaagtacgcccacatgatcaacggcttcaccgccctggccctgaccaagctggacatcctggacatgttcaccgagatcaaggtgggcgtggcctacaagctggacggcgagatcatcccccacatccccgccaaccaggaggtgctgaacaaggtggaggtgcagtacaagaccctgcccggctggaacaccgacatcagcaacgccagagccttcaaggagctgcccgtgaacgcccagaactacgtgagattcatcgaggacgagctgcagatccccgtgaagtggatcggcgtgggcaagagcagagagagcatgatccagctgttctag

SEQ ID NO: 72136 - DNA, 1236 bp, synthetic construct
  misc_feature 1..1236: note = Description of Artificial Sequence: Synthetic coding sequence
  source 1..1236: mol_type = other DNA
atgtggatccagcagctgctgggcctgagcagcatgagcatcagatggcccggcagacccctgggcagccacgcctggatcctgatcgccatgttccagctggccgtggacctgcccgcctgcgaggccctgggccccggccccgagttctggctgctgcccagaagcccccccagaccccccagactgtggagcttcagaagcggccagcccgccagagtgcccgcccccgtgtggagccccagaccccccagagtggagagaatccacggccagatgcagatgcccagagccagaagagcccacagacccagagaccaggccgccgccctggtgcccaaggccggcctggccaagccccccgccgccgccaagagcagccccagcctggccagcagcagcagcagcagcagcagcgccgtggccggcggcgcccccgagcagcaggccctgctgagaagaggcaagagacacctgcagggcgacggcctgagcagcttcgacagcagaggcagcagacccaccaccgagaccgagttcatcgcctggggccccaccggcgacgaggaggccctggagagcaacaccttccccggcgtgtacggccccaccaccgtgagcatcctgcagaccagaaagaccaccgtggccgccaccaccaccaccaccaccaccgccacccccatgaccctgcagaccaagggcttcaccgagagcctggaccccagaagaagaatccccggcggcgtgagcaccaccgagcccagcaccagccccagcaacaacggcgaggtgacccagccccccagaatcctgggcgaggccagcggcctggccgtgcaccagatcatcaccatcaccgtgagcctgatcatggtgatcgccgccctgatcaccaccctggtgctgaagaactgctgcgcccagagcggcaacaccagaagaaacagccaccagagaaagaccaaccagcaggaggagagctgccagaacctgaccgacttccccagcgccagagtgcccagcagcctggacatcttcaccgcctacaacgagaccctgcagtgcagccacgagtgcgtgagagccagcgtgcccgtgtacaccgacgagaccctgcacagcaccaccggcgagtacaagagcaccttcaacggcaacagacccagcagcagcgacagacacctgatccccgtggccttcgtgagcgagaagtggttcgagatcagctgctag

SEQ ID NO: 72137 - DNA, 1236 bp, synthetic construct; identical to SEQ ID NO: 72136
  misc_feature 1..1236: note = Description of Artificial Sequence: Synthetic coding sequence
  source 1..1236: mol_type = other DNA

SEQ ID NO: 72138 - DNA, 1155 bp, synthetic construct
  misc_feature 1..1155: note = Description of Artificial Sequence: Synthetic coding sequence
  source 1..1155: mol_type = other DNA
atggtgagcggcgactacagcctgggcctgaacgacctgaacgtgagcccccccgagctgaccgtgcacgtgggcgacagcgccctgatgggctgcgtgttccagagcaccgaggacaagtgcatcttcaagatcgactggaccctgagccccggcgagcacgccaaggacgagtacgtgctgtactactacagcaacctgagcgtgcccatcggcagattccagaacagagtgcacctgatgggcgacatcctgtgcaacgacggcagcctgctgctgcaggacgtgcaggaggccgaccagggcacctacatctgcgagatcagactgaagggcgagagccaggtgttcaagaaggccgtggtgctgcacgtgctgcccgaggagcccaaggagctgatggtgcacgtgggcggcctgatccagatgggctgcgtgttccagagcaccgaggtgaagcacgtgaccaaggtggagtggatcttcagcggcagaagagccaaggaggagatcgtgttcagatactaccacaagctgagaatgagcgtggagtacagccagagctggggccacttccagaacagagtgaacctggtgggcgacatcttcagaaacgacggcagcatcatgctgcagggcgtgagagagagcgacggcggcaactacacctgcagcatccacctgggcaacctggtgttcaagaagaccatcgtgctgcacgtgagccccgaggagcccagaaccctggtgacccccgccgccctgagacccctggtgctgggcggcaaccagctggtgatcatcgtgggcatcgtgtgcgccaccatcctgctgctgcccgtgctgatcctgatcgtgaagaagacctgcggcaacaagagcagcgtgaacagcaccgtgctggtgaagaacaccaagaagaccaaccccgagatcaaggagaagccctgccacttcgagagatgcgagggcgagaagcacatctacagccccatcatcgtgagagaggtgatcgaggaggaggagcccagcgagaagagcgaggccacctacatgaccatgcaccccgtgtggcccagcctgagaagcgacagaaacaacagcctggagaagaagagcggcggcggcatgcccaagacccagcaggccttctag

SEQ ID NO: 72139 - DNA, 1185 bp, synthetic construct
  misc_feature 1..1185: note = Description of Artificial Sequence: Synthetic coding sequence
  source 1..1185: mol_type = other DNA
atgttctgccccctgaagctgatcctgctgcccgtgctgctggactacagcctgggcctgaacgacctgaacgtgagcccccccgagctgaccgtgcacgtgggcgacagcgccctgatgggctgcgtgttccagagcaccgaggacaagtgcatcttcaagatcgactggaccctgagccccggcgagcacgccaaggacgagtacgtgctgtactactacagcaacctgagcgtgcccatcggcagattccagaacagagtgcacctgatgggcgacatcctgtgcaacgacggcagcctgctgctgcaggacgtgcaggaggccgaccagggcacctacatctgcgagatcagactgaagggcgagagccaggtgttcaagaaggccgtggtgctgcacgtgctgcccgaggagcccaaggagctgatggtgcacgtgggcggcctgatccagatgggctgcgtgttccagagcaccgaggtgaagcacgtgaccaaggtggagtggatcttcagcggcagaagagccaaggaggagatcgtgttcagatactaccacaagctgagaatgagcgtggagtacagccagagctggggccacttccagaacagagtgaacctggtgggcgacatcttcagaaacgacggcagcatcatgctgcagggcgtgagagagagcgacggcggcaactacacctgcagcatccacctgggcaacctggtgttcaagaagaccatcgtgctgcacgtgagccccgaggagcccagaaccctggtgacccccgccgccctgagacccctggtgctgggcggcaaccagctggtgatcatcgtgggcatcgtgtgcgccaccatcctgctgctgcccgtgctgatcctgatcgtgaagaagacctgcggcaacaagagcagcgtgaacagcaccgtgctggtgaagaacaccaagaagaccaaccccgagatcaaggagaagccctgccacttcgagagatgcgagggcgagaagcacatctacagccccatcatcgtgagagaggtgatcgaggaggaggagcccagcgagaagagcgaggccacctacatgaccatgcaccccgtgtggcccagcctgagaagcgacagaaacaacagcctggagaagaagagcggcggcggcatgcccaagacccagcaggccttctag

SEQ ID NO: 72140 - DNA, 468 bp, synthetic construct
  misc_feature 1..468: note = Description of Artificial Sequence: Synthetic coding sequence
  source 1..468: mol_type = other DNA
atgttctgccccctgaagctgatcctgctgcccgtgctgctggactacagcctgggcctgaacgacctgaacgtgagcccccccgagctgaccgtgcacgtgggcgacagcgccctgatgggctgcgtgttccagagcaccgaggacaagtgcatcttcaagatcgactggaccctgagccccggcgagcacgccaaggacgagtacgtgctgtactactacagcaacctgagcgtgcccatcggcagattccagaacagagtgcacctgatgggcgacatcctgtgcaacgacggcagcctgctgctgcaggacgtgcaggaggccgaccagggcacctacatctgcgagatcagactgaagggcgagagccaggtgttcaagaaggccgtggtgctgcacgtgctgcccgaggagcccaaggagctgatggtgcacgtgggcggcctgatccagatgggctgctag

SEQ ID NO: 72141 - DNA, 663 bp, synthetic construct
  misc_feature 1..663: note = Description of Artificial Sequence: Synthetic coding sequence
  source 1..663: mol_type = other DNA
atgggctgcgtgttccagagcaccgaggacaagtgcatcttcaagatcgactggaccctgagccccggcgagcacgccaaggacgagtacgtgctgtactactacagcaacctgagcgtgcccatcggcagattccagaacagagtgcacctgatgggcgacatcctgtgcaacgacggcagcctgctgctgcaggacgtgcaggaggccgaccagggcacctacatctgcgagatcagactgaagggcgagagccaggtgttcaagaaggccgtggtgctgcacgtgctgcccgaggagcccaaggagctgatggtgcacgtgggcggcctgatccagatgggctgcgtgttccagagcaccgaggtgaagcacgtgaccaaggtggagtggatcttcagcggcagaagagccaaggaggagatcgtgttcagatactaccacaagctgagaatgagcgtggagtacagccagagctggggccacttccagaacagagtgaacctggtgggcgacatcttcagaaacgacggcagcatcatgctgcagggcgtgagagagagcgacggcggcaactacacctgcagcatccacctgggcaacctggtgttcaagaagaccatcgtgctgcacgtgagccccgaggagcccagaaagtggtag

SEQ ID NO: 72142 - DNA, 1128 bp, synthetic construct
  misc_feature 1..1128: note = Description of Artificial Sequence: Synthetic coding sequence
  source 1..1128: mol_type = other DNA
atgagcagccacaagggcagcgtggtggcccagggcaacggcgcccccgccagcaacagagaggccgacaccgtggagctggccgagctgggccccctgctggaggagaagggcaagagagtgatcgccaacccccccaaggccgaggaggagcagacctgccccgtgccccaggaggaggaggaggaggtgagagtgctgaccctgcccctgcaggcccaccacgccatggagaagatggaggagttcgtgtacaaggtgtgggagggcagatggagagtgatcccctacgacgtgctgcccgactggctgaaggacaacgactacctgctgcacggccacagaccccccatgcccagcttcagagcctgcttcaagagcatcttcagaatccacaccgagaccggcaacatctggacccacctgctgggcttcgtgctgttcctgttcctgggcatcctgaccatgctgagacccaacatgtacttcatggcccccctgcaggagaaggtggtgttcggcatgttcttcctgggcgccgtgctgtgcctgagcttcagctggctgttccacaccgtgtactgccacagcgagaaggtgagcagaaccttcagcaagctggactacagcggcatcgccctgctgatcatgggcagcttcgtgccctggctgtactacagcttctactgcagcccccagcccagactgatctacctgagcatcgtgtgcgtgctgggcatcagcgccatcatcgtggcccagtgggacagattcgccacccccaagcacagacagaccagagccggcgtgttcctgggcctgggcctgagcggcgtggtgcccaccatgcacttcaccatcgccgagggcttcgtgaaggccaccaccgtgggccagatgggctggttcttcctgatggccgtgatgtacatcaccggcgccggcctgtacgccgccagaatccccgagagattcttccccggcaagttcgacatctggttccagagccaccagatcttccacgtgctggtggtggccgccgccttcgtgcacttctacggcgtgagcaacctgcaggagttcagatacggcctggagggcggctgcaccgacgacaccctgctgtag

SEQ ID NO: 72143 - DNA, 516 bp, synthetic construct
  misc_feature 1..516: note = Description of Artificial Sequence: Synthetic coding sequence
  source 1..516: mol_type = other DNA
atgagcagccacaagggcagcgtggtggcccagggcaacggcgcccccgccagcaacagagaggccgacaccgtggagctggccgagctgggccccctgctggaggagaagggcaagagagtgatcgccaacccccccaaggccgaggaggagcagacctgccccgtgccccaggaggaggaggaggaggtgagagtgctgaccctgcccctgcaggcccaccacgccatggagaagatggaggagttcgtgtacaaggtgtgggagggcagatggagagtgatcccctacgacgtgctgcccgactggctgaaggacaacgactacctgctgcacggccacagaccccccatgcccagcttcagagcctgcttcaagagcatcttcagaatccacaccgagaccggcaacatctggacccacctgctggccaccgcccacctgcccctgcacagactgtgccccggccacttctgccaccactgcggcgccgtgggccccgtgtgccacagctag

SEQ ID NO: 72144 - DNA, 801 bp, synthetic construct
  misc_feature 1..801: note = Description of Artificial Sequence: Synthetic coding sequence
  source 1..801: mol_type = other DNA
atgagcagccacaagggcagcgtggtggcccagggcaacggcgcccccgccagcaacagagaggccgacaccgtggagctggccgagctgggccccctgctggaggagaagggcaagagagtgatcgccaacccccccaaggccgaggaggagcagacctgccccgtgccccaggaggaggaggaggaggtgagagtgctgaccctgcccctgcaggcccaccacgccatggagaagatggaggagttcgtgtacaaggtgtgggagggcagatggagagtgatcccctacgacgtgctgcccgactggctgaaggacaacgactacctgctgcacggccacagaccccccatgcccagcttcagagcctgcttcaagagcatcttcagaatccacaccgagaccggcaacatctggacccacctgctgggcttcgtgctgttcctgttcctgggcatcctgaccatgctgagacccaacatgtacttcatggcccccctgcaggagaaggtggtgttcggcatgttcttcctgggcgccgtgctgtgcctgagcttcagctggctgttccacaccgtgtactgccacagcgagaaggtgagcagaaccttcagcaagctggactacagcggcatcgccctgctgatcatgggcagcttcgtgccctggctgtactacagcttctactgcagcccccagcccagactgatctacctgagcatcgtgtgcgtgctgggcatcagcgccatcatcgtggcccagtgggacagattcgccacccccaagcacagacagacctag

SEQ ID NO: 72145 - DNA, 618 bp, synthetic construct
  misc_feature 1..618: note = Description of Artificial Sequence: Synthetic coding sequence
  source 1..618: mol_type = other DNA
atgagcagccacaagggcagcgtggtggcccagggcaacggcgcccccgccagcaacagagaggccgacaccgtggagctggccgagctgggccccctgctggaggagaagggcaagagagtgatcgccaacccccccaaggccgaggaggagcagacctgccccgtgccccaggaggaggaggaggaggtgagagtgctgaccctgcccctgcaggcccaccacgccatggagaagatggaggagttcgtgtacaaggtgtgggagggcagatggagagtgatcccctacgacgtgctgcccgactggctgaaggacaacgactacctgctgcacggccacagaccccccatgcccagcttcagagcctgcttcaagagcatcttcagaatccacaccgagaccggcaacatctggacccacctgctgggcttcgtgctgttcctgttcctgggcatcctgaccatgctgagacccaacatgtacttcatggcccccctgcaggagaaggtggtgttcggcatgttcttcctgggcgccgtgctgtgcctgagcttcagctggctgttccacaccgtgtactgccacagcgagaaggtgagcagaaccttcagctag

SEQ ID NO: 72146 - DNA, 1128 bp, synthetic construct; identical to SEQ ID NO: 72142
  misc_feature 1..1128: note = Description of Artificial Sequence: Synthetic coding sequence
  source 1..1128: mol_type = other DNA

SEQ ID NO: 72147 - DNA, 1161 bp, synthetic construct
  misc_feature 1..1161: note = Description of Artificial Sequence: Synthetic coding sequence
  source 1..1161: mol_type = other DNA
atgaacgagcccaccgagaacagactgggctgcagcagaacccccgagcccgacatcagactgagaaagggccaccagctggacggcaccagaagaggcgacaacgacagccaccagggcgacctggagcccatcctggaggccagcgtgctgagcagccaccacaagaagagcagcgaggagcacgagtacagcgacgaggccccccaggaggacgagggcttcatgggcatgagccccctgctgcaggcccaccacgccatggagaagatggaggagttcgtgtgcaaggtgtgggagggcagatggagagtgatcccccacgacgtgctgcccgactggctgaaggacaacgacttcctgctgcacggccacagaccccccatgcccagcttcagagcctgcttcaagagcatcttcagaatccacaccgagaccggcaacatctggacccacctgctgggctgcgtgttcttcctgtgcctgggcatcttctacatgttcagacccaacatcagcttcgtggcccccctgcaggagaaggtggtgttcggcctgttcttcctgggcgccatcctgtgcctgagcttcagctggctgttccacaccgtgtactgccacagcgagggcgtgagcagactgttcagcaagctggactacagcggcatcgccctgctgatcatgggcagcttcgtgccctggctgtactacagcttctactgcaacccccagccctgcttcatctacctgatcgtgatctgcgtgctgggcatcgccgccatcatcgtgagccagtgggacatgttcgccaccccccagtacagaggcgtgagagccggcgtgttcctgggcctgggcctgagcggcatcatccccaccctgcactacgtgatcagcgagggcttcctgaaggccgccaccatcggccagatcggctggctgatgctgatggccagcctgtacatcaccggcgccgccctgtacgccgccagaatccccgagagattcttccccggcaagtgcgacatctggttccacagccaccagctgttccacatcttcgtggtggccggcgccttcgtgcacttccacggcgtgagcaacctgcaggagttcagattcatgatcggcggcggctgcagcgaggaggacgccctgtag

SEQ ID NO: 72148 - DNA, 735 bp, synthetic construct
  misc_feature 1..735: note = Description of Artificial Sequence: Synthetic coding sequence
  source 1..735: mol_type = other DNA
atgctgctgctgggcgccgtgctgctgctgctggccctgcccggccacgaccaggagaccaccacccagggccccggcgtgctgctgcccctgcccaagggcgcctgcaccggctggatggccggcatccccggccaccccggccacaacggcgcccccggcagagacggcagagacggcacccccggcgagaagggcgagaagggcgaccccggcctgatcggccccaagggcgacatcggcgagaccggcgtgcccggcgccgagggccccagaggcttccccggcatccagggcagaaagggcgagcccggcgagggcgcctacgtgtacagaagcgccttcagcgtgggcctggagacctacgtgaccatccccaacatgcccatcagattcaccaagatcttctacaaccagcagaaccactacgacggcagcaccggcaagttccactgcaacatccccggcctgtactacttcgcctaccacatcaccgtgtacatgaaggacgtgaaggtgagcctgttcaagaaggacaaggccatgctgttcacctacgaccagtaccaggagaacaacgtggaccaggccagcggcagcgtgctgctgcacctggaggtgggcgaccaggtgtggctgcaggtgtacggcgagggcgagagaaacggcctgtacgccgacaacgacaacgacagcaccttcaccggcttcctgctgtaccacgacaccaactag

SEQ ID NO: 72149 - DNA, 735 bp, synthetic construct; identical to SEQ ID NO: 72148
  misc_feature 1..735: note = Description of Artificial Sequence: Synthetic coding sequence
  source 1..735: mol_type = other DNA

SEQ ID NO: 72150 - DNA, 735 bp, synthetic construct; identical to SEQ ID NO: 72148
  misc_feature 1..735: note = Description of Artificial Sequence: Synthetic coding sequence
  source 1..735: mol_type = other DNA

SEQ ID NO: 72151 - DNA, 1491 bp, synthetic construct
  misc_feature 1..1491: note = Description of Artificial Sequence: Synthetic coding sequence
  source 1..1491: mol_type = other DNA
atggccctgtggagaggcagcgcctacgccggcttcctggccctggccgtgggctgcgtgttcctgctggagcccgagctgcccggcagcgccctgagaagcctgtggagcagcctgtgcctgggccccgcccccgccccccccggccccgtgagccccgagggcagactggccgccgcctgggacgccctgatcgtgagacccgtgagaagatggagaagagtggccgtgggcgtgaacgcctgcgtggacgtggtgctgagcggcgtgaagctgctgcaggccctgggcctgagccccggcaacggcaaggaccacagcatcctgcacagcagaaacgacctggaggaggccttcatccacttcatgggcaagggcgccgccgccgagagattcttcagcgacaaggagaccttccacgacatcgcccaggtggccagcgagttccccggcgcccagcactacgtgggcggcaacgccgccctgatcggccagaagttcgccgccaacagcgacctgaaggtgctgctgtgcggccccgtgggccccaagctgcacgagctgctggacgacaacgtgttcgtgccccccgagagcctgcaggaggtggacgagttccacctgatcctggagtaccaggccggcgaggagtggggccagctgaaggccccccacgccaacagattcatcttcagccacgacctgagcaacggcgccatgaacatgctggaggtgttcgtgagcagcctggaggagttccagcccgacctggtggtgctgagcggcctgcacatgatggagggccagagcaaggagctgcagagaaagagactgctggaggtggtgaccagcatcagcgacatccccaccggcatccccgtgcacctggagctggccagcatgaccaacagagagctgatgagcagcatcgtgcaccaggtgttccccgccgtgaccagcctgggcctgaacgagcaggagctgctgttcctgacccagagcgccagcggcccccacagcagcctgagcagctggaacggcgtgcccgacgtgggcatggtgagcgacatcctgttctggatcctgaaggagcacggcagaagcaagagcagagccagcgacctgaccagaatccacttccacaccctggtgtaccacatcctggccaccgtggacggccactgggccaaccagctggccgccgtggccgccggcgccagagtggccggcacccaggcctgcgccaccgagaccatcgacaccagcagagtgagcctgagagccccccaggagttcatgaccagccacagcgaggccggcagcagaatcgtgctgaaccccaacaagcccgtggtggagtggcacagagagggcatcagcttccacttcacccccgtgctggtgtgcaaggaccccatcagaaccgtgggcctgggcgacgccatcagcgccgagggcctgttctacagcgaggtgcacccccactactag

SEQ ID NO: 72152 - DNA, 1041 bp, synthetic construct
  misc_feature 1..1041: note = Description of Artificial Sequence: Synthetic coding sequence
  source 1..1041: mol_type = other DNA
atgggcaagggcgccgccgccgagagattcttcagcgacaaggagaccttccacgacatcgcccaggtggccagcgagttccccggcgcccagcactacgtgggcggcaacgccgccctgatcggccagaagttcgccgccaacagcgacctgaaggtgctgctgtgcggccccgtgggccccaagctgcacgagctgctggacgacaacgtgttcgtgccccccgagagcctgcaggaggtggacgagttccacctgatcctggagtaccaggccggcgaggagtggggccagctgaaggccccccacgccaacagattcatcttcagccacgacctgagcaacggcgccatgaacatgctggaggtgttcgtgagcagcctggaggagttccagcccgacctggtggtgctgagcggcctgcacatgatggagggccagagcaaggagctgcagagaaagagactgctggaggtggtgaccagcatcagcgacatccccaccggcatccccgtgcacctggagctggccagcatgaccaacagagagctgatgagcagcatcgtgcaccagcaggtgttccccgccgtgaccagcctgggcctgaacgagcaggagctgctgttcctgacccagagcgccagcggcccccacagcagcctgagcagctggaacggcgtgcccgacgtgggcatggtgagcgacatcctgttctggatcctgaaggagcacggcagaagcaagagcagagccagcgacctgaccagaatccacttccacaccctggtgtaccacatcctggccaccgtggacggccactgggccaaccagctggccgccgtggccagcagctgcggctgggacaccggcctgagacacagaaaccacagacaccagcccagcgtgagcgagggcacccccagagtgcacgacttccccttcggcggcagactgcaggactgcatcaagcccaagcaggccagcagcagaatggcccagagaggcaacatcctgcccctgcacaccagcatcggcgtgtag

SEQ ID NO: 72153 - DNA, 1251 bp, synthetic construct
  misc_feature 1..1251: note = Description of Artificial Sequence: Synthetic coding sequence
  source 1..1251: mol_type = other DNA
atggccctgtggagaggcagcgcctacgccggcttcctggccctgggcctgagccccggcaacggcaaggaccacagcatcctgcacagcagaaacgacctggaggaggccttcatccacttcatgggcaagggcgccgccgccgagagattcttcagcgacaaggagaccttccacgacatcgcccaggtggccagcgagttccccggcgcccagcactacgtgggcggcaacgccgccctgatcggccagaagttcgccgccaacagcgacctgaaggtgctgctgtgcggccccgtgggccccaagctgcacgagctgctggacgacaacgtgttcgtgccccccgagagcctgcaggaggtggacgagttccacctgatcctggagtaccaggccggcgaggagtggggccagctgaaggccccccacgccaacagattcatcttcagccacgacctgagcaacggcgccatgaacatgctggaggtgttcgtgagcagcctggaggagttccagcccgacctggtggtgctgagcggcctgcacatgatggagggccagagcaaggagctgcagagaaagagactgctggaggtggtgaccagcatcagcgacatccccaccggcatccccgtgcacctggagctggccagcatgaccaacagagagctgatgagcagcatcgtgcaccagcaggtgttccccgccgtgaccagcctgggcctgaacgagcaggagctgctgttcctgacccagagcgccagcggcccccacagcagcctgagcagctggaacggcgtgcccgacgtgggcatggtgagcgacatcctgttctggatcctgaaggagcacggcagaagcaagagcagagccagcgacctgaccagaatccacttccacaccctggtgtaccacatcctggccaccgtggacggccactgggccaaccagctggccgccgtggccgccggcgccagagtggccggcacccaggcctgcgccaccgagaccatcgacaccagcagagtgagcctgagagccccccaggagttcatgaccagccacagcgaggccggcagcagaatcgtgctgaaccccaacaagcccgtggtggagtggcacagagagggcatcagcttccacttcacccccgtgctggtgtgcaaggaccccatcagaaccgtgggcctgggcgacgccatcagcgccgagggcctgttctacagcgaggtgcacccccactactag

SEQ ID NO: 72154 - DNA, 669 bp, synthetic construct
  misc_feature 1..669: note = Description of Artificial Sequence: Synthetic coding sequence
  source 1..669: mol_type = other DNA
atggccgccagctgcagagtggtgaccagcatcagcgacatccccaccggcatccccgtgcacctggagctggccagcatgaccaacagagagctgatgagcagcatcgtgcaccaggtgttccccgccgtgaccagcctgggcctgaacgagcaggagctgctgttcctgacccagagcgccagcggcccccacagcagcctgagcagctggaacggcgtgcccgacgtgggcatggtgagcgacatcctgttctggatcctgaaggagcacggcagaagcaagagcagagccagcgacctgaccagaatccacttccacaccctggtgtaccacatcctggccaccgtggacggccactgggccaaccagctggccgccgtggccgccggcgccagagtggccggcacccaggcctgcgccaccgagaccatcgacaccagcagagtgagcctgagagccccccaggagttcatgaccagccacagcgaggccggcagcagaatcgtgctgaaccccaacaagcccgtggtggagtggcacagagagggcatcagcttccacttcacccccgtgctggtgtgcaaggaccccatcagaaccgtgggcctgggcgacgccatcagcgccgagggcctgttctacagcgaggtgcacccccactactag

SEQ ID NO: 72155 - DNA, 546 bp, synthetic construct
  misc_feature 1..546: note = Description of Artificial Sequence: Synthetic coding sequence
  source 1..546: mol_type = other DNA
atgggcaacatcttcgccaacctgttcaagggcctgttcggcaagaaggagatgagaatcctgatggtgggcctggacgccgccggcaagaccaccatcctgtacaagctgaagctgggcgagatcgtgaccaccatccccaccatcggcttcaacgtggagaccgtggagtacaagaacatcagcttcaccgtgtgggacgtgggcggccaggacaagatcagacccctgtggagacactacttccagaacacccagggcctgatcttcgtggtggacagcaacgacagagagagagtgaacgaggccagagaggagctgatgagaatgctggccgaggacgagctgagagacgccgtgctgctggtgttcgccaacaagcaggacctgcccaacgccatgaacgccgccgagatcaccgacaagctgggcctgcacagcctgagacacagaaactggtacatccaggccacctgcgccaccagcggcgacggcctgtacgagggcctggactggctgagcaaccagctgagaaaccagaagtag

SEQ ID NO: 72156 - DNA, 546 bp, synthetic construct; identical to SEQ ID NO: 72155
  misc_feature 1..546: note = Description of Artificial Sequence: Synthetic coding sequence
  source 1..546: mol_type = other DNA

SEQ ID NO: 72157 - DNA, 546 bp, synthetic construct; identical to SEQ ID NO: 72155
  misc_feature 1..546: note = Description of Artificial Sequence: Synthetic coding sequence
  source 1..546: mol_type = other DNA

SEQ ID NO: 72158 - DNA, 519 bp, synthetic construct
  misc_feature 1..519: note = Description of Artificial Sequence: Synthetic coding sequence
  source 1..519: mol_type = other DNA
atgggcaacatcttcgccaacctgttcaagggcctgttcggcaagaaggagatgagaatcctgatggtgggcctggacgccgccggcaagaccaccatcctgtacaagctgaagctgggcgagatcgtgaccaccatccccaccatcggcttcaacgtggagaccgtggagtacaagaacatcagcttcaccgtgtgggacgtgggcggccaggacaagatcagacccctgtggagacactacttccagaacacccagggcctgatcttcgtggtggacagcaacgacagagagagagtgaacgaggcccaggacgagctgagagacgccgtgctgctggtgttcgccaacaagcaggacctgcccaacgccatgaacgccgccgagatcaccgacaagctgggcctgcacagcctgagacacagaaactggtacatccaggccacctgcgccaccagcggcgacggcctgtacgagggcctggactggctgagcaaccagctgagaaaccagaagtag

SEQ ID NO: 72159 - DNA, 546 bp, synthetic construct
  misc_feature 1..546: note = Description of Artificial Sequence: Synthetic coding sequence
  source 1..546: mol_type = other DNA
atgggcaacatcttcggcaacctgctgaagagcctgatcggcaagaaggagatgagaatcctgatggtgggcctggacgccgccggcaagaccaccatcctgtacaagctgaagctgggcgagatcgtgaccaccatccccaccatcggcttcaacgtggagaccgtggagtacaagaacatcagcttcaccgtgtgggacgtgggcggccaggacaagatcagacccctgtggagacactacttccagaacacccagggcctgatcttcgtggtggacagcaacgacagagagagagtgaacgaggccagagaggagctgatgagaatgctggccgaggacgagctgagagacgccgtgctgctggtgttcgccaacaagcaggacctgcccaacgccatgaacgccgccgagatcaccgacaagctgggcctgcacagcctgagacacagaaactggtacatccaggccacctgcgccaccagcggcgacggcctgtacgagggcctggactggctggccaaccagctgaagaacaagaagtag

SEQ ID NO: 72160 - DNA, 435 bp, synthetic construct
  misc_feature 1..435: note = Description of Artificial Sequence: Synthetic coding sequence
  source 1..435: mol_type = other DNA
atgggcaacatcttcggcaacctgctgaagagcctgatcggcaagaaggagatgagaatcctgatggtgggcctggacgccgccggcaagaccaccatcctgtacaagctgaagctgggcgagatcgtgaccaccatccccaccatcggcctgatcttcgtggtggacagcaacgacagagagagagtgaacgaggccagagaggagctgatgagaatgctggccgaggacgagctgagagacgccgtgctgctggtgttcgccaacaagcaggacctgcccaacgccatgaacgccgccgagatcaccgacaagctgggcctgcacagcctgagacacagaaactggtacatccaggccacctgcgccaccagcggcgacggcctgtacgagggcctggactggctggccaaccagctgaagaacaagaagtag

SEQ ID NO: 72161 - DNA, 153 bp, synthetic construct
  misc_feature 1..153: note = Description of Artificial Sequence: Synthetic coding sequence
  source 1..153: mol_type = other DNA
atgggcaacatcttcggcaacctgctgaagagcctgatcggcaagaaggagatgagaatcctgatggtgggcctggacgccgccggcaagaccaccatcctgtacaagctgaagctgggcgagatcgtgaccaccatccccaccatcggctag

SEQ ID NO: 72162 - DNA, 309 bp, synthetic construct
  misc_feature 1..309: note = Description of Artificial Sequence: Synthetic coding sequence
  source 1..309: mol_type = other DNA
atgggcaacatcttcggcaacctgctgaagagcctgatcggcaagaaggagatgagaatcctgatggtgggcctggacgccgccggcaagaccaccatcctgtacaagctgaagctgggcgagatcgtgaccaccatccccaccatcggcttcaacgtggagaccgtggagtacaagaacatcagcttcaccgtgtgggacgtgggcggccaggacaagatcagacccctgtggagacactacttccagaacacccagggcctgatcttcgtggtggacagcaacgacagagagagagtgaacgagtag

SEQ ID NO: 72163 - DNA, 546 bp, synthetic construct; identical to SEQ ID NO: 72159
  misc_feature 1..546: note = Description of Artificial Sequence: Synthetic coding sequence
  source 1..546: mol_type = other DNA

SEQ ID NO: 72164 - DNA, 123 bp, synthetic construct
  misc_feature 1..123: note = Description of Artificial Sequence: Synthetic coding sequence
  source 1..123: mol_type = other DNA
atgggcaacatcttcggcaacctgctgaagagcctgatcggcaagaaggagatgagaatcctgatggtgggcctggacgccgccggcaagaccaccatcctgtacaagctgaagctgggctag

SEQ ID NO: 72165 - DNA, 543 bp, synthetic construct
  misc_feature 1..543: note = Description of Artificial Sequence: Synthetic coding sequence
  source 1..543: mol_type = other DNA
atgggcctgaccatcagcagcctgttcagcagactgttcggcaagaagcagatgagaatcctgatggtgggcctggacgccgccggcaagaccaccatcctgtacaagctgaagctgggcgagatcgtgaccaccatccccaccatcggcttcaacgtggagaccgtggagtacaagaacatctgcttcaccgtgtgggacgtgggcggccaggacagaatcagacccctgtggaagcactacttccagaacacccagggcctgatcttcgtggtggacagcaacgacagagagagaatccaggaggtggccgacgagctgcagaagatgctgctggtggacgagctgagagacgccgtgctgctgctgttcgccaacaagcaggacctgcccaacgccatggccatcagcgagatgaccgacaagctgggcctgcagagcctgagaaacagaacctggtacgtgcaggccacctgcgccacccagggcaccggcctgtacgagggcctggactggctgagcaacgagctgagcaagagatag

SEQ ID NO: 72166 - DNA, 384 bp, synthetic construct
  misc_feature 1..384: note = Description of Artificial Sequence: Synthetic coding sequence
  source 1..384: mol_type = other DNA
atgggcctgaccatcagcagcctgttcagcagactgttcggcaagaagcagatgagaatcctgatggtgggcctggacgccgccggcaagaccaccatcctgtacaagctgaagctgggcgagatcgtgaccaccatccccaccatcggcttcaacgtggagaccgtggagtacaagaacatctgcttcaccgtgtgggacgtgggcggccaggacagaatcagacccctgtggaagcactacttccagaacacccagggcctgatcttcgtggtggacagcaacgacagagagagaatccaggaggtggccgacgagctgcagaagatgctgctggtggacgagctgagagacgccgtgctgctgctgttcgccaacaagtag

SEQ ID NO: 72167 - DNA, 69 bp, synthetic construct
  misc_feature 1..69: note = Description of Artificial Sequence: Synthetic coding sequence
  source 1..69: mol_type = other DNA
atgggcctgaccatcagcagcctgttcagcagactgttcggcaagaagcagatgagaatcctgatgtag

SEQ ID NO: 72168 - DNA, 543 bp, synthetic construct
  misc_feature 1..543: note = Description of Artificial Sequence: Synthetic coding sequence
  source 1..543: mol_type = other DNA
atgggcctgaccgtgagcgccctgttcagcagaatcttcggcaagaagcagatgagaatcctgatggtgggcctggacgccgccggcaagaccaccatcctgtacaagctgaagctgggcgagatcgtgaccaccatccccaccatcggcttcaacgtggagaccgtggagtacaagaacatctgcttcaccgtgtgggacgtgggcggccaggacaagatcagacccctgtggagacactacttccagaacacccagggcctgatcttcgtggtggacagcaacgacagagagagagtgcaggagagcgccgacgagctgcagaagatgctgcaggaggacgagctgagagacgccgtgctgctggtgttcgccaacaagcaggacatgcccaacgccatgcccgtgagcgagctgaccgacaagctgggcctgcagcacctgagaagcagaacctggtacgtgcaggccacctgcgccacccagggcaccggcctgtacgacggcctggactggctgagccacgagctgagcaagagatag

SEQ ID NO: 72169 - DNA, 1245 bp, synthetic construct
  misc_feature 1..1245: note = Description of Artificial Sequence: Synthetic coding sequence
  source 1..1245: mol_type = other DNA
atggccagccccagaaccagaaaggtgctgaaggaggtgagagtgcaggacgagaacaacgtgtgcttcgagtgcggcgccttcaacccccagtgggtgagcgtgacctacggcatctggatctgcctggagtgcagcggcagacacagaggcctgggcgtgcacctgagcttcgtgagaagcgtgaccatggacaagtggaaggacatcgagctggagaagatgaaggccggcggcaacgccaagttcagagagttcctggagagccaggaggactacgacccctgctggagcctgcaggagaagtacaacagcagagccgccgccctgttcagagacaaggtggtggccctggccgagggcagagagtggagcctggagagcagccccgcccagaactggacccccccccagcccagaaccctgcccagcatggtgcacagagtgagcggccagccccagagcgtgaccgccagcagcgacaaggccttcgaggactggctgaacgacgacctgggcagctaccagggcgcccagggcaacagatacgtgggcttcggcaacaccccccccccccagaagaaggaggacgacttcctgaacaacgccatgagcagcctgtacagcggctggagcagcttcaccaccggcgccagcagattcgccagcgccgccaaggagggcgccaccaagttcggcagccaggccagccagaagttctggggccacaagcagcagcccgagcccgccagcgagctgggccacagcctgaacgagaacgtgctgaagcccgcccaggagaaggtgaaggagggcaagatcttcgacgacgtgagcagcggcgtgagccagctggccagcaagggcgtgggcagcaagggctggagagacgtgaccaccttcttcagcggcaaggccgagggccccctggacagccccagcgagggccacagctaccagaacagcggcctggaccacttccagaacagcaacatcgaccagagcttctgggagaccttcggcagcgccgagcccaccaagaccagaaagagccccagcagcgacagctggacctgcgccgacaccagcaccgagagaagaagcagcgacagctgggaggtgtggggcagcgccagcaccaacagaaacagcaacagcgacggcggcgagggcggcgagggcaccaagaaggccgtgccccccgccgtgcccaccgacgacggctgggacaaccagaactggtag

SEQ ID NO: 72170 - DNA, 1212 bp, synthetic construct
  misc_feature 1..1212: note = Description of Artificial Sequence: Synthetic coding sequence
  source 1..1212: mol_type = other DNA
atggccagccccagaaccagaaaggtgctgaaggaggtgagagtgcaggacgagaacaacgtgtgcttcgagtgcggcgccttcaacccccagtgggtgagcgtgacctacggcatctggatctgcctggagtgcagcggcagacacagaggcctgggcgtgcacctgagcttcgtgagaagcgtgaccatggacaagtggaaggacatcgagctggagaagatgaaggccggcggcaacgccaagttcagagagttcctggagagccaggaggactacgacccctgctggagcctgcaggagaagtacaacagcagagccgccgccctgttcagagacaaggtggtggccctggccgagggcagagagtggagcctggagagcagccccgcccagaactggacccccccccagcccagaaccctgcccagcatggtgcacagagtgagcggccagccccagagcgtgaccgccagcagcgacaaggccttcgaggactggctgaacgacgacctgggcagctaccagggcgcccagggcaacagatacgtgggcttcggcaacaccccccccccccagaagaaggaggacgacttcctgaacaacgccatgagcagcctgtacagcggctggagcagcttcaccaccggcgccagcagattcgccagcgccgccaaggagggcgccaccaagttcggcagccaggccagccagaaggccagcgagctgggccacagcctgaacgagaacgtgctgaagcccgcccaggagaaggtgaaggagggcaagatcttcgacgacgtgagcagcggcgtgagccagctggccagcaagtgccagagaagactgtgctgccaccagagccactgcagcgccggccacctgggcagagccttctgccccgtgagctggcacgaggccctgtgcggccagaccggcagagaggagcaggccagcctgctgccccccaagcacgtggtgggcgccctggaggtgtgcgccagaggctgccccagatgccacgtgccccacacccccggcaccgccgccgagtggcccggcagactgtgcctgagcagagagagcgtggtgagagacggcggcaccagcccccccttcttcagaggcaagcagagagccccctggaccgcccccagaagagccaccgtgatcagaaccgccgtgtggaccaccagcaagaccgccacctag

SEQ ID NO: 72171 - DNA, 1221 bp, synthetic construct
  misc_feature 1..1221: note = Description of Artificial Sequence: Synthetic coding sequence
  source 1..1221: mol_type = other DNA
atggccagccccagaaccagaaaggtgctgaaggaggtgagagtgcaggacgagaacaacgtgtgcttcgagtgcggcgccttcaacccccagtgggtgagcgtgacctacggcatctggatctgcctggagtgcagcggcagacacagaggcctgggcgtgcacctgagcttcgtgagaagcgtgaccatggacaagtggaaggacatcgagctggagaagatgaaggccggcggcaacgccaagttcagagagttcctggagagccaggaggactacgacccctgctggagcctgcaggagaagtacaacagcagagccgccgccctgttcagagacaaggtggtggccctggccgagggcagagagtggagcctggagagcagccccgcccagaactggacccccccccagcccagaaccctgcccagcatggtgcacagagtgagcggccagccccagagcgtgaccgccagcagcgacaaggccttcgaggactggctgaacgacgacctgggcagctaccagggcgcccagggcaacagatacgtgggcttcggcaacaccccccccccccagaagaaggaggacgacttcctgaacaacgccatgagcagcctgtacagcggctggagcagcttcaccaccggcgccagcagattcgccagcgccgccaaggagggcgccaccaagttcggcagccaggccagccagaaggccagcgagctgggccacagcctgaacgagaacgtgctgaagcccgcccaggagaaggtgaaggagggcaagatcttcgacgacgtgagcagcggcgtgagccagctggccagcaaggtgcagggcgtgggcagcaagggctggagagacgtgaccaccttcttcagcggcaaggccgagggccccctggacagccccagcgagggccacagctaccagaacagcggcctggaccacttccagaacagcaacatcgaccagagcttctgggagaccttcggcagcgccgagcccaccaagaccagaaagagccccagcagcgacagctggacctgcgccgacaccagcaccgagagaagaagcagcgacagctgggaggtgtggggcagcgccagcaccaacagaaacagcaacagcgacggcggcgagggcggcgagggcaccaagaaggccgtgccccccgccgtgcccaccgacgacggctgggacaaccagaactggtag

SEQ ID NO: 72172 - DNA, 882 bp, synthetic construct
  misc_feature 1..882: note = Description of Artificial Sequence: Synthetic coding sequence
  source 1..882: mol_type = other DNA
atgctgagcagcgagagcagctggagcctgagaagaatcaccatcctggccggcccctgcagaagaagcaccaccgccgagcccagacccagcctgggcatcagagtgagcggccagccccagagcgtgaccgccagcagcgacaaggccttcgaggactggctgaacgacgacctgggcagctaccagggcgcccagggcaacagatacgtgggcttcggcaacaccccccccccccagaagaaggaggacgacttcctgaacaacgccatgagcagcctgtacagcggctggagcagcttcaccaccggcgccagcagattcgccagcgccgccaaggagggcgccaccaagttcggcagccaggccagccagaaggccagcgagctgggccacagcctgaacgagaacgtgctgaagcccgcccaggagaaggtgaaggagggcaagatcttcgacgacgtgagcagcggcgtgagccagctggccagcaaggtgcagggcgtgggcagcaagggctggagagacgtgaccaccttcttcagcggcaaggccgagggccccctggacagccccagcgagggccacagctaccagaacagcggcctggaccacttccagaacagcaacatcgaccagagcttctgggagaccttcggcagcgccgagcccaccaagaccagaaagagccccagcagcgacagctggacctgcgccgacaccagcaccgagagaagaagcagcgacagctgggaggtgtggggcagcgccagcaccaacagaaacagcaacagcgacggcggcgagggcggcgagggcaccaagaaggccgtgccccccgccgtgcccaccgacgacggctgggacaaccagaactggtag

SEQ ID NO: 72173 - DNA, 1086 bp, synthetic construct
  misc_feature 1..1086: note = Description of Artificial Sequence: Synthetic coding sequence
  source 1..1086: mol_type = other DNA
atgagaaccaccttcgtgagaagcgtgaccatggacaagtggaaggacatcgagctggagaagatgaaggccggcggcaacgccaagttcagagagttcctggagagccaggaggactacgacccctgctggagcctgcaggagaagtacaacagcagagccgccgccctgttcagagacaaggtggtggccctggccgagggcagagagtggagcctggagagcagccccgcccagaactggacccccccccagcccagaaccctgcccagcatggtgcacagagtgagcggccagccccagagcgtgaccgccagcagcgacaaggccttcgaggactggctgaacgacgacctgggcagctaccagggcgcccagggcaacagatacgtgggcttcggcaacaccccccccccccagaagaaggaggacgacttcctgaacaacgccatgagcagcctgtacagcggctggagcagcttcaccaccggcgccagcagattcgccagcgccgccaaggagggcgccaccaagttcggcagccaggccagccagaagttctggggccacaagcagcagcccgagcccgccagcgagctgggccacagcctgaacgagaacgtgctgaagcccgcccaggagaaggtgaaggagggcaagatcttcgacgacgtgagcagcggcgtgagccagctggccagcaagggcgtgggcagcaagggctggagagacgtgaccaccttcttcagcggcaaggccgagggccccctggacagccccagcgagggccacagctaccagaacagcggcctggaccacttccagaacagcaacatcgaccagagcttctgggagaccttcggcagcgccgagcccaccaagaccagaaagagccccagcagcgacagctggacctgcgccgacaccagcaccgagagaagaagcagcgacagctgggaggtgtggggcagcgccagcaccaacagaaacagcaacagcgacggcggcgagggcggcgagggcaccaagaaggccgtgccccccgccgtgcccaccgacgacggctgggacaaccagaactggtag

SEQ ID NO: 72174 - DNA, 786 bp, synthetic construct
  misc_feature 1..786: note = Description of Artificial Sequence: Synthetic coding sequence
  source 1..786: mol_type = other DNA
atggccagccccagaaccagaaaggtgctgaaggaggtgagagtgcaggacgagaacaacgtgtgcttcgagtgcggcgccttcaacccccagtgggtgagcgtgacctacggcatctggatctgcctggagtgcagcggcagacacagaggcctgggcgtgcacctgagcttcgtgagaagcgtgaccatggacaagtggaaggacatcgagctggagaagatgaaggccggcggcaacgccaagttcagagagttcctggagagccaggaggactacgacccctgctggagcctgcaggagaagtacaacagcagagccgccgccctgttcagagacaaggtggtggccctggccgagggcagagagtggagcctggagagcagccccgcccagaactggacccccccccagcccagaaccctgcccagcatggtgcacagagtgagcggccagccccagagcgtgaccgccagcagcgacaaggccttcgaggactggctgaacgacgacctgggcagctaccagggcgcccagggcaacagatacgtgggcttcggcaacaccccccccccccagaagaaggaggacgacttcctgaacaacgccatgagcagcctgtacagcggctggagcagcttcaccaccggcgccagcagattcgccagcgccgccaaggagggcgccaccaagttcggcagccaggccagccagaaggccagcgagctgggccacagcctgaacgagaacgtgctgaagcccgcccaggagaaggtgaaggagtag

SEQ ID NO: 72175 - DNA, 240 bp, synthetic construct
  misc_feature 1..240: note = Description of Artificial Sequence: Synthetic coding sequence
  source 1..240: mol_type = other DNA
atggccagccccagaaccagaaaggtgctgaaggaggtgagagtgcaggacgagaacaacgtgtgcttcgagtgcggcgccttcaacccccagtgggtgagcgtgacctacggcatctggatctgcctggagtgcagcggcagacacagaggcctgggcgtgcacctgagcttcgtgagaagcgtgaccatggacaagtggaaggacatcgagctggagaagatgaaggccggcggctag

SEQ ID NO: 72176 - DNA, 369 bp, synthetic construct
  misc_feature 1..369: note = Description of Artificial Sequence: Synthetic coding sequence
  source 1..369: mol_type = other DNA
atggccagccccagaaccagaaaggtgctgaaggaggtgagagtgcaggacgagaacaacgtgtgcttcgagtgcggcgccttcaacccccagtgggtgagcgtgacctacggcatctggatctgcctggagtgcagcggcagacacagaggcctgggcgtgcacctgagcttcgtgagaagcgtgaccatggacaagtggaaggacatcgagctggagaagatgaaggccggcggcaacgccaagttcagagagttcctggagagccaggaggactacgacccctgctggagcctgcaggagaagtacaacagcagagccgccgccctgttcagagacaaggtggtggccctggccgagggcagatag

SEQ ID NO: 72177 - DNA, 759 bp, synthetic construct
  misc_feature 1..759: note = Description of Artificial Sequence: Synthetic coding sequence
  source 1..759: mol_type = other DNA
atggtggccagcatgagactggcctaccaggagctgcagatcgacagaaagaaggaggagaagaagctgcagaacctggagggcaagaagagagagcaggccgagagactgggcatgggcctggtgagcagaagcagcgtgagccacagcgtgctgagcgagatgcaggtgatcgagcaggagacccccgtgagcgccaagagcagcagaagccagctggacctgttcgacgacgtgggcaccttcgccagcggcccccccaagtacaaggacaaccccttcagcctgggcgagagcttcggcagcagatgggacaccgacgccgcctggggcatggacagagtggaggagaaggagcccgaggtgaccatcagcagcatcagacccatcagcgagagagccaccaacagaagagaggtggagagcagaagcagcggcctggagagcagcgaggccagacagaagttcgccggcgccaaggccatcagcagcgacatgttcttcggcagagaggtggacgccgagtacgaggccagaagcagactgcagcagctgagcggcagcagcgccatcagcagcagcgacctgttcggcgacatggacggcgcccacggcgccggcagcgtgagcctgggcaacgtgctgcccaccgccgacatcgcccagttcaagcagggcgtgaagagcgtggccggcaagatggccgtgctggccaacggcgtgatgaacagcctgcaggacagatacggcagctactag

SEQ ID NO: 72178 - DNA, 1245 bp, synthetic construct
  misc_feature 1..1245: note = Description of Artificial Sequence: Synthetic coding sequence
  source 1..1245: mol_type = other DNA
atgcaggtgggcggcaacgccaacgccaccgccttcttcagacagcacggctgcaccgccaacgacgccaacaccaagtacaacagcagagccgcccagatgtacagagagaagatcagacagctgggcagcgccgccctggccagacacggcaccgacccccccgcctgggacgcccccgccaccgagcccagcggcacccagcagcccgcccccagcaccgagagcagcggcctggcccagcccgagcacggccccaacaccgacctgctgggcaccagccccaaggccagcctggagctgaagagcagcatcatcggcaagaagaagcccgccgccgccaagaagggcctgggcgccaagaagggcctgggcgcccagaaggtgagcagccagagcttcagcgagatcgagagacaggcccaggtggccgagaagctgagagagcagcaggccgccgacgccaagaagcaggccgaggagagcatggtggccagcatgagactggcctaccaggagctgcagatcgacagaaagaaggaggagaagaagctgcagaacctggagggcaagaagagagagcaggccgagagactgggcatgggcctggtgagcagaagcagcgtgagccacagcgtgctgagcgagatgcaggtgatcgagcaggagacccccgtgagcgccaagagcagcagaagccagctggacctgttcgacgacgtgggcaccttcgccagcggcccccccaagtacaaggacaaccccttcagcctgggcgagagcttcggcagcagatgggacaccgacgccgcctggggcatggacagagtggaggagaaggagcccgaggtgaccatcagcagcatcagacccatcagcgagagagccaccaacagaagagaggtggagagcagaagcagcggcctggagagcagcgaggccagacagaagttcgccggcgccaaggccatcagcagcgacatgttcttcggcagagaggtggacgccgagtacgaggccagaagcagactgcagcagctgagcggcagcagcgccatcagcagcagcgacctgttcggcgacatggacggcgcccacggcgccggcagcgtgagcctgggcaacgtgctgcccaccgccgacatcgcccagttcaagcagggcgtgaagagcgtggccggcaagatggccgtgctggccaacggcgtgatgaacagcctgcaggacagatacggcagctactag

SEQ ID NO: 72179 - DNA, 1158 bp, synthetic construct
  misc_feature 1..1158: note = Description of Artificial Sequence: Synthetic coding sequence
  source 1..1158: mol_type = other DNA
atggccgccgagcccaacaagaccgagatccagaccctgttcaagagactgagagccgtgcccaccaacaaggcctgcttcgactgcggcgccaagaaccccagctgggccagcatcacctacggcgtgttcctgtgcatcgactgcagcggcgtgcacagaagcctgggcgtgcacctgagcttcatcagaagcaccgagctggacagcaactggaactggttccagctgagatgcatgcaggtgggcggcaacgccaacgccctgggcgccaagaagggcctgggcgcccagaaggtgagcagccagagcttcagcgagatcgagagacaggcccaggtggccgagaagctgagagagcagcaggccgccgacgccaagaagcaggccgaggagagcatggtggccagcatgagactggcctaccaggagctgcagatcgacagaaagaaggaggagaagaagctgcagaacctggagggcaagaagagagagcaggccgagagactgggcatgggcctggtgagcagaagcagcgtgagccacagcgtgctgagcgagatgcaggtgatcgagcaggagacccccgtgagcgccaagagcagcagaagccagctggacctgttcgacgacgtgggcaccttcgccagcggcccccccaagtacaaggacaaccccttcagcctgggcgagagcttcggcagcagatgggacaccgacgccgcctggggcatggacagagtggaggagaaggagcccgaggtgaccatcagcagcatcagacccatcagcgagagagccaccaacagaagagaggtggagagcagaagcagcggcctggagagcagcgaggccagacagaagttcgccggcgccaaggccatcagcagcgacatgttcttcggcagagaggtggacgccgagtacgaggccagaagcagactgcagcagctgagcggcagcagcgccatcagcagcagcgacctgttcggcgacatggacggcgcccacggcgccggcagcgtgagcctgggcaacgtgctgcccaccgccgacatcgcccagttcaagcagggcgtgaagagcgtggccggcaagatggccgtgctggccaacggcgtgatgaacagcctgcaggacagatacggcagctactag

SEQ ID NO: 72180 - DNA, 1566 bp, synthetic construct
  misc_feature 1..1566: note = Description of Artificial Sequence: Synthetic coding sequence
  source 1..1566: mol_type = other DNA
atggccgccgagcccaacaagaccgagatccagaccctgttcaagagactgagagccgtgcccaccaacaaggcctgcttcgactgcggcgccaagaaccccagctgggccagcatcacctacggcgtgttcctgtgcatcgactgcagcggcgtgcacagaagcctgggcgtgcacctgagcttcatcagaagcaccgagctggacagcaactggaactggttccagctgagatgcatgcaggtgggcggcaacgccaacgccaccgccttcttcagacagcacggctgcaccgccaacgacgccaacaccaagtacaacagcagagccgcccagatgtacagagagaagatcagacagctgggcagcgccgccctggccagacacggcaccgacctgtggatcgacaacatgagcagcgccgtgcccaaccacagccccgagaagaaggacagcgacttcttcaccgagcacacccagccccccgcctgggacgcccccgccaccgagcccagcggcacccagcagcccgcccccagcaccgagagcagcggcctggcccagcccgagcacggccccaacaccgacctgctgggcaccagccccaaggccagcctggagctgaagagcagcatcatcggcaagaagaagcccgccgccgccaagaagggcctgggcgccaagaagggcctgggcgcccagaaggtgagcagccagagcttcagcgagatcgagagacaggcccaggtggccgagaagctgagagagcagcaggccgccgacgccaagaagcaggccgaggagagcatggtggccagcatgagactggcctaccaggagctgcagatcgacagaaagaaggaggagaagaagctgcagaacctggagggcaagaagagagagcaggccgagagactgggcatgggcctggtgagcagaagcagcgtgagccacagcgtgctgagcgagatgcaggtgatcgagcaggagacccccgtgagcgccaagagcagcagaagccagctggacctgttcgacgacgtgggcaccttcgccagcggcccccccaagtacaaggacaaccccttcagcctgggcgagagcttcggcagcagatgggacaccgacgccgcctggggcatggacagagtggaggagaaggagcccgaggtgaccatcagcagcatcagacccatcagcgagagagccaccaacagaagagaggtggagagcagaagcagcggcctggagagcagcgaggccagacagaagttcgccggcgccaaggccatcagcagcgacatgttcttcggcagagaggtggacgccgagtacgaggccagaagcagactgcagcagctgagcggcagcagcgccatcagcagcagcgacctgttcggcgacatggacggcgcccacggcgccggcagcgtgagcctgggcaacgtgctgcccaccgccgacatcgcccagttcaagcagggcgtgaagagcgtggccggcaagatggccgtgctggccaacggcgtgatgaacagcctgcaggacagatacggcagctactag

SEQ ID NO: 72181 - DNA, 1551 bp, synthetic construct
  misc_feature 1..1551: note = Description of Artificial Sequence: Synthetic coding sequence
  source 1..1551: mol_type = other DNA
atgggcgaccccagcaagcaggacatcctgaccatcttcaagagactgagaagcgtgcccaccaacaaggtgtgcttcgactgcggcgccaagaaccccagctgggccagcatcacctacggcgtgttcctgtgcatcgactgcagcggcagccacagaagcctgggcgtgcacctgagcttcatcagaagcaccgagctggacagcaactggagctggttccagctgagatgcatgcaggtgggcggcaacgccagcgccagcagcttcttccaccagcacggctgcagcaccaacgacaccaacgccaagtacaacagcagagccgcccagctgtacagagagaagatcaagagcctggccagccaggccaccagaaagcacggcaccgacctgtggctggacagctgcgtggtgccccccctgagccccccccccaaggaggaggacttcttcgccagccacgtgagccccgaggtgagcgacaccgcctgggccagcgccatcgccgagcccagcagcctgaccagcagacccgtggagaccaccctggagaacaacgagggcggccaggagcagggccccagcgtggagggcctgaacgtgcccaccaaggccaccctggaggtgagcagcatcatcaagaagaagcccaaccaggccaagaagggcctgggcgccaagaagggcagcctgggcgcccagaagctggccaacacctgcttcaacgagatcgagaagcaggcccaggccgccgacaagatgaaggagcaggaggacctggccaaggtggtgagcaaggaggagagcatcgtgagcagcctgagactggcctacaaggacctggagatccagatgaagaaggacgagaagatgaacatcagcggcaagaagaacgtggacagcgacagactgggcatgggcttcggcaactgcagaagcgtgatcagccacagcgtgaccagcgacatgcagaccatcgagcaggagagccccatcatggccaagcccagaaagaagtacaacgacgacagcgacgacagctacttcaccagcagcagcagctacttcgacgagcccgtggagctgagaagcagcagcttcagcagctgggacgacagcagcgacagctactggaagaaggagaccagcaaggacaccgagaccgtgctgaagaccaccggctacagcgacagacccaccgccagaagaaagcccgactacgagcccgtggagaacaccgacgaggcccagaagaagttcggcaacgtgaaggccatcagcagcgacatgtacttcggcagacagagccaggccgactacgagaccagagccagactggagagactgagcgccagcagcagcatcagcagcgccgacctgttcgaggagcccagaaagcagcccgccggcaactacagcctgagcagcgtgctgcccaacgcccccgacatggcccagttcaagcagggcgtgagaagcgtggccggcaagctgagcgtgttcgccaacggcgtggtgaccagcatccaggacagatacggcagctag

SEQ ID NO: 72182 - DNA, 1335 bp, synthetic construct
  misc_feature 1..1335: note = Description of Artificial Sequence: Synthetic coding sequence
  source 1..1335: mol_type = other DNA
atgggcgaccccagcaagcaggacatcctgaccatcttcaagagactgagaagcgtgcccaccaacaaggtgtgcttcgactgcggcgccaagaaccccagctgggccagcatcacctacggcgtgttcctgtgcatcgactgcagcggcagccacagaagcctgggcgtgcacctgagcttcatcagaagcaccgagctggacagcaactggagctggttccagctgagatgcatgcaggtgggcggcaacgccagcgccgtgagcgacaccgcctgggccagcgccatcgccgagcccagcagcctgaccagcagacccgtggagaccaccctggagaacaacgagggcggccaggagcagggccccagcgtggagggcctgaacgtgcccaccaaggccaccctggaggtgagcagcatcatcaagaagaagcccaaccaggccaagaagggcctgggcgccaagaagggcagcctgggcgcccagaagctggccaacacctgcttcaacgagatcgagaagcaggcccaggccgccgacaagatgaaggagcaggaggacctggccaaggtggtgagcaaggaggagagcatcgtgagcagcctgagactggcctacaaggacctggagatccagatgaagaaggacgagaagatgaacatcagcggcaagaagaacgtggacagcgacagactgggcatgggcttcggcaactgcagaagcgtgatcagccacagcgtgaccagcgacatgcagaccatcgagcaggagagccccatcatggccaagcccagaaagaagtacaacgacgacagcgacgacagctacttcaccagcagcagcagctacttcgacgagcccgtggagctgagaagcagcagcttcagcagctgggacgacagcagcgacagctactggaagaaggagaccagcaaggacaccgagaccgtgctgaagaccaccggctacagcgacagacccaccgccagaagaaagcccgactacgagcccgtggagaacaccgacgaggcccagaagaagttcggcaacgtgaaggccatcagcagcgacatgtacttcggcagacagagccaggccgactacgagaccagagccagactggagagactgagcgccagcagcagcatcagcagcgccgacctgttcgaggagcccagaaagcagcccgccggcaactacagcctgagcagcgtgctgcccaacgcccccgacatggcccagttcaagcagggcgtgagaagcgtggccggcaagctgagcgtgttcgccaacggcgtggtgaccagcatccaggacagatacggcagctag

SEQ ID NO: 72183 - DNA, 1419 bp, synthetic construct
  misc_feature 1..1419: note = Description of Artificial Sequence: Synthetic coding sequence
  source 1..1419: mol_type = other DNA
atgggcgaccccagcaagcaggacatcctgaccatcttcaagagactgagaagcgtgcccaccaacaaggtgtgcttcgactgcggcgccaagaaccccagctgggccagcatcacctacggcgtgttcctgtgcatcgactgcagcggcagccacagaagcctgggcgtgcacctgagcttcatcagaagcaccgagctggacagcaactggagctggttccagctgagatgcatgcaggtgggcggcaacgccagcgccctgtggctggacagctgcgtggtgccccccctgagccccccccccaaggaggaggacttcttcgccagccacgtgagccccgaggtgagcgacaccgcctgggccagcgccatcgccgagcccagcagcctgaccagcagacccgtggagaccaccctggagaacaacgagggcggccaggagcagggccccagcgtggagggcctgaacgtgcccaccaaggccaccctggaggtgagcagcatcatcaagaagaagcccaaccaggccaagaagggcctgggcgccaagaagggcagcctgggcgcccagaagctggccaacacctgcttcaacgagatcgagaagcaggcccaggccgccgacaagatgaaggagcaggaggacctggccaaggtggtgagcaaggaggagagcatcgtgagcagcctgagactggcctacaaggacctggagatccagatgaagaaggacgagaagatgaacatcagcggcaagaagaacgtggacagcgacagactgggcatgggcttcggcaactgcagaagcgtgatcagccacagcgtgaccagcgacatgcagaccatcgagcaggagagccccatcatggccaagcccagaaagaagtacaacgacgacagcgacgacagctacttcaccagcagcagcagctacttcgacgagcccgtggagctgagaagcagcagcttcagcagctgggacgacagcagcgacagctactggaagaaggagaccagcaaggacaccgagaccgtgctgaagaccaccggctacagcgacagacccaccgccagaagaaagcccgactacgagcccgtggagaacaccgacgaggcccagaagaagttcggcaacgtgaaggccatcagcagcgacatgtacttcggcagacagagccaggccgactacgagaccagagccagactggagagactgagcgccagcagcagcatcagcagcgccgacctgttcgaggagcccagaaagcagcccgccggcaactacagcctgagcagcgtgctgcccaacgcccccgacatggcccagttcaagcagggcgtgagaagcgtggccggcaagctgagcgtgttcgccaacggcgtggtgaccagcatccaggacagatacggcagctag

SEQ ID NO: 72184 - DNA, 822 bp, synthetic construct
  misc_feature 1..822: note = Description of Artificial Sequence: Synthetic coding sequence
  source 1..822: mol_type = other DNA
tgactggccctgttccaggtgagcgacaccgcctgggccagcgccatcgccgagcccagcagcctgaccagcagacccgtggagaccaccctggagaacaacgagggcggccaggagcagggccccagcgtggagggcctgaacgtgcccaccaaggccaccctggaggtgagcagcatcatcaagaagaagcccaaccaggccaagaagggcctgggcgccaagaagggcagcctgggcgcccagaagctggccaacacctgcttcaacgagatcgagaagcaggcccaggccgccgacaagatgaaggagcaggaggacctggccaaggtggtgagcaaggaggagagcatcgtgagcagcctgagactggcctacaaggacctggagatccagatgaagaaggacgagaagatgaacatcagcggcaagaagaacgtggacagcgacagactgggcatgggcttcggcaactgcagaagcgtgatcagccacagcgtgaccagcgacatgcagaccatcgagcaggagagccccatcatggccaagcccagaaagaagtacaacgacgacagcgacgacagctacttcaccagcagcagcagacccaccgccagaagaaagcccgactacgagcccgtggagaacaccgacgaggcccagaagaagttcggcaacgtgaaggccatcagcagcgacatgtacttcggcagacagagccaggccgactacgagaccagagccagactggagagactgagcgccagcagcagcatcagcagcgccgacctgttcgaggagcccagaaagcagcccgcctag

SEQ ID NO: 72185 - DNA, 459 bp, synthetic construct
  misc_feature 1..459: note = Description of Artificial Sequence: Synthetic coding sequence
  source 1..459: mol_type = other DNA
atgggcgaccccagcaagcaggacatcctgaccatcttcaagagactgagaagcgtgcccaccaacaaggtgtgcttcgactgcggcgccaagaaccccagctgggccagcatcacctacggcgtgttcctgtgcatcgactgcagcggcagccacagaagcctgggcgtgcacctgagcttcatcagaagcaccgagctggacagcaactggagctggttccagctgagatgcatgcaggtgggcggcaacgccagcgccgtgagcgacaccgcctgggccagcgccatcgccgagcccagcagcctgaccagcagacccgtggagaccaccctggagaacaacgagggcggccaggagcagggccccagcgtggagggcctgaacgtgcccaccaaggccaccctggaggtgagcagcatcatcaagaagaagcccaaccaggccaagaagggctag

SEQ ID NO: 72186 - DNA, 5550 bp, synthetic construct
  misc_feature 1..5550: note = Description of Artificial Sequence: Synthetic coding sequence
  source 1..5550: mol_type = other DNA
atgtacgagggcaagaagaccaagaacatgttcctgaccagagccctggagaagatcctggccgacaaggaggtgaagaaggcccaccacagccagctgagaaaggcctgcgaggtggccctggaggagatcaaggccgagaccgagaagcagagccccccccacggcgaggccaaggccggcagcagcaccctgccccccgtgaagagcaagaccaacttcatcgaggccgacaagtacttcctgcccttcgagctggcctgccagagcaagtgccccagaatcgtgagcaccagcctggactgcctgcagaagctgatcgcctacggccacctgaccggcaacgcccccgacagcaccacccccggcaagaagctgatcgacagaatcatcgagaccatctgcggctgcttccagggcccccagaccgacgagggcgtgcagctgcagatcatcaaggccctgctgaccgccgtgaccagccagcacatcgagatccacgagggcaccgtgctgcaggccgtgagaacctgctacaacatctacctggccagcaagaacctgatcaaccagaccaccgccaaggccaccctgacccagatgctgaacgtgatcttcgccagaatggagaaccaggccctgcaggaggccaagcagatggagaaggagagacacagacagcaccaccacctgctgcagagccccgtgagccaccacgagcccgagagcccccagctgagatacctgcccccccagaccgtggaccacatcagccaggagcacgagggcgacctggacctgcacaccaacgacgtggacaagagcctgcaggacgacaccgagcccgagaacggcagcgacatcagcagcgccgagaacgagcagaccgaggccgaccaggccaccgccgccgagaccctgagcaagaacgaggtgctgtacgacggcgagaaccacgactgcgaggagaagccccaggacatcgtgcagaacatcgtggaggagatggtgaacatcgtggtgggcgacatgggcgagggcaccaccatcaacgccagcgccgacggcaacatcggcaccatcgaggacggcagcgacagcgagaacatccaggccaacggcatccccggcacccccatcagcgtggcctacacccccagcctgcccgacgacagactgagcgtgagcagcaacgacacccaggagagcggcaacagcagcggccccagccccggcgccaagttcagccacatcctgcagaaggacgccttcctggtgttcagaagcctgtgcaagctgagcatgaagcccctgagcgacggcccccccgaccccaagagccacgagctgagaagcaagatcctgagcctgcagctgctgctgagcatcctgcagaacgccggccccatcttcagaaccaacgagatgttcatcaacgccatcaagcagtacctgtgcgtggccctgagcaagaacggcgtgagcagcgtgcccgaggtgttcgagctgagcctgagcatcttcctgaccctgctgagcaacttcaagacccacctgaagatgcagatcgaggtgttcttcaaggagatcttcctgtacatcctggagaccagcaccagcagcttcgaccacaagtggatggtgatccagaccctgaccagaatctgcgccgacgcccagagcgtggtggacatctacgtgaactacgactgcgacctgaacgccgccaacatcttcgagagactggtgaacgacctgagcaagatcgcccagggcagaggcagccaggagctgggcatgagcaacgtgcaggagctgagcctgagaaagaagggcctggagtgcctggtgagcatcctgaagtgcatggtggagtggagcaaggaccagtacgtgaaccccaacagccagaccaccctgggccaggagaagcccagcgagcaggagatgagcgagatcaagcaccccgagaccatcaacagatacggcagcctgaacagcctggagagcaccagcagcagcggcatcggcagctacagcacccagatgagcggcaccgacaaccccgagcagttcgaggtgctgaagcagcagaaggagatcatcgagcagggcatcgacctgttcaacaagaagcccaagagaggcatccagtacctgcaggagcagggcatgctgggcaccacccccgaggacatcgcccagttcctgcaccaggaggagagactggacagcacccaggtgggcgagttcctgggcgacaacgacaagttcaacaaggaggtgatgtacgcctacgtggaccagcacgacttcagcggcaaggacttcgtgagcgccctgagaatgttcctggagggcttcagactgcccggcgaggcccagaagatcgacagactgatggagaagttcgccgccagatacctggagtgcaaccagggccagaccctgttcgccagcgccgacaccgcctacgtgctggcctacagcatcatcatgctgaccaccgacctgcacagcccccaggtgaagaacaagatgaccaaggagcagtacatcaagatgaacagaggcatcaacgacagcaaggacctgcccgaggagtacctgagcgccatctacaacgagatcgccggcaagaagatcagcatgaaggagaccaaggagctgaccatccccaccaagagcagcaagcagaacgtggccagcgagaagcagagaagactgctgtacaacctggagatggagcagatggccaagaccgccaaggccctgatggaggccgtgagccacgtgcaggcccccttcaccagcgccacccacctggagcacgtgagacccatgttcaagctggcctggacccccttcctggccgccttcagcgtgggcctgcaggactgcgacgacaccgaggtggccagcctgtgcctggagggcatcagatgcgccatcagaatcgcctgcatcttcagcatccagctggagagagacgcctacgtgcaggccctggccagattcaccctgctgaccgtgagcagcggcatcaccgagatgaagcagaagaacatcgacaccatcaagaccctgatcaccgtggcccacaccgacggcaactacctgggcaacagctggcacgagatcctgaagtgcatcagccagctggagctggcccagctgatcggcaccggcgtgaagcccagatacatcagcggcaccgtgagaggcagagagggcagcctgaccggcaccaaggaccaggcccccgacgagttcgtgggcctgggcctggtgggcggcaacgtggactggaagcagatcgccagcatccaggagagcatcggcgagaccagcagccagagcgtggtggtggccgtggacagaatcttcaccggcagcaccagactggacggcaacgccatcgtggacttcgtgagatggctgtgcgccgtgagcatggacgagctgctgagcaccacccaccccagaatgttcagcctgcagaagatcgtggagatcagctactacaacatgggcagaatcagactgcagtggagcagaatctgggaggtgatcggcgaccacttcaacaaggtgggctgcaaccccaacgaggacgtggccatcttcgccgtggacagcctgagacagctgagcatgaagttcctggagaagggcgagctggccaacttcagattccagaaggacttcctgagacccttcgagcacatcatgaagagaaacagaagccccaccatcagagacatggtggtgagatgcatcgcccagatggtgaacagccaggccgccaacatcagaagcggctggaagaacatcttcagcgtgttccacctggccgccagcgaccaggacgagagcatcgtggagctggccttccagaccaccggccacatcgtgaccctggtgttcgagaagcacttccccgccaccatcgacagcttccaggacgccgtgaagtgcctgagcgagttcgcctgcaacgccgccttccccgacaccagcatggaggccatcagactgatcagacactgcgccaagtacgtgagcgacagaccccaggccttcaaggagtacaccagcgacgacatgaacgtggcccccgaggacagagtgtgggtgagaggctggttccccatcctgttcgagctgagctgcatcatcaacagatgcaagctggacgtgagaaccagaggcctgaccgtgatgttcgagatcatgaagacctacggccacacctacgagaagcactggtggcaggacctgttcagaatcgtgttcagaatcttcgacaacatgaagctgcccgagcagcagaccgagaaggccgagtggatgaccaccacctgcaaccacgccctgtacgccatctgcgacgtgttcacccagtacctggaggtgctgagcgacgtgctgctggacgacatcttcgcccagctgtactggtgcgtgcagcaggacaacgagcagctggccagaagcggcaccaactgcctggagaacgtggtgatcctgaacggcgagaagttcaccctggagatctgggacaagacctgcaactgcaccctggacatcttcaagaccaccatcccccacgccctgctgacctggagacccaacagcggcgagaccgccccccccccccccagccccgtgagcgagaagcccctggacaccatcagccagaagagcgtggacatccacgacagcatccagcccagaagcgtggacaacagaccccaggcccccctggtgagcgccagcgccgtgaacgaggaggtgagcaagatcaagagcaccgccaagttccccgagcagaagctgttcgccgccctgctgatcaagtgcgtggtgcagctggagctgatccagaccatcgacaacatcgtgttcttccccgccaccagcaagaaggaggacgccgagaacctggccgccgcccagagagacgccgtggacttcgacgtgagagtggacacccaggaccagggcatgtacagattcctgaccagccagcagctgttcaagctgctggactgcctgctggagagccacagattcgccaaggccttcaacagcaacaacgagcagagaaccgccctgtggaaggccggcttcaagggcaagagcaagcccaacctgctgaagcaggagaccagcagcctggcctgcggcctgagaatcctgttcagaatgtacatggacgagagcagagtgagcgcctgggaggaggtgcagcagagactgctgaacgtgtgcagcgaggccctgagctacttcctgaccctgaccagcgagagccacagagaggcctggaccaacctgctgctgctgttcctgaccaaggtgctgaagatcagcgacaacagattcaaggcccacgccagcttctactaccccctgctgtgcgagatcatgcagttcgacctgatccccgagctgagagccgtgctgagaagattcttcctgagaatcggcgtggtgttccagatcagccagccccccgagcaggagctgggcatcaacaagcagtag

SEQ ID NO: 72187 - DNA, 5358 bp, synthetic construct
  misc_feature 1..5358: note = Description of Artificial Sequence: Synthetic coding sequence
  source 1..5358: mol_type = other DNA
atgcaggagagccagaccaagagcatgttcgtgagcagagccctggagaagatcctggccgacaaggaggtgaagagaccccagcacagccagctgagaagagcctgccaggtggccctggacgagatcaaggccgagatcgagaagcagagactgggcaccgccgccccccccaaggccaacttcatcgaggccgacaagtacttcctgcccttcgagctggcctgccagagcaagagccccagagtggtgagcaccagcctggactgcctgcagaagctgatcgcctacggccacatcaccggcaacgcccccgacagcggcgcccccggcaagagactgatcgacagaatcgtggagaccatctgcagctgcttccagggcccccagaccgacgagggcgtgcagctgcagatcatcaaggccctgctgaccgccgtgaccagcccccacatcgagatccacgagggcaccatcctgcagaccgtgagaacctgctacaacatctacctggccagcaagaacctgatcaaccagaccaccgccaaggccaccctgacccagatgctgaacgtgatcttcaccagaatggagaaccaggtgctgcaggaggccagagagctggagaagcccatccagagcaagccccagagccccgtgatccaggccgccgccgtgagccccaagttcgtgagactgaagcacagccaggcccagagcaagcccaccacccccgagaagaccgacctgaccaacggcgagcacgccagaagcgacagcggcaaggtgagcaccgagaacggcgacgcccccagagagagaggcagcagcctgagcggcaccgacgacggcgcccaggaggtggtgaaggacatcctggaggacgtggtgaccagcgccatcaaggaggccgccgagaagcacggcctgaccgagcccgagagagtgctgggcgagctggagtgccaggagtgcgccatcccccccggcgtggacgagaacagccagaccaacggcatcgccgacgacagacagagcctgagcagcgccgacaacctggagagcgacgcccagggccaccaggtggccgccagattcagccacgtgctgcagaaggacgccttcctggtgttcagaagcctgtgcaagctgagcatgaagcccctgggcgagggcccccccgaccccaagagccacgagctgagaagcaaggtggtgagcctgcagctgctgctgagcgtgctgcagaacgccggccccgtgttcagaacccacgagatgttcatcaacgccatcaagcagtacctgtgcgtggccctgagcaagaacggcgtgagcagcgtgcccgacgtgttcgagctgagcctggccatcttcctgaccctgctgagcaacttcaagatgcacctgaagatgcagatcgaggtgttcttcaaggagatcttcctgaacatcctggagaccagcaccagcagcttcgagcacagatggatggtgatccagaccctgaccagaatctgcgccgacgcccagtgcgtggtggacatctacgtgaactacgactgcgacctgaacgccgccaacatcttcgagagactggtgaacgacctgagcaagatcgcccagggcagaagcggccacgagctgggcatgacccccctgcaggagctgagcctgagaaagaagggcctggagtgcctggtgagcatcctgaagtgcatggtggagtggagcaaggacctgtacgtgaaccccaaccaccagaccagcctgggccaggagagactgaccgaccaggagatcggcgacggcaagggcctggacatggccagaagatgcagcgtgaccagcatggagagcaccgtgagcagcggcacccagaccaccgtgcaggacgaccccgagcagttcgaggtgatcaagcagcagaaggagatcatcgagcacggcatcgagctgttcaacaagaagcccaagagaggcatccagttcctgcaggagcagggcatgctgggcaccagcgtggaggacatcgcccagttcctgcaccaggaggagagactggacagcacccaggtgggcgacttcctgggcgacagcgccagattcaacaaggaggtgatgtacgcctacgtggaccagctggacttctgcgagaaggagttcgtgagcgccctgagaaccttcctggagggcttcagactgcccggcgaggcccagaagatcgacagactgatggagaagttcgccgccagatacatcgagtgcaaccagggccagaccctgttcgccagcgccgacaccgcctacgtgctggcctacagcatcatcatgctgaccaccgacctgcacagcccccaggtgaagaacaagatgaccaaggagcagtacatcaagatgaacagaggcatcaacgacagcaaggacctgcccgaggagtacctgagcagcatctacgaggagatcgagggcaagaagatcgccatgaaggagaccaaggagctgaccatcgccaccaagagcaccaagcagaacgtggccagcgagaagcagagaagactgctgtacaacctggagatggagcagatggccaagaccgccaaggccctgatggaggccgtgagccacgccaaggcccccttcaccagcgccacccacctggaccacgtgagacccatgttcaagctggtgtggacccccctgctggccgcctacagcatcggcctgcagaactgcgacgacaccgaggtggccagcctgtgcctggagggcatcagatgcgccatcagaatcgcctgcatcttcggcatgcagctggagagagacgcctacgtgcaggccctggccagattcagcctgctgaccgccagcagcagcatcaccgagatgaagcagaagaacatcgacaccatcaagaccctgatcaccgtggcccacaccgacggcaactacctgggcaacagctggcacgagatcctgaagtgcatcagccagctggagctggcccagctgatcggcaccggcgtgaagaccagatacctgagcggcagcggcagagagagagagggcagcctgaagggccacaccctggccggcgaggagttcatgggcctgggcctgggcaacctggtgagcggcggcgtggacaagagacagatggccagcttccaggagagcgtgggcgagaccagcagccagagcgtggtggtggccgtggacagaatcttcaccggcagcaccagactggacggcaacgccatcgtggacttcgtgagatggctgtgcgccgtgagcatggacgagctggccagcccccaccaccccagaatgttcagcctgcagaagatcgtggagatcagctactacaacatgaacagaatcagactgcagtggagcagaatctggcacgtgatcggcgaccacttcaacaaggtgggctgcaaccccaacgaggacgtggccatcttcgccgtggacagcctgagacagctgagcatgaagttcctggagaagggcgagctggccaacttcagattccagaaggacttcctgagacccttcgagcacatcatgaagaagaacagaagccccaccatcagagacatggccatcagatgcatcgcccagatggtgaacagccaggccgccaacatcagaagcggctggaagaacatcttcgccgtgttccaccaggccgccagcgaccacgacggcaacatcgtggagctggccttccagaccacctgccacatcgtgaccaccatcttccagcaccacttccccgccgccatcgacagcttccaggacgccgtgaagtgcctgagcgagttcgcctgcaacgccgccttccccgacaccagcatggaggccatcagactgatcagattctgcggcaagtacgtgagcgagagacccagagtgctgcaggagtacaccagcgacgacatgaacgtggcccccggcgacagagtgtgggtgagaggctggttccccatcctgttcgagctgagctgcatcatcaacagatgcaagctggacgtgagaaccagaggcctgaccgtgatgttcgagatcatgaagagctacggccacaccttcgagaagcactggtggcaggacctgttcagaatcgtgttcagaatcttcgacaacatgaagctgcccgagcagctgagcgagaagagcgagtggatgaccaccacctgcaaccacgccctgtacgccatctgcgacgtgttcacccagttctacgaggccctgaacgaggtgctgctgagcgacgtgttcgcccagctgcagtggtgcgtgaagcaggacaacgagcagctggccagaagcggcaccaactgcctggagaacctggtgatcagcaacggcgagaagttcagccccgaggtgtgggacgagacctgcaactgcatgctggacatcttcaagaccaccatcccccacgtgctgctgacctggagacccgtgggcatggaggaggacagcagcgagaagcacctggacgtggacctggacagacagagcctgagcagcatcgacaagaaccccagcgagagaggccagagccagctgagcaaccccaccgacgacagctggaagggcagaccctacgccaaccagaagctgttcgccagcctgctgatcaagtgcgtggtgcagctggagctgatccagaccatcgacaacatcgtgttctaccccgccaccagcaagaaggaggacgccgagcacatggtggccgcccagcaggacaccctggacgccgacatccacatcgagaccgaggaccagggcatgtacaagtacatgagcagccagcacctgttcaagctgctggactgcctgcaggagagccacagcttcagcaaggccttcaacagcaactacgagcagagaaccgtgctgtggagagccggcttcaagggcaagagcaagcccaacctgctgaagcaggagaccagcagcctggcctgctgcctgagaatcctgttcagaatgtacgtggacgagaacagaagagacagctgggaggagatccagcagagactgctgaccgtgtgcagcgaggccctggcctacttcatcaccgtgaacagcgagagccacagagaggcctggaccagcctgctgctgctgctgctgaccaagaccctgaagatcaacgacgagaagttcaaggcccacgccagcatgtactacccctacctgtgcgagatcatgcagttcgacctgatccccgagctgagagccgtgctgagaaagttcttcctgagaatcggcgtggtgtacaagatctggatccccgaggagcccagccaggtgcccgccgccctgagccccgtgtggtag

SEQ ID NO: 72188 - DNA, 2499 bp, synthetic construct
  misc_feature 1..2499: note = Description of Artificial Sequence: Synthetic coding sequence
  source 1..2499: mol_type = other DNA
atgcaggagagccagaccaagagcatgttcgtgagcagagccctggagaagatcctggccgacaaggaggtgaagagaccccagcacagccagctgagaagagcctgccaggtggccctggacgagatcaaggccgagatcgagaagcagagactgggcaccgccgccccccccaaggccaacttcatcgaggccgacaagtacttcctgcccttcgagctggcctgccagagcaagagccccagagtggtgagcaccagcctggactgcctgcagaagctgatcgcctacggccacatcaccggcaacgcccccgacagcggcgcccccggcaagagactgatcgacagaatcgtggagaccatctgcagctgcttccagggcccccagaccgacgagggcgtgcagctgcagatcatcaaggccctgctgaccgccgtgaccagcccccacatcgagatccacgagggcaccatcctgcagaccgtgagaacctgctacaacatctacctggccagcaagaacctgatcaaccagaccaccgccaaggccaccctgacccagatgctgaacgtgatcttcaccagaatggagaaccaggtgctgcaggaggccagagagctggagaagcccatccagagcaagccccagagccccgtgatccaggccgccgccgtgagccccaagttcgtgagactgaagcacagccaggcccagagcaagcccaccacccccgagaagaccgacctgaccaacggcgagcacgccagaagcgacagcggcaaggtgagcaccgagaacggcgacgcccccagagagagaggcagcagcctgagcggcaccgacgacggcgcccaggaggtggtgaaggacatcctggaggacgtggtgaccagcgccatcaaggaggccgccgagaagcacggcctgaccgagcccgagagagtgctgggcgagctggagtgccaggagtgcgccatcccccccggcgtggacgagaacagccagaccaacggcatcgccgacgacagacagagcctgagcagcgccgacaacctggagagcgacgcccagggccaccaggtggccgccagattcagccacgtgctgcagaaggacgccttcctggtgttcagaagcctgtgcaagctgagcatgaagcccctgggcgagggcccccccgaccccaagagccacgagctgagaagcaaggtggtgagcctgcagctgctgctgagcgtgctgcagaacgccggccccgtgttcagaacccacgagatgttcatcaacgccatcaagcagtacctgtgcgtggccctgagcaagaacggcgtgagcagcgtgcccgacgtgttcgagctgagcctggccatcttcctgaccctgctgagcaacttcaagatgcacctgaagatgcagatcgaggtgttcttcaaggagatcttcctgaacatcctggagaccagcaccagcagcttcgagcacagatggatggtgatccagaccctgaccagaatctgcgccgacgcccagtgcgtggtggacatctacgtgaactacgactgcgacctgaacgccgccaacatcttcgagagactggtgaacgacctgagcaagatcgcccagggcagaagcggccacgagctgggcatgacccccctgcaggagctgagcctgagaaagaagggcctggagtgcctggtgagcatcctgaagtgcatggtggagtggagcaaggacctgtacgtgaaccccaaccaccagaccagcctgggccaggagagactgaccgaccaggagatcggcgacggcaagggcctggacatggccagaagatgcagcgtgaccagcatggagagcaccgtgagcagcggcacccagaccaccgtgcaggacgaccccgagcagttcgaggtgatcaagcagcagaaggagatcatcgagcacggcatcgagctgttcaacaagaagcccaagagaggcatccagttcctgcaggagcagggcatgctgggcaccagcgtggaggacatcgcccagttcctgcaccaggaggagagactggacagcacccaggtgggcgacttcctgggcgacagcgccagattcaacaaggaggtgatgtacgcctacgtggaccagctggacttctgcgagaaggagttcgtgagcgccctgagaaccttcctggagggcttcagactgcccggcgaggcccagaagatcgacagactgatggagaagttcgccgccagatacatcgagtgcaaccagggccagaccctgttcgccagcgccgacaccgcctacgtgctggcctacagcatcatcatgctgaccaccgacctgcacagcccccaggtgaagaacaagatgaccaaggagcagtacatcaagatgaacagaggcatcaacgacagcaaggacctgcccgaggagtacctgagcagcatctacgaggagatcgagggcaagaagatcgccatcaagaagaactag

SEQ ID NO: 72189 - DNA, 591 bp, synthetic construct
  misc_feature 1..591: note = Description of Artificial Sequence: Synthetic coding sequence
  source 1..591: mol_type = other DNA
atgggcagcgtgaacagcagaggccacaaggccgaggcccaggtggtgatgatgggcctggacagcgccggcaagaccaccctgctgtacaagctgaagggccaccagctggtggagaccctgcccaccgtgggcttcaacgtggagcccctgaaggcccccggccacgtgagcctgaccctgtgggacgtgggcggccaggcccccctgagagccagctggaaggactacctggagggcaccgacatcctggtgtacgtgctggacagcaccgacgaggccagactgcccgagagcgccgccgagctgaccgaggtgctgaacgaccccaacatggccggcgtgcccttcctggtgctggccaacaagcaggaggcccccgacgccctgcccctgctgaagatcagaaacagactgagcctggagagattccaggaccactgctgggagctgagaggctgcagcgccctgaccggcgagggcctgcccgaggccctgcagagcctgtggagcctgctgaagagcagaagctgcatgtgcctgcaggccagagcccacggcgccgagagaggcgacagcaagagaagctag

SEQ ID NO: 72190 - DNA, 966 bp, synthetic construct
  misc_feature 1..966: note = Description of Artificial Sequence: Synthetic coding sequence
  source 1..966: mol_type = other DNA
atgttcagcctgatggccagctgctgcggctggttcaagagatggagagagcccgtgagactggccaacaagcaggacaaggagggcgccctgggcgaggccgacgtgatcgagtgcctgagcctggagaagctggtgaacgagcacaagtgcctgtgccagatcgagccctgcagcgccatcagcggctacggcaagaagatcgacaagagcatcaagaagggcctgtactggctgctgcacgtgatcgccagagacttcgacgccctgaacgagagaatccagaaggagaccaccgagcagagagccctggaggagcaggagaagcaggagagagccgagagagtgagaaagctgagagaggagagaaagcagaacgagcaggagcaggccgagctggacggcaccagcggcctggccgagctggaccccgagcccaccaaccccttccagcccatcgccagcgtgatcatcgagaacgagggcaagctggagagagagaagaagaaccagaagatggagaaggacagcgacggctgccacctgaagcacaagatggagcacgagcagatcgagacccagggccaggtgaaccacaacggccagaagaacaacgagttcggcctggtggagaactacaaggaggccctgacccagcagctgaagaacgaggacgagaccgacagacccagcctggagagcgccaacggcaagaagaagaccaagaagctgagaatgaagagaaaccacagagtggagcccctgaacatcgacgactgcgcccccgagagccccacccccccccccccccccccccccgtgggctggggcacccccaaggtgaccagactgcccaagctggagcccctgggcgagacccaccacaacgacttctacagaaagcccctgccccccctggccgtgccccagagacccaacagcgacgcccacgacgtgatcagctag

SEQ ID NO: 72191 - DNA, 1287 bp, synthetic construct
  misc_feature 1..1287: note = Description of Artificial Sequence: Synthetic coding sequence
  source 1..1287: mol_type = other DNA
atgttcagcctgatggccagctgctgcggctggttcaagagatggagagagcccgtgagaaaggtgaccctgctgatggtgggcctggacaacgccggcaagaccgccaccgccaagggcatccagggcgagtaccccgaggacgtggcccccaccgtgggcttcagcaagatcaacctgagacagggcaagttcgaggtgaccatcttcgacctgggcggcggcatcagaatcagaggcatctggaagaactactacgccgagagctacggcgtgatcttcgtggtggacagcagcgacgaggagagaatggaggagaccaaggaggccatgagcgagatgctgagacaccccagaatcagcggcaagcccatcctggtgctggccaacaagcaggacaaggagggcgccctgggcgaggccgacgtgatcgagtgcctgagcctggagaagctggtgaacgagcacaagtgcctgtgccagatcgagccctgcagcgccatcagcggctacggcaagaagatcgacaagagcatcaagaagggcctgtactggctgctgcacgtgatcgccagagacttcgacgccctgaacgagagaatccagaaggagaccaccgagcagagagccctggaggagcaggagaagcaggagagagccgagagagtgagaaagctgagagaggagagaaagcagaacgagcaggagcaggccgagctggacggcaccagcggcctggccgagctggaccccgagcccaccaaccccttccagcccatcgccagcgtgatcatcgagaacgagggcaagctggagagagagaagaagaaccagaagatggagaaggacagcgacggctgccacctgaagcacaagatggagcacgagcagatcgagacccagggccaggtgaaccacaacggccagaagaacaacgagttcggcctggtggagaactacaaggaggccctgacccagcagctgaagaacgaggacgagaccgacagacccagcctggagagcgccaacggcaagaagaagaccaagaagctgagaatgaagagaaaccacagagtggagcccctgaacatcgacgactgcgcccccgagagccccacccccccccccccccccccccccgtgggctggggcacccccaaggtgaccagactgcccaagctggagcccctgggcgagacccaccacaacgacttctacagaaagcccctgccccccctggccgtgccccagagacccaacagcgacgcccacgacgtgatcagctag

SEQ ID NO: 72192 - DNA, 1287 bp, synthetic construct; identical to SEQ ID NO: 72191
  misc_feature 1..1287: note = Description of Artificial Sequence: Synthetic coding sequence
  source 1..1287: mol_type = other DNA

SEQ ID NO: 72193 - DNA, 978 bp, synthetic construct
  misc_feature 1..978: note = Description of Artificial Sequence: Synthetic coding sequence
  source 1..978: mol_type = other DNA
atggaggagaccaaggaggccatgagcgagatgctgagacaccccagaatcagcggcaagcccatcctggtgctggccaacaagcaggacaaggagggcgccctgggcgaggccgacgtgatcgagtgcctgagcctggagaagctggtgaacgagcacaagtgcctgtgccagatcgagccctgcagcgccatcagcggctacggcaagaagatcgacaagagcatcaagaagggcctgtactggctgctgcacgtgatcgccagagacttcgacgccctgaacgagagaatccagaaggagaccaccgagcagagagccctggaggagcaggagaagcaggagagagccgagagagtgagaaagctgagagaggagagaaagcagaacgagcaggagcaggccgagctggacggcaccagcggcctggccgagctggaccccgagcccaccaaccccttccagcccatcgccagcgtgatcatcgagaacgagggcaagctggagagagagaagaagaaccagaagatggagaaggacagcgacggctgccacctgaagcacaagatggagcacgagcagatcgagacccagggccaggtgaaccacaacggccagaagaacaacgagttcggcctggtggagaactacaaggaggccctgacccagcagctgaagaacgaggacgagaccgacagacccagcctggagagcgccaacggcaagaagaagaccaagaagctgagaatgaagagaaaccacagagtggagcccctgaacatcgacgactgcgcccccgagagccccacccccccccccccccccccccccgtgggctggggcacccccaaggtgaccagactgcccaagctggagcccctgggcgagacccaccacaacgacttctacagaaagcccctgccccccctggccgtgccccagagacccaacagcgacgcccacgacgtgatcagctag

SEQ ID NO: 72194 - DNA, 450 bp, synthetic construct
  misc_feature 1..450: note = Description of Artificial Sequence: Synthetic coding sequence
  source 1..450: mol_type = other DNA
atggagaaggacagcgacggctgccacctgaagcacaagatggagcacgagcagatcgagacccagggccaggtgaaccacaacggccagaagaacaacgagttcggcctggtggagaactacaaggaggccctgacccagcagctgaagaacgaggacgagaccgacagacccagcctggagagcgccaacggcaagaagaagaccaagaagctgagaatgaagagaaaccacagagtggagcccctgaacatcgacgactgcgcccccgagagccccacccccccccccccccccccccccgtgggctggggcacccccaaggtgaccagactgcccaagctggagcccctgggcgagacccaccacaacgacttctacagaaagcccctgccccccctggccgtgccccagagacccaacagcgacgcccacgacgtgatcagctag

SEQ ID NO: 72195 - DNA, 579 bp, synthetic construct
  misc_feature 1..579: note = Description of Artificial Sequence: Synthetic coding sequence
  source 1..579: mol_type = other DNA
atgggcagcctgggcagcaagaacccccagaccaagcaggcccaggtgctgctgctgggcctggacagcgccggcaagagcaccctgctgtacaagctgaagctggccaaggacatcaccaccatccccaccatcggcttcaacgtggagatgatcgagctggagagaaacctgagcctgaccgtgtgggacgtgggcggccaggagaagatgagaaccgtgtggggctgctactgcgagaacaccgacggcctggtgtacgtggtggacagcaccgacaagcagagactggaggagagccagagacagttcgagcacatcctgaagaacgagcacatcaagaacgtgcccgtggtgctgctggccaacaagcaggacatgcccggcgccctgaccgccgaggacatcaccagaatgttcaaggtgaagaagctgtgcagcgacagaaactggtacgtgcagccctgctgcgccctgaccggcgagggcctggcccagggcttcagaaagctgaccggcttcgtgaagagccacatgaagagcagaggcgacaccctggccttcttcaagcagaactag

SEQ ID NO: 72196 - DNA, 555 bp, synthetic construct
  misc_feature 1..555: note = Description of Artificial Sequence: Synthetic coding sequence
  source 1..555: mol_type = other DNA
atgggcctgctgaccatcctgaagaagatgaagcagaaggagagagagctgagactgctgatgctgggcctggacaacgccggcaagaccaccatcctgaagaagttcaacggcgaggacatcgacaccatcagccccaccctgggcttcaacatcaagaccctggagcacagaggcttcaagctgaacatctgggacgtgggcggccagaagagcctgagaagctactggagaaactacttcgagagcaccgacggcctgatctgggtggtggacagcgccgacagacagagaatgcaggactgccagagagagctgcagagcctgctggtggaggagagactggccggcgccaccctgctgatcttcgccaacaagcaggacctgcccggcgccctgagcagcaacgccatcagagaggtgctggagctggacagcatcagaagccaccactggtgcatccagggctgcagcgccgtgaccggcgagaacctgctgcccggcatcgactggctgctggacgacatcagcagcagaatcttcaccgccgactag

SEQ ID NO: 72197 - DNA, 555 bp, synthetic construct; identical to SEQ ID NO: 72196
  misc_feature 1..555: note = Description of Artificial Sequence: Synthetic coding sequence
  source 1..555: mol_type = other DNA

SEQ ID NO: 72198 - DNA, 474 bp, synthetic construct
  misc_feature 1..474: note = Description of Artificial Sequence: Synthetic coding sequence
  source 1..474: mol_type = other DNA
atgggcctgctgaccatcctgaagaagatgaagcagaaggagagagagctgagactgctgatgctgggcctggacaacgccggcaagaccaccatcctgaagaagttcaacggcgaggacatcgacaccatcagccccaccctgggcttcaacatcaagaccctggagcacagaggcttcaagctgaacatctgggacgtgggcggccagaagagcctgagaagctactggagaaactacttcgagagcaccgacggcctgatctgggtggtggacagcgccgacagacagagaatgcaggactgccagagagagctgcagagcctgctggtggaggaggtgctggagctggacagcatcagaagccaccactggtgcatccagggctgcagcgccgtgaccggcgagaacctgctgcccggcatcgactggctgctggacgacatcagcagcagaatcttcaccgccgactag

SEQ ID NO: 72199 - DNA, 549 bp, synthetic construct
  misc_feature 1..549: note = Description of Artificial Sequence: Synthetic coding sequence
  source 1..549: mol_type = other DNA
atgggcctgctgagcatcctgagaaagctgaagagcgcccccgaccaggaggtgagaatcctgctgctgggcctggacaacgccggcaagaccaccctgctgaagcagctggccagcgaggacatcagccacatcacccccacccagggcttcaacatcaagagcgtgcagagccagggcttcaagctgaacgtgtgggacatcggcggccagagaaagatcagaccctactggaagaactacttcgagaacaccgacatcctgatctacgtgatcgacagcgccgacagaaagagattcgaggagaccggccaggagctggccgagctgctggaggaggagaagctgagctgcgtgcccgtgctgatcttcgccaacaagcaggacctgctgaccgccgcccccgccagcgagatcgccgagggcctgaacctgcacaccatcagagacagagtgtggcagatccagagctgcagcgccctgaccggcgagggcgtgcaggacggcatgaactgggtgtgcaagaacgtgaacgccaagaagaagtag

SEQ ID NO: 72200 - DNA, 606 bp, synthetic construct
  misc_feature 1..606: note = Description of Artificial Sequence: Synthetic coding sequence
  source 1..606: mol_type = other DNA
atgggcaaccacctgaccgagatggcccccaccgccagcagcttcctgccccacttccaggccctgcacgtggtggtgatcggcctggacagcgccggcaagaccagcctgctgtacagactgaagttcaaggagttcgtgcagagcgtgcccaccaagggcttcaacaccgagaagatcagagtgcccctgggcggcagcagaggcatcaccttccaggtgtgggacgtgggcggccaggagaagctgagacccctgtggagaagctacaccagaagaaccgacggcctggtgttcgtggtggacgccgccgaggccgagagactggaggaggccaaggtggagctgcacagaatcagcagagccagcgacaaccagggcgtgcccgtgctggtgctggccaacaagcaggaccagcccggcgccctgagcgccgccgaggtggagaagagactggccgtgagagagctggccgccgccaccctgacccacgtgcagggctgcagcgccgtggacggcctgggcctgcagcagggcctggagagactgtacgagatgatcctgaagagaaagaaggccgccagaggcggcaagaagagaagatag

SEQ ID NO: 72201 - DNA, 561 bp, synthetic construct
  misc_feature 1..561: note = Description of Artificial Sequence: Synthetic coding sequence
  source 1..561: mol_type = other DNA
atgggcctgctggacagactgagcgtgctgctgggcctgaagaagaaggaggtgcacgtgctgtgcctgggcctggacaacagcggcaagaccaccatcatcaacaagctgaagcccagcaacgcccagagccagaacatcctgcccaccatcggcttcagcatcgagaagttcaagagcagcagcctgagcttcaccgtgttcgacatgagcggccagggcagatacagaaacctgtgggagcactactacaaggagggccaggccatcatcttcgtgatcgacagcagcgacagactgagaatggtggtggccaaggaggagctggacaccctgctgaaccaccccgacatcaagcacagaagaatccccatcctgttcttcgccaacaagatggacctgagagacgccgtgaccagcgtgaaggtgagccagctgctgtgcctggagaacatcaaggacaagccctggcacatctgcgccagcgacgccatcaagggcgagggcctgcaggagggcgtggactggctgcaggaccagatccagaccgtgaagacctag

SEQ ID NO: 72202 - DNA, 561 bp, synthetic construct; identical to SEQ ID NO: 72201
  misc_feature 1..561: note = Description of Artificial Sequence: Synthetic coding sequence
  source 1..561: mol_type = other DNA

SEQ ID NO: 72203 - DNA, 366 bp, synthetic construct
  misc_feature 1..366: note = Description of Artificial Sequence: Synthetic coding sequence
  source 1..366: mol_type = other DNA
atgggcctgctggacagactgagcgtgctgctgggcctgaagaagaaggaggtgcacgtgctgtgcctgggcctggacaacagcggcaagaccaccatcatcaacaagctgaagcccagcaacgcccagagccagaacatcctgcccaccatcggcttcagcatcgagaagttcaagagcagcagcctgagcttcaccgtgttcgacatgagcggccagggcagatacagaaacctgtgggagcactactacaaggagggccaggccatcatcttcgtgatcgacagcagcgacagactgagaatggtggtggccaaggaggagctggacaccctgctgaaccaccccgacatcaagcacagatag

SEQ ID NO: 72204 - DNA, 561 bp, synthetic construct; identical to SEQ ID NO: 72201
  misc_feature 1..561: note = Description of Artificial Sequence: Synthetic coding sequence
  source 1..561: mol_type = other DNA

SEQ ID NO: 72205 - DNA, 561 bp, synthetic construct; identical to SEQ ID NO: 72201
  misc_feature 1..561: note = Description of Artificial Sequence: Synthetic coding sequence
  source 1..561: mol_type = other DNA

SEQ ID NO: 72206 - DNA, 564 bp, synthetic construct
  misc_feature 1..564: note = Description of Artificial Sequence: Synthetic coding sequence
  source 1..564: mol_type = other DNA
ctgagacccacctggaaggccctgagccaccccgcctggcccgaggagaagaacaagcagatcctggtgctgggcctggacggcgccggcaagaccagcgtgctgcacagcctggccagcaacagagtgcagcacagcgtggcccccacccagggcttccacgccgtgtgcatcaacaccgaggacagccagatggagttcctggagatcggcggcagcaagcccttcagaagctactgggagatgtacctgagcaagggcctgctgctgatcttcgtggtggacagcgccgaccacagcagactgcccgaggccaagaagtacctgcaccagctgatcgccgccaaccccgtgctgcccctggtggtgttcgccaacaagcaggacctggaggccgcctaccacatcaccgacatccacgaggccctggccctgagcgaggtgggcaacgacagaaagatgttcctgttcggcacctacctgaccaagaacggcagcgagatccccagcaccatgcaggacgccaaggacctgatcgcccagctggccgccgacgtgcagtag

SEQ ID NO: 72207 - DNA, 1083 bp, synthetic construct
  misc_feature 1..1083: note = Description of Artificial Sequence: Synthetic coding sequence
  source 1..1083: mol_type = other DNA
atggagagagccggccccgccggcgaggagggcggcgccagagagggcagactgctgcccagagcccccggcgcctgggtgctgagagcctgcgccgagagagccgccctggaggtgggcgccgccagcgccgacaccggcgtgagaggctgcggcgccagaggccccgcccccctgctggccagcgccggcggcggcagagccagagacggcacctggggcgtgagaaccaagggcagcggcgccgccctgcccagcagacccgccagcagagccgcccccagacccgaggccagcagcccccccctgcccctggagaaggccagaggcggcctgagcggcccccagggcggcagagccagaggcgccatggcccacgtgggcagcagaaagagaagcagaagcagaagcagaagcagaggcagaggcagcgagaagagaaagaagaagagcagaaaggacaccagcagaaactgcagcgccagcaccagccagggcagaaaggccagcaccgcccccggcgccgaggccagccccagcccctgcatcaccgagagaagcaagcagaaggccagaagaagaaccagaagcagcagcagcagcagcagcagcagcagcagcagcagcagcagcagcagcagcagcagcagcagcagcagcagcgacggcagaaagaagagaggcaagtacaaggacaagagaagaaagaagaagaagaagagaaagaagctgaagaagaagggcaaggagaaggccgaggcccagcaggtggaggccctgcccggccccagcctggaccagtggcacagaagcgccggcgaggaggaggacggccccgtgctgaccgacgagcagaagagcagaatccaggccatgaagcccatgaccaaggaggagtgggacgccagacagagcatcatcagaaaggtggtggaccccgagaccggcagaaccagactgatcaagggcgacggcgaggtgctggaggagatcgtgaccaaggagagacacagagagatcaacaagcaggccaccagaggcgactgcctggccttccagatgagagccggcctgctgccctag

SEQ ID NO: 72208 - DNA, 1017 bp, synthetic construct
  misc_feature 1..1017: note = Description of Artificial Sequence: Synthetic coding sequence
  source 1..1017: mol_type = other DNA
atggagagagccggccccgccggcgaggagggcggcgccagagagggcagactgctgcccagagcccccggcgcctgggtgctgagagcctgcgccgagagagccgccctggaggtgggcgccgccagcgccgacaccggcgtgagaggctgcggcgccagaggccccgcccccctgctggccagcgccggcggcggcagagccagagacggcacctggggcgtgagaaccaagggcagcggcgccgccctgcccagcagacccgccagcagagccgcccccagacccgaggccagcagcccccccctgcccctggagaaggccagaggcggcctgagcggcccccagggcggcagagccagaggcgccatggcccacgtgggcagcagaaagagaagcagaagcagaagcagaagcagaggcagaggcagcgagaagagaaagaagaagagcagaaaggacaccagcagaaactgcagcgccagcaccagccaggagagaagcaagcagaaggccagaagaagaaccagaagcagcagcagcagcagcagcagcagcagcagcagcagcagcagcagcagcagcagcagcagcagcagcagcagcgacggcagaaagaagagaggcaagtacaaggacaagagaagaaagaagaagaagaagagaaagaagctgaagaagaagggcaaggagaaggccgaggcccagcaggtggaggccctgcccggccccagcctggaccagtggcacagaagcgccggcgaggaggaggacggccccgtgctgaccgacgagcagaagagcagaatccaggccatgaagcccatgaccaaggaggagtgggacgccagacagagcatcatcagaaaggtggtggaccccgagaccggcagaaccagactgatcaagggcgacggcgaggtgctggaggagatcgtgaccaaggagagacacagagagatcaacaaggtgggcgtggcccccctgcccgccatcagaccccagctgtgcctgtag

SEQ ID NO: 72209 - DNA, 1059 bp, synthetic construct
  misc_feature 1..1059: note = Description of Artificial Sequence: Synthetic coding sequence
  source 1..1059: mol_type = other DNA
atggagagagccggccccgccggcgaggagggcggcgccagagagggcagactgctgcccagagcccccggcgcctgggtgctgagagcctgcgccgagagagccgccctggaggtgggcgccgccagcgccgacaccggcgtgagaggctgcggcgccagaggccccgcccccctgctggccagcgccggcggcggcagagccagagacggcacctggggcgtgagaaccaagggcagcggcgccgccctgcccagcagacccgccagcagagccgcccccagacccgaggccagcagcccccccctgcccctggagaaggccagaggcggcctgagcggcccccagggcggcagagccagaggcgccatggcccacgtgggcagcagaaagagaagcagaagcagaagcagaagcagaggcagaggcagcgagaagagaaagaagaagagcagaaaggacaccagcagaaactgcagcgccagcaccagccagggcagaaaggccagcaccgcccccggcgccgaggagagaagcaagcagaaggccagaagaagaaccagaagcagcagcagcagcagcagcagcagcagcagcagcagcagcagcagcagcagcagcagcagcagcagcagcagcgacggcagaaagaagagaggcaagtacaaggacaagagaagaaagaagaagaagaagagaaagaagctgaagaagaagggcaaggagaaggccgaggcccagcaggtggaggccctgcccggccccagcctggaccagtggcacagaagcgccggcgaggaggaggacggccccgtgctgaccgacgagcagaagagcagaatccaggccatgaagcccatgaccaaggaggagtgggacgccagacagagcatcatcagaaaggtggtggaccccgagaccggcagaaccagactgatcaagggcgacggcgaggtgctggaggagatcgtgaccaaggagagacacagagagatcaacaagcaggccaccagaggcgactgcctggccttccagatgagagccggcctgctgccctag

SEQ ID NO: 72210 - DNA, 1026 bp, synthetic construct
  misc_feature 1..1026: note = Description of Artificial Sequence: Synthetic coding sequence
  source 1..1026: mol_type = other DNA
atggagagagccggccccgccggcgaggagggcggcgccagagagggcagactgctgcccagagcccccggcgcctgggtgctgagagcctgcgccgagagagccgccctggaggtgggcgccgccagcgccgacaccggcgtgagaggctgcggcgccagaggccccgcccccctgctggccagcgccggcggcggcagagccagagacggcacctggggcgtgagaaccaagggcagcggcgccgccctgcccagcagacccgccagcagagccgcccccagacccgaggccagcagcccccccctgcccctggagaaggccagaggcggcctgagcggcccccagggcggcagagccagaggcgccatggcccacgtgggcagcagaaagagaagcagaagcagaagcagaagcagaggcagaggcagcgagaagagaaagaagaagagcagaaaggacaccagcagaaactgcagcgccagcaccagccaggagagaagcaagcagaaggccagaagaagaaccagaagcagcagcagcagcagcagcagcagcagcagcagcagcagcagcagcagcagcagcagcagcagcagcagcagcgacggcagaaagaagagaggcaagtacaaggacaagagaagaaagaagaagaagaagagaaagaagctgaagaagaagggcaaggagaaggccgaggcccagcaggtggaggccctgcccggccccagcctggaccagtggcacagaagcgccggcgaggaggaggacggccccgtgctgaccgacgagcagaagagcagaatccaggccatgaagcccatgaccaaggaggagtgggacgccagacagagcatcatcagaaaggtggtggaccccgagaccggcagaaccagactgatcaagggcgacggcgaggtgctggaggagatcgtgaccaaggagagacacagagagatcaacaagcaggccaccagaggcgactgcctggccttccagatgagagccggcctgctgccctag

SEQ ID NO: 72211 - DNA, 567 bp, synthetic construct
  misc_feature 1..567: note = Description of Artificial Sequence: Synthetic coding sequence
  source 1..567: mol_type = other DNA
atggacgtgaacatcgcccccctgagagcctgggacgacttcttccccggcagcgacagattcgccagacccgacttcagagacatcagcaagtggaacaacagagtggtgagcaacctgctgtactaccagaccaactacctggtggtggccgccatgatgatcagcatcgtgggcttcctgagccccttcaacatgatcctgggcggcatcgtggtggtgctggtgttcaccggcttcgtgtgggccgcccacaacaaggacgtgctgagaagaatgaagaagagataccccaccaccttcgtgatggtggtgatgctggccagctacttcctgatcagcatgttcggcggcgtgatggtgttcgtgttcggcatcaccttccccctgctgctgatgttcatccacgccagcctgagactgagaaacctgaagaacaagctggagaacaagatggagggcatcggcctgaagagaacccccatgggcatcgtgctggacgccctggagcagcaggaggagggcatcaacagactgaccgactacatcagcaaggtgaaggagtag

SEQ ID NO: 72212 - DNA, 411 bp, synthetic construct
  misc_feature 1..411: note = Description of Artificial Sequence: Synthetic coding sequence
  source 1..411: mol_type = other DNA
atggacgtgaacatcgcccccctgagagcctgggacgacttcttccccggcagcgacagattcgccagacccgacttcagagacatcagcaagtggaacaacagagtggtgagcaacctgctgtactaccagaccaactacctggtggtggccgccatgatgatcagcatcgtgggcttcctgagccccttcaacatgatcctgggcggcatcgtggtggtgctggtgttcaccggcttcgtgtgggccgcccacgacgtgagatacggcggccacgtgggcgagctgttcccctacctgcacgtgtggagaagccacggcctgtgcgtgtggcactacttcagcttcgccgtggacgtgtacccctgcatcgtggagaccagcgagccccaggagcagaccggcgagtag

SEQ ID NO: 72213 - DNA, 819 bp, synthetic construct
  misc_feature 1..819: note = Description of Artificial Sequence: Synthetic coding sequence
  source 1..819: mol_type = other DNA
atggtgagatgctacgtggagatcgtggagaagctgcccgagagaagacccgaccccgccaccatcgagggctgcgcccagctgaagcccaacaactacctgctggcctggcacacccccttcaacgagaagggcagcggcttcggcgccgccaccaaggccatgtgcatcggcctgagatactggaagcccgagagactggagaccctgatcgaggtgagcgtggagtgcggcagaatgacccacaaccaccccaccggcttcctgggcagcctgtgcaccgccctgttcgtgagcttcgccgcccagggcaagcccctggtgcagtggggcagagacatgctgagagccgtgcccctggccgaggagtactgcagaaagaccatcagacacaccgccgagtaccaggagcactggttctacttcgaggccaagtggcagttctacctggaggagagaaagatcagcaaggacagcgagaacaaggccatcttccccgacaactacgacgccgaggagagagagaagacctacagaaagtggagcagcgagggcagaggcggcagaagaggccacgacgcccccatgatcgcctacgacgccctgctggccgccggcaacagctggaccgagctgtgccacagagccatgttccacggcggcgagagcgccgccaccggcaccatcgccggctgcctgttcggcctgctgtacggcctggacctggtgcccaagggcctgtaccaggacctggaggacaaggagaagctggaggacctgggcgccgccctgtacagactgagcaccgaggagaagtag

SEQ ID NO: 72214 - DNA, 1065 bp, synthetic construct
  misc_feature 1..1065: note = Description of Artificial Sequence: Synthetic coding sequence
  source 1..1065: mol_type = other DNA
atggagaagttcaaggccgccatgctgctgggcagcgtgggcgacgccctgggctacagaaacgtgtgcaaggagaacagcaccgtgggcatgaagatccaggaggagctgcagagaagcggcggcctggaccacctggtgctgagccccggcgagtggcccgtgagcgacaacaccatcatgcacatcgccaccgccgaggccctgaccaccgactactggtgcctggacgacctgtacagagagatggtgagatgctacgtggagatcgtggagaagctgcccgagagaagacccgaccccgccaccatcgagggctgcgcccagctgaagcccaacaactacctgctggcctggcacacccccttcaacgagaagggcagcggcttcggcgccgccaccaaggccatgtgcatcggcctgagatactggaagcccgagagactggagaccctgatcgaggtgagcgtggagtgcggcagaatgacccacaaccaccccaccggcttcctgggcagcctgtgcaccgccctgttcgtgagcttcgccgcccagggcaagcccctggtgcagtggggcagagacatgctgagagccgtgcccctggccgaggagtactgcagaaagaccatcagacacaccgccgagtaccaggagcactggttctacttcgaggccaagtggcagttctacctggaggagagaaagatcagcaaggacagcgagaacaaggccatcttccccgacaactacgacgccgaggagagagagaagacctacagaaagtggagcagcgagggcagaggcggcagaagaggccacgacgcccccatgatcgcctacgacgccctgctggccgccggcaacagctggaccgagctgtgccacagagccatgttccacggcggcgagagcgccgccaccggcaccatcgccggctgcctgttcggcctgctgtacggcctggacctggtgcccaagggcctgtaccaggacctggaggacaaggagaagctggaggacctgggcgccgccctgtacagactgagcaccgaggagaagtag

SEQ ID NO: 72215 - DNA, 531 bp, synthetic construct
  misc_feature 1..531: note = Description of Artificial Sequence: Synthetic coding sequence
  source 1..531: mol_type = other DNA
atggtgagatgctacgtggagatcgtggagaagctgcccgagagaagacccgaccccgccaccatcgagggctgcgcccagctgaagcccaacaactacctgctggcctggcacacccccttcaacgagaagggcagcggcttcggcgccgccaccaaggccatgtgcatcggcctgagatactggaagcccgagagactggagaccctgatcgaggtgagcgtggagtgcggcagaatgacccacaaccaccccaccggcttcctgggcagcctgtgcaccgccctgttcgtgagcttcgccgcccagggcaagcccctggtgcagtggggcagagacatgctgagagccgtgcccctggccgaggagtactgcagaaagaccatcagacacaccgccgagtaccaggagcactggttctacttcgaggccaagtggcagttctacctggaggagagaaagatcagcaaggacagcgagaacaaggccatcttccccgacaactacgacgccgaggagagagagaagtag

SEQ ID NO: 72216 - DNA, 1092 bp, synthetic construct
  misc_feature 1..1092: note = Description of Artificial Sequence: Synthetic coding sequence
  source 1..1092: mol_type = other DNA
atggccgccgccgccatggccgccgccgccggcggcggcgccggcgccgccagaagcctgagcagattcagaggctgcctggccggcgccctgctgggcgactgcgtgggcagcttctacgaggcccacgacaccgtggacctgaccagcgtgctgagacacgtgcagagcctggagcccgaccccggcacccccggcagcgagagaaccgaggccctgtactacaccgacgacaccgccatggccagagccctggtgcagagcctgctggccaaggaggccttcgacgaggtggacatggcccacagattcgcccaggagtacaagaaggaccccgacagaggctacggcgccggcgtggtgaccgtgttcaagaagctgctgaaccccaagtgcagagacgtgttcgagcccgccagagcccagttcaacggcaagggcagctacggcaacggcggcgccatgagagtggccggcatcagcctggcctacagcagcgtgcaggacgtgcagaagttcgccagactgagcgcccagctgacccacgccagcagcctgggctacaacggcgccatcctgcaggccctggccgtgcacctggccctgcagggcgagagcagcagcgagcacttcctgaagcagctgctgggccacatggaggacctggagggcgacgcccagagcgtgctggacgccagagagctgggcatggaggagagaccctacagcagcagactgaagaagatcggcgagctgctggaccaggccagcgtgaccagagaggaggtggtgagcgagctgggcaacggcatcgccgccttcgagagcgtgcccaccgccatctactgcttcctgagatgcatggagcccgaccccgagatccccagcgccttcaacagcctgcagagaaccctgatctacagcatcagcctgggcggcgacaccgacaccatcgccaccatggccggcgccatcgccggcgcctactacggcatggaccaggtgcccgagagctggcagcagagctgcgagggctacgaggagaccgacatcctggcccagagcctgcacagagtgttccagaagagctag

SEQ ID NO: 72217 - DNA, 852 bp, synthetic construct
  misc_feature 1..852: note = Description of Artificial Sequence: Synthetic coding sequence
  source 1..852: mol_type = other DNA
atggccagagccctggtgcagagcctgctggccaaggaggccttcgacgaggtggacatggcccacagattcgcccaggagtacaagaaggaccccgacagaggctacggcgccggcgtggtgaccgtgttcaagaagctgctgaaccccaagtgcagagacgtgttcgagcccgccagagcccagttcaacggcaagggcagctacggcaacggcggcgccatgagagtggccggcatcagcctggcctacagcagcgtgcaggacgtgcagaagttcgccagactgagcgcccagctgacccacgccagcagcctgggctacaacggcgccatcctgcaggccctggccgtgcacctggccctgcagggcgagagcagcagcgagcacttcctgaagcagctgctgggccacatggaggacctggagggcgacgcccagagcgtgctggacgccagagagctgggcatggaggagagaccctacagcagcagactgaagaagatcggcgagctgctggaccaggccagcgtgaccagagaggaggtggtgagcgagctgggcaacggcatcgccgccttcgagagcgtgcccaccgccatctactgcttcctgagatgcatggagcccgaccccgagatccccagcgccttcaacagcctgcagagaaccctgatctacagcatcagcctgggcggcgacaccgacaccatcgccaccatggccggcgccatcgccggcgcctactacggcatggaccaggtgcccgagagctggcagcagagctgcgagggctacgaggagaccgacatcctggcccagagcctgcacagagtgttccagaagagctag

SEQ ID NO: 72218 - DNA, 630 bp, synthetic construct
  misc_feature 1..630: note = Description of Artificial Sequence: Synthetic coding sequence
  source 1..630: mol_type = other DNA
atgagagtggccggcatcagcctggcctacagcagcgtgcaggacgtgcagaagttcgccagactgagcgcccagctgacccacgccagcagcctgggctacaacggcgccatcctgcaggccctggccgtgcacctggccctgcagggcgagagcagcagcgagcacttcctgaagcagctgctgggccacatggaggacctggagggcgacgcccagagcgtgctggacgccagagagctgggcatggaggagagaccctacagcagcagactgaagaagatcggcgagctgctggaccaggccagcgtgaccagagaggaggtggtgagcgagctgggcaacggcatcgccgccttcgagagcgtgcccaccgccatctactgcttcctgagatgcatggagcccgaccccgagatccccagcgccttcaacagcctgcagagaaccctgatctacagcatcagcctgggcggcgacaccgacaccatcgccaccatggccggcgccatcgccggcgcctactacggcatggaccaggtgcccgagagctggcagcagagctgcgagggctacgaggagaccgacatcctggcccagagcctgcacagagtgttccagaagagctag

SEQ ID NO: 72219 - DNA, 984 bp, synthetic construct
  misc_feature 1..984: note = Description of Artificial Sequence: Synthetic coding sequence
  source 1..984: mol_type = other DNA
atgcagatgcccgccatgatgagcctgctgctggtgagcgtgggcctgatggaggccctgcaggcccagagccaccccatcaccagaagagacctgttcagccaggagatccagctggacatggccctggccagcttcgacgaccagtacgccggctgcgccgccgccatgaccgccgccctgcccgacctgaaccacaccgagttccaggccaaccaggtgtacgccgacagctggaccctggccagcagccagtggcaggagagacaggccagatggcccgagtggagcctgagccccaccagacccagccccccccccctgggcttcagagacgagcacggcgtggccctgctggcctacaccgccaacagccccctgcacaaggagttcaacgccgccgtgagagaggccggcagaagcagagcccactacctgcaccacttcagcttcaagaccctgcacttcctgctgaccgaggccctgcagctgctgggcagcggccagagaccccccagatgccaccaggtgttcagaggcgtgcacggcctgagattcagacccgccggccccagagccaccgtgagactgggcggcttcgccagcgccagcctgaagcacgtggccgcccagcagttcggcgaggacaccttcttcggcatctggacctgcctgggcgcccccatcaagggctacagcttcttccccggcgaggaggaggtgctgatcccccccttcgagaccttccaggtgatcaacgccagcagactggcccagggccccgccagaatctacctgagagccctgggcaagcacagcacctacaactgcgagtacatcaaggacaagaagtgcaagagcggcccctgccacctggacaacagcgccatgggccagagccccctgagcgccgtgtggagcctgctgctgctgctgtggttcctggtggtgagagccttccccgacggccccggcctgctgtag

SEQ ID NO: 72220 - DNA, 1104 bp, synthetic construct
  misc_feature 1..1104: note = Description of Artificial Sequence: Synthetic coding sequence
  source 1..1104: mol_type = other DNA
atgaagaccggccacttcgagatcgtgaccatgctgctggccaccatgatcctggtggacatcttccaggtgaaggccgaggtgctggacatggccgacaacgccttcgacgacgagtacctgaagtgcaccgacagaatggagatcaagtacgtgccccagctgctgaaggaggagaaggccagccaccagcagctggacaccgtgtgggagaacgccaaggccaagtgggccgccagaaagacccagatcttcctgcccatgaacttcaaggacaaccacggcatcgccctgatggcctacatcagcgaggcccaggagcagacccccttctaccacctgttcagcgaggccgtgaagatggccggccagagcagagaggactacatctacggcttccagttcaaggccttccacttctacctgaccagagccctgcagctgctgagaaagccctgcgaggccagcagcaagaccgtggtgtacagaaccagccagggcaccagcttcaccttcggcggcctgaaccaggccagattcggccacttcaccctggcctacagcgccaagccccaggccgccaacgaccagctgaccgtgctgagcatctacacctgcctgggcgtggacatcgagaacttcctggacaaggagagcgagagaatcaccctgatccccctgaacgaggtgttccaggtgagccaggagggcgccggcaacaacctgatcctgcagagcatcaacaagacctgcagccactacgagtgcgccttcctgggcggcctgaagaccgagaactgcatcgagaacctggagtacttccagcccatctacgtgtacaaccccggcgagaagaaccagaagctggaggaccacagcgagaagaactggaagctggaggaccacggcgagaagaaccagaagctggaggaccacggcgtgaagatcctggagcccacccagatccccgcccccggccccgtgcccgtgcccggccccaagagccaccccagcgccagcagcggcaagctgctgctgccccagttcggcatggtgatcatcctgatcagcgtgagcgccatcaacctgttcgtggccctgtag

SEQ ID NO: 72221 - DNA, 1137 bp, synthetic construct
  misc_feature 1..1137: note = Description of Artificial Sequence: Synthetic coding sequence
  source 1..1137: mol_type = other DNA
atgaagaccggccacttcgagatcgtgaccatgctgctggccaccatgatcctggtggacatcttccaggtgaaggccgaggtgctggacatggccgacaacgccttcgacgacgagtacctgaagtgcaccgacagaatggagatcaagtacgtgccccagctgctgaaggaggagaaggccagccaccagcagctggacaccgtgtgggagaacgccaaggccaagtgggccgccagaaagacccagatcttcctgcccatgaacttcaaggacaaccacggcatcgccctgatggcctacatcagcgaggcccaggagcagacccccttctaccacctgttcagcgaggccgtgaagatggccggccagagcagagaggactacatctacggcttccagttcaaggccttccacttctacctgaccagagccctgcagctgctgagaaagccctgcgaggccagcagcaagaccgtggtgtacagaaccagccagggcaccagcttcaccttcggcggcctgaaccaggccagattcggccacttcaccctggcctacagcgccaagccccaggccgccaacgaccagctgaccgtgctgagcatctacacctgcctgggcgtggacatcgagaacttcctggacaaggagagcgagagaatcaccctgatccccctgaacgaggtgttccaggtgagccaggagggcgccggcaacaacctgatcctgcagagcatcaacaagacctgcagccactacgagtgcgccttcctgggcggcctgaagaccgagaactgcatcgagaacctggagtacttccagcccatctacgtgtacaaccccggcgagaagaaccagaagctggaggaccacagcgagaagaactggaagctggaggaccacggcgagaagaaccagaagctggaggaccacggcgtgaagatcctggagcccacccagatccccgaggacaagagccagggcaacatcaacaaccccacccccggccccgtgcccgtgcccggccccaagagccaccccagcgccagcagcggcaagctgctgctgccccagttcggcatggtgatcatcctgatcagcgtgagcgccatcaacctgttcgtggccctgtag

SEQ ID NO: 72222 - DNA, 1170 bp, synthetic construct
  misc_feature 1..1170: note = Description of Artificial Sequence: Synthetic coding sequence
  source 1..1170: mol_type = other DNA
atgaagaccggccacttcgagatcgtgaccatgctgctggccaccatgatcctggtggacatcttccaggtgaaggccgaggtgctggacatggccgacaacgccttcgacgacgagtacctgaagtgcaccgacagaatggagatcaagtacgtgccccagctgctgaaggaggagaaggccagccaccagcagctggacaccgtgtgggagaacgccaaggccaagtgggccgccagaaagacccagatcttcctgcccatgaacttcaaggacaaccacggcatcgccctgatggcctacatcagcgaggcccaggagcagacccccttctaccacctgttcagcgaggccgtgaagatggccggccagagcagagaggactacatctacggcttccagttcaaggccttccacttctacctgaccagagccctgcagctgctgagaaagccctgcgaggccagcagcaagaccgtggtgtacagaaccagccagggcaccagcttcaccttcggcggcctgaaccaggccagattcggccacttcaccctggcctacagcgccaagccccaggccgccaacgaccagctgaccgtgctgagcatctacacctgcctgggcgtggacatcgagaacttcctggacaaggagagcgagagaatcaccctgatccccctgaacgaggtgttccaggtgagccaggagggcgccggcaacaacctgatcctgcagagcatcaacaagacctgcagccactacgagtgcgccttcctgggcggcctgaagaccgagaactgcatcgagaacctggagtacttccagcccatctacgtgtacaaccccggcgagaagaaccagaagctggaggaccacagcgagaagaactggaagctggaggaccacggcgagaagaaccagaagctggaggaccacggcgtgaagatcctggagcccacccagatccccggcatgaagatccccgagcccttccccctgcccgaggacaagagccagggcaacatcaacaaccccacccccggccccgtgcccgtgcccggccccaagagccaccccagcgccagcagcggcaagctgctgctgccccagttcggcatggtgatcatcctgatcagcgtgagcgccatcaacctgttcgtggccctgtag

SEQ ID NO: 72223 - DNA, 390 bp, synthetic construct
  misc_feature 1..390: note = Description of Artificial Sequence: Synthetic coding sequence
  source 1..390: mol_type = other DNA
atgaagaccggccacttcgagatcgtgaccatgctgctggccaccatgatcctggtggacatcttccaggtgaaggccgaggtgctggacatggccgacaacgccttcgacgacgagtacctgaagtgcaccgacagaatggagatcaagtacgtgccccagctgctgaaggaggagaaggccagccaccagcagctggacaccgtgtgggagaacgccaaggccaagtgggccgccagaaagacccagatcttcctgcccatgaacttcaaggacaaccacggcatcgccctgatggcctacatcagcgaggcccaggagcagacccccttctaccacctgttcagcgaggccgtgaagatggccggccagagcagagaggactactag

SEQ ID NO: 72224 - DNA, 528 bp, synthetic construct
  misc_feature 1..528: note = Description of Artificial Sequence: Synthetic coding sequence
  source 1..528: mol_type = other DNA
atgaagaccggccacttcgagatcgtgaccatgctgctggccaccatgatcctggtggacatcttccaggtgaaggccgaggtgctggacatggccgacaacgccttcgacgacgagtacctgaagtgcaccgacagaatggagatcaagtacgtgccccagctgctgaaggaggagaaggccagccaccagcagctggacaccgtgtgggagaacgccaaggccaagtgggccgccagaaagacccagatcttcctgcccatgaacttcaaggacaaccacggcatcgccctgatggcctacatcagcgaggcccaggagcagacccccttctaccacctgttcagcgaggccgtgaagatggccggccagagcagagaggactacatctacggcttccagttcaaggccttccacttctacctgaccagagccctgcagctgctgagaaagccctgcgaggccagcagcaagaccgtggtgtacagaaccagccagggcaccagcttcaccttcggcggcctgtag

SEQ ID NO: 72225 - DNA, 609 bp, synthetic construct
  misc_feature 1..609: note = Description of Artificial Sequence: Synthetic coding sequence
  source 1..609: mol_type = other DNA
atgaagaccggccacttcgagatcgtgaccatgctgctggccaccatgatcctggtggacatcttccaggtgaaggccgaggtgctggacatggccgacaacgccttcgacgacgagtacctgaagtgcaccgacagaatggagatcaagtacgtgccccagctgctgaaggaggagaaggccagccaccagcagctggacaccgtgtgggagaacgccaaggccaagtgggccgccagaaagacccagatcttcctgcccatgaacttcaaggacaaccacggcatcgccctgatggcctacatcagcgaggcccaggagcagacccccttctaccacctgttcagcgaggccgtgaagatggccggccagagcagagaggactacatctacggcttccagttcaaggccttccacttctacctgaccagagccctgcagctgctgagaaagccctgcgaggccagcagcaagaccgtggtgtacagaaccagccagggcaccagcttcaccttcggcggcctgaaccaggccagattcggccacttcaccctggcctacagcgccaagccccaggccgccaacgaccagctgaccgtgctgagctag

SEQ ID NO: 72226 - DNA, 324 bp, synthetic construct
  misc_feature 1..324: note = Description of Artificial Sequence: Synthetic coding sequence
  source 1..324: mol_type = other DNA
atgaagaccggccacttcgagatcgtgaccatgctgctggccaccatgatcctggtggacatcttccaggtgaaggccgaggtgctggacatggccgacaacgccttcgacgacgagtacctgaagtgcaccgacagaatggagatcaagtacgtgccccagctgctgaaggaggagaaggccagccaccagcagctggacaccgtgtgggagaacgccaaggccaagtgggccgccagaaagacccagatcttcctgcccatgaacttcaaggacaaccacggcatcgccctgatggcctacatcagcgaggcccaggagtag

SEQ ID NO: 72227 - DNA, 456 bp, synthetic construct
  misc_feature 1..456: note = Description of Artificial Sequence: Synthetic coding sequence
  source 1..456: mol_type = other DNA
atgagcggcagaggcaagcagggcggcaaggtgagagccaaggccaagagcagaagcagcagagccggcctgcagttccccgtgggcagagtgcacagactgctgagaaagggcaactacgccgagagagtgggcgccggcgcccccgtgtacctggccgccgtgctggagtacctgaccgccgagatcctggagctggccggcaacgccgccagagacaacaagaagaccagaatcatccccagacacctgcagctggccatcagaaacgacgaggagctgaacaagctgctgggcaaggtgaccatcgcccagggcggcgtgctgcccaacatccaggccgtgctgctgcccatctgcgagcacagcggccccagcagcggcaagatccccagcgacagagccgagctgggcgccggcagcgtgtgcggccacatcttccagaaggtggagtag

SEQ ID NO: 72228 - DNA, 177 bp, synthetic construct
  misc_feature 1..177: note = Description of Artificial Sequence: Synthetic coding sequence
  source 1..177: mol_type = other DNA
atgggccccctgatcaacagatgcaagaagatcctgctgcccaccaccgtgccccccgccaccatgagaatctggctgctgggcggcctgctgcccttcctgctgctgctgagcggcctgcagagacccaccgagggcagcgagctgcccgccagaaacgccagcctgatcctgtag

SEQ ID NO: 72229 - DNA, 876 bp, synthetic construct
  misc_feature 1..876: note = Description of Artificial Sequence: Synthetic coding sequence
  source 1..876: mol_type = other DNA
atggccctggccgccctgatgatcgccctgggcagcctgggcctgcacacctggcaggcccaggccgtgcccatcctgcccctgggcctggcccccgacaccttcgacgacacctacgtgggctgcgccgaggagatggaggagaaggccgcccccctgctgaaggaggagatggcccaccacgccctgctgagagagagctgggaggccgcccaggagacctgggaggacaagagaagaggcctgaccctgccccccggcttcaaggcccagaacggcatcgccatcatggtgtacaccaacagcagcaacaccctgtactgggagctgaaccaggccgtgagaaccggcggcggcagcagagagctgtacatgagacacttccccttcaaggccctgcacttctacctgatcagagccctgcagctgctgagaggcagcggcggctgcagcagaggccccggcgaggtggtgttcagaggcgtgggcagcctgagattcgagcccaagagactgggcgacagcgtgagactgggccagttcgccagcagcagcctggacaaggccgtggcccacagattcggcaacgccaccctgttcagcctgaccacctgcttcggcgcccccatccaggccttcagcgtgttccccaaggagagagaggtgctgatccccccccacgaggtgttcctggtgaccagattcagccaggacggcgcccagagcctggtgaccctgtggagctacaaccagacctgcagccacttcaactgcgcctacctgggcggcgagaagagaagaggctgcgtgagcgcccccggcgccctgggcaccggcgacctgcacatgaccaagagacacctgcagcagccctag

SEQ ID NO: 72230 - DNA, 720 bp, synthetic construct
  misc_feature 1..720: note = Description of Artificial Sequence: Synthetic coding sequence
  source 1..720: mol_type = other DNA
atggccctggccgccctgatgatcgccctgggcagcctgggcctgcacacctggcaggcccaggccgtgcccatcctgcccctgggcctggcccccgacaccttcgacgacacctacgtgggctgcgccgaggagatggaggagaaggccgcccccctgctgaaggaggagatggcccaccacgccctgctgagagagagctgggaggccgcccaggagacctgggaggacaagagaagaggcctgaccctgccccccggcttcaaggcccagaacggcatcgccatcatggtgtacaccaacagcagcaacaccctgtactgggagctgaaccaggccgtgagaaccggcggcggcagcagagagctgtacatgagacacttccccttcaaggccctgcacttctacctgatcagagccctgcagctgctgagaggcagcggcggctgcagcagaggccccggcgaggtggtgttcagaggcgtgggcagcctgagattcgagcccaagagactgggcgacagcgtgagactgggccagttcgccagcagcagcctggacaaggccgtggcccacagattcggcgagaagagaagaggctgcgtgagcgcccccggcgtgcagctgggcagccagagcgagggcgccagcagcctgcccccctggaagaccctgctgctggcccccggcgagttccagctgagcggcgtgggcccctag

SEQ ID NO: 72231 - DNA, 876 bp, synthetic construct; identical to SEQ ID NO: 72229
  misc_feature 1..876: note = Description of Artificial Sequence: Synthetic coding sequence
  source 1..876: mol_type = other DNA

SEQ ID NO: 72232 - DNA, 1401 bp, synthetic construct
  misc_feature 1..1401: note = Description of Artificial Sequence: Synthetic coding sequence
  source 1..1401: mol_type = other DNA
atggtgttcctgagcggcaacgccagcgacagcagcaactgcacccagccccccgcccccgtgaacatcagcaaggccatcctgctgggcgtgatcctgggcggcctgatcctgttcggcgtgctgggcaacatcctggtgatcctgagcgtggcctgccacagacacctgcacagcgtgacccactactacatcgtgaacctggccgtggccgacctgctgctgaccagcaccgtgctgcccttcagcgccatcttcgaggtgctgggctactgggccttcggcagagtgttctgcaacatctgggccgccgtggacgtgctgtgctgcaccgccagcatcatgggcctgtgcatcatcagcatcgacagatacatcggcgtgagctaccccctgagataccccaccatcgtgacccagagaagaggcctgatggccctgctgtgcgtgtgggccctgagcctggtgatcagcatcggccccctgttcggctggagacagcccgcccccgaggacgagaccatctgccagatcaacgaggagcccggctacgtgctgttcagcgccctgggcagcttctacctgcccctggccatcatcctggtgatgtactgcagagtgtacgtggtggccaagagagagagcagaggcctgaagagcggcctgaagaccgacaagagcgacagcgagcaggtgaccctgagaatccacagaaagaacgcccccgccggcggcagcggcatggccagcgccaagaccaagacccacttcagcgtgagactgctgaagttcagcagagagaagaaggccgccaagaccctgggcatcgtggtgggctgcttcgtgctgtgctggctgcccttcttcctggtgatgcccatcggcagcttcttccccgacttcaagcccagcgagaccgtgttcaagatcgtgttctggctgggctacctgaacagctgcatcaaccccatcatctacccctgcagcagccaggagttcaagaaggccttccagaacgtgctgagaatccagtgcctgtgcagaaagcagagcagcaagcacgccctgggctacaccctgcacccccccagccaggccgtggagggccagcacaaggacatggtgagaatccccgtgggcagcagagagaccttctacagaatcagcaagaccgacggcgtgtgcgagtggaagttcttcagcagcatgcccagaggcagcgccagaatcaccgtgagcaaggaccagagcagctgcaccaccgccagagtgagaagcaagagcttcctgcaggtgtgctgctgcgtgggccccagcacccccagcctggacaagaaccaccaggtgcccaccatcaaggtgcacaccatcagcctgagcgagaacggcgaggaggtgtag

SEQ ID NO: 72233 - DNA, 1368 bp, synthetic construct
  misc_feature 1..1368: note = Description of Artificial Sequence: Synthetic coding sequence
  source 1..1368: mol_type = other DNA
atggtgttcctgagcggcaacgccagcgacagcagcaactgcacccagccccccgcccccgtgaacatcagcaaggccatcctgctgggcgtgatcctgggcggcctgatcctgttcggcgtgctgggcaacatcctggtgatcctgagcgtggcctgccacagacacctgcacagcgtgacccactactacatcgtgaacctggccgtggccgacctgctgctgaccagcaccgtgctgcccttcagcgccatcttcgaggtgctgggctactgggccttcggcagagtgttctgcaacatctgggccgccgtggacgtgctgtgctgcaccgccagcatcatgggcctgtgcatcatcagcatcgacagatacatcggcgtgagctaccccctgagataccccaccatcgtgacccagagaagaggcctgatggccctgctgtgcgtgtgggccctgagcctggtgatcagcatcggccccctgttcggctggagacagcccgcccccgaggacgagaccatctgccagatcaacgaggagcccggctacgtgctgttcagcgccctgggcagcttctacctgcccctggccatcatcctggtgatgtactgcagagtgtacgtggtggccaagagagagagcagaggcctgaagagcggcctgaagaccgacaagagcgacagcgagcaggtgaccctgagaatccacagaaagaacgcccccgccggcggcagcggcatggccagcgccaagaccaagacccacttcagcgtgagactgctgaagttcagcagagagaagaaggccgccaagaccctgggcatcgtggtgggctgcttcgtgctgtgctggctgcccttcttcctggtgatgcccatcggcagcttcttccccgacttcaagcccagcgagaccgtgttcaagatcgtgttctggctgggctacctgaacagctgcatcaaccccatcatctacccctgcagcagccaggagttcaagaaggccttccagaacgtgctgagaatccagtgcctgtgcagaaagcagagcagcaagcacgccctgggctacaccctgcacccccccagccaggccgtggagggccagcacaaggacatggtgagaatccccgtgggcagcagagagaccttctacagaatcagcaagaccgacggcgtgtgcgagtggaagttcttcagcagcatgcccagaggcagcgccagaatcaccgtgagcaaggaccagagcagctgcaccaccgccagaagaggcatggactgcagatacttcaccaagaactgcagagagcacatcaagcacgtgaacttcatgatgcccccctggagaaagggcagcgagtgctag

SEQ ID NO: 72234 - DNA, 975 bp, synthetic construct
  misc_feature 1..975: note = Description of Artificial Sequence: Synthetic coding sequence
  source 1..975: mol_type = other DNA
atggtgttcctgagcggcaacgccagcgacagcagcaactgcacccagccccccgcccccgtgaacatcagcaaggccatcctgctgggcgtgatcctgggcggcctgatcctgttcggcgtgctgggcaacatcctggtgatcctgagcgtggcctgccacagacacctgcacagcgtgacccactactacatcgtgaacctggccgtggccgacctgctgctgaccagcaccgtgctgcccttcagcgccatcttcgaggtgctgggctactgggccttcggcagagtgttctgcaacatctgggccgccgtggacgtgctgtgctgcaccgccagcatcatgggcctgtgcatcatcagcatcgacagatacatcggcgtgagctaccccctgagataccccaccatcgtgacccagagaagaggcctgatggccctgctgtgcgtgtgggccctgagcctggtgatcagcatcggccccctgttcggctggagacagcccgcccccgaggacgagaccatctgccagatcaacgaggagcccggctacgtgctgttcagcgccctgggcagcttctacctgcccctggccatcatcctggtgatgtactgcagagtgtacgtggtggccaagagagagagcagaggcctgaagagcggcctgaagaccgacaagagcgacagcgagcaggtgaccctgagaatccacagaaagaacgcccccgccggcggcagcggcatggccagcgccaagaccaagacccacttcagcgtgagactgctgaagttcagcagagagaagaaggccgccaagaccctgggcatcgtggtgggctgcttcgtgctgtgctggctgcccttcttcctggtgatgcccatcggcacctacatcctgaagtacgacgtgctgttctggagaaagggcctgagcgtgtgcaccagactgagagagagaaaggagatcaagaactag

SEQ ID NO: 72235 - DNA, 1029 bp, synthetic construct
  misc_feature 1..1029: note = Description of Artificial Sequence: Synthetic coding sequence
  source 1..1029: mol_type = other DNA
atggtgttcctgagcggcaacgccagcgacagcagcaactgcacccagccccccgcccccgtgaacatcagcaaggccatcctgctgggcgtgatcctgggcggcctgatcctgttcggcgtgctgggcaacatcctggtgatcctgagcgtggcctgccacagacacctgcacagcgtgacccactactacatcgtgaacctggccgtggccgacctgctgctgaccagcaccgtgctgcccttcagcgccatcttcgaggtgctgggctactgggccttcggcagagtgttctgcaacatctgggccgccgtggacgtgctgtgctgcaccgccagcatcatgggcctgtgcatcatcagcatcgacagatacatcggcgtgagctaccccctgagataccccaccatcgtgacccagagaagaggcctgatggccctgctgtgcgtgtgggccctgagcctggtgatcagcatcggccccctgttcggctggagacagcccgcccccgaggacgagaccatctgccagatcaacgaggagcccggctacgtgctgttcagcgccctgggcagcttctacctgcccctggccatcatcctggtgatgtactgcagagtgtacgtggtggccaagagagagagcagaggcctgaagagcggcctgaagaccgacaagagcgacagcgagcaggtgaccctgagaatccacagaaagaacgcccccgccggcggcagcggcatggccagcgccaagaccaagacccacttcagcgtgagactgctgaagttcagcagagagaagaaggccgccaagaccctgggcatcgtggtgggctgcttcgtgctgtgctggctgcccttcttcctggtgatgcccatcgacgaggagaccgaggcccaggagggcaagaacgacagccccagcttcaagcagcccgtgcaccacgccgccgtgctgggcctggaggtgatggagaaggagaacctggagggcgtgagcagaaaggacacctgcggcgtgtggtag

SEQ ID NO: 72236 - DNA, 1401 bp, synthetic construct; identical to SEQ ID NO: 72232
  misc_feature 1..1401: note = Description of Artificial Sequence: Synthetic coding sequence
  source 1..1401: mol_type = other DNA

SEQ ID NO: 72237 - DNA, 1119 bp, synthetic construct
  misc_feature 1..1119: note = Description of Artificial Sequence: Synthetic coding sequence
  source 1..1119: mol_type = other DNA
atggtgttcctgagcggcaacgccagcgacagcagcaactgcacccagccccccgcccccgtgaacatcagcaaggccatcctgctgggcgtgatcctgggcggcctgatcctgttcggcgtgctgggcaacatcctggtgatcctgagcgtggcctgccacagacacctgcacagcgtgacccactactacatcgtgaacctggccgtggccgacctgctgctgaccagcaccgtgctgcccttcagcgccatcttcgaggtgctgggctactgggccttcggcagagtgttctgcaacatctgggccgccgtggacgtgctgtgctgcaccgccagcatcatgggcctgtgcatcatcagcatcgacagatacatcggcgtgagctaccccctgagataccccaccatcgtgacccagagaagaggcctgatggccctgctgtgcgtgtgggccctgagcctggtgatcagcatcggccccctgttcggctggagacagcccgcccccgaggacgagaccatctgccagatcaacgaggagcccggctacgtgctgttcagcgccctgggcagcttctacctgcccctggccatcatcctggtgatgtactgcagagtgtacgtggtggccaagagagagagcagaggcctgaagagcggcctgaagaccgacaagagcgacagcgagcaggtgaccctgagaatccacagaaagaacgcccccgccggcggcagcggcatggccagcgccaagaccaagacccacttcagcgtgagactgctgaagttcagcagagagaagaaggccgccaagaccctgggcatcgtggtgggctgcttcgtgctgtgctggctgcccttcttcctggtgatgcccatcggcacccacacccacgacatgaagcccgccagcagacccagactgctgagcctgctgcccaaggagggcgagcacgagacccaccactggagctgcgaccccctgagcctggagagcacccccggcgcccaggagccctgcctgaccctgggcttcaccagcctgagcagcatccacctgaccaaggcccagatccagcacgtgaccgtgaccgacaccggcaagaccgtgacctag

SEQ ID NO: 72238 - DNA, 1290 bp, synthetic construct
  misc_feature 1..1290: note = Description of Artificial Sequence: Synthetic coding sequence
  source 1..1290: mol_type = other DNA
atggtgttcctgagcggcaacgccagcgacagcagcaactgcacccagccccccgcccccgtgaacatcagcaaggccatcctgctgggcgtgatcctgggcggcctgatcctgttcggcgtgctgggcaacatcctggtgatcctgagcgtggcctgccacagacacctgcacagcgtgacccactactacatcgtgaacctggccgtggccgacctgctgctgaccagcaccgtgctgcccttcagcgccatcttcgaggtgctgggctactgggccttcggcagagtgttctgcaacatctgggccgccgtggacgtgctgtgctgcaccgccagcatcatgggcctgtgcatcatcagcatcgacagatacatcggcgtgagctaccccctgagataccccaccatcgtgacccagagaagaggcctgatggccctgctgtgcgtgtgggccctgagcctggtgatcagcatcggccccctgttcggctggagacagcccgcccccgaggacgagaccatctgccagatcaacgaggagcccggctacgtgctgttcagcgccctgggcagcttctacctgcccctggccatcatcctggtgatgtactgcagagtgtacgtggtggccaagagagagagcagaggcctgaagagcggcctgaagaccgacaagagcgacagcgagcaggtgaccctgagaatccacagaaagaacgcccccgccggcggcagcggcatggccagcgccaagaccaagacccacttcagcgtgagactgctgaagttcagcagagagaagaaggccgccaagaccctgggcatcgtggtgggctgcttcgtgctgtgctggctgcccttcttcctggtgatgcccatcggcagcttcttccccgacttcaagcccagcgagaccgtgttcaagatcgtgttctggctgggctacctgaacagctgcatcaaccccatcatctacccctgcagcagccaggagttcaagaaggccttccagaacgtgctgagaatccagtgcctgtgcagaaagcagagcagcaagcacgccctgggctacaccctgcacccccccagccaggccgtggagggccagcacaaggacatggtgagaatccccgtgggcagcagagagaccttctacagaatcagcaagaccgacggcgtgtgcgagtggaagttcttcagcagcatgcccagaggcagcgccagaatcaccgtgagcaaggaccagagcagctgcaccaccgccagaggccacacccccatgacctag

SEQ ID NO: 72239 - DNA, 1428 bp, synthetic construct
  misc_feature 1..1428: note = Description of Artificial Sequence: Synthetic coding sequence
  source 1..1428: mol_type = other DNA
atggtgttcctgagcggcaacgccagcgacagcagcaactgcacccagccccccgcccccgtgaacatcagcaaggccatcctgctgggcgtgatcctgggcggcctgatcctgttcggcgtgctgggcaacatcctggtgatcctgagcgtggcctgccacagacacctgcacagcgtgacccactactacatcgtgaacctggccgtggccgacctgctgctgaccagcaccgtgctgcccttcagcgccatcttcgaggtgctgggctactgggccttcggcagagtgttctgcaacatctgggccgccgtggacgtgctgtgctgcaccgccagcatcatgggcctgtgcatcatcagcatcgacagatacatcggcgtgagctaccccctgagataccccaccatcgtgacccagagaagaggcctgatggccctgctgtgcgtgtgggccctgagcctggtgatcagcatcggccccctgttcggctggagacagcccgcccccgaggacgagaccatctgccagatcaacgaggagcccggctacgtgctgttcagcgccctgggcagcttctacctgcccctggccatcatcctggtgatgtactgcagagtgtacgtggtggccaagagagagagcagaggcctgaagagcggcctgaagaccgacaagagcgacagcgagcaggtgaccctgagaatccacagaaagaacgcccccgccggcggcagcggcatggccagcgccaagaccaagacccacttcagcgtgagactgctgaagttcagcagagagaagaaggccgccaagaccctgggcatcgtggtgggctgcttcgtgctgtgctggctgcccttcttcctggtgatgcccatcggcagcttcttccccgacttcaagcccagcgagaccgtgttcaagatcgtgttctggctgggctacctgaacagctgcatcaaccccatcatctacccctgcagcagccaggagttcaagaaggccttccagaacgtgctgagaatccagtgcctgtgcagaaagcagagcagcaagcacgccctgggctacaccctgcacccccccagccaggccgtggagggccagcacaaggacatggtgagaatccccgtgggcagcagagagaccttctacagaatcagcaagaccgacggcgtgtgcgagtggaagttcttcagcagcatgcccagaggcagcgccagaatcaccgtgagcaaggaccagagcagctgcaccaccgccagaaccaagagcagaagcgtgaccagactggagtgcagcggcatgatcctggcccactgcaacctgagactgcccggcagcagagacagccccgccagcgccagccaggccgccggcaccaccggcatgtgccaccaggccgacgccaccagacccagctag

SEQ ID NO: 72240 - DNA, 1113 bp, synthetic construct
  misc_feature 1..1113: note = Description of Artificial Sequence: Synthetic coding sequence
  source 1..1113: mol_type = other DNA
atggtgttcctgagcggcaacgccagcgacagcagcaactgcacccagccccccgcccccgtgaacatcagcaaggccatcctgctgggcgtgatcctgggcggcctgatcctgttcggcgtgctgggcaacatcctggtgatcctgagcgtggcctgccacagacacctgcacagcgtgacccactactacatcgtgaacctggccgtggccgacctgctgctgaccagcaccgtgctgcccttcagcgccatcttcgaggtgctgggctactgggccttcggcagagtgttctgcaacatctgggccgccgtggacgtgctgtgctgcaccgccagcatcatgggcctgtgcatcatcagcatcgacagatacatcggcgtgagctaccccctgagataccccaccatcgtgacccagagaagaggcctgatggccctgctgtgcgtgtgggccctgagcctggtgatcagcatcggccccctgttcggctggagacagcccgcccccgaggacgagaccatctgccagatcaacgaggagcccggctacgtgctgttcagcgccctgggcagcttctacctgcccctggccatcatcctggtgatgtactgcagagtgtacgtggtggccaagagagagagcagaggcctgaagagcggcctgaagaccgacaagagcgacagcgagcaggtgaccctgagaatccacagaaagaacgcccccgccggcggcagcggcatggccagcgccaagaccaagacccacttcagcgtgagactgctgaagttcagcagagagaagaaggccgccaagaccctgggcatcgtggtgggctgcttcgtgctgtgctggctgcccttcttcctggtgatgcccatcgacgaggtgagcctgtgccaccaggccggcgtgcagtggcacgacctgggcagcctgcagccccccccccccggcttcaagagattcagctgcctgagcctgcccagcagctgggactacagagacgtgccccccggcagaagacaccaggcccagctgatcttcgtgttcctggtggagaccggcttccaccacgtgggccaggacgacctggacctgctgaccagctag

SEQ ID NO: 72241 - DNA, 1284 bp, synthetic construct
  misc_feature 1..1284: note = Description of Artificial Sequence: Synthetic coding sequence
  source 1..1284: mol_type = other DNA
atggtgttcctgagcggcaacgccagcgacagcagcaactgcacccagccccccgcccccgtgaacatcagcaaggccatcctgctgggcgtgatcctgggcggcctgatcctgttcggcgtgctgggcaacatcctggtgatcctgagcgtggcctgccacagacacctgcacagcgtgacccactactacatcgtgaacctggccgtggccgacctgctgctgaccagcaccgtgctgcccttcagcgccatcttcgaggtgctgggctactgggccttcggcagagtgttctgcaacatctgggccgccgtggacgtgctgtgctgcaccgccagcatcatgggcctgtgcatcatcagcatcgacagatacatcggcgtgagctaccccctgagataccccaccatcgtgacccagagaagaggcctgatggccctgctgtgcgtgtgggccctgagcctggtgatcagcatcggccccctgttcggctggagacagcccgcccccgaggacgagaccatctgccagatcaacgaggagcccggctacgtgctgttcagcgccctgggcagcttctacctgcccctggccatcatcctggtgatgtactgcagagtgtacgtggtggccaagagagagagcagaggcctgaagagcggcctgaagaccgacaagagcgacagcgagcaggtgaccctgagaatccacagaaagaacgcccccgccggcggcagcggcatggccagcgccaagaccaagacccacttcagcgtgagactgctgaagttcagcagagagaagaaggccgccaagaccctgggcatcgtggtgggctgcttcgtgctgtgctggctgcccttcttcctggtgatgcccatcggcagcttcttccccgacttcaagcccagcgagaccgtgttcaagatcgtgttctggctgggctacctgaacagctgcatcaaccccatcatctacccctgcagcagccaggagttcaagaaggccttccagaacgtgctgagaatccagtgcctgtgcagaaagcagagcagcaagcacgccctgggctacaccctgcacccccccagccaggccgtggagggccagcacaaggacatggtgagaatccccgtgggcagcagagagaccttctacagaatcagcaagaccgacggcgtgtgcgagtggaagttcttcagcagcatgcccagaggcagcgccagaatcaccgtgagcaaggaccagagcagctgcaccaccgccagaagcagcggcttctag

SEQ ID NO: 72242 - DNA, 1563 bp, synthetic construct
  misc_feature 1..1563: note = Description of Artificial Sequence: Synthetic coding sequence
  source 1..1563: mol_type = other DNA
atgaaccccgacctggacaccggccacaacaccagcgcccccgcccactggggcgagctgaagaacgccaacttcaccggccccaaccagaccagcagcaacagcaccctgccccagctggacatcaccagagccatcagcgtgggcctggtgctgggcgccttcatcctgttcgccatcgtgggcaacatcctggtgatcctgagcgtggcctgcaacagacacctgagaacccccaccaactacttcatcgtgaacctggccatggccgacctgctgctgagcttcaccgtgctgcccttcagcgccgccctggaggtgctgggctactgggtgctgggcagaatcttctgcgacatctgggccgccgtggacgtgctgtgctgcaccgccagcatcctgagcctgtgcgccatcagcatcgacagatacatcggcgtgagatacagcctgcagtaccccaccctggtgaccagaagaaaggccatcctggccctgctgagcgtgtgggtgctgagcaccgtgatcagcatcggccccctgctgggctggaaggagcccgcccccaacgacgacaaggagtgcggcgtgaccgaggagcccttctacgccctgttcagcagcctgggcagcttctacatccccctggccgtgatcctggtgatgtactgcagagtgtacatcgtggccaagagaaccaccaagaacctggaggccggcgtgatgaaggagatgagcaacagcaaggagctgaccctgagaatccacagcaagaacttccacgaggacaccctgagcagcaccaaggccaagggccacaaccccagaagcagcatcgccgtgaagctgttcaagttcagcagagagaagaaggccgccaagaccctgggcatcgtggtgggcatgttcatcctgtgctggctgcccttcttcatcgccctgcccctgggcagcctgttcagcaccctgaagccccccgacgccgtgttcaaggtggtgttctggctgggctacttcaacagctgcctgaaccccatcatctacccctgcagcagcaaggagttcaagagagccttcgtgagaatcctgggctgccagtgcagaggcagaggcagaagaagaagaagaagaagaagaagactgggcggctgcgcctacacctacagaccctggaccagaggcggcagcctggagagaagccagagcagaaaggacagcctggacgacagcggcagctgcctgagcggcagccagagaaccctgcccagcgccagccccagccccggctacctgggcagaggcgcccccccccccgtggagctgtgcgccttccccgagtggaaggcccccggcgccctgctgagcctgcccgcccccgagccccccggcagaagaggcagacacgacagcggccccctgttcaccttcaagctgctgaccgagcccgagagccccggcaccgacggcggcgccagcaacggcggctgcgaggccgccgccgacgtggccaacggccagcccggcttcaagagcaacatgcccctggcccccggccagttctag

SEQ ID NO: 72243 - DNA, 1719 bp, synthetic construct
  misc_feature 1..1719: note = Description of Artificial Sequence: Synthetic coding sequence
  source 1..1719: mol_type = other DNA
atgaccttcagagacctgctgagcgtgagcttcgagggccccagacccgacagcagcgccggcggcagcagcgccggcggcggcggcggcagcgccggcggcgccgcccccagcgagggccccgccgtgggcggcgtgcccggcggcgccggcggcggcggcggcgtggtgggcgccggcagcggcgaggacaacagaagcagcgccggcgagcccggcagcgccggcgccggcggcgacgtgaacggcaccgccgccgtgggcggcctggtggtgagcgcccagggcgtgggcgtgggcgtgttcctggccgccttcatcctgatggccgtggccggcaacctgctggtgatcctgagcgtggcctgcaacagacacctgcagaccgtgaccaactacttcatcgtgaacctggccgtggccgacctgctgctgagcgccaccgtgctgcccttcagcgccaccatggaggtgctgggcttctgggccttcggcagagccttctgcgacgtgtgggccgccgtggacgtgctgtgctgcaccgccagcatcctgagcctgtgcaccatcagcgtggacagatacgtgggcgtgagacacagcctgaagtaccccgccatcatgaccgagagaaaggccgccgccatcctggccctgctgtgggtggtggccctggtggtgagcgtgggccccctgctgggctggaaggagcccgtgccccccgacgagagattctgcggcatcaccgaggaggccggctacgccgtgttcagcagcgtgtgcagcttctacctgcccatggccgtgatcgtggtgatgtactgcagagtgtacgtggtggccagaagcaccaccagaagcctggaggccggcgtgaagagagagagaggcaaggccagcgaggtggtgctgagaatccactgcagaggcgccgccaccggcgccgacggcgcccacggcatgagaagcgccaagggccacaccttcagaagcagcctgagcgtgagactgctgaagttcagcagagagaagaaggccgccaagaccctggccatcgtggtgggcgtgttcgtgctgtgctggttccccttcttcttcgtgctgcccctgggcagcctgttcccccagctgaagcccagcgagggcgtgttcaaggtgatcttctggctgggctacttcaacagctgcgtgaaccccctgatctacccctgcagcagcagagagttcaagagagccttcctgagactgctgagatgccagtgcagaagaagaagaagaagaagacccctgtggagagtgtacggccaccactggagagccagcaccagcggcctgagacaggactgcgcccccagcagcggcgacgccccccccggcgcccccctggccctgaccgccctgcccgaccccgaccccgagccccccggcacccccgagatgcaggcccccgtggccagcagaagaaagccccccagcgccttcagagagtggagactgctgggccccttcagaagacccaccacccagctgagagccaaggtgagcagcctgagccacaagatcagagccggcggcgcccagagagccgaggccgcctgcgcccagagaagcgaggtggaggccgtgagcctgggcgtgccccacgaggtggccgagggcgccacctgccaggcctacgagctggccgactacagcaacctgagagagaccgacatctag

SEQ ID NO: 72244 - DNA, 1344 bp, synthetic construct
  misc_feature 1..1344: note = Description of Artificial Sequence: Synthetic coding sequence
  source 1..1344: mol_type = other DNA
atggaccaccaggacccctacagcgtgcaggccaccgccgccatcgccgccgccatcaccttcctgatcctgttcaccatcttcggcaacgccctggtgatcctggccgtgctgaccagcagaagcctgagagccccccagaacctgttcctggtgagcctggccgccgccgacatcctggtggccaccctgatcatccccttcagcctggccaacgagctgctgggctactggtacttcagaagaacctggtgcgaggtgtacctggccctggacgtgctgttctgcaccagcagcatcgtgcacctgtgcgccatcagcctggacagatactgggccgtgagcagagccctggagtacaacagcaagagaacccccagaagaatcaagtgcatcatcctgaccgtgtggctgatcgccgccgtgatcagcctgccccccctgatctacaagggcgaccagggcccccagcccagaggcagaccccagtgcaagctgaaccaggaggcctggtacatcctggccagcagcatcggcagcttcttcgccccctgcctgatcatgatcctggtgtacctgagaatctacctgatcgccaagagaagcaacagaagaggccccagagccaagggcggccccggccagggcgagagcaagcagcccagacccgaccacggcggcgccctggccagcgccaagctgcccgccctggccagcgtggccagcgccagagaggtgaacggccacagcaagagcaccggcgagaaggaggagggcgagacccccgaggacaccggcaccagagccctgccccccagctgggccgccctgcccaacagcggccagggccagaaggagggcgtgtgcggcgccagccccgaggacgaggccgaggaggaggaggaggaggaggaggagtgcgagccccaggccgtgcccgtgagccccgccagcgcctgcagcccccccctgcagcagccccagggcagcagagtgctggccaccctgagaggccaggtgctgctgggcagaggcgtgggcgccatcggcggccagtggtggagaagaagagcccagctgaccagagagaagagattcaccttcgtgctggccgtggtgatcggcgtgttcgtgctgtgctggttccccttcttcttcagctacagcctgggcgccatctgccccaagcactgcaaggtgccccacggcctgttccagttcttcttctggatcggctactgcaacagcagcctgaaccccgtgatctacaccatcttcaaccaggacttcagaagagccttcagaagaatcctgtgcagaccctggacccagaccgcctggtag

SEQ ID NO: 72245 - DNA, 1389 bp, synthetic construct
  misc_feature 1..1389: note = Description of Artificial Sequence: Synthetic coding sequence
  source 1..1389: mol_type = other DNA
atggccagccccgccctggccgccgccctggccgtggccgccgccgccggccccaacgccagcggcgccggcgagagaggcagcggcggcgtggccaacgccagcggcgccagctggggcccccccagaggccagtacagcgccggcgccgtggccggcctggccgccgtggtgggcttcctgatcgtgttcaccgtggtgggcaacgtgctggtggtgatcgccgtgctgaccagcagagccctgagagccccccagaacctgttcctggtgagcctggccagcgccgacatcctggtggccaccctggtgatgcccttcagcctggccaacgagctgatggcctactggtacttcggccaggtgtggtgcggcgtgtacctggccctggacgtgctgttctgcaccagcagcatcgtgcacctgtgcgccatcagcctggacagatactggagcgtgacccaggccgtggagtacaacctgaagagaacccccagaagagtgaaggccaccatcgtggccgtgtggctgatcagcgccgtgatcagcttcccccccctggtgagcctgtacagacagcccgacggcgccgcctacccccagtgcggcctgaacgacgagacctggtacatcctgagcagctgcatcggcagcttcttcgccccctgcctgatcatgggcctggtgtacgccagaatctacagagtggccaagctgagaaccagaaccctgagcgagaagagagcccccgtgggccccgacggcgccagccccaccaccgagaacggcctgggcgccgccgccggcgccggcgagaacggccactgcgcccccccccccgccgacgtggagcccgacgagagcagcgccgccgccgagagaagaagaagaagaggcgccctgagaagaggcggcagaagaagagccggcgccgagggcggcgccggcggcgccgacggccagggcgccggccccggcgccgccgagagcggcgccctgaccgccagcagaagccccggccccggcggcagactgagcagagccagcagcagaagcgtggagttcttcctgagcagaagaagaagagccagaagcagcgtgtgcagaagaaaggtggcccaggccagagagaagagattcaccttcgtgctggccgtggtgatgggcgtgttcgtgctgtgctggttccccttcttcttcagctacagcctgtacggcatctgcagagaggcctgccaggtgcccggccccctgttcaagttcttcttctggatcggctactgcaacagcagcctgaaccccgtgatctacaccgtgttcaaccaggacttcagaagaagcttcaagcacatcctgttcagaagaagaagaagaggcttcagacagtag

SEQ ID NO: 72246 - DNA, 2070 bp, synthetic construct
  misc_feature 1..2070: note = Description of Artificial Sequence: Synthetic coding sequence
  source 1..2070: mol_type = other DNA
atggccgacctggaggccgtgctggccgacgtgagctacctgatggccatggagaagagcaaggccacccccgccgccagagccagcaagaagatcctgctgcccgagcccagcatcagaagcgtgatgcagaagtacctggaggacagaggcgaggtgaccttcgagaagatcttcagccagaagctgggctacctgctgttcagagacttctgcctgaaccacctggaggaggccagacccctggtggagttctacgaggagatcaagaagtacgagaagctggagaccgaggaggagagagtggccagaagcagagagatcttcgacagctacatcatgaaggagctgctggcctgcagccaccccttcagcaagagcgccaccgagcacgtgcagggccacctgggcaagaagcaggtgccccccgacctgttccagccctacatcgaggagatctgccagaacctgagaggcgacgtgttccagaagttcatcgagagcgacaagttcaccagattctgccagtggaagaacgtggagctgaacatccacctgaccatgaacgacttcagcgtgcacagaatcatcggcagaggcggcttcggcgaggtgtacggctgcagaaaggccgacaccggcaagatgtacgccatgaagtgcctggacaagaagagaatcaagatgaagcagggcgagaccctggccctgaacgagagaatcatgctgagcctggtgagcaccggcgactgccccttcatcgtgtgcatgagctacgccttccacacccccgacaagctgagcttcatcctggacctgatgaacggcggcgacctgcactaccacctgagccagcacggcgtgttcagcgaggccgacatgagattctacgccgccgagatcatcctgggcctggagcacatgcacaacagattcgtggtgtacagagacctgaagcccgccaacatcctgctggacgagcacggccacgtgagaatcagcgacctgggcctggcctgcgacttcagcaagaagaagccccacgccagcgtgggcacccacggctacatggcccccgaggtgctgcagaagggcgtggcctacgacagcagcgccgactggttcagcctgggctgcatgctgttcaagctgctgagaggccacagccccttcagacagcacaagaccaaggacaagcacgagatcgacagaatgaccctgaccatggccgtggagctgcccgacagcttcagccccgagctgagaagcctgctggagggcctgctgcagagagacgtgaacagaagactgggctgcctgggcagaggcgcccaggaggtgaaggagagccccttcttcagaagcctggactggcagatggtgttcctgcagaagtaccccccccccctgatcccccccagaggcgaggtgaacgccgccgacgccttcgacatcggcagcttcgacgaggaggacaccaagggcatcaagctgctggacagcgaccaggagctgtacagaaacttccccctgaccatcagcgagagatggcagcaggaggtggccgagaccgtgttcgacaccatcaacgccgagaccgacagactggaggccagaaagaaggccaagaacaagcagctgggccacgaggaggactacgccctgggcaaggactgcatcatgcacggctacatgagcaagatgggcaaccccttcctgacccagtggcagagaagatacttctacctgttccccaacagactggagtggagaggcgagggcgaggccccccagagcctgctgaccatggaggagatccagagcgtggaggagacccagatcaaggagagaaagtgcctgctgctgaagatcagaggcggcaagcagttcatcctgcagtgcgacagcgaccccgagctggtgcagtggaagaaggagctgagagacgcctacagagaggcccagcagctggtgcagagagtgcccaagatgaagaacaagcccagaagccccgtggtggagctgagcaaggtgcccctggtgcagagaggcagcgccaacggcctgtag

SEQ ID NO: 72247 - DNA, 2067 bp, synthetic construct
  misc_feature 1..2067: note = Description of Artificial Sequence: Synthetic coding sequence
  source 1..2067: mol_type = other DNA
atggccgacctggaggccgtgctggccgacgtgagctacctgatggccatggagaagagcaaggccacccccgccgccagagccagcaagagaatcgtgctgcccgagcccagcatcagaagcgtgatgcagaagtacctggccgagagaaacgagatcaccttcgacaagatcttcaaccagaagatcggcttcctgctgttcaaggacttctgcctgaacgagatcaacgaggccgtgccccaggtgaagttctacgaggagatcaaggagtacgagaagctggacaacgaggaggacagactgtgcagaagcagacagatctacgacgcctacatcatgaaggagctgctgagctgcagccaccccttcagcaagcaggccgtggagcacgtgcagagccacctgagcaagaagcaggtgaccagcaccctgttccagccctacatcgaggagatctgcgagagcctgagaggcgacatcttccagaagttcatggagagcgacaagttcaccagattctgccagtggaagaacgtggagctgaacatccacctgaccatgaacgagttcagcgtgcacagaatcatcggcagaggcggcttcggcgaggtgtacggctgcagaaaggccgacaccggcaagatgtacgccatgaagtgcctggacaagaagagaatcaagatgaagcagggcgagaccctggccctgaacgagagaatcatgctgagcctggtgagcaccggcgactgccccttcatcgtgtgcatgacctacgccttccacacccccgacaagctgtgcttcatcctggacctgatgaacggcggcgacctgcactaccacctgagccagcacggcgtgttcagcgagaaggagatgagattctacgccaccgagatcatcctgggcctggagcacatgcacaacagattcgtggtgtacagagacctgaagcccgccaacatcctgctggacgagcacggccacgccagaatcagcgacctgggcctggcctgcgacttcagcaagaagaagccccacgccagcgtgggcacccacggctacatggcccccgaggtgctgcagaagggcaccgcctacgacagcagcgccgactggttcagcctgggctgcatgctgttcaagctgctgagaggccacagccccttcagacagcacaagaccaaggacaagcacgagatcgacagaatgaccctgaccgtgaacgtggagctgcccgacaccttcagccccgagctgaagagcctgctggagggcctgctgcagagagacgtgagcaagagactgggctgccacggcggcggcagccaggaggtgaaggagcacagcttcttcaagggcgtggactggcagcacgtgtacctgcagaagtaccccccccccctgatcccccccagaggcgaggtgaacgccgccgacgccttcgacatcggcagcttcgacgaggaggacaccaagggcatcaagctgctggactgcgaccaggagctgtacaagaacttccccctggtgatcagcgagagatggcagcaggaggtgaccgagaccgtgtacgaggccgtgaacgccgacaccgacaagatcgaggccagaaagagagccaagaacaagcagctgggccacgaggaggactacgccctgggcaaggactgcatcatgcacggctacatgctgaagctgggcaaccccttcctgacccagtggcagagaagatacttctacctgttccccaacagactggagtggagaggcgagggcgagagcagacagaacctgctgaccatggagcagatcctgagcgtggaggagacccagatcaaggacaagaagtgcatcctgttcagaatcaagggcggcaagcagttcgtgctgcagtgcgagagcgaccccgagttcgtgcagtggaagaaggagctgaacgagaccttcaaggaggcccagagactgctgagaagagcccccaagttcctgaacaagcccagaagcggcaccgtggagctgcccaagcccagcctgtgccacagaaacagcaacggcctgtag

SEQ ID NO: 72248 - DNA, 1164 bp, synthetic construct
  misc_feature 1..1164: note = Description of Artificial Sequence: Synthetic coding sequence
  source 1..1164: mol_type = other DNA
atggccgacctggaggccgtgctggccgacgtgagctacctgatggccatggagaagagcaaggccacccccgccgccagagccagcaagagaatcgtgctgcccgagcccagcatcagaagcgtgatgcagaagtacctggccgagagaaacgagatcaccttcgacaagatcttcaaccagaagatcggcttcctgctgttcaaggacttctgcctgaacgagatcaacgaggccgtgccccaggtgaagttctacgaggagatcaaggagtacgagaagctggacaacgaggaggacagactgtgcagaagcagacagatctacgacgcctacatcatgaaggagctgctgagctgcagccaccccttcagcaagcaggccgtggagcacgtgcagagccacctgagcaagaagcaggtgaccagcaccctgttccagccctacatcgaggagatctgcgagagcctgagaggcgacatcttccagaagttcatggagagcgacaagttcaccagattctgccagtggaagaacgtggagctgaacatccacctgaccatgaacgagttcagcgtgcacagaatcatcggcagaggcggcttcggcgaggtgtacggctgcagaaaggccgacaccggcaagatgtacgccatgaagtgcctggacaagaagagaatcaagatgaagcagggcgagaccctggccctgaacgagagaatcatgctgagcctggtgagcaccggcgactgccccttcatcgtgtgcatgacctacgccttccacacccccgacaagctgtgcttcatcctggacctgatgaacggcggcgacctgcactaccacctgagccagcacggcgtgttcagcgagaaggagatgagattctacgccaccgagatcatcctgggcctggagcacatgcacaacagattcgtggtgtacagagacctgaagcccgccaacatcctgctggacgagcacggccacgccagaatcagcgacctgggcctggcctgcgacttcagcaagaagaagccccacgccagcgtgggcacccacggctacatggcccccgaggtgctgcagaagggcaccgcctacgacagcagcgccgactggttcagcctgggctgcatgctgttcaagctgctgagaggctag

SEQ ID NO: 72249 - DNA, 1434 bp, synthetic construct
  misc_feature 1..1434: note = Description of Artificial Sequence: Synthetic coding sequence
  source 1..1434: mol_type = other DNA
atgggcgccggcgtgctggtgctgggcgccagcgagcccggcaacctgagcagcgccgcccccctgcccgacggcgccgccaccgccgccagactgctggtgcccgccagcccccccgccagcctgctgccccccgccagcgagagccccgagcccctgagccagcagtggaccgccggcatgggcctgctgatggccctgatcgtgctgctgatcgtggccggcaacgtgctggtgatcgtggccatcgccaagacccccagactgcagaccctgaccaacctgttcatcatgagcctggccagcgccgacctggtgatgggcctgctggtggtgcccttcggcgccaccatcgtggtgtggggcagatgggagtacggcagcttcttctgcgagctgtggaccagcgtggacgtgctgtgcgtgaccgccagcatcgagaccctgtgcgtgatcgccctggacagatacctggccatcaccagccccttcagataccagagcctgctgaccagagccagagccagaggcctggtgtgcaccgtgtgggccatcagcgccctggtgagcttcctgcccatcctgatgcactggtggagagccgagagcgacgaggccagaagatgctacaacgaccccaagtgctgcgacttcgtgaccaacagagcctacgccatcgccagcagcgtggtgagcttctacgtgcccctgtgcatcatggccttcgtgtacctgagagtgttcagagaggcccagaagcaggtgaagaagatcgacagctgcgagagaagattcctgggcggccccgccagaccccccagccccagccccagccccgtgcccgcccccgcccccccccccggcccccccagacccgccgccgccgccgccaccgcccccctggccaacggcagagccggcaagagaagacccagcagactggtggccctgagagagcagaaggccctgaagaccctgggcatcatcatgggcgtgttcaccctgtgctggctgcccttcttcctggccaacgtggtgaaggccttccacagagagctggtgcccgacagactgttcgtgttcttcaactggctgggctacgccaacagcgccttcaaccccatcatctactgcagaagccccgacttcagaaaggccttccagggcctgctgtgctgcgccagaagagccgccagaagaagacacgccacccacggcgacagacccagagccagcggctgcctggccagacccggccccccccccagccccggcgccgccagcgacgacgacgacgacgacgtggtgggcgccaccccccccgccagactgctggagccctgggccggctgcaacggcggcgccgccgccgacagcgacagcagcctggacgagccctgcagacccggcttcgccagcgagagcaaggtgtag

SEQ ID NO: 72250 - DNA, 1242 bp, synthetic construct
  misc_feature 1..1242: note = Description of Artificial Sequence: Synthetic coding sequence
  source 1..1242: mol_type = other DNA
atgggccagcccggcaacggcagcgccttcctgctggcccccaacggcagccacgcccccgaccacgacgtgacccaggagagagacgaggtgtgggtggtgggcatgggcatcgtgatgagcctgatcgtgctggccatcgtgttcggcaacgtgctggtgatcaccgccatcgccaagttcgagagactgcagaccgtgaccaactacttcatcaccagcctggcctgcgccgacctggtgatgggcctggccgtggtgcccttcggcgccgcccacatcctgatgaagatgtggaccttcggcaacttctggtgcgagttctggaccagcatcgacgtgctgtgcgtgaccgccagcatcgagaccctgtgcgtgatcgccgtggacagatacttcgccatcaccagccccttcaagtaccagagcctgctgaccaagaacaaggccagagtgatcatcctgatggtgtggatcgtgagcggcctgaccagcttcctgcccatccagatgcactggtacagagccacccaccaggaggccatcaactgctacgccaacgagacctgctgcgacttcttcaccaaccaggcctacgccatcgccagcagcatcgtgagcttctacgtgcccctggtgatcatggtgttcgtgtacagcagagtgttccaggaggccaagagacagctgcagaagatcgacaagagcgagggcagattccacgtgcagaacctgagccaggtggagcaggacggcagaaccggccacggcctgagaagaagcagcaagttctgcctgaaggagcacaaggccctgaagaccctgggcatcatcatgggcaccttcaccctgtgctggctgcccttcttcatcgtgaacatcgtgcacgtgatccaggacaacctgatcagaaaggaggtgtacatcctgctgaactggatcggctacgtgaacagcggcttcaaccccctgatctactgcagaagccccgacttcagaatcgccttccaggagctgctgtgcctgagaagaagcagcctgaaggcctacggcaacggctacagcagcaacggcaacaccggcgagcagagcggctaccacgtggagcaggagaaggagaacaagctgctgtgcgaggacctgcccggcaccgaggacttcgtgggccaccagggcaccgtgcccagcgacaacatcgacagccagggcagaaactgcagcaccaacgacagcctgctgtag

SEQ ID NO: 72251 - DNA, 1227 bp, synthetic construct
  misc_feature 1..1227: note = Description of Artificial Sequence: Synthetic coding sequence
  source 1..1227: mol_type = other DNA
atggccccctggccccacgagaacagcagcctggccccctggcccgacctgcccaccctggcccccaacaccgccaacaccagcggcctgcccggcgtgccctgggaggccgccctggccggcgccctgctggccctggccgtgctggccaccgtgggcggcaacctgctggtgatcgtggccatcgcctggacccccagactgcagaccatgaccaacgtgttcgtgaccagcctggccgccgccgacctggtgatgggcctgctggtggtgccccccgccgccaccctggccctgaccggccactggcccctgggcgccaccggctgcgagctgtggaccagcgtggacgtgctgtgcgtgaccgccagcatcgagaccctgtgcgccctggccgtggacagatacctggccgtgaccaaccccctgagatacggcgccctggtgaccaagagatgcgccagaaccgccgtggtgctggtgtgggtggtgagcgccgccgtgagcttcgcccccatcatgagccagtggtggagagtgggcgccgacgccgaggcccagagatgccacagcaaccccagatgctgcgccttcgccagcaacatgccctacgtgctgctgagcagcagcgtgagcttctacctgcccctgctggtgatgctgttcgtgtacgccagagtgttcgtggtggccaccagacagctgagactgctgagaggcgagctgggcagattcccccccgaggagagcccccccgcccccagcagaagcctggcccccgcccccgtgggcacctgcgccccccccgagggcgtgcccgcctgcggcagaagacccgccagactgctgcccctgagagagcacagagccctgtgcaccctgggcctgatcatgggcaccttcaccctgtgctggctgcccttcttcctggccaacgtgctgagagccctgggcggccccagcctggtgcccggccccgccttcctggccctgaactggctgggctacgccaacagcgccttcaaccccctgatctactgcagaagccccgacttcagaagcgccttcagaagactgctgtgcagatgcggcagaagactgccccccgagccctgcgccgccgccagacccgccctgttccccagcggcgtgcccgccgccagaagcagccccgcccagcccagactgtgccagagactggacggcgccagctggggcgtgagctag

SEQ ID NO: 72252 - DNA, 1044 bp, synthetic construct
  misc_feature 1..1044: note = Description of Artificial Sequence: Synthetic coding sequence
  source 1..1044: mol_type = other DNA
atggccgccggcaccgccgtgggcgcctgggtgctggtgctgagcctgtggggcgccgtggtgggcgcccagaacatcaccgccagaatcggcgagcccctggtgctgaagtgcaagggcgcccccaagaagcccccccagagactggagtggaagctgaacaccggcagaaccgaggcctggaaggtgctgagcccccagggcggcggcccctgggacagcgtggccagagtgctgcccaacggcagcctgttcctgcccgccgtgggcatccaggacgagggcatcttcagatgccaggccatgaacagaaacggcaaggagaccaagagcaactacagagtgagagtgtaccagatccccggcaagcccgagatcgtggacagcgccagcgagctgaccgccggcgtgcccaacaaggtgggcacctgcgtgagcgagggcagctaccccgccggcaccctgagctggcacctggacggcaagcccctggtgcccaacgagaagggcgtgagcgtgaaggagcagaccagaagacaccccgagaccggcctgttcaccctgcagagcgagctgatggtgacccccgccagaggcggcgaccccagacccaccttcagctgcagcttcagccccggcctgcccagacacagagccctgagaaccgcccccatccagcccagagtgtgggagcccgtgcccctggaggaggtgcagctggtggtggagcccgagggcggcgccgtggcccccggcggcaccgtgaccctgacctgcgaggtgcccgcccagcccagcccccagatccactggatgaaggacggcgtgcccctgcccctgccccccagccccgtgctgatcctgcccgagatcggcccccaggaccagggcacctacagctgcgtggccacccacagcagccacggcccccaggagagcagagccgtgagcatcagcatcatcgagcccggcgaggagggccccaccgccggcgagggcttcgacaaggtgagagaggccgaggacagcccccagcacatgtag

SEQ ID NO: 72253 - DNA, 702 bp, synthetic construct
  misc_feature 1..702: note = Description of Artificial Sequence: Synthetic coding sequence
  source 1..702: mol_type = other DNA
atggccgccggcaccgccgtgggcgcctgggtgctggtgctgagcctgtggggcgccgtggtgggcgcccagaacatcaccgccagaatcggcgagcccctggtgctgaagtgcaagggcgcccccaagaagcccccccagagactggagtggaagctgaacaccggcagaaccgaggcctggaaggtgctgagcccccagggcggcggcccctgggacagcgtggccagagtgctgcccaacggcagcctgttcctgcccgccgtgggcatccaggacgagggcatcttcagatgccaggccatgaacagaaacggcaaggagaccaagagcaactacagagtgagagtgtaccagatccccggcaagcccgagatcgtggacagcgccagcgagctgaccgccggcgtgcccaacaaggtggtggaggagagcagaagaagcagaaagagaccctgcgagcaggaggtgggcacctgcgtgagcgagggcagctaccccgccggcaccctgagctggcacctggacggcaagcccctggtgcccaacgagaagggcgtgagcgtgaaggagcagaccagaagacaccccgagaccggcctgttcaccctgcagagcgagctgatggtgacccccgccagaggcggcgaccccagacccaccttcagctgcagcttcagccccggcctgcccagacactag

SEQ ID NO: 72254 - DNA, 402 bp, synthetic construct
  misc_feature 1..402: note = Description of Artificial Sequence: Synthetic coding sequence
  source 1..402: mol_type = other DNA
atgaaggacggcgtgcccctgcccctgccccccagccccgtgctgatcctgcccgagatcggcccccaggaccagggcacctacagctgcgtggccacccacagcagccacggcccccaggagagcagagccgtgagcatcagcatcatcgagcccggcgaggagggccccaccgccggcagcgtgggcggcagcggcctgggcaccctggccctggccctgggcatcctgggcggcctgggcaccgccgccctgctgatcggcgtgatcctgtggcagagaagacagagaagaggcgaggagagaaaggcccccgagaaccaggaggaggaggaggagagagccgagctgaaccagagcgaggagcccgaggccggcgagagcagcaccggcggcccctag

SEQ ID NO: 72255 - DNA, 366 bp, synthetic construct
  misc_feature 1..366: note = Description of Artificial Sequence: Synthetic coding sequence
  source 1..366: mol_type = other DNA
atggccgccggcaccgccgtgggcgcctgggtgctggtgctgagcctgtggggcgccgtggtgggcgcccagaacatcaccgccagaatcggcgagcccctggtgctgaagtgcaagggcgcccccaagaagcccccccagagactggagtggaagctgaacaccggcagaaccgaggcctggaaggtgctgagcccccagggcggcggcccctgggacagcgtggccagagtgctgcccaacggcagcctgttcctgcccgccgtgggcatccaggacgagggcatcttcagatgccaggccatgaacagaaacggcaaggagaccaagagcaactggtggtggagccagaaggtggagcagtag

SEQ ID NO: 72256 - DNA, 1029 bp, synthetic construct
  misc_feature 1..1029: note = Description of Artificial Sequence: Synthetic coding sequence
  source 1..1029: mol_type = other DNA
atggccgccggcaccgccgtgggcgcctgggtgctggtgctgagcctgtggggcgccgtggtgggcgcccagaacatcaccgccagaatcggcgagcccctggtgctgaagtgcaagggcgcccccaagaagcccccccagagactggagtggaagctgggcggcggcccctgggacagcgtggccagagtgctgcccaacggcagcctgttcctgcccgccgtgggcatccaggacgagggcatcttcagatgccaggccatgaacagaaacggcaaggagaccaagagcaactacagagtgagagtgtaccagatccccggcaagcccgagatcgtggacagcgccagcgagctgaccgccggcgtgcccaacaaggtgggcacctgcgtgagcgagggcagctaccccgccggcaccctgagctggcacctggacggcaagcccctggtgcccaacgagaagggcgtgagcgtgaaggagcagaccagaagacaccccgagaccggcctgttcaccctgcagagcgagctgatggtgacccccgccagaggcggcgaccccagacccaccttcagctgcagcttcagccccggcctgcccagacacagagccctgagaaccgcccccatccagcccagagtgtgggagcccgtgcccctggaggaggtgcagctggtggtggagcccgagggcggcgccgtggcccccggcggcaccgtgaccctgacctgcgaggtgcccgcccagcccagcccccagatccactggatgaaggacgtgagcgacctggagagaggcgccggcagaaccagaagaggcggcgccaactgcagactgtgcggcagaatcagagccggcaacagcagccccggccccggcgaccccggcagacccggcgacagcagacccgcccactggggccacctggtggccaaggccgccacccccagaagaggcgaggagggccccagaaagcccggcggcagaggcggcgcctgcagaaccgagagcgtgggcggcacctag

SEQ ID NO: 72257 - DNA, 885 bp, synthetic construct
  misc_feature 1..885: note = Description of Artificial Sequence: Synthetic coding sequence
  source 1..885: mol_type = other DNA
atgaacagaaacggcaaggagaccaagagcaactacagagtgagagtgtaccagatccccggcaagcccgagatcgtggacagcgccagcgagctgaccgccggcgtgcccaacaaggtgggcacctgcgtgagcgagggcagctaccccgccggcaccctgagctggcacctggacggcaagcccctggtgcccaacgagaagggcgtgagcgtgaaggagcagaccagaagacaccccgagaccggcctgttcaccctgcagagcgagctgatggtgacccccgccagaggcggcgaccccagacccaccttcagctgcagcttcagccccggcctgcccagacacagagccctgagaaccgcccccatccagcccagagtgtgggagcccgtgcccctggaggaggtgcagctggtggtggagcccgagggcggcgccgtggcccccggcggcaccgtgaccctgacctgcgaggtgcccgcccagcccagcccccagatccactggatgaaggacggcgtgcccctgcccctgccccccagccccgtgctgatcctgcccgagatcggcccccaggaccagggcacctacagctgcgtggccacccacagcagccacggcccccaggagagcagagccgtgagcatcagcatcatcggcagcgtgggcggcagcggcctgggcaccctggccctggccctgggcatcctgggcggcctgggcaccgccgccctgctgatcggcgtgatcctgtggcagagaagacagagaagaggcgaggagagaaaggcccccgagaaccaggaggaggaggaggagagagccgagctgaaccagagcgaggagcccgaggccggcgagagcagcaccggcggcccctag

SEQ ID NO: 72258 - DNA, 1308 bp, synthetic construct
  misc_feature 1..1308: note = Description of Artificial Sequence: Synthetic coding sequence
  source 1..1308: mol_type = other DNA
atgggcgccggcgagagagtgcaggccccccccagagccgaggccaccgccggcagaggcgccgacagagccagaaccctggagggcagcagaatggccgccggcaccgccgtgggcgcctgggtgctggtgctgagcctgtggggcgccgtggtgggcgcccagaacatcaccgccagaatcggcgagcccctggtgctgaagtgcaagggcgcccccaagaagcccccccagagactggagtggaagctgaacaccggcagaaccgaggcctggaaggtgctgagcccccagggcggcggcccctgggacagcgtggccagagtgctgcccaacggcagcctgttcctgcccgccgtgggcatccaggacgagggcatcttcagatgccaggccatgaacagaaacggcaaggagaccaagagcaactacagagtgagagtgtaccagatccccggcaagcccgagatcgtggacagcgccagcgagctgaccgccggcgtgcccaacaaggtgggcacctgcgtgagcgagggcagctaccccgccggcaccctgagctggcacctggacggcaagcccctggtgcccaacgagaagggcgtgagcgtgaaggagcagaccagaagacaccccgagaccggcctgttcaccctgcagagcgagctgatggtgacccccgccagaggcggcgaccccagacccaccttcagctgcagcttcagccccggcctgcccagacacagagccctgagaaccgcccccatccagcccagagtgtgggagcccgtgcccctggaggaggtgcagctggtggtggagcccgagggcggcgccgtggcccccggcggcaccgtgaccctgacctgcgaggtgcccgcccagcccagcccccagatccactggatgaaggacggcgtgcccctgcccctgccccccagccccgtgctgatcctgcccgagatcggcccccaggaccagggcacctacagctgcgtggccacccacagcagccacggcccccaggagagcagagccgtgagcatcagcatcatcgagcccggcgaggagggccccaccgccggcagcgtgggcggcagcggcctgggcaccctggccctggccctgggcatcctgggcggcctgggcaccgccgccctgctgatcggcgtgatcctgtggcagagaagacagagaagaggcgaggagagaaaggcccccgagaaccaggaggaggaggaggagagagccgagctgaaccagagcgaggagcccgaggccggcgagagcagcaccggcggcccctag

SEQ ID NO: 72259 - DNA, 1215 bp, synthetic construct
  misc_feature 1..1215: note = Description of Artificial Sequence: Synthetic coding sequence
  source 1..1215: mol_type = other DNA
atggccgccggcaccgccgtgggcgcctgggtgctggtgctgagcctgtggggcgccgtggtgggcgcccagaacatcaccgccagaatcggcgagcccctggtgctgaagtgcaagggcgcccccaagaagcccccccagagactggagtggaagctgaacaccggcagaaccgaggcctggaaggtgctgagcccccagggcggcggcccctgggacagcgtggccagagtgctgcccaacggcagcctgttcctgcccgccgtgggcatccaggacgagggcatcttcagatgccaggccatgaacagaaacggcaaggagaccaagagcaactacagagtgagagtgtaccagatccccggcaagcccgagatcgtggacagcgccagcgagctgaccgccggcgtgcccaacaaggtgggcacctgcgtgagcgagggcagctaccccgccggcaccctgagctggcacctggacggcaagcccctggtgcccaacgagaagggcgtgagcgtgaaggagcagaccagaagacaccccgagaccggcctgttcaccctgcagagcgagctgatggtgacccccgccagaggcggcgaccccagacccaccttcagctgcagcttcagccccggcctgcccagacacagagccctgagaaccgcccccatccagcccagagtgtgggagcccgtgcccctggaggaggtgcagctggtggtggagcccgagggcggcgccgtggcccccggcggcaccgtgaccctgacctgcgaggtgcccgcccagcccagcccccagatccactggatgaaggacggcgtgcccctgcccctgccccccagccccgtgctgatcctgcccgagatcggcccccaggaccagggcacctacagctgcgtggccacccacagcagccacggcccccaggagagcagagccgtgagcatcagcatcatcgagcccggcgaggagggccccaccgccggcagcgtgggcggcagcggcctgggcaccctggccctggccctgggcatcctgggcggcctgggcaccgccgccctgctgatcggcgtgatcctgtggcagagaagacagagaagaggcgaggagagaaaggcccccgagaaccaggaggaggaggaggagagagccgagctgaaccagagcgaggagcccgaggccggcgagagcagcaccggcggcccctag

SEQ ID NO: 72260 - DNA, 1044 bp, synthetic construct; identical to SEQ ID NO: 72252
  misc_feature 1..1044: note = Description of Artificial Sequence: Synthetic coding sequence
  source 1..1044: mol_type = other DNA

SEQ ID NO: 72261 - DNA, 1029 bp, synthetic construct; identical to SEQ ID NO: 72256
  misc_feature 1..1029: note = Description of Artificial Sequence: Synthetic coding sequence
  source 1..1029: mol_type = other DNA

SEQ ID NO: 72262 - DNA, 1029 bp, synthetic construct; identical to SEQ ID NO: 72256
  misc_feature 1..1029: note = Description of Artificial Sequence: Synthetic coding sequence
  source 1..1029: mol_type = other DNA

SEQ ID NO: 72263 - DNA, 702 bp, synthetic construct
  misc_feature 1..702: note = Description of Artificial Sequence: Synthetic coding sequence
  source 1..702: mol_type = other DNA
atggccgccggcaccgccgtgggcgcctgggtgctggtgctgagcctgtggggcgccgtggtgggcgcccagaacatcaccgccagaatcggcgagcccctggtgctgaagtgcaagggcgcccccaagaagcccccccagagactggagtggaagctgaacaccggcagaaccgaggcctggaaggtgctgagcccccagggcggcggcccctgggacagcgtggccagagtgctgcccaacagcagcctgttcctgcccgccgtgggcatccaggacgagggcatcttcagatgccaggccatgaacagaaacggcaaggagaccaagagcaactacagagtgagagtgtaccagatccccggcaagcccgagatcgtggacagcgccagcgagctgaccgccggcgtgcccaacaaggtggtggaggagagcagaagaagcagaaagagaccctgcgagcaggaggtgggcacctgcgtgagcgagggcagctaccccgccggcaccctgagctggcacctggacggcaagcccctggtgcccaacgagaagggcgtgagcgtgaaggagcagaccagaagacaccccgagaccggcctgttcaccctgcagagcgagctgatggtgacccccgccagaggcggcgaccccagacccaccttcagctgcagcttcagccccggcctgcccagacactag

SEQ ID NO: 72264 - DNA, 705 bp, synthetic construct
  misc_feature 1..705: note = Description of Artificial Sequence: Synthetic coding sequence
  source 1..705: mol_type = other DNA
atggccgccggcaccgccgtgggcgcctgggtgctggtgctgagcctgtggggcgccgtggtgggcgcccagaacatcaccgccagaatcggcgagcccctggtgctgaagtgcaagggcgcccccaagaagcccccccagagactggagtggaagctgaacaccggcagaaccgaggcctggaaggtgctgagcccccagggcggcggcccctgggacagcgtggccagagtgctgcccaacggcagcctgttcctgcccgccgtgggcatccaggacgagggcatcttcagatgccaggccatgaacagaaacggcaaggagaccaagagcaactacagaagcctgagaaccttcaccatcaccgccagcgactggatcttcccccccagcgagatccccggcaagcccgagatcgtggacagcgccagcgagctgaccgccggcgtgcccaacaaggtgggcacctgcgtgagcgagggcagctaccccgccggcaccctgagctggcacctggacggcaagcccctggtgcccaacgagaagggcgtgagcgtgaaggagcagaccagaagacaccccgagaccggcctgttcaccctgcagagcgagctgatggtgacccccgccagaggcggcgaccccagacccaccttcagctgcagcttcagccccggcctgcccagacacagagccctgagatag

SEQ ID NO: 72265 - DNA, 705 bp, synthetic construct; identical to SEQ ID NO: 72264
  misc_feature 1..705: note = Description of Artificial Sequence: Synthetic coding sequence
  source 1..705: mol_type = other DNA

SEQ ID NO: 72266 - DNA, 702 bp, synthetic construct; identical to SEQ ID NO: 72253
  misc_feature 1..702: note = Description of Artificial Sequence: Synthetic coding sequence
  source 1..702: mol_type = other DNA

SEQ ID NO: 72267 - DNA, 1215 bp, synthetic construct
  misc_feature 1..1215: note = Description of Artificial Sequence: Synthetic coding sequence
  source 1..1215: mol_type = other DNA
atggccgccggcaccgccgtgggcgcctgggtgctggtgctgagcctgtggggcgccgtggtgggcgcccagaacatcaccgccagaatcggcgagcccctggtgctgaagtgcaagggcgcccccaagaagcccccccagagactggagtggaagctgaacaccggcagaaccgaggcctggaaggtgctgagcccccagggcggcggcccctgggacagcgtggccagagtgctgcccaacagcagcctgttcctgcccgccgtgggcatccaggacgagggcatcttcagatgccaggccatgaacagaaacggcaaggagaccaagagcaactacagagtgagagtgtaccagatccccggcaagcccgagatcgtggacagcgccagcgagctgaccgccggcgtgcccaacaaggtgggcacctgcgtgagcgagggcagctaccccgccggcaccctgagctggcacctggacggcaagcccctggtgcccaacgagaagggcgtgagcgtgaaggagcagaccagaagacaccccgagaccggcctgttcaccctgcagagcgagctgatggtgacccccgccagaggcggcgaccccagacccaccttcagctgcagcttcagccccggcctgcccagacacagagccctgagaaccgcccccatccagcccagagtgtgggagcccgtgcccctggaggaggtgcagctggtggtggagcccgagggcggcgccgtggcccccggcggcaccgtgaccctgacctgcgaggtgcccgcccagcccagcccccagatccactggatgaaggacggcgtgcccctgcccctgccccccagccccgtgctgatcctgcccgagatcggcccccaggaccagggcacctacagctgcgtggccacccacagcagccacggcccccaggagagcagagccgtgagcatcagcatcatcgagcccggcgaggagggccccaccgccggcagcgtgggcggcagcggcctgggcaccctggccctggccctgggcatcctgggcggcctgggcaccgccgccctgctgatcggcgtgatcctgtggcagagaagacagagaagaggcgaggagagaaaggcccccgagaaccaggaggaggaggaggagagagccgagctgaaccagagcgaggagcccgaggccggcgagagcagcaccggcggcccctag

SEQ ID NO: 72268 - DNA, 1044 bp, synthetic construct; identical to SEQ ID NO: 72252
  misc_feature 1..1044: note = Description of Artificial Sequence: Synthetic coding sequence
  source 1..1044: mol_type = other DNA

SEQ ID NO: 72269 - DNA, 702 bp, synthetic construct; identical to SEQ ID NO: 72253
  misc_feature 1..702: note = Description of Artificial Sequence: Synthetic coding sequence
  source 1..702: mol_type = other DNA

SEQ ID NO: 72270 - DNA, 1215 bp, synthetic construct; identical to SEQ ID NO: 72259
  misc_feature 1..1215: note = Description of Artificial Sequence: Synthetic coding sequence
  source 1..1215: mol_type = other DNA

SEQ ID NO: 72271 - DNA, 705 bp, synthetic construct
  misc_feature 1..705: note = Description of Artificial Sequence: Synthetic coding sequence
  source 1..705: mol_type = other DNA
atggccgccggcaccgccgtgggcgcctgggtgctggtgctgagcctgtggggcgccgtggtgggcgcccagaacatcaccgccagaatcggcgagcccctggtgctgaagtgcaagggcgcccccaagaagcccccccagagactggagtggaagctgaacaccggcagaaccgaggcctggaaggtgctgagcccccagggcggcggcccctgggacagcgtggccagagtgctgcccaacagcagcctgttcctgcccgccgtgggcatccaggacgagggcatcttcagatgccaggccatgaacagaaacggcaaggagaccaagagcaactacagaagcctgagaaccttcaccatcaccgccagcgactggatcttcccccccagcgagatccccggcaagcccgagatcgtggacagcgccagcgagctgaccgccggcgtgcccaacaaggtgggcacctgcgtgagcgagggcagctaccccgccggcaccctgagctggcacctggacggcaagcccctggtgcccaacgagaagggcgtgagcgtgaaggagcagaccagaagacaccccgagaccggcctgttcaccctgcagagcgagctgatggtgacccccgccagaggcggcgaccccagacccaccttcagctgcagcttcagccccggcctgcccagacacagagccctgagatag

SEQ ID NO: 72272 - DNA, 1092 bp, synthetic construct
  misc_feature 1..1092: note = Description of Artificial Sequence: Synthetic coding sequence
  source 1..1092: mol_type = other DNA
atggccgccggcaccgccgtgggcgcctgggtgctggtgctgagcctgtggggcgccgtggtgggcgcccagaacatcaccgccagaatcggcgagcccctggtgctgaagtgcaagggcgcccccaagaagcccccccagagactggagtggaagctgaacaccggcagaaccgaggcctggaaggtgctgagcccccagggcggcggcccctgggacagcgtggccagagtgctgcccaacggcagcctgttcctgcccgccgtgggcatccaggacgagggcatcttcagatgccaggccatgaacagaaacggcaaggagaccaagagcaactacagagtgagagtgtaccagatccccggcaagcccgagatcgtggacagcgccagcgagctgaccgccggcgtgcccaacaaggtggtggaggagagcagaagaagcagaaagagaccctgcgagcaggaggtgggcacctgcgtgagcgagggcagctaccccgccggcaccctgagctggcacctggacggcaagcccctggtgcccaacgagaagggcgtgagcgtgaaggagcagaccagaagacaccccgagaccggcctgttcaccctgcagagcgagctgatggtgacccccgccagaggcggcgaccccagacccaccttcagctgcagcttcagccccggcctgcccagacacagagccctgagaaccgcccccatccagcccagagtgtgggagcccgtgcccctggaggaggtgcagctggtggtggagcccgagggcggcgccgtggcccccggcggcaccgtgaccctgacctgcgaggtgcccgcccagcccagcccccagatccactggatgaaggacggcgtgcccctgcccctgccccccagccccgtgctgatcctgcccgagatcggcccccaggaccagggcacctacagctgcgtggccacccacagcagccacggcccccaggagagcagagccgtgagcatcagcatcatcgagcccggcgaggagggccccaccgccggcgagggcttcgacaaggtgagagaggccgaggacagcccccagcacatgtag

SEQ ID NO: 72273 - DNA, 1029 bp, synthetic construct; identical to SEQ ID NO: 72256
  misc_feature 1..1029: note = Description of Artificial Sequence: Synthetic coding sequence
  source 1..1029: mol_type = other DNA

SEQ ID NO: 72274 - DNA, 702 bp, synthetic construct; identical to SEQ ID NO: 72253
  misc_feature 1..702: note = Description of Artificial Sequence: Synthetic coding sequence
  source 1..702: mol_type = other DNA

SEQ ID NO: 72275 - DNA, 1029 bp, synthetic construct; identical to SEQ ID NO: 72256
  misc_feature 1..1029: note = Description of Artificial Sequence: Synthetic coding sequence
  source 1..1029: mol_type = other DNA

SEQ ID NO: 72276 - DNA, 705 bp, synthetic construct; identical to SEQ ID NO: 72264
  misc_feature 1..705: note = Description of Artificial Sequence: Synthetic coding sequence
  source 1..705: mol_type = other DNA

SEQ ID NO: 72277 - DNA, 1215 bp, synthetic construct; identical to SEQ ID NO: 72259
  misc_feature 1..1215: note = Description of Artificial Sequence: Synthetic coding sequence
  source 1..1215: mol_type = other DNA

SEQ ID NO: 72278 - DNA, 1029 bp, synthetic construct
  misc_feature 1..1029: note = Description of Artificial Sequence: Synthetic coding sequence
  source 1..1029: mol_type = other DNA
atggccgccggcaccgccgtgggcgcctgggtgctggtgctgagcctgtggggcgccgtggtgggcgcccagaacatcaccgccagaatcggcgagcccctggtgctgaagtgcaagggcgcccccaagaagcccccccagagactggagtggaagctgggcggcggcccctgggacagcgtggccagagtgctgcccaacagcagcctgttcctgcccgccgtgggcatccaggacgagggcatcttcagatgccaggccatgaacagaaacggcaaggagaccaagagcaactacagagtgagagtgtaccagatccccggcaagcccgagatcgtggacagcgccagcgagctgaccgccggcgtgcccaacaaggtgggcacctgcgtgagcgagggcagctaccccgccggcaccctgagctggcacctggacggcaagcccctggtgcccaacgagaagggcgtgagcgtgaaggagcagaccagaagacaccccgagaccggcctgttcaccctgcagagcgagctgatggtgacccccgccagaggcggcgaccccagacccaccttcagctgcagcttcagccccggcctgcccagacacagagccctgagaaccgcccccatccagcccagagtgtgggagcccgtgcccctggaggaggtgcagctggtggtggagcccgagggcggcgccgtggcccccggcggcaccgtgaccctgacctgcgaggtgcccgcccagcccagcccccagatccactggatgaaggacgtgagcgacctggagagaggcgccggcagaaccagaagaggcggcgccaactgcagactgtgcggcagaatcagagccggcaacagcagccccggccccggcgaccccggcagacccggcgacagcagacccgcccactggggccacctggtggccaaggccgccacccccagaagaggcgaggagggccccagaaagcccggcggcagaggcggcgcctgcagaaccgagagcgtgggcggcacctag

SEQ ID NO: 72279 - DNA, 1044 bp, synthetic construct; identical to SEQ ID NO: 72252
  misc_feature 1..1044: note = Description of Artificial Sequence: Synthetic coding sequence
  source 1..1044: mol_type = other DNA

SEQ ID NO: 72280 - DNA, 705 bp, synthetic construct; identical to SEQ ID NO: 72264
  misc_feature 1..705: note = Description of Artificial Sequence: Synthetic coding sequence
  source 1..705: mol_type = other DNA

SEQ ID NO: 72281 - DNA, 1215 bp, synthetic construct; identical to SEQ ID NO: 72259
  misc_feature 1..1215: note = Description of Artificial Sequence: Synthetic coding sequence
  source 1..1215: mol_type = other DNA

SEQ ID NO: 72282 - DNA, 1044 bp, synthetic construct
  misc_feature 1..1044: note = Description of Artificial Sequence: Synthetic coding sequence
  source 1..1044: mol_type = other DNA
atggccgccggcaccgccgtgggcgcctgggtgctggtgctgagcctgtggggcgccgtggtgggcgcccagaacatcaccgccagaatcggcgagcccctggtgctgaagtgcaagggcgcccccaagaagcccccccagagactggagtggaagctgaacaccggcagaaccgaggcctggaaggtgctgagcccccagggcggcggcccctgggacagcgtggccagagtgctgcccaacagcagcctgttcctgcccgccgtgggcatccaggacgagggcatcttcagatgccaggccatgaacagaaacggcaaggagaccaagagcaactacagagtgagagtgtaccagatccccggcaagcccgagatcgtggacagcgccagcgagctgaccgccggcgtgcccaacaaggtgggcacctgcgtgagcgagggcagctaccccgccggcaccctgagctggcacctggacggcaagcccctggtgcccaacgagaagggcgtgagcgtgaaggagcagaccagaagacaccccgagaccggcctgttcaccctgcagagcgagctgatggtgacccccgccagaggcggcgaccccagacccaccttcagctgcagcttcagccccggcctgcccagacacagagccctgagaaccgcccccatccagcccagagtgtgggagcccgtgcccctggaggaggtgcagctggtggtggagcccgagggcggcgccgtggcccccggcggcaccgtgaccctgacctgcgaggtgcccgcccagcccagcccccagatccactggatgaaggacggcgtgcccctgcccctgccccccagccccgtgctgatcctgcccgagatcggcccccaggaccagggcacctacagctgcgtggccacccacagcagccacggcccccaggagagcagagccgtgagcatcagcatcatcgagcccggcgaggagggccccaccgccggcgagggcttcgacaaggtgagagaggccgaggacagcccccagcacatgtag

SEQ ID NO: 72283 - DNA, 702 bp, synthetic construct; identical to SEQ ID NO: 72253
  misc_feature 1..702: note = Description of Artificial Sequence: Synthetic coding sequence
  source 1..702: mol_type = other DNA

SEQ ID NO: 72284 - DNA, 1044 bp, synthetic construct; identical to SEQ ID NO: 72252
  misc_feature 1..1044: note = Description of Artificial Sequence: Synthetic coding sequence
  source 1..1044: mol_type = other DNA

SEQ ID NO: 72285 - DNA, 705 bp, synthetic construct; identical to SEQ ID NO: 72264
  misc_feature 1..705: note = Description of Artificial Sequence: Synthetic coding sequence
  source 1..705: mol_type = other DNA

SEQ ID NO: 72286 - DNA, 1215 bp, synthetic construct; identical to SEQ ID NO: 72259
  misc_feature 1..1215: note = Description of Artificial Sequence: Synthetic coding sequence
  source 1..1215: mol_type = other DNA

SEQ ID NO: 72287 - DNA, 387 bp, synthetic construct
  misc_feature 1..387: note = Description of Artificial Sequence: Synthetic coding sequence
  source 1..387: mol_type = other DNA
atggccgccggcaccgccgtgggcgcctgggtgctggtgctgagcctgtggggcgccgtggtgggcgcccagaacatcaccgccagaatcggcgagcccctggtgctgaagtgcaagggcgcccccaagaagcccccccagagactggagtggaagctgaacaccggcagaaccgaggcctggaaggtgctgagcccccagggcggcggcccctgggacagcgtggccagagtgctgcccaacggcagcctgttcctgcccgccgtgggcatccaggacgagggcatcttcagatgccaggccatgaacagaaacggcaaggagaccaagagcaactacagagtgagagtgtaccagttcgagaacctgcacaactacagcctgtag

SEQ ID NO: 72288 - DNA, 462 bp, synthetic construct
  misc_feature 1..462: note = Description of Artificial Sequence: Synthetic coding sequence
  source 1..462: mol_type = other DNA
atggccgccggcaccgccgtgggcgcctgggtgctggtgctgagcctgtggggcgccgtggtgggcgcccagaacatcaccgccagaatcggcgagcccctggtgctgaagtgcaagggcgcccccaagaagcccccccagagactggagtggaagctgaacaccggcagaaccgaggcctggaaggtgctgagcccccagggcggcggcccctgggacagcgtggccagagtgctgcccaacggcagcctgttcctgcccgccgtgggcatccaggacgagggcatcctgggcggcctgggcaccgccgccctgctgatcggcgtgatcctgtggcagagaagacagagaagaggcgaggagagaaaggcccccgagaaccaggaggaggaggaggagagagccgagctgaaccagagcgaggagcccgaggccggcgagagcagcaccggcggcccctag

SEQ ID NO: 72289 - DNA, 885 bp, synthetic construct; identical to SEQ ID NO: 72257
  misc_feature 1..885: note = Description of Artificial Sequence: Synthetic coding sequence
  source 1..885: mol_type = other DNA

SEQ ID NO: 72290 - DNA, 885 bp, synthetic construct; identical to SEQ ID NO: 72257
  misc_feature 1..885: note = Description of Artificial Sequence: Synthetic coding sequence
  source 1..885: mol_type = other DNA

SEQ ID NO: 72291 - DNA, 366 bp, synthetic construct; identical to SEQ ID NO: 72255
  misc_feature 1..366: note = Description of Artificial Sequence: Synthetic coding sequence
  source 1..366: mol_type = other DNA

SEQ ID NO: 72292 - DNA, 1308 bp, synthetic construct; identical to SEQ ID NO: 72258
  misc_feature 1..1308: note = Description of Artificial Sequence: Synthetic coding sequence
  source 1..1308: mol_type = other DNA

SEQ ID NO: 72293 - DNA, 1092 bp, synthetic construct; identical to SEQ ID NO: 72272
  misc_feature 1..1092: note = Description of Artificial Sequence: Synthetic coding sequence
  source 1..1092: mol_type = other DNA

SEQ ID NO: 72294 - DNA, 402 bp, synthetic construct; identical to SEQ ID NO: 72254
  misc_feature 1..402: note = Description of Artificial Sequence: Synthetic coding sequence
  source 1..402: mol_type = other DNA

SEQ ID NO: 72295 - DNA, 387 bp, synthetic construct
  misc_feature 1..387: note = Description of Artificial Sequence: Synthetic coding sequence
  source 1..387: mol_type = other DNA
atggccgccggcaccgccgtgggcgcctgggtgctggtgctgagcctgtggggcgccgtggtgggcgcccagaacatcaccgccagaatcggcgagcccctggtgctgaagtgcaagggcgcccccaagaagcccccccagagactggagtggaagctgaacaccggcagaaccgaggcctggaaggtgctgagcccccagggcggcggcccctgggacagcgtggccagagtgctgcccaacagcagcctgttcctgcccgccgtgggcatccaggacgagggcatcttcagatgccaggccatgaacagaaacggcaaggagaccaagagcaactacagagtgagagtgtaccagttcgagaacctgcacaactacagcctgtag

SEQ ID NO: 72296 - DNA, 462 bp, synthetic construct; identical to SEQ ID NO: 72288
  misc_feature 1..462: note = Description of Artificial Sequence: Synthetic coding sequence
  source 1..462: mol_type = other DNA

SEQ ID NO: 72297 - DNA, 1308 bp, synthetic construct; identical to SEQ ID NO: 72258
  misc_feature 1..1308: note = Description of Artificial Sequence: Synthetic coding sequence
  source 1..1308: mol_type = other DNA

SEQ ID NO: 72298 - DNA, 366 bp, synthetic construct; identical to SEQ ID NO: 72255
  misc_feature 1..366: note = Description of Artificial Sequence: Synthetic coding sequence
  source 1..366: mol_type = other DNA

SEQ ID NO: 72299 - DNA, 387 bp, synthetic construct; identical to SEQ ID NO: 72287
  misc_feature 1..387: note = Description of Artificial Sequence: Synthetic coding sequence
  source 1..387: mol_type = other DNA

SEQ ID NO: 72300 - DNA, 885 bp, synthetic construct; identical to SEQ ID NO: 72257
  misc_feature 1..885: note = Description of Artificial Sequence: Synthetic coding sequence
  source 1..885: mol_type = other DNA

SEQ ID NO: 72301 - DNA, 366 bp, synthetic construct
  misc_feature 1..366: note = Description of Artificial Sequence: Synthetic coding sequence
  source 1..366: mol_type = other DNA
atggccgccggcaccgccgtgggcgcctgggtgctggtgctgagcctgtggggcgccgtggtgggcgcccagaacatcaccgccagaatcggcgagcccctggtgctgaagtgcaagggcgcccccaagaagcccccccagagactggagtggaagctgaacaccggcagaaccgaggcctggaaggtgctgagcccccagggcggcggcccctgggacagcgtggccagagtgctgcccaacagcagcctgttcctgcccgccgtgggcatccaggacgagggcatcttcagatgccaggccatgaacagaaacggcaaggagaccaagagcaactggtggtggagccagaaggtggagcagtag

SEQ ID NO: 72302 - DNA, 462 bp, synthetic construct; identical to SEQ ID NO: 72288
  misc_feature 1..462: note = Description of Artificial Sequence: Synthetic coding sequence
  source 1..462: mol_type = other DNA

SEQ ID NO: 72303 - DNA, 1308 bp, synthetic construct; identical to SEQ ID NO: 72258
  misc_feature 1..1308: note = Description of Artificial Sequence: Synthetic coding sequence
  source 1..1308: mol_type = other DNA

SEQ ID NO: 72304 - DNA, 366 bp, synthetic construct; identical to SEQ ID NO: 72255
  misc_feature 1..366: note = Description of Artificial Sequence: Synthetic coding sequence
  source 1..366: mol_type = other DNA

SEQ ID NO: 72305 - DNA, 402 bp, synthetic construct; identical to SEQ ID NO: 72254
  misc_feature 1..402: note = Description of Artificial Sequence: Synthetic coding sequence
  source 1..402: mol_type = other DNA

SEQ ID NO: 72306 - DNA, 885 bp, synthetic construct; identical to SEQ ID NO: 72257
  misc_feature 1..885: note = Description of Artificial Sequence: Synthetic coding sequence
  source 1..885: mol_type = other DNA

SEQ ID NO: 72307 - DNA, 402 bp, synthetic construct; identical to SEQ ID NO: 72254
  misc_feature 1..402: note = Description of Artificial Sequence: Synthetic coding sequence
  source 1..402: mol_type = other DNA

SEQ ID NO: 72308 - DNA, 1092 bp, synthetic construct; identical to SEQ ID NO: 72272
  misc_feature 1..1092: note = Description of Artificial Sequence: Synthetic coding sequence
  source 1..1092: mol_type = other DNA

SEQ ID NO: 72309 - DNA, 1308 bp, synthetic construct
  misc_feature 1..1308: note = Description of Artificial Sequence: Synthetic coding sequence
  source 1..1308: mol_type = other DNA
atgggcgccggcgagagagtgcaggccccccccagagccgaggccaccgccggcagaggcgccgacagagccagaaccctggagggcagcagaatggccgccggcaccgccgtgggcgcctgggtgctggtgctgagcctgtggggcgccgtggtgggcgcccagaacatcaccgccagaatcggcgagcccctggtgctgaagtgcaagggcgcccccaagaagcccccccagagactggagtggaagctgaacaccggcagaaccgaggcctggaaggtgctgagcccccagggcggcggcccctgggacagcgtggccagagtgctgcccaacagcagcctgttcctgcccgccgtgggcatccaggacgagggcatcttcagatgccaggccatgaacagaaacggcaaggagaccaagagcaactacagagtgagagtgtaccagatccccggcaagcccgagatcgtggacagcgccagcgagctgaccgccggcgtgcccaacaaggtgggcacctgcgtgagcgagggcagctaccccgccggcaccctgagctggcacctggacggcaagcccctggtgcccaacgagaagggcgtgagcgtgaaggagcagaccagaagacaccccgagaccggcctgttcaccctgcagagcgagctgatggtgacccccgccagaggcggcgaccccagacccaccttcagctgcagcttcagccccggcctgcccagacacagagccctgagaaccgcccccatccagcccagagtgtgggagcccgtgcccctggaggaggtgcagctggtggtggagcccgagggcggcgccgtggcccccggcggcaccgtgaccctgacctgcgaggtgcccgcccagcccagcccccagatccactggatgaaggacggcgtgcccctgcccctgccccccagccccgtgctgatcctgcccgagatcggcccccaggaccagggcacctacagctgcgtggccacccacagcagccacggcccccaggagagcagagccgtgagcatcagcatcatcgagcccggcgaggagggccccaccgccggcagcgtgggcggcagcggcctgggcaccctggccctggccctgggcatcctgggcggcctgggcaccgccgccctgctgatcggcgtgatcctgtggcagagaagacagagaagaggcgaggagagaaaggcccccgagaaccaggaggaggaggaggagagagccgagctgaaccagagcgaggagcccgaggccggcgagagcagcaccggcggcccctag

SEQ ID NO: 72310 - DNA, 387 bp, synthetic construct; identical to SEQ ID NO: 72287
  misc_feature 1..387: note = Description of Artificial Sequence: Synthetic coding sequence
  source 1..387: mol_type = other DNA

SEQ ID NO: 72311 - DNA, 462 bp, synthetic construct; identical to SEQ ID NO: 72288
  misc_feature 1..462: note = Description of Artificial Sequence: Synthetic coding sequence
  source 1..462: mol_type = other DNA

SEQ ID NO: 72312 - DNA, 1092 bp, synthetic construct; identical to SEQ ID NO: 72272
  misc_feature 1..1092: note = Description of Artificial Sequence: Synthetic coding sequence
  source 1..1092: mol_type = other DNA

SEQ ID NO: 72313 - DNA, 366 bp, synthetic construct; identical to SEQ ID NO: 72255
  misc_feature 1..366: note = Description of Artificial Sequence: Synthetic coding sequence
  source 1..366: mol_type = other DNA

SEQ ID NO: 72314 - DNA, 402 bp, synthetic construct; identical to SEQ ID NO: 72254
  misc_feature 1..402: note = Description of Artificial Sequence: Synthetic coding sequence
  source 1..402: mol_type = other DNA

SEQ ID NO: 72315 - DNA, 387 bp, synthetic construct; identical to SEQ ID NO: 72287
  misc_feature 1..387: note = Description of Artificial Sequence: Synthetic coding sequence
  source 1..387: mol_type = other DNA

SEQ ID NO: 72316 - DNA, 1092 bp, synthetic construct; identical to SEQ ID NO: 72272
  misc_feature 1..1092: note = Description of Artificial Sequence: Synthetic coding sequence
  source 1..1092: mol_type = other DNA

SEQ ID NO: 72317 - DNA, 1308 bp, synthetic construct; identical to SEQ ID NO: 72258
  misc_feature 1..1308: note = Description of Artificial Sequence: Synthetic coding sequence
  source 1..1308: mol_type = other DNA

SEQ ID NO: 72318 - DNA, 462 bp, synthetic construct
  misc_feature 1..462: note = Description of Artificial Sequence: Synthetic coding sequence
  source 1..462: mol_type = other DNA
atggccgccggcaccgccgtgggcgcctgggtgctggtgctgagcctgtggggcgccgtggtgggcgcccagaacatcaccgccagaatcggcgagcccctggtgctgaagtgcaagggcgcccccaagaagcccccccagagactggagtggaagctgaacaccggcagaaccgaggcctggaaggtgctgagcccccagggcggcggcccctgggacagcgtggccagagtgctgcccaacagcagcctgttcctgcccgccgtgggcatccaggacgagggcatcctgggcggcctgggcaccgccgccctgctgatcggcgtgatcctgtggcagagaagacagagaagaggcgaggagagaaaggcccccgagaaccaggaggaggaggaggagagagccgagctgaaccagagcgaggagcccgaggccggcgagagcagcaccggcggcccctag

SEQ ID NO: 72319 - DNA, 402 bp, synthetic construct; identical to SEQ ID NO: 72254
  misc_feature 1..402: note = Description of Artificial Sequence: Synthetic coding sequence
  source 1..402: mol_type = other DNA

SEQ ID NO: 72320 - DNA, 885 bp, synthetic construct; identical to SEQ ID NO: 72257
  misc_feature 1..885: note = Description of Artificial Sequence: Synthetic coding sequence
  source 1..885: mol_type = other DNA

SEQ ID NO: 72321 - DNA, 1092 bp, synthetic construct
  misc_feature 1..1092: note = Description of Artificial Sequence: Synthetic coding sequence
  source 1..1092: mol_type = other DNA
atggccgccggcaccgccgtgggcgcctgggtgctggtgctgagcctgtggggcgccgtggtgggcgcccagaacatcaccgccagaatcggcgagcccctggtgctgaagtgcaagggcgcccccaagaagcccccccagagactggagtggaagctgaacaccggcagaaccgaggcctggaaggtgctgagcccccagggcggcggcccctgggacagcgtggccagagtgctgcccaacagcagcctgttcctgcccgccgtgggcatccaggacgagggcatcttcagatgccaggccatgaacagaaacggcaaggagaccaagagcaactacagagtgagagtgtaccagatccccggcaagcccgagatcgtggacagcgccagcgagctgaccgccggcgtgcccaacaaggtggtggaggagagcagaagaagcagaaagagaccctgcgagcaggaggtgggcacctgcgtgagcgagggcagctaccccgccggcaccctgagctggcacctggacggcaagcccctggtgcccaacgagaagggcgtgagcgtgaaggagcagaccagaagacaccccgagaccggcctgttcaccctgcagagcgagctgatggtgacccccgccagaggcggcgaccccagacccaccttcagctgcagcttcagccccggcctgcccagacacagagccctgagaaccgcccccatccagcccagagtgtgggagcccgtgcccctggaggaggtgcagctggtggtggagcccgagggcggcgccgtggcccccggcggcaccgtgaccctgacctgcgaggtgcccgcccagcccagcccccagatccactggatgaaggacggcgtgcccctgcccctgccccccagccccgtgctgatcctgcccgagatcggcccccaggaccagggcacctacagctgcgtggccacccacagcagccacggcccccaggagagcagagccgtgagcatcagcatcatcgagcccggcgaggagggccccaccgccggcgagggcttcgacaaggtgagagaggccgaggacagcccccagcacatgtag

SEQ ID NO: 72322 - DNA, 462 bp, synthetic construct; identical to SEQ ID NO: 72288
  misc_feature 1..462: note = Description of Artificial Sequence: Synthetic coding sequence
  source 1..462: mol_type = other DNA

SEQ ID NO: 72323 - DNA, 387 bp, synthetic construct; identical to SEQ ID NO: 72287
  misc_feature 1..387: note = Description of Artificial Sequence: Synthetic coding sequence
  source 1..387: mol_type = other DNA

SEQ ID NO: 72324 - DNA, 2460 bp, synthetic construct
  misc_feature 1..2460: note = Description of Artificial Sequence: Synthetic coding sequence
  source 1..2460: mol_type = other DNA
atgcccctgaccagcgccttcagagccgtggacaacgaccccggcatcatcgtgtggagaatcgagaagatggagctggccctggtgcccgtgagcgcccacggcaacttctacgagggcgactgctacgtgatcctgagcaccagaagagtggccagcctgctgagccaggacatccacttctggatcggcaaggacagcagccaggacgagcagagctgcgccgccatctacaccacccagctggacgactacctgggcggcagccccgtgcagcacagagaggtgcagtaccacgagagcgacaccttcagaggctacttcaagcagggcatcatctacaagcagggcggcgtggccagcggcatgaagcacgtggagaccaacacctacgacgtgaagagactgctgcacgtgaagggcaagagaaacatcagagccaccgaggtggagatgagctgggacagcttcaacagaggcgacgtgttcctgctggacctgggcaaggtgatcatccagtggaacggccccgagagcaacagcggcgagagactgaaggccatgctgctggccaaggacatcagagacagagagagaggcggcagagccaagatcggcgtgatcgagggcgacaaggaggccgccagccccgagctgatgaaggtgctgcaggacaccctgggcagaagaagcatcatcaagcccaccgtgcccgacgagatcatcgaccagaagcagaagagcaccatcatgctgtaccacatcagcgacagcgccggccagctggccgtgaccgaggtggccaccagacccctggtgcaggacctgctgaaccacgacgactgctacatcctggaccagagcggcaccaagatctacgtgtggaagggcaagggcgccaccaaggccgagaagcaggccgccatgagcaaggccctgggcttcatcaagatgaagagctaccccagcagcaccaacgtggagaccgtgaacgacggcgccgagagcgccatgttcaagcagctgttccagaagtggagcgtgaaggaccagaccatgggcctgggcaagaccttcagcatcggcaagatcgccaaggtgttccaggacaagttcgacgtgaccctgctgcacaccaagcccgaggtggccgcccaggagagaatggtggacgacggcaacggcaaggtggaggtgtggagaatcgagaacctggagctggtgcccgtggagtaccagtggtacggcttcttctacggcggcgactgctacctggtgctgtacacctacgaggtgaacggcaagccccaccacatcctgtacatctggcagggcagacacgccagccaggacgagctggccgccagcgcctaccaggccgtggaggtggacagacagttcgacggcgccgccgtgcaggtgagagtgagaatgggcaccgagcccagacacttcatggccatcttcaagggcaagctggtgatcttcgagggcggcaccagcagaaagggcaacgccgagcccgacccccccgtgagactgttccagatccacggcaacgacaagagcaacaccaaggccgtggaggtgcccgccttcgccagcagcctgaacagcaacgacgtgttcctgctgagaacccaggccgagcactacctgtggtacggcaagggcagcagcggcgacgagagagccatggccaaggagctggccagcctgctgtgcgacggcagcgagaacaccgtggccgagggccaggagcccgccgagttctgggacctgctgggcggcaagaccccctacgccaacgacaagagactgcagcaggagatcctggacgtgcagagcagactgttcgagtgcagcaacaagaccggccagttcgtggtgaccgagatcaccgacttcacccaggacgacctgaaccccaccgacgtgatgctgctggacacctgggaccaggtgttcctgtggatcggcgccgaggccaacgccaccgagaaggagagcgccctggccaccgcccagcagtacctgcacacccaccccagcggcagagaccccgacacccccatcctgatcatcaagcagggcttcgagccccccatcttcaccggctggttcctggcctgggaccccaacatctggagcgccggcaagacctacgagcagctgaaggaggagctgggcgacgccgccgccatcatgagaatcaccgccgacatgaagaacgccaccctgagcctgaacagcaacgacagcgagcccaagtactaccccatcgccgtgctgctgaagaaccagaaccaggagctgcccgaggacgtgaaccccgccaagaaggagaactacctgagcgagcaggacttcgtgagcgtgttcggcatcaccagaggccagttcgccgccctgcccggctggaagcagctgcagatgaagaaggagaagggcctgttctag

SEQ ID NO: 72325 - DNA, 2439 bp, synthetic construct
  misc_feature 1..2439: note = Description of Artificial Sequence: Synthetic coding sequence
  source 1..2439: mol_type = other DNA
atgagcagcaccggccaccccggcagctacaagatctggggcgagaagatggagctggccctggtgcccgtgagcgcccacggcaacttctacgagggcgactgctacgtgatcctgagcaccagaagagtggccagcctgctgagccaggacatccacttctggatcggcaaggacagcagccaggacgagcagagctgcgccgccatctacaccacccagctggacgactacctgggcggcagccccgtgcagcacagagaggtgcagtaccacgagagcgacaccttcagaggctacttcaagcagggcatcatctacaagcagggcggcgtggccagcggcatgaagcacgtggagaccaacacctacgacgtgaagagactgctgcacgtgaagggcaagagaaacatcagagccaccgaggtggagatgagctgggacagcttcaacagaggcgacgtgttcctgctggacctgggcaaggtgatcatccagtggaacggccccgagagcaacagcggcgagagactgaaggccatgctgctggccaaggacatcagagacagagagagaggcggcagagccaagatcggcgtgatcgagggcgacaaggaggccgccagccccgagctgatgaaggtgctgcaggacaccctgggcagaagaagcatcatcaagcccaccgtgcccgacgagatcatcgaccagaagcagaagagcaccatcatgctgtaccacatcagcgacagcgccggccagctggccgtgaccgaggtggccaccagacccctggtgcaggacctgctgaaccacgacgactgctacatcctggaccagagcggcaccaagatctacgtgtggaagggcaagggcgccaccaaggccgagaagcaggccgccatgagcaaggccctgggcttcatcaagatgaagagctaccccagcagcaccaacgtggagaccgtgaacgacggcgccgagagcgccatgttcaagcagctgttccagaagtggagcgtgaaggaccagaccatgggcctgggcaagaccttcagcatcggcaagatcgccaaggtgttccaggacaagttcgacgtgaccctgctgcacaccaagcccgaggtggccgcccaggagagaatggtggacgacggcaacggcaaggtggaggtgtggagaatcgagaacctggagctggtgcccgtggagtaccagtggtacggcttcttctacggcggcgactgctacctggtgctgtacacctacgaggtgaacggcaagccccaccacatcctgtacatctggcagggcagacacgccagccaggacgagctggccgccagcgcctaccaggccgtggaggtggacagacagttcgacggcgccgccgtgcaggtgagagtgagaatgggcaccgagcccagacacttcatggccatcttcaagggcaagctggtgatcttcgagggcggcaccagcagaaagggcaacgccgagcccgacccccccgtgagactgttccagatccacggcaacgacaagagcaacaccaaggccgtggaggtgcccgccttcgccagcagcctgaacagcaacgacgtgttcctgctgagaacccaggccgagcactacctgtggtacggcaagggcagcagcggcgacgagagagccatggccaaggagctggccagcctgctgtgcgacggcagcgagaacaccgtggccgagggccaggagcccgccgagttctgggacctgctgggcggcaagaccccctacgccaacgacaagagactgcagcaggagatcctggacgtgcagagcagactgttcgagtgcagcaacaagaccggccagttcgtggtgaccgagatcaccgacttcacccaggacgacctgaaccccaccgacgtgatgctgctggacacctgggaccaggtgttcctgtggatcggcgccgaggccaacgccaccgagaaggagagcgccctggccaccgcccagcagtacctgcacacccaccccagcggcagagaccccgacacccccatcctgatcatcaagcagggcttcgagccccccatcttcaccggctggttcctggcctgggaccccaacatctggagcgccggcaagacctacgagcagctgaaggaggagctgggcgacgccgccgccatcatgagaatcaccgccgacatgaagaacgccaccctgagcctgaacagcaacgacagcgagcccaagtactaccccatcgccgtgctgctgaagaaccagaaccaggagctgcccgaggacgtgaaccccgccaagaaggagaactacctgagcgagcaggacttcgtgagcgtgttcggcatcaccagaggccagttcgccgccctgcccggctggaagcagctgcagatgaagaaggagaagggcctgttctag

SEQ ID NO: 72326 - DNA, 474 bp, synthetic construct
  misc_feature 1..474: note = Description of Artificial Sequence: Synthetic coding sequence
  source 1..474: mol_type = other DNA
atgcccctgaccagcgccttcagagccgtggacaacgaccccggcatcatcgtgtggagaatcgagaagatggagctggccctggtgcccgtgagcgcccacggcaacttctacgagggcgactgctacgtgatcctgagcaccagaagagtggccagcctgctgagccaggacatccacttctggatcggcaaggacagcagccaggacgagcagagctgcgccgccatctacaccacccagctggacgactacctgggcggcagccccgtgcagcacagagaggtgcagtaccacgagagcgacaccttcagaggctacttcaagcagggcatcatctacaagcagggcggcgtggccagcggcatgaagcacgtggagaccaacacctacgacgtgaagagactgctgcacgtgaagggcaagagaaacatcagagccaccgaggtggagatgagctgggacagcttctag

SEQ ID NO: 72327 - DNA, 2859 bp, synthetic construct
  misc_feature 1..2859: note = Description of Artificial Sequence: Synthetic coding sequence
  source 1..2859: mol_type = other DNA
atgaagttcaagagaagacaccaggccttccccagcttcttcaagatgaaggtgagcctgcccagcgaccccagctgcgtggaggagatcctgagagagagccagcacctgacccccggcttcaccctgcagaagtggaacgaccccaccaccagagccagcaccaagagcgtgagcttcaagagcatgctggaggacgacctgaagctgagcagcgacgaggacgacctggagcccgtgaagaccctgaccacccagtgcaccgccaccgagctgtaccaggccgtggagaaggccaagcccagaaacaaccccgtgaacccccccctggccaccccccagcccccccccgccgtgcaggccagcggcggcagcggcagcagcagcgagagcgagagcagcagcgagagcgacagcgacaccgagagcagcaccaccgacagcgagagcaacgaggcccccagagtggccacccccgagcccgagccccccagcaccaacaagtggcagctggacaagtggctgaacaaggtgaccagccagaacaagagcttcatctgcggccagaacgagacccccatggagaccatcagcctgcccccccccatcatccagcccatggaggtgcagatgaaggtgaagaccaacgccagccaggtgcccgccgagcccaaggagagacccctgctgagcctgatcagagagaaggccagacccagacccacccagaagatccccgagaccaaggccctgaagcacaagctgagcaccaccagcgagaccgtgagccagagaaccatcggcaagaagcagcccaagaaggtggagaagaacaccagcaccgacgagttcacctggcccaagcccaacatcaccagcagcacccccaaggagaaggagagcgtggagctgcacgacccccccagaggcagaaacaaggccaccgcccacaagcccgcccccagaaaggagcccagacccaacatccccctggcccccgagaagaagaagtacagaggccccggcaagatcgtgcccaagagcagagagttcatcgagaccgacagcagcaccagcgacagcaacaccgaccaggaggagaccctgcagatcaaggtgctgcccccctgcatcatcagcggcggcaacaccgccaagagcaaggagatctgcggcgccagcctgaccctgagcaccctgatgagcagcagcggcagcaacaacaacctgagcatcagcaacgaggagcccaccttcagccccatccccgtgatgcagaccgagatcctgagccccctgagagaccacgagaacctgaagaacctgtgggtgaagatcgacctggacctgctgagcagagtgcccggccacagcagcctgcacgccgcccccgccaagcccgaccacaaggagaccgccaccaagcccaagagacagaccgccgtgaccgccgtggagaagcccgcccccaagggcaagagaaagcacaagcccatcgaggtggccgagaagatccccgagaagaagcagagactggaggaggccaccaccatctgcctgctgcccccctgcatcagccccgcccccccccacaagccccccaacaccagagagaacaacagcagcagaagagccaacagaagaaaggaggagaagctgttccccccccccctgagccccctgcccgaggacccccccagaagaagaaacgtgagcggcaacaacggccccttcggccaggacaagaacatcgccatgaccggccagatcaccagcaccaagcccaagagaaccgagggcaagttctgcgccaccttcaagggcatcagcgtgaacgagggcgacacccccaagaaggccagcagcgccaccatcaccgtgaccaacaccgccatcgccaccgccaccgtgaccgccaccgccatcgtgaccaccaccgtgaccgccaccgccaccgccaccgccaccaccaccaccaccaccaccaccatcagcaccatcaccagcaccatcaccaccggcctgatggacagcagccacctggagatgaccagctgggccgccctgcccctgctgagcagcagcagcaccaacgtgagaagacccaagctgaccttcgacgacagcgtgcacaacgccgactactacatgcaggaggccaagaagctgaagcacaaggccgacgccctgttcgagaagttcggcaaggccgtgaactacgccgacgccgccctgagcttcaccgagtgcggcaacgccatggagagagaccccctggaggccaagagcccctacaccatgtacagcgagaccgtggagctgctgagatacgccatgagactgaagaacttcgccagccccctggccagcgacggcgacaagaagctggccgtgctgtgctacagatgcctgagcctgctgtacctgagaatgttcaagctgaagaaggaccacgccatgaagtacagcagaagcctgatggagtacttcaagcagaacgccagcaaggtggcccagatccccagcccctgggtgagcaacggcaagaacacccccagccccgtgagcctgaacaacgtgagccccatcaacgccatgggcaactgcaacaacggccccgtgaccatcccccagagaatccaccacatggccgccagccacgtgaacatcaccagcaacgtgctgagaggctacgagcactgggacatggccgacaagctgaccagagagaacaaggagttcttcggcgacctggacaccctgatgggccccctgacccagcacagcagcatgaccaacctggtgagatacgtgagacagggcctgtgctggctgagaatcgacgcccacctgctgtag

SEQ ID NO: 72328 - DNA, 3837 bp, synthetic construct
  misc_feature 1..3837: note = Description of Artificial Sequence: Synthetic coding sequence
  source 1..3837: mol_type = other DNA
atggacctgttcgacttcttcagagactgggacctggagcagcagtgccactacgagcaggacagaagcgccctgaagaagagagagtgggagagaagaaaccaggaggtgcagcaggaggacgacctgttcagcagcggcttcgacctgttcggcgagccctacaagaccaacaagggcgacgccctggccaacagagtgcagaacaccctgggcaactacgacgagatgaagaacctgctgaccaaccacagcaaccagaaccacctggtgggcatccccaagaacagcgtgccccagaaccccaacaacaagaacgagcccagcttcttccccgagcagaagaacagaatcatccccccccaccaggacaacacccaccccagcgcccccatgcccccccccagcgtggtgatcctgaacagcaccctgatccacagcaacagaaagagcaagcccgagtggagcagagacagccacaaccccagcaccgtgctggccagccaggccagcggccagcccaacaagatgcagaccctgacccaggaccagagccaggccaagctggaggacttcttcgtgtaccccgccgagcagccccagatcggcgaggtggaggagagcaaccccagcgccaaggaggacagcaaccccaacagcagcggcgaggacgccttcaaggagatcttccagagcaacagccccgaggagagcgagttcgccgtgcaggcccccggcagccccctggtggccagcagcctgctggcccccagcagcggcctgagcgtgcagaacttcccccccggcctgtactgcaagaccagcatgggccagcagaagcccaccgcctacgtgagacccatggacggccaggaccaggcccccgacatcagccccaccctgaagcccagcatcgagttcgagaacagcttcggcaacctgagcttcggcaccctgctggacggcaagcccagcgccgccagcagcaagaccaagctgcccaagttcaccatcctgcagaccagcgaggtgagcctgcccagcgaccccagctgcgtggaggagatcctgagagagagccagcacctgacccccggcttcaccctgcagaagtggaacgaccccaccaccagagccagcaccaagagcgtgagcttcaagagcatgctggaggacgacctgaagctgagcagcgacgaggacgacctggagcccgtgaagaccctgaccacccagtgcaccgccaccgagctgtaccaggccgtggagaaggccaagcccagaaacaaccccgtgaacccccccctggccaccccccagcccccccccgccgtgcaggccagcggcggcagcggcagcagcagcgagagcgagagcagcagcgagagcgacagcgacaccgagagcagcaccaccgacagcgagagcaacgaggcccccagagtggccacccccgagcccgagccccccagcaccaacaagtggcagctggacaagtggctgaacaaggtgaccagccagaacaagagcttcatctgcggccagaacgagacccccatggagaccatcagcctgcccccccccatcatccagcccatggaggtgcagatgaaggtgaagaccaacgccagccaggtgcccgccgagcccaaggagagacccctgctgagcctgatcagagagaaggccagacccagacccacccagaagatccccgagaccaaggccctgaagcacaagctgagcaccaccagcgagaccgtgagccagagaaccatcggcaagaagcagcccaagaaggtggagaagaacaccagcaccgacgagttcacctggcccaagcccaacatcaccagcagcacccccaaggagaaggagagcgtggagctgcacgacccccccagaggcagaaacaaggccaccgcccacaagcccgcccccagaaaggagcccagacccaacatccccctggcccccgagaagaagaagtacagaggccccggcaagatcgtgcccaagagcagagagttcatcgagaccgacagcagcaccagcgacagcaacaccgaccaggaggagaccctgcagatcaaggtgctgcccccctgcatcatcagcggcggcaacaccgccaagagcaaggagatctgcggcgccagcctgaccctgagcaccctgatgagcagcagcggcagcaacaacaacctgagcatcagcaacgaggagcccaccttcagccccatccccgtgatgcagaccgagatcctgagccccctgagagaccacgagaacctgaagaacctgtgggtgaagatcgacctggacctgctgagcagagtgcccggccacagcagcctgcacgccgcccccgccaagcccgaccacaaggagaccgccaccaagcccaagagacagaccgccgtgaccgccgtggagaagcccgcccccaagggcaagagaaagcacaagcccatcgaggtggccgagaagatccccgagaagaagcagagactggaggaggccaccaccatctgcctgctgcccccctgcatcagccccgcccccccccacaagccccccaacaccagagagaacaacagcagcagaagagccaacagaagaaaggaggagaagctgttccccccccccctgagccccctgcccgaggacccccccagaagaagaaacgtgagcggcaacaacggccccttcggccaggacaagaacatcgccatgaccggccagatcaccagcaccaagcccaagagaaccgagggcaagttctgcgccaccttcaagggcatcagcgtgaacgagggcgacacccccaagaaggccagcagcgccaccatcaccgtgaccaacaccgccatcgccaccgccaccgtgaccgccaccgccatcgtgaccaccaccgtgaccgccaccgccaccgccaccgccaccaccaccaccaccaccaccaccatcagcaccatcaccagcaccatcaccaccggcctgatggacagcagccacctggagatgaccagctgggccgccctgcccctgctgagcagcagcagcaccaacgtgagaagacccaagctgaccttcgacgacagcgtgcacaacgccgactactacatgcaggaggccaagaagctgaagcacaaggccgacgccctgttcgagaagttcggcaaggccgtgaactacgccgacgccgccctgagcttcaccgagtgcggcaacgccatggagagagaccccctggaggccaagagcccctacaccatgtacagcgagaccgtggagctgctgagatacgccatgagactgaagaacttcgccagccccctggccagcgacggcgacaagaagctggccgtgctgtgctacagatgcctgagcctgctgtacctgagaatgttcaagctgaagaaggaccacgccatgaagtacagcagaagcctgatggagtacttcaagcagaacgccagcaaggtggcccagatccccagcccctgggtgagcaacggcaagaacacccccagccccgtgagcctgaacaacgtgagccccatcaacgccatgggcaactgcaacaacggccccgtgaccatcccccagagaatccaccacatggccgccagccacgtgaacatcaccagcaacgtgctgagaggctacgagcactgggacatggccgacaagctgaccagagagaacaaggagttcttcggcgacctggacaccctgatgggccccctgacccagcacagcagcatgaccaacctggtgagatacgtgagacagggcctgtgctggctgagaatcgacgcccacctgctgtag

SEQ ID NO: 72329 - DNA, 3831 bp, synthetic construct
  misc_feature 1..3831: note = Description of Artificial Sequence: Synthetic coding sequence
  source 1..3831: mol_type = other DNA
atggacctgttcgacttcttcagagactgggacctggagcagcagtgccactacgagcaggacagaagcgccctgaagaagagagagtgggagagaagaaaccaggaggtgcagcaggaggacgacctgttcagcagcggcttcgacctgttcggcgagccctacaagaccaacaagggcgacgccctggccaacagagtgcagaacaccctgggcaactacgacgagatgaagaacctgctgaccaaccacagcaaccagaaccacctggtgggcatccccaagaacagcgtgccccagaaccccaacaacaagaacgagcccagcttcttccccgagcagaagaacagaatcatccccccccaccaggacaacacccaccccagcgcccccatgcccccccccagcgtggtgatcctgaacagcaccctgatccacagcaacagaaagagcaagcccgagtggagcagagacagccacaaccccagcaccgtgctggccagccaggccagcggccagcccaacaagatgcagaccctgacccaggaccagagccaggccaagctggaggacttcttcgtgtaccccgccgagcagccccagatcggcgaggtggaggagagcaaccccagcgccaaggaggacagcaaccccaacagcagcggcgaggacgccttcaaggagatcttccagagcaacagccccgaggagagcgagttcgccgtgcaggcccccggcagccccctggtggccagcagcctgctggcccccagcagcggcctgagcgtgcagaacttcccccccggcctgtactgcaagaccagcatgggccagcagaagcccaccgcctacgtgagacccatggacggccaggaccaggcccccgacatcagccccaccctgaagcccagcatcgagttcgagaacagcttcggcaacctgagcttcggcaccctgctggacggcaagcccagcgccgccagcagcaagaccaagctgcccaagttcaccatcctgcagaccagcgaggtgagcctgcccagcgaccccagctgcgtggaggagatcctgagagagagccagcacctgacccccggcttcaccctgcagaagtggaacgaccccaccaccagagccagcaccaagagcgtgagcttcaagagcatgctggaggacgacctgaagctgagcagcgacgaggacgacctggagcccgtgaagaccctgaccacccagtgcaccgccaccgagctgtaccaggccgtggagaaggccaagcccagaaacaaccccgtgaacccccccctggccaccccccagcccccccccgccgtgcaggccagcggcggcagcggcagcagcagcgagagcgagagcagcagcgagagcgacagcgacaccgagagcagcaccaccgacagcgagagcaacgaggcccccagagtggccacccccgagcccgagccccccagcaccaacaagtggcagctggacaagtggctgaacaaggtgaccagccagaacaagagcttcatctgcggccagaacgagacccccatggagaccatcagcctgcccccccccatcatccagcccatggaggtgcagatgaaggtgaagaccaacgccagccaggtgcccgccgagcccaaggagagacccctgctgagcctgatcagagagaaggccagacccagacccacccagaagatccccgagaccaaggccctgaagcacaagctgagcaccaccagcgagaccgtgagccagagaaccatcggcaagaagcagcccaagaaggtggagaagaacaccagcaccgacgagttcacctggcccaagcccaacatcaccagcagcacccccaaggagaaggagagcgtggagctgcacgacccccccagaggcagaaacaaggccaccgcccacaagcccgcccccagaaaggagcccagacccaacatccccctggcccccgagaagaagaagtacagaggccccggcaagatcgtgcccaagagcagagagttcatcgagaccgacagcagcaccagcgacagcaacaccgaccaggaggagaccctgcagatcaaggtgctgcccccctgcatcatcagcggcggcaacaccgccaagagcaaggagatctgcggcgccagcctgaccctgagcaccctgatgagcagcagcggcagcaacaacaacctgagcatcagcaacgaggagcccaccttcagccccatccccgtgatgcagaccgagatcctgagccccctgagagaccacgagaacctgaagaacctgtgggtgaagatcgacctggacctgctgagcagagtgcccggccacagcagcctgcacgccgcccccgccaagcccgaccacaaggagaccgccaccaagcccaagagacagaccgccgtgaccgccgtggagaagcccgcccccaagggcaagagaaagcacaagcccatcgaggtggccgagaagatccccgagaagaagcagagactggaggaggccaccaccatctgcctgctgcccccctgcatcagccccgcccccccccacaagccccccaacaccagagagaacaacagcagcagaagagccaacagaagaaaggaggagaagctgttccccccccccctgagccccctgcccgaggacccccccagaagaagaaacgtgagcggcaacaacggccccttcggccaggacaagaacatcgccatgaccggccagatcaccagcaccaagcccaagagaaccgagggcaagttctgcgccaccttcaagggcatcagcgagggcgacacccccaagaaggccagcagcgccaccatcaccgtgaccaacaccgccatcgccaccgccaccgtgaccgccaccgccatcgtgaccaccaccgtgaccgccaccgccaccgccaccgccaccaccaccaccaccaccaccaccatcagcaccatcaccagcaccatcaccaccggcctgatggacagcagccacctggagatgaccagctgggccgccctgcccctgctgagcagcagcagcaccaacgtgagaagacccaagctgaccttcgacgacagcgtgcacaacgccgactactacatgcaggaggccaagaagctgaagcacaaggccgacgccctgttcgagaagttcggcaaggccgtgaactacgccgacgccgccctgagcttcaccgagtgcggcaacgccatggagagagaccccctggaggccaagagcccctacaccatgtacagcgagaccgtggagctgctgagatacgccatgagactgaagaacttcgccagccccctggccagcgacggcgacaagaagctggccgtgctgtgctacagatgcctgagcctgctgtacctgagaatgttcaagctgaagaaggaccacgccatgaagtacagcagaagcctgatggagtacttcaagcagaacgccagcaaggtggcccagatccccagcccctgggtgagcaacggcaagaacacccccagccccgtgagcctgaacaacgtgagccccatcaacgccatgggcaactgcaacaacggccccgtgaccatcccccagagaatccaccacatggccgccagccacgtgaacatcaccagcaacgtgctgagaggctacgagcactgggacatggccgacaagctgaccagagagaacaaggagttcttcggcgacctggacaccctgatgggccccctgacccagcacagcagcatgaccaacctggtgagatacgtgagacagggcctgtgctggctgagaatcgacgcccacctgctgtag

SEQ ID NO: 72330 - DNA, 1284 bp, synthetic construct
  misc_feature 1..1284: note = Description of Artificial Sequence: Synthetic coding sequence
  source 1..1284: mol_type = other DNA
atggacctgttcgacttcttcagagactgggacctggagcagcagtgccactacgagcaggacagaagcgccctgaagaagagagagtgggagagaagaaaccaggaggtgcagcaggaggacgacctgttcagcagcggcttcgacctgttcggcgagccctacaagaccaacaagggcgacgccctggccaacagagtgcagaacaccctgggcaactacgacgagatgaagaacctgctgaccaaccacagcaaccagaaccacctggtgggcatccccaagaacagcgtgccccagaaccccaacaacaagaacgagcccagcttcttccccgagcagaagaacagaatcatccccccccaccaggacaacacccaccccagcgcccccatgcccccccccagcgtggtgatcctgaacagcaccctgatccacagcaacagaaagagcaagcccgagtggagcagagacagccacaaccccagcaccgtgctggccagccaggccagcggccagcccaacaagatgcagaccctgacccaggaccagagccaggccaagctggaggacttcttcgtgtaccccgccgagcagccccagatcggcgaggtggaggagagcaaccccagcgccaaggaggacagcaaccccaacagcagcggcgaggacgccttcaaggagatcttccagagcaacagccccgaggagagcgagttcgccgtgcaggcccccggcagccccctggtggccagcagcctgctggcccccagcagcggcctgagcgtgcagaacttcccccccggcctgtactgcaagaccagcatgggccagcagaagcccaccgcctacgtgagacccatggacggccaggaccaggcccccgacatcagccccaccctgaagcccagcatcgagttcgagaacagcttcggcaacctgagcttcggcaccctgctggacggcaagcccagcgccgccagcagcaagaccaagctgcccaagttcaccatcctgcagaccagcgaggtgagcctgcccagcgaccccagctgcgtggaggagatcctgagagagagccagcacctgacccccggcttcaccctgcagaagtggaacgaccccaccaccagagccagcaccaagatgctggaggacgacctgaagctgagcagcgacgaggacgacctggagcccgtgaagaccctgaccacccagtgcaccgccaccgagctgtaccaggccgtggagaaggccaagcccagaaacaaccccgtgaagtag

SEQ ID NO: 72331 - DNA, 3936 bp, synthetic construct
  misc_feature 1..3936: note = Description of Artificial Sequence: Synthetic coding sequence
  source 1..3936: mol_type = other DNA
atggacctgttcgacttcttcagagactgggacctggagcagcagtgccactacgagcaggacagaagcgccctgaagaagagagagtgggagagaagaaaccaggaggtgcagcaggaggacgacctgttcagcagcggcttcgacctgttcggcgagccctacaaggtggccgagtacaccaacaagggcgacgccctggccaacagagtgcagaacaccctgggcaactacgacgagatgaagaacctgctgaccaaccacagcaaccagaaccacctggtgggcatccccaagaacagcgtgccccagaaccccaacaacaagaacgagcccagcttcttccccgagcagaagaacagaatcatccccccccaccaggacaacacccaccccagcgcccccatgcccccccccagcgtggtgatcctgaacagcaccctgatccacagcaacagaaagagcaagcccgagtggagcagagacagccacaaccccagcaccgtgctggccagccaggccagcggccagcccaacaagatgcagaccctgacccaggaccagagccaggccaagctggaggacttcttcgtgtaccccgccgagcagccccagatcggcgaggtggaggagagcaaccccagcgccaaggaggacagcaaccccaacagcagcggcgaggacgccttcaaggagatcttccagagcaacagccccgaggagagcgagttcgccgtgcaggcccccggcagccccctggtggccagcagcctgctggcccccagcagcggcctgagcgtgcagaacttcccccccggcctgtactgcaagaccagcatgggccagcagaagcccaccgcctacgtgagacccatggacggccaggaccaggcccccgacatcagccccaccctgaagcccagcatcgagttcgagaacagcttcggcaacctgagcttcggcaccctgctggacggcaagcccagcgccgccagcagcaagaccaagctgcccaagttcaccatcctgcagaccagcgaggtgagcctgcccagcgaccccagctgcgtggaggagatcctgagagagatgacccacagctggcccacccccctgaccagcatgcacaccgccggccacagcgagcagagcaccttcagcatccccggccaggagagccagcacctgacccccggcttcaccctgcagaagtggaacgaccccaccaccagagccagcaccaagagcgtgagcttcaagagcatgctggaggacgacctgaagctgagcagcgacgaggacgacctggagcccgtgaagaccctgaccacccagtgcaccgccaccgagctgtaccaggccgtggagaaggccaagcccagaaacaaccccgtgaacccccccctggccaccccccagcccccccccgccgtgcaggccagcggcggcagcggcagcagcagcgagagcgagagcagcagcgagagcgacagcgacaccgagagcagcaccaccgacagcgagagcaacgaggcccccagagtggccacccccgagcccgagccccccagcaccaacaagtggcagctggacaagtggctgaacaaggtgaccagccagaacaagagcttcatctgcggccagaacgagacccccatggagaccatcagcctgcccccccccatcatccagcccatggaggtgcagatgaaggtgaagaccaacgccagccaggtgcccgccgagcccaaggagagacccctgctgagcctgatcagagagaaggccagacccagacccacccagaagatccccgagaccaaggccctgaagcacaagctgagcaccaccagcgagaccgtgagccagagaaccatcggcaagaagcagcccaagaaggtggagaagaacaccagcaccgacgagttcacctggcccaagcccaacatcaccagcagcacccccaaggagaaggagagcgtggagctgcacgacccccccagaggcagaaacaaggccaccgcccacaagcccgcccccagaaaggagcccagacccaacatccccctggcccccgagaagaagaagtacagaggccccggcaagatcgtgcccaagagcagagagttcatcgagaccgacagcagcaccagcgacagcaacaccgaccaggaggagaccctgcagatcaaggtgctgcccccctgcatcatcagcggcggcaacaccgccaagagcaaggagatctgcggcgccagcctgaccctgagcaccctgatgagcagcagcggcagcaacaacaacctgagcatcagcaacgaggagcccaccttcagccccatccccgtgatgcagaccgagatcctgagccccctgagagaccacgagaacctgaagaacctgtgggtgaagatcgacctggacctgctgagcagagtgcccggccacagcagcctgcacgccgcccccgccaagcccgaccacaaggagaccgccaccaagcccaagagacagaccgccgtgaccgccgtggagaagcccgcccccaagggcaagagaaagcacaagcccatcgaggtggccgagaagatccccgagaagaagcagagactggaggaggccaccaccatctgcctgctgcccccctgcatcagccccgcccccccccacaagccccccaacaccagagagaacaacagcagcagaagagccaacagaagaaaggaggagaagctgttccccccccccctgagccccctgcccgaggacccccccagaagaagaaacgtgagcggcaacaacggccccttcggccaggacaagaacatcgccatgaccggccagatcaccagcaccaagcccaagagaaccgagggcaagttctgcgccaccttcaagggcatcagcgtgaacgagggcgacacccccaagaaggccagcagcgccaccatcaccgtgaccaacaccgccatcgccaccgccaccgtgaccgccaccgccatcgtgaccaccaccgtgaccgccaccgccaccgccaccgccaccaccaccaccaccaccaccaccatcagcaccatcaccagcaccatcaccaccggcctgatggacagcagccacctggagatgaccagctgggccgccctgcccctgctgagcagcagcagcaccaacgtgagaagacccaagctgaccttcgacgacagcgtgcacaacgccgactactacatgcaggaggccaagaagctgaagcacaaggccgacgccctgttcgagaagttcggcaaggccgtgaactacgccgacgccgccctgagcttcaccgagtgcggcaacgccatggagagagaccccctggaggccaagagcccctacaccatgtacagcgagaccgtggagctgctgagatacgccatgagactgaagaacttcgccagccccctggccagcgacggcgacaagaagctggccgtgctgtgctacagatgcctgagcctgctgtacctgagaatgttcaagctgaagaaggaccacgccatgaagtacagcagaagcctgatggagtacttcaagcagaacgccagcaaggtggcccagatccccagcccctgggtgagcaacggcaagaacacccccagccccgtgagcctgaacaacgtgagccccatcaacgccatgggcaactgcaacaacggccccgtgaccatcccccagagaatccaccacatggccgccagccacgtgaacatcaccagcaacgtgctgagaggctacgagcactgggacatggccgacaagctgaccagagagaacaaggagttcttcggcgacctggacaccctgatgggccccctgacccagcacagcagcatgaccaacctggtgagatacgtgagacagggcctgtgctggctgagaatcgacgcccacctgctgtag

SEQ ID NO: 72332 - DNA, 1410 bp, synthetic construct
  misc_feature 1..1410: note = Description of Artificial Sequence: Synthetic coding sequence
  source 1..1410: mol_type = other DNA
atgagcgccctgaccccccccaccgacatgcccacccccaccaccgacaagatcacccaggccgccatggagaccatctacctgtgcaagttcagagtgagcatggacggcgagtggctgtgcctgagagagctggacgacatcagcctgacccccgaccccgagcccacccacgaggaccccaactacctgatggccaacgagagaatgaacctgatgaacatggccaagctgagcatcaagggcctgatcgagagcgccctgaacctgggcagaaccctggacagcgactacgcccccctgcagcagttcttcgtggtgatggagcactgcctgaagcacggcctgaaggccaagaagaccttcctgggccagaacaagagcttctggggccccctggagctggtggagaagctggtgcccgaggccgccgagatcaccgccagcgtgaaggacctgcccggcctgaagacccccgtgggcagaggcagagcctggctgagactggccctgatgcagaagaagctgagcgagtacatgaaggccctgatcaacaagaaggagctgctgagcgagttctacgagcccaacgccctgatgatggaggaggagggcgccatcatcgccggcctgctggtgggcctgaacgtgatcgacgccaacttctgcatgaagggcgaggacctggacagccaggtgggcgtgatcgacttcagcatgtacctgaaggacggcaacagcagcaagggcaccgagggcgacggccagatcaccgccatcctggaccagaagaactacgtggaggagctgaacagacacctgaacgccaccgtgaacaacctgcaggccaaggtggacgccctggagaagagcaacaccaagctgaccgaggagctggccgtggccaacaacagaatcatcaccctgcaggaggagatggagagagtgaaggaggagagcagctacatcctggagagcaacagaaagggccccaagcaggacagaaccgccgagggccaggccctgagcgaggccagaaagcacctgaaggaggagacccagctgagactggacgtggagaaggagctggagatgcagatcagcatgagacaggagatggagctggccatgaagatgctggagaaggacgtgtgcgagaagcaggacgccctggtgagcctgagacagcagctggacgacctgagagccctgaagcacgagctggccttcaagctgcagagcagcgacctgggcgtgaagcagaagagcgagctgaacagcagactggaggagaagaccaaccagatggccgccaccatcaagcagctggagcagagcgagaaggacctggtgaagcaggccaagaccctgaacagcgccgccaacaagctgatccccaagcaccactag

SEQ ID NO: 72333 - DNA, 2394 bp, synthetic construct
  misc_feature 1..2394: note = Description of Artificial Sequence: Synthetic coding sequence
  source 1..2394: mol_type = other DNA
atggcccacagatgcctgagactgtggggcagaggcggctgctggcccagaggcctgcagcagctgctggtgcccggcggcgtgggccccggcgagcagccctgcctgagaaccctgtacagattcgtgaccacccaggccagagccagcagaaacagcctgctgaccgacatcatcgccgcctaccagagattctgcagcagaccccccaagggcttcgagaagtacttccccaacggcaagaacggcaagaaggccagcgagcccaaggaggtgatgggcgagaagaaggagagcaagcccgccgccaccaccagaagcagcggcggcggcggcggcggcggcggcaagagaggcggcaagaaggacgacagccactggtggagcagattccagaagggcgacatcccctgggacgacaaggacttcagaatgttcttcctgtggaccgccctgttctggggcggcgtgatgttctacctgctgctgaagagaagcggcagagagatcacctggaaggacttcgtgaacaactacctgagcaagggcgtggtggacagactggaggtggtgaacaagagattcgtgagagtgaccttcacccccggcaagacccccgtggacggccagtacgtgtggttcaacatcggcagcgtggacaccttcgagagaaacctggagaccctgcagcaggagctgggcatcgagggcgagaacagagtgcccgtggtgtacatcgccgagagcgacggcagcttcctgctgagcatgctgcccaccgtgctgatcatcgccttcctgctgtacaccatcagaagaggccccgccggcatcggcagaaccggcagaggcatgggcggcctgttcagcgtgggcgagaccaccgccaaggtgctgaaggacgagatcgacgtgaagttcaaggacgtggccggctgcgaggaggccaagctggagatcatggagttcgtgaacttcctgaagaaccccaagcagtaccaggacctgggcgccaagatccccaagggcgccatcctgaccggcccccccggcaccggcaagaccctgctggccaaggccaccgccggcgaggccaacgtgcccttcatcaccgtgagcggcagcgagttcctggagatgttcgtgggcgtgggccccgccagagtgagagacctgttcgccctggccagaaagaacgccccctgcatcctgttcatcgacgagatcgacgccgtgggcagaaagagaggcagaggcaacttcggcggccagagcgagcaggagaacaccctgaaccagctgctggtggagatggacggcttcaacaccaccaccaacgtggtgatcctggccggcaccaacagacccgacatcctggaccccgccctgctgagacccggcagattcgacagacagatcttcatcggcccccccgacatcaagggcagagccagcatcttcaaggtgcacctgagacccctgaagctggacagcaccctggagaaggacaagctggccagaaagctggccagcctgacccccggcttcagcggcgccgacgtggccaacgtgtgcaacgaggccgccctgatcgccgccagacacctgagcgacagcatcaaccagaagcacttcgagcaggccatcgagagagtgatcggcggcctggagaagaagacccaggtgctgcagcccgaggagaagaagaccgtggcctaccacgaggccggccacgccgtggccggctggtacctggagcacgccgaccccctgctgaaggtgagcatcatccccagaggcaagggcctgggctacgcccagtacctgcccaaggagcagtacctgtacaccaaggagcagctgctggacagaatgtgcatgaccctgggcggcagagtgagcgaggagatcttcttcggcagaatcaccaccggcgcccaggacgacctgagaaaggtgacccagagcgcctacgcccagatcgtgcagttcggcatgaacgagaaggtgggccagatcagcttcgacctgcccagacagggcgacatggtgctggagaagccctacagcgaggccaccgccagactgatcgacgacgaggtgagaatcctgatcaacgacgcctacaagagaaccgtggccctgctgaccgagaagaaggccgacgtggagaaggtggccctgctgctgctggagaaggaggtgctggacaagaacgacatggtggagctgctgggccccagacccttcgccgagaagagcacctacgaggagttcgtggagggcaccggcagcctggacgaggacaccagcctgcccgagggcctgaaggactggaacaaggagagagagaaggagaaggaggagccccccggcgagaaggtggccaactag

SEQ ID NO: 72334 - DNA, 2439 bp, synthetic construct
  misc_feature 1..2439: note = Description of Artificial Sequence: Synthetic coding sequence
  source 1..2439: mol_type = other DNA
ggcgccggcggcagaagaagaagagtggagagcctgggcagcagcgtgagcagaagaagagccagcctgcccggcggcctgagccccagcagagccagattccccagaccccccgtggtggcctgccccagactgagagagcagccctgcctgagaaccctgtacagattcgtgaccacccaggccagagccagcagaaacagcctgctgaccgacatcatcgccgcctaccagagattctgcagcagaccccccaagggcttcgagaagtacttccccaacggcaagaacggcaagaaggccagcgagcccaaggaggtgatgggcgagaagaaggagagcaagcccgccgccaccaccagaagcagcggcggcggcggcggcggcggcggcaagagaggcggcaagaaggacgacagccactggtggagcagattccagaagggcgacatcccctgggacgacaaggacttcagaatgttcttcctgtggaccgccctgttctggggcggcgtgatgttctacctgctgctgaagagaagcggcagagagatcacctggaaggacttcgtgaacaactacctgagcaagggcgtggtggacagactggaggtggtgaacaagagattcgtgagagtgaccttcacccccggcaagacccccgtggacggccagtacgtgtggttcaacatcggcagcgtggacaccttcgagagaaacctggagaccctgcagcaggagctgggcatcgagggcgagaacagagtgcccgtggtgtacatcgccgagagcgacggcagcttcctgctgagcatgctgcccaccgtgctgatcatcgccttcctgctgtacaccatcagaagaggccccgccggcatcggcagaaccggcagaggcatgggcggcctgttcagcgtgggcgagaccaccgccaaggtgctgaaggacgagatcgacgtgaagttcaaggacgtggccggctgcgaggaggccaagctggagatcatggagttcgtgaacttcctgaagaaccccaagcagtaccaggacctgggcgccaagatccccaagggcgccatcctgaccggcccccccggcaccggcaagaccctgctggccaaggccaccgccggcgaggccaacgtgcccttcatcaccgtgagcggcagcgagttcctggagatgttcgtgggcgtgggccccgccagagtgagagacctgttcgccctggccagaaagaacgccccctgcatcctgttcatcgacgagatcgacgccgtgggcagaaagagaggcagaggcaacttcggcggccagagcgagcaggagaacaccctgaaccagctgctggtggagatggacggcttcaacaccaccaccaacgtggtgatcctggccggcaccaacagacccgacatcctggaccccgccctgctgagacccggcagattcgacagacagatcttcatcggcccccccgacatcaagggcagagccagcatcttcaaggtgcacctgagacccctgaagctggacagcaccctggagaaggacaagctggccagaaagctggccagcctgacccccggcttcagcggcgccgacgtggccaacgtgtgcaacgaggccgccctgatcgccgccagacacctgagcgacagcatcaaccagaagcacttcgagcaggccatcgagagagtgatcggcggcctggagaagaagacccaggtgctgcagcccgaggagaagaagaccgtggcctaccacgaggccggccacgccgtggccggctggtacctggagcacgccgaccccctgctgaaggtgagcatcatccccagaggcaagggcctgggctacgcccagtacctgcccaaggagcagtacctgtacaccaaggagcagctgctggacagaatgtgcatgaccctgggcggcagagtgagcgaggagatcttcttcggcagaatcaccaccggcgcccaggacgacctgagaaaggtgacccagagcgcctacgcccagatcgtgcagttcggcatgaacgagaaggtgggccagatcagcttcgacctgcccagacagggcgacatggtgctggagaagccctacagcgaggccaccgccagactgatcgacgacgaggtgagaatcctgatcaacgacgcctacaagagaaccgtggccctgctgaccgagaagaaggccgacgtggagaaggtggccctgctgctgctggagaaggaggtgctggacaagaacgacatggtggagctgctgggccccagacccttcgccgagaagagcacctacgaggagttcgtggagggcaccggcagcctggacgaggacaccagcctgcccgagggcctgaaggactggaacaaggagagagagaaggagaaggaggagccccccggcgagaaggtggccaactag

SEQ ID NO: 72335 - DNA, 7251 bp, synthetic construct
  misc_feature 1..7251: note = Description of Artificial Sequence: Synthetic coding sequence
  source 1..7251: mol_type = other DNA
atgaccaccctgctgtgggtgttcgtgaccctgagagtgatcaccgccgccgtgaccgtggagaccagcgaccacgacaacagcctgagcgtgagcatcccccagcccagccccctgagagtgctgctgggcaccagcctgaccatcccctgctacttcatcgaccccatgcaccccgtgaccaccgcccccagcaccgcccccctggcccccagaatcaagtggagcagagtgagcaaggagaaggaggtggtgctgctggtggccaccgagggcagagtgagagtgaacagcgcctaccaggacaaggtgagcctgcccaactaccccgccatccccagcgacgccaccctggaggtgcagagcctgagaagcaacgacagcggcgtgtacagatgcgaggtgatgcacggcatcgaggacagcgaggccaccctggaggtggtggtgaagggcatcgtgttccactacagagccatcagcaccagatacaccctggacttcgacagagcccagagagcctgcctgcagaacagcgccatcatcgccacccccgagcagctgcaggccgcctacgaggacggcttccaccagtgcgacgccggctggctggccgaccagaccgtgagataccccatccacacccccagagagggctgctacggcgacaaggacgagttccccggcgtgagaacctacggcatcagagacaccaacgagacctacgacgtgtactgcttcgccgaggagatggagggcgaggtgttctacgccaccagccccgagaagttcaccttccaggaggccgccaacgagtgcagaagactgggcgccagactggccaccaccggccagctgtacctggcctggcaggccggcatggacatgtgcagcgccggctggctggccgacagaagcgtgagataccccatcagcaaggccagacccaactgcggcggcaacctgctgggcgtgagaaccgtgtacgtgcacgccaaccagaccggctaccccgaccccagcagcagatacgacgccatctgctacaccggcgaggacttcgtggacatccccgagaacttcttcggcgtgggcggcgaggaggacatcaccgtgcagaccgtgacctggcccgacatggagctgcccctgcccagaaacatcaccgagggcgaggccagaggcagcgtgatcctgaccgtgaagcccatcttcgaggtgagccccagccccctggagcccgaggagcccttcaccttcgcccccgagatcggcgccaccgccttcgccgaggtggagaacgagaccggcgaggccaccagaccctggggcttccccacccccggcctgggccccgccaccgccttcaccagcgaggacctggtggtgcaggtgaccgccgtgcccggccagccccacctgcccggcggcgtggtgttccactacagacccggccccaccagatacagcctgaccttcgaggaggcccagcaggcctgcctgagaaccggcgccgtgatcgccagccccgagcagctgcaggccgcctacgaggccggctacgagcagtgcgacgccggctggctgagagaccagaccgtgagataccccatcgtgagccccagaaccccctgcgtgggcgacaaggacagcagccccggcgtgagaacctacggcgtgagacccagcaccgagacctacgacgtgtactgcttcgtggacagactggagggcgaggtgttcttcgccaccagactggagcagttcaccttccaggaggccctggagttctgcgagagccacaacgccaccctggccaccaccggccagctgtacgccgcctggagcagaggcctggacaagtgctacgccggctggctggccgacggcagcctgagataccccatcgtgacccccagacccgcctgcggcggcgacaagcccggcgtgagaaccgtgtacctgtaccccaaccagaccggcctgcccgaccccctgagcagacaccacgccttctgcttcagaggcatcagcgccgtgcccagccccggcgaggaggagggcggcacccccaccagccccagcggcgtggaggagtggatcgtgacccaggtggtgcccggcgtggccgccgtgcccgtggaggaggagaccaccgccgtgcccagcggcgagaccaccgccatcctggagttcaccaccgagcccgagaaccagaccgagtgggagcccgcctacacccccgtgggcaccagccccctgcccggcatcctgcccacctggccccccaccggcgccgccaccgaggagagcaccgagggccccagcgccaccgaggtgcccagcgccagcgaggagcccagccccagcgaggtgcccttccccagcgaggagcccagccccagcgaggagcccttccccagcgtgagacccttccccagcgtggagctgttccccagcgaggagcccttccccagcaaggagcccagccccagcgaggagcccagcgccagcgaggagccctacacccccagcccccccgtgcccagctggaccgagctgcccagcagcggcgaggagagcggcgcccccgacgtgagcggcgacttcaccggcagcggcgacgtgagcggccacctggacttcagcggccagctgagcggcgacagagccagcggcctgcccagcggcgacctggacagcagcggcctgaccagcaccgtgggcagcggcctgcccgtggagagcggcctgcccagcggcgacgaggagagaatcgagtggcccagcacccccaccgtgggcgagctgcccagcggcgccgagatcctggagggcagcgccagcggcgtgggcgacctgagcggcctgcccagcggcgaggtgctggagaccagcgccagcggcgtgggcgacctgagcggcctgcccagcggcgaggtgctggagaccaccgcccccggcgtggaggacatcagcggcctgcccagcggcgaggtgctggagaccaccgcccccggcgtggaggacatcagcggcctgcccagcggcgaggtgctggagaccaccgcccccggcgtggaggacatcagcggcctgcccagcggcgaggtgctggagaccaccgcccccggcgtggaggacatcagcggcctgcccagcggcgaggtgctggagaccaccgcccccggcgtggaggacatcagcggcctgcccagcggcgaggtgctggagaccgccgcccccggcgtggaggacatcagcggcctgcccagcggcgaggtgctggagaccgccgcccccggcgtggaggacatcagcggcctgcccagcggcgaggtgctggagaccgccgcccccggcgtggaggacatcagcggcctgcccagcggcgaggtgctggagaccgccgcccccggcgtggaggacatcagcggcctgcccagcggcgaggtgctggagaccgccgcccccggcgtggaggacatcagcggcctgcccagcggcgaggtgctggagaccgccgcccccggcgtggaggacatcagcggcctgcccagcggcgaggtgctggagaccgccgcccccggcgtggaggacatcagcggcctgcccagcggcgaggtgctggagaccgccgcccccggcgtggaggacatcagcggcctgcccagcggcgaggtgctggagaccgccgcccccggcgtggaggacatcagcggcctgcccagcggcgaggtgctggagaccgccgcccccggcgtggaggacatcagcggcctgcccagcggcgaggtgctggagaccgccgcccccggcgtggaggacatcagcggcctgcccagcggcgaggtgctggagaccaccgcccccggcgtggaggagatcagcggcctgcccagcggcgaggtgctggagaccaccgcccccggcgtggacgagatcagcggcctgcccagcggcgaggtgctggagaccaccgcccccggcgtggaggagatcagcggcctgcccagcggcgaggtgctggagaccagcaccagcgccgtgggcgacctgagcggcctgcccagcggcggcgaggtgctggagatcagcgtgagcggcgtggaggacatcagcggcctgcccagcggcgaggtggtggagaccagcgccagcggcatcgaggacgtgagcgagctgcccagcggcgagggcctggagaccagcgccagcggcgtggaggacctgagcagactgcccagcggcgaggaggtgctggagatcagcgccagcggcttcggcgacctgagcggcctgcccagcggcggcgagggcctggagaccagcgccagcgaggtgggcaccgacctgagcggcctgcccagcggcagagagggcctggagaccagcgccagcggcgccgaggacctgagcggcctgcccagcggcaaggaggacctggtgggcagcgccagcggcgacctggacctgggcaagctgcccagcggcaccctgggcagcggccaggcccccgagaccagcggcctgcccagcggcttcagcggcgagtacagcggcgtggacctgggcagcggcccccccagcggcctgcccgacttcagcggcctgcccagcggcttccccaccgtgagcctggtggacagcaccctggtggaggtggtgaccgccagcaccgccagcgagctggagggcagaggcaccatcggcatcagcggcgccggcgagatcagcggcctgcccagcagcgagctggacatcagcggcagagccagcggcctgcccagcggcaccgagctgagcggccaggccagcggcagccccgacgtgagcggcgagatccccggcctgttcggcgtgagcggccagcccagcggcttccccgacaccagcggcgagaccagcggcgtgaccgagctgagcggcctgagcagcggccagcccggcatcagcggcgaggccagcggcgtgctgtacggcaccagccagcccttcggcatcaccgacctgagcggcgagaccagcggcgtgcccgacctgagcggccagcccagcggcctgcccggcttcagcggcgccaccagcggcgtgcccgacctggtgagcggcaccaccagcggcagcggcgagagcagcggcatcaccttcgtggacaccagcctggtggaggtggcccccaccaccttcaaggaggaggagggcctgggcagcgtggagctgagcggcctgcccagcggcgaggccgacctgagcggcaagagcggcatggtggacgtgagcggccagttcagcggcaccgtggacagcagcggcttcaccagccagacccccgagttcagcggcctgcccagcggcatcgccgaggtgagcggcgagagcagcagagccgagatcggcagcagcctgcccagcggcgcctactacggcagcggcacccccagcagcttccccaccgtgagcctggtggacagaaccctggtggagagcgtgacccaggcccccaccgcccaggaggccggcgagggccccagcggcatcctggagctgagcggcgcccacagcggcgcccccgacatgagcggcgagcacagcggcttcctggacctgagcggcctgcagagcggcctgatcgagcccagcggcgagccccccggcaccccctacttcagcggcgacttcgccagcaccaccaacgtgagcggcgagagcagcgtggccatgggcaccagcggcgaggccagcggcctgcccgaggtgaccctgatcaccagcgagttcgtggagggcgtgaccgagcccaccatcagccaggagctgggccagagaccccccgtgacccacaccccccagctgttcgagagcagcggcaaggtgagcaccgccggcgacatcagcggcgccacccccgtgctgcccggcagcggcgtggaggtgagcagcgtgcccgagagcagcagcgagaccagcgcctaccccgaggccggcttcggcgccagcgccgcccccgaggccagcagagaggacagcggcagccccgacctgagcgagaccaccagcgccttccacgaggccaacctggagagaagcagcggcctgggcgtgagcggcagcaccctgaccttccaggagggcgaggccagcgccgcccccgaggtgagcggcgagagcaccaccaccagcgacgtgggcaccgaggcccccggcctgcccagcgccacccccaccgccagcggcgacagaaccgagatcagcggcgacctgagcggccacaccagccagctgggcgtggtgatcagcaccagcatccccgagagcgagtggacccagcagacccagagacccgccgagacccacctggagatcgagagcagcagcctgctgtacagcggcgaggagacccacaccgtggagaccgccaccagccccaccgacgccagcatccccgccagccccgagtggaagagagagagcgagagcaccgccgccgcccccgccagaagctgcgccgaggagccctgcggcgccggcacctgcaaggagaccgagggccacgtgatctgcctgtgcccccccggctacaccggcgagcactgcaacatcgaccaggaggtgtgcgaggagggctggaacaagtaccagggccactgctacagacacttccccgacagagagacctgggtggacgccgagagaagatgcagagagcagcagagccacctgagcagcatcgtgacccccgaggagcaggagttcgtgaacaacaacgcccaggactaccagtggatcggcctgaacgacagaaccatcgagggcgacttcagatggagcgacggccaccccatgcagttcgagaactggagacccaaccagcccgacaacttcttcgccgccggcgaggactgcgtggtgatgatctggcacgagaagggcgagtggaacgacgtgccctgcaactaccacctgcccttcacctgcaagaagggcaccgtggcctgcggcgagccccccgtggtggagcacgccagaaccttcggccagaagaaggacagatacgagatcaacagcctggtgagataccagtgcaccgagggcttcgtgcagagacacatgcccaccatcagatgccagcccagcggccactgggaggagccccagatcacctgcaccgaccccaccacctacaagagaagactgcagaagagaagcagcagacaccccagaagaagcagacccagcaccgcccactag

SEQ ID NO: 72336 - DNA, 7296 bp, synthetic construct
  misc_feature 1..7296: note = Description of Artificial Sequence: Synthetic coding sequence
  source 1..7296: mol_type = other DNA
atgaccaccctgctgtgggtgttcgtgaccctgagagtgatcaccgccgccgtgaccgtggagaccagcgaccacgacaacagcctgagcgtgagcatcccccagcccagccccctgagagtgctgctgggcaccagcctgaccatcccctgctacttcatcgaccccatgcaccccgtgaccaccgcccccagcaccgcccccctggcccccagaatcaagtggagcagagtgagcaaggagaaggaggtggtgctgctggtggccaccgagggcagagtgagagtgaacagcgcctaccaggacaaggtgagcctgcccaactaccccgccatccccagcgacgccaccctggaggtgcagagcctgagaagcaacgacagcggcgtgtacagatgcgaggtgatgcacggcatcgaggacagcgaggccaccctggaggtggtggtgaagggcatcgtgttccactacagagccatcagcaccagatacaccctggacttcgacagagcccagagagcctgcctgcagaacagcgccatcatcgccacccccgagcagctgcaggccgcctacgaggacggcttccaccagtgcgacgccggctggctggccgaccagaccgtgagataccccatccacacccccagagagggctgctacggcgacaaggacgagttccccggcgtgagaacctacggcatcagagacaccaacgagacctacgacgtgtactgcttcgccgaggagatggagggcgaggtgttctacgccaccagccccgagaagttcaccttccaggaggccgccaacgagtgcagaagactgggcgccagactggccaccaccggccagctgtacctggcctggcaggccggcatggacatgtgcagcgccggctggctggccgacagaagcgtgagataccccatcagcaaggccagacccaactgcggcggcaacctgctgggcgtgagaaccgtgtacgtgcacgccaaccagaccggctaccccgaccccagcagcagatacgacgccatctgctacaccggcgaggacttcgtggacatccccgagaacttcttcggcgtgggcggcgaggaggacatcaccgtgcagaccgtgacctggcccgacatggagctgcccctgcccagaaacatcaccgagggcgaggccagaggcagcgtgatcctgaccgtgaagcccatcttcgaggtgagccccagccccctggagcccgaggagcccttcaccttcgcccccgagatcggcgccaccgccttcgccgaggtggagaacgagaccggcgaggccaccagaccctggggcttccccacccccggcctgggccccgccaccgccttcaccagcgaggacctggtggtgcaggtgaccgccgtgcccggccagccccacctgcccggcggcgtggtgttccactacagacccggccccaccagatacagcctgaccttcgaggaggcccagcaggcctgcctgagaaccggcgccgtgatcgccagccccgagcagctgcaggccgcctacgaggccggctacgagcagtgcgacgccggctggctgagagaccagaccgtgagataccccatcgtgagccccagaaccccctgcgtgggcgacaaggacagcagccccggcgtgagaacctacggcgtgagacccagcaccgagacctacgacgtgtactgcttcgtggacagactggagggcgaggtgttcttcgccaccagactggagcagttcaccttccaggaggccctggagttctgcgagagccacaacgccaccctggccaccaccggccagctgtacgccgcctggagcagaggcctggacaagtgctacgccggctggctggccgacggcagcctgagataccccatcgtgacccccagacccgcctgcggcggcgacaagcccggcgtgagaaccgtgtacctgtaccccaaccagaccggcctgcccgaccccctgagcagacaccacgccttctgcttcagaggcatcagcgccgtgcccagccccggcgaggaggagggcggcacccccaccagccccagcggcgtggaggagtggatcgtgacccaggtggtgcccggcgtggccgccgtgcccgtggaggaggagaccaccgccgtgcccagcggcgagaccaccgccatcctggagttcaccaccgagcccgagaaccagaccgagtgggagcccgcctacacccccgtgggcaccagccccctgcccggcatcctgcccacctggccccccaccggcgccgccaccgaggagagcaccgagggccccagcgccaccgaggtgcccagcgccagcgaggagcccagccccagcgaggtgcccttccccagcgaggagcccagccccagcgaggagcccttccccagcgtgagacccttccccagcgtggagctgttccccagcgaggagcccttccccagcaaggagcccagccccagcgaggagcccagcgccagcgaggagccctacacccccagcccccccgtgcccagctggaccgagctgcccagcagcggcgaggagagcggcgcccccgacgtgagcggcgacttcaccggcagcggcgacgtgagcggccacctggacttcagcggccagctgagcggcgacagagccagcggcctgcccagcggcgacctggacagcagcggcctgaccagcaccgtgggcagcggcctgcccgtggagagcggcctgcccagcggcgacgaggagagaatcgagtggcccagcacccccaccgtgggcgagctgcccagcggcgccgagatcctggagggcagcgccagcggcgtgggcgacctgagcggcctgcccagcggcgaggtgctggagaccagcgccagcggcgtgggcgacctgagcggcctgcccagcggcgaggtgctggagaccaccgcccccggcgtggaggacatcagcggcctgcccagcggcgaggtgctggagaccaccgcccccggcgtggaggacatcagcggcctgcccagcggcgaggtgctggagaccaccgcccccggcgtggaggacatcagcggcctgcccagcggcgaggtgctggagaccaccgcccccggcgtggaggacatcagcggcctgcccagcggcgaggtgctggagaccaccgcccccggcgtggaggacatcagcggcctgcccagcggcgaggtgctggagaccaccgcccccggcgtggaggacatcagcggcctgcccagcggcgaggtgctggagaccgccgcccccggcgtggaggacatcagcggcctgcccagcggcgaggtgctggagaccgccgcccccggcgtggaggacatcagcggcctgcccagcggcgaggtgctggagaccgccgcccccggcgtggaggacatcagcggcctgcccagcggcgaggtgctggagaccgccgcccccggcgtggaggacatcagcggcctgcccagcggcgaggtgctggagaccgccgcccccggcgtggaggacatcagcggcctgcccagcggcgaggtgctggagaccgccgcccccggcgtggaggacatcagcggcctgcccagcggcgaggtgctggagaccgccgcccccggcgtggaggacatcagcggcctgcccagcggcgaggtgctggagaccgccgcccccggcgtggaggacatcagcggcctgcccagcggcgaggtgctggagaccgccgcccccggcgtggaggacatcagcggcctgcccagcggcgaggtgctggagaccgccgcccccggcgtggaggacatcagcggcctgcccagcggcgaggtgctggagaccgccgcccccggcgtggaggacatcagcggcctgcccagcggcgaggtgctggagaccgccgcccccggcgtggaggacatcagcggcctgcccagcggcgaggtgctggagaccgccgcccccggcgtggaggacatcagcggcctgcccagcggcgaggtgctggagaccgccgcccccggcgtggaggacatcagcggcctgcccagcggcgaggtgctggagaccgccgcccccggcgtggaggacatcagcggcctgcccagcggcgaggtgctggagaccgccgcccccggcgtggaggacatcagcggcctgcccagcggcgaggtgctggagaccaccgcccccggcgtggaggagatcagcggcctgcccagcggcgaggtgctggagaccaccgcccccggcgtggacgagatcagcggcctgcccagcggcgaggtgctggagaccaccgcccccggcgtggaggagatcagcggcctgcccagcggcgaggtgctggagaccagcaccagcgccgtgggcgacctgagcggcctgcccagcggcggcgaggtgctggagatcagcgtgagcggcgtggaggacatcagcggcctgcccagcggcgaggtggtggagaccagcgccagcggcatcgaggacgtgagcgagctgcccagcggcgagggcctggagaccagcgccagcggcgtggaggacctgagcagactgcccagcggcgaggaggtgctggagatcagcgccagcggcttcggcgacctgagcggcctgcccagcggcggcgagggcctggagaccagcgccagcgaggtgggcaccgacctgagcggcctgcccagcggcagagagggcctggagaccagcgccagcggcgccgaggacctgagcggcctgcccagcggcaaggaggacctggtgggcagcgccagcggcgacctggacctgggcaagctgcccagcggcaccctgggcagcggccaggcccccgagaccagcggcctgcccagcggcttcagcggcgagtacagcggcgtggacctgggcagcggcccccccagcggcctgcccgacttcagcggcctgcccagcggcttccccaccgtgagcctggtggacagcaccctggtggaggtggtgaccgccagcaccgccagcgagctggagggcagaggcaccatcggcatcagcggcgccggcgagatcagcggcctgcccagcagcgagctggacatcagcggcagagccagcggcctgcccagcggcaccgagctgagcggccaggccagcggcagccccgacgtgagcggcgagatccccggcctgttcggcgtgagcggccagcccagcggcttccccgacaccagcggcgagaccagcggcgtgaccgagctgagcggcctgagcagcggccagcccggcatcagcggcgaggccagcggcgtgctgtacggcaccagccagcccttcggcatcaccgacctgagcggcgagaccagcggcgtgcccgacctgagcggccagcccagcggcctgcccggcttcagcggcgccaccagcggcgtgcccgacctggtgagcggcaccaccagcggcagcggcgagagcagcggcatcaccttcgtggacaccagcctggtggaggtggcccccaccaccttcaaggaggaggagggcctgggcagcgtggagctgagcggcctgcccagcggcgaggccgacctgagcggcaagagcggcatggtggacgtgagcggccagttcagcggcaccgtggacagcagcggcttcaccagccagacccccgagttcagcggcctgcccagcggcatcgccgaggtgagcggcgagagcagcagagccgagatcggcagcagcctgcccagcggcgcctactacggcagcggcacccccagcagcttccccaccgtgagcctggtggacagaaccctggtggagagcgtgacccaggcccccaccgcccaggaggccggcgagggccccagcggcatcctggagctgagcggcgcccacagcggcgcccccgacatgagcggcgagcacagcggcttcctggacctgagcggcctgcagagcggcctgatcgagcccagcggcgagccccccggcaccccctacttcagcggcgacttcgccagcaccaccaacgtgagcggcgagagcagcgtggccatgggcaccagcggcgaggccagcggcctgcccgaggtgaccctgatcaccagcgagttcgtggagggcgtgaccgagcccaccatcagccaggagctgggccagagaccccccgtgacccacaccccccagctgttcgagagcagcggcaaggtgagcaccgccggcgacatcagcggcgccacccccgtgctgcccggcagcggcgtggaggtgagcagcgtgcccgagagcagcagcgagaccagcgcctaccccgaggccggcttcggcgccagcgccgcccccgaggccagcagagaggacagcggcagccccgacctgagcgagaccaccagcgccttccacgaggccaacctggagagaagcagcggcctgggcgtgagcggcagcaccctgaccttccaggagggcgaggccagcgccgcccccgaggtgagcggcgagagcaccaccaccagcgacgtgggcaccgaggcccccggcctgcccagcgccacccccaccgccagcggcgacagaaccgagatcagcggcgacctgagcggccacaccagccagctgggcgtggtgatcagcaccagcatccccgagagcgagtggacccagcagacccagagacccgccgagacccacctggagatcgagagcagcagcctgctgtacagcggcgaggagacccacaccgtggagaccgccaccagccccaccgacgccagcatccccgccagccccgagtggaagagagagagcgagagcaccgccgccgaccaggaggtgtgcgaggagggctggaacaagtaccagggccactgctacagacacttccccgacagagagacctgggtggacgccgagagaagatgcagagagcagcagagccacctgagcagcatcgtgacccccgaggagcaggagttcgtgaacaacaacgcccaggactaccagtggatcggcctgaacgacagaaccatcgagggcgacttcagatggagcgacggccaccccatgcagttcgagaactggagacccaaccagcccgacaacttcttcgccgccggcgaggactgcgtggtgatgatctggcacgagaagggcgagtggaacgacgtgccctgcaactaccacctgcccttcacctgcaagaagggcaccgccaccacctacaagagaagactgcagaagagaagcagcagacaccccagaagaagcagacccagcaccgcccactag

SEQ ID NO: 72337 - DNA, 7593 bp, synthetic construct
  misc_feature 1..7593: note = Description of Artificial Sequence: Synthetic coding sequence
  source 1..7593: mol_type = other DNA
atgaccaccctgctgtgggtgttcgtgaccctgagagtgatcaccgccgccgtgaccgtggagaccagcgaccacgacaacagcctgagcgtgagcatcccccagcccagccccctgagagtgctgctgggcaccagcctgaccatcccctgctacttcatcgaccccatgcaccccgtgaccaccgcccccagcaccgcccccctggcccccagaatcaagtggagcagagtgagcaaggagaaggaggtggtgctgctggtggccaccgagggcagagtgagagtgaacagcgcctaccaggacaaggtgagcctgcccaactaccccgccatccccagcgacgccaccctggaggtgcagagcctgagaagcaacgacagcggcgtgtacagatgcgaggtgatgcacggcatcgaggacagcgaggccaccctggaggtggtggtgaagggcatcgtgttccactacagagccatcagcaccagatacaccctggacttcgacagagcccagagagcctgcctgcagaacagcgccatcatcgccacccccgagcagctgcaggccgcctacgaggacggcttccaccagtgcgacgccggctggctggccgaccagaccgtgagataccccatccacacccccagagagggctgctacggcgacaaggacgagttccccggcgtgagaacctacggcatcagagacaccaacgagacctacgacgtgtactgcttcgccgaggagatggagggcgaggtgttctacgccaccagccccgagaagttcaccttccaggaggccgccaacgagtgcagaagactgggcgccagactggccaccaccggccagctgtacctggcctggcaggccggcatggacatgtgcagcgccggctggctggccgacagaagcgtgagataccccatcagcaaggccagacccaactgcggcggcaacctgctgggcgtgagaaccgtgtacgtgcacgccaaccagaccggctaccccgaccccagcagcagatacgacgccatctgctacaccggcgaggacttcgtggacatccccgagaacttcttcggcgtgggcggcgaggaggacatcaccgtgcagaccgtgacctggcccgacatggagctgcccctgcccagaaacatcaccgagggcgaggccagaggcagcgtgatcctgaccgtgaagcccatcttcgaggtgagccccagccccctggagcccgaggagcccttcaccttcgcccccgagatcggcgccaccgccttcgccgaggtggagaacgagaccggcgaggccaccagaccctggggcttccccacccccggcctgggccccgccaccgccttcaccagcgaggacctggtggtgcaggtgaccgccgtgcccggccagccccacctgcccggcggcgtggtgttccactacagacccggccccaccagatacagcctgaccttcgaggaggcccagcaggcctgcctgagaaccggcgccgtgatcgccagccccgagcagctgcaggccgcctacgaggccggctacgagcagtgcgacgccggctggctgagagaccagaccgtgagataccccatcgtgagccccagaaccccctgcgtgggcgacaaggacagcagccccggcgtgagaacctacggcgtgagacccagcaccgagacctacgacgtgtactgcttcgtggacagactggagggcgaggtgttcttcgccaccagactggagcagttcaccttccaggaggccctggagttctgcgagagccacaacgccaccctggccaccaccggccagctgtacgccgcctggagcagaggcctggacaagtgctacgccggctggctggccgacggcagcctgagataccccatcgtgacccccagacccgcctgcggcggcgacaagcccggcgtgagaaccgtgtacctgtaccccaaccagaccggcctgcccgaccccctgagcagacaccacgccttctgcttcagaggcatcagcgccgtgcccagccccggcgaggaggagggcggcacccccaccagccccagcggcgtggaggagtggatcgtgacccaggtggtgcccggcgtggccgccgtgcccgtggaggaggagaccaccgccgtgcccagcggcgagaccaccgccatcctggagttcaccaccgagcccgagaaccagaccgagtgggagcccgcctacacccccgtgggcaccagccccctgcccggcatcctgcccacctggccccccaccggcgccgccaccgaggagagcaccgagggccccagcgccaccgaggtgcccagcgccagcgaggagcccagccccagcgaggtgcccttccccagcgaggagcccagccccagcgaggagcccttccccagcgtgagacccttccccagcgtggagctgttccccagcgaggagcccttccccagcaaggagcccagccccagcgaggagcccagcgccagcgaggagccctacacccccagcccccccgtgcccagctggaccgagctgcccagcagcggcgaggagagcggcgcccccgacgtgagcggcgacttcaccggcagcggcgacgtgagcggccacctggacttcagcggccagctgagcggcgacagagccagcggcctgcccagcggcgacctggacagcagcggcctgaccagcaccgtgggcagcggcctgcccgtggagagcggcctgcccagcggcgacgaggagagaatcgagtggcccagcacccccaccgtgggcgagctgcccagcggcgccgagatcctggagggcagcgccagcggcgtgggcgacctgagcggcctgcccagcggcgaggtgctggagaccagcgccagcggcgtgggcgacctgagcggcctgcccagcggcgaggtgctggagaccaccgcccccggcgtggaggacatcagcggcctgcccagcggcgaggtgctggagaccaccgcccccggcgtggaggacatcagcggcctgcccagcggcgaggtgctggagaccaccgcccccggcgtggaggacatcagcggcctgcccagcggcgaggtgctggagaccaccgcccccggcgtggaggacatcagcggcctgcccagcggcgaggtgctggagaccaccgcccccggcgtggaggacatcagcggcctgcccagcggcgaggtgctggagaccaccgcccccggcgtggaggacatcagcggcctgcccagcggcgaggtgctggagaccgccgcccccggcgtggaggacatcagcggcctgcccagcggcgaggtgctggagaccgccgcccccggcgtggaggacatcagcggcctgcccagcggcgaggtgctggagaccgccgcccccggcgtggaggacatcagcggcctgcccagcggcgaggtgctggagaccgccgcccccggcgtggaggacatcagcggcctgcccagcggcgaggtgctggagaccgccgcccccggcgtggaggacatcagcggcctgcccagcggcgaggtgctggagaccgccgcccccggcgtggaggacatcagcggcctgcccagcggcgaggtgctggagaccgccgcccccggcgtggaggacatcagcggcctgcccagcggcgaggtgctggagaccgccgcccccggcgtggaggacatcagcggcctgcccagcggcgaggtgctggagaccgccgcccccggcgtggaggacatcagcggcctgcccagcggcgaggtgctggagaccgccgcccccggcgtggaggacatcagcggcctgcccagcggcgaggtgctggagaccgccgcccccggcgtggaggacatcagcggcctgcccagcggcgaggtgctggagaccgccgcccccggcgtggaggacatcagcggcctgcccagcggcgaggtgctggagaccgccgcccccggcgtggaggacatcagcggcctgcccagcggcgaggtgctggagaccgccgcccccggcgtggaggacatcagcggcctgcccagcggcgaggtgctggagaccgccgcccccggcgtggaggacatcagcggcctgcccagcggcgaggtgctggagaccgccgcccccggcgtggaggacatcagcggcctgcccagcggcgaggtgctggagaccaccgcccccggcgtggaggagatcagcggcctgcccagcggcgaggtgctggagaccaccgcccccggcgtggacgagatcagcggcctgcccagcggcgaggtgctggagaccaccgcccccggcgtggaggagatcagcggcctgcccagcggcgaggtgctggagaccagcaccagcgccgtgggcgacctgagcggcctgcccagcggcggcgaggtgctggagatcagcgtgagcggcgtggaggacatcagcggcctgcccagcggcgaggtggtggagaccagcgccagcggcatcgaggacgtgagcgagctgcccagcggcgagggcctggagaccagcgccagcggcgtggaggacctgagcagactgcccagcggcgaggaggtgctggagatcagcgccagcggcttcggcgacctgagcggcctgcccagcggcggcgagggcctggagaccagcgccagcgaggtgggcaccgacctgagcggcctgcccagcggcagagagggcctggagaccagcgccagcggcgccgaggacctgagcggcctgcccagcggcaaggaggacctggtgggcagcgccagcggcgacctggacctgggcaagctgcccagcggcaccctgggcagcggccaggcccccgagaccagcggcctgcccagcggcttcagcggcgagtacagcggcgtggacctgggcagcggcccccccagcggcctgcccgacttcagcggcctgcccagcggcttccccaccgtgagcctggtggacagcaccctggtggaggtggtgaccgccagcaccgccagcgagctggagggcagaggcaccatcggcatcagcggcgccggcgagatcagcggcctgcccagcagcgagctggacatcagcggcagagccagcggcctgcccagcggcaccgagctgagcggccaggccagcggcagccccgacgtgagcggcgagatccccggcctgttcggcgtgagcggccagcccagcggcttccccgacaccagcggcgagaccagcggcgtgaccgagctgagcggcctgagcagcggccagcccggcatcagcggcgaggccagcggcgtgctgtacggcaccagccagcccttcggcatcaccgacctgagcggcgagaccagcggcgtgcccgacctgagcggccagcccagcggcctgcccggcttcagcggcgccaccagcggcgtgcccgacctggtgagcggcaccaccagcggcagcggcgagagcagcggcatcaccttcgtggacaccagcctggtggaggtggcccccaccaccttcaaggaggaggagggcctgggcagcgtggagctgagcggcctgcccagcggcgaggccgacctgagcggcaagagcggcatggtggacgtgagcggccagttcagcggcaccgtggacagcagcggcttcaccagccagacccccgagttcagcggcctgcccagcggcatcgccgaggtgagcggcgagagcagcagagccgagatcggcagcagcctgcccagcggcgcctactacggcagcggcacccccagcagcttccccaccgtgagcctggtggacagaaccctggtggagagcgtgacccaggcccccaccgcccaggaggccggcgagggccccagcggcatcctggagctgagcggcgcccacagcggcgcccccgacatgagcggcgagcacagcggcttcctggacctgagcggcctgcagagcggcctgatcgagcccagcggcgagccccccggcaccccctacttcagcggcgacttcgccagcaccaccaacgtgagcggcgagagcagcgtggccatgggcaccagcggcgaggccagcggcctgcccgaggtgaccctgatcaccagcgagttcgtggagggcgtgaccgagcccaccatcagccaggagctgggccagagaccccccgtgacccacaccccccagctgttcgagagcagcggcaaggtgagcaccgccggcgacatcagcggcgccacccccgtgctgcccggcagcggcgtggaggtgagcagcgtgcccgagagcagcagcgagaccagcgcctaccccgaggccggcttcggcgccagcgccgcccccgaggccagcagagaggacagcggcagccccgacctgagcgagaccaccagcgccttccacgaggccaacctggagagaagcagcggcctgggcgtgagcggcagcaccctgaccttccaggagggcgaggccagcgccgcccccgaggtgagcggcgagagcaccaccaccagcgacgtgggcaccgaggcccccggcctgcccagcgccacccccaccgccagcggcgacagaaccgagatcagcggcgacctgagcggccacaccagccagctgggcgtggtgatcagcaccagcatccccgagagcgagtggacccagcagacccagagacccgccgagacccacctggagatcgagagcagcagcctgctgtacagcggcgaggagacccacaccgtggagaccgccaccagccccaccgacgccagcatccccgccagccccgagtggaagagagagagcgagagcaccgccgccgcccccgccagaagctgcgccgaggagccctgcggcgccggcacctgcaaggagaccgagggccacgtgatctgcctgtgcccccccggctacaccggcgagcactgcaacatcgaccaggaggtgtgcgaggagggctggaacaagtaccagggccactgctacagacacttccccgacagagagacctgggtggacgccgagagaagatgcagagagcagcagagccacctgagcagcatcgtgacccccgaggagcaggagttcgtgaacaacaacgcccaggactaccagtggatcggcctgaacgacagaaccatcgagggcgacttcagatggagcgacggccaccccatgcagttcgagaactggagacccaaccagcccgacaacttcttcgccgccggcgaggactgcgtggtgatgatctggcacgagaagggcgagtggaacgacgtgccctgcaactaccacctgcccttcacctgcaagaagggcaccgtggcctgcggcgagccccccgtggtggagcacgccagaaccttcggccagaagaaggacagatacgagatcaacagcctggtgagataccagtgcaccgagggcttcgtgcagagacacatgcccaccatcagatgccagcccagcggccactgggaggagccccagatcacctgcaccgaccccaccacctacaagagaagactgcagaagagaagcagcagacaccccagaagaagcagacccagcaccgcccactag

SEQ ID NO: 72338 - DNA, 7479 bp, synthetic construct
  misc_feature 1..7479: note = Description of Artificial Sequence: Synthetic coding sequence
  source 1..7479: mol_type = other DNA
atgaccaccctgctgtgggtgttcgtgaccctgagagtgatcaccgccgccgtgaccgtggagaccagcgaccacgacaacagcctgagcgtgagcatcccccagcccagccccctgagagtgctgctgggcaccagcctgaccatcccctgctacttcatcgaccccatgcaccccgtgaccaccgcccccagcaccgcccccctggcccccagaatcaagtggagcagagtgagcaaggagaaggaggtggtgctgctggtggccaccgagggcagagtgagagtgaacagcgcctaccaggacaaggtgagcctgcccaactaccccgccatccccagcgacgccaccctggaggtgcagagcctgagaagcaacgacagcggcgtgtacagatgcgaggtgatgcacggcatcgaggacagcgaggccaccctggaggtggtggtgaagggcatcgtgttccactacagagccatcagcaccagatacaccctggacttcgacagagcccagagagcctgcctgcagaacagcgccatcatcgccacccccgagcagctgcaggccgcctacgaggacggcttccaccagtgcgacgccggctggctggccgaccagaccgtgagataccccatccacacccccagagagggctgctacggcgacaaggacgagttccccggcgtgagaacctacggcatcagagacaccaacgagacctacgacgtgtactgcttcgccgaggagatggagggcgaggtgttctacgccaccagccccgagaagttcaccttccaggaggccgccaacgagtgcagaagactgggcgccagactggccaccaccggccagctgtacctggcctggcaggccggcatggacatgtgcagcgccggctggctggccgacagaagcgtgagataccccatcagcaaggccagacccaactgcggcggcaacctgctgggcgtgagaaccgtgtacgtgcacgccaaccagaccggctaccccgaccccagcagcagatacgacgccatctgctacaccggcgaggacttcgtggacatccccgagaacttcttcggcgtgggcggcgaggaggacatcaccgtgcagaccgtgacctggcccgacatggagctgcccctgcccagaaacatcaccgagggcgaggccagaggcagcgtgatcctgaccgtgaagcccatcttcgaggtgagccccagccccctggagcccgaggagcccttcaccttcgcccccgagatcggcgccaccgccttcgccgaggtggagaacgagaccggcgaggccaccagaccctggggcttccccacccccggcctgggccccgccaccgccttcaccagcgaggacctggtggtgcaggtgaccgccgtgcccggccagccccacctgcccggcggcgtggtgttccactacagacccggccccaccagatacagcctgaccttcgaggaggcccagcaggcctgcctgagaaccggcgccgtgatcgccagccccgagcagctgcaggccgcctacgaggccggctacgagcagtgcgacgccggctggctgagagaccagaccgtgagataccccatcgtgagccccagaaccccctgcgtgggcgacaaggacagcagccccggcgtgagaacctacggcgtgagacccagcaccgagacctacgacgtgtactgcttcgtggacagactggagggcgaggtgttcttcgccaccagactggagcagttcaccttccaggaggccctggagttctgcgagagccacaacgccaccctggccaccaccggccagctgtacgccgcctggagcagaggcctggacaagtgctacgccggctggctggccgacggcagcctgagataccccatcgtgacccccagacccgcctgcggcggcgacaagcccggcgtgagaaccgtgtacctgtaccccaaccagaccggcctgcccgaccccctgagcagacaccacgccttctgcttcagaggcatcagcgccgtgcccagccccggcgaggaggagggcggcacccccaccagccccagcggcgtggaggagtggatcgtgacccaggtggtgcccggcgtggccgccgtgcccgtggaggaggagaccaccgccgtgcccagcggcgagaccaccgccatcctggagttcaccaccgagcccgagaaccagaccgagtgggagcccgcctacacccccgtgggcaccagccccctgcccggcatcctgcccacctggccccccaccggcgccgccaccgaggagagcaccgagggccccagcgccaccgaggtgcccagcgccagcgaggagcccagccccagcgaggtgcccttccccagcgaggagcccagccccagcgaggagcccttccccagcgtgagacccttccccagcgtggagctgttccccagcgaggagcccttccccagcaaggagcccagccccagcgaggagcccagcgccagcgaggagccctacacccccagcccccccgtgcccagctggaccgagctgcccagcagcggcgaggagagcggcgcccccgacgtgagcggcgacttcaccggcagcggcgacgtgagcggccacctggacttcagcggccagctgagcggcgacagagccagcggcctgcccagcggcgacctggacagcagcggcctgaccagcaccgtgggcagcggcctgcccgtggagagcggcctgcccagcggcgacgaggagagaatcgagtggcccagcacccccaccgtgggcgagctgcccagcggcgccgagatcctggagggcagcgccagcggcgtgggcgacctgagcggcctgcccagcggcgaggtgctggagaccagcgccagcggcgtgggcgacctgagcggcctgcccagcggcgaggtgctggagaccaccgcccccggcgtggaggacatcagcggcctgcccagcggcgaggtgctggagaccaccgcccccggcgtggaggacatcagcggcctgcccagcggcgaggtgctggagaccaccgcccccggcgtggaggacatcagcggcctgcccagcggcgaggtgctggagaccaccgcccccggcgtggaggacatcagcggcctgcccagcggcgaggtgctggagaccaccgcccccggcgtggaggacatcagcggcctgcccagcggcgaggtgctggagaccaccgcccccggcgtggaggacatcagcggcctgcccagcggcgaggtgctggagaccgccgcccccggcgtggaggacatcagcggcctgcccagcggcgaggtgctggagaccgccgcccccggcgtggaggacatcagcggcctgcccagcggcgaggtgctggagaccgccgcccccggcgtggaggacatcagcggcctgcccagcggcgaggtgctggagaccgccgcccccggcgtggaggacatcagcggcctgcccagcggcgaggtgctggagaccgccgcccccggcgtggaggacatcagcggcctgcccagcggcgaggtgctggagaccgccgcccccggcgtggaggacatcagcggcctgcccagcggcgaggtgctggagaccgccgcccccggcgtggaggacatcagcggcctgcccagcggcgaggtgctggagaccgccgcccccggcgtggaggacatcagcggcctgcccagcggcgaggtgctggagaccgccgcccccggcgtggaggacatcagcggcctgcccagcggcgaggtgctggagaccgccgcccccggcgtggaggacatcagcggcctgcccagcggcgaggtgctggagaccgccgcccccggcgtggaggacatcagcggcctgcccagcggcgaggtgctggagaccgccgcccccggcgtggaggacatcagcggcctgcccagcggcgaggtgctggagaccgccgcccccggcgtggaggacatcagcggcctgcccagcggcgaggtgctggagaccgccgcccccggcgtggaggacatcagcggcctgcccagcggcgaggtgctggagaccgccgcccccggcgtggaggacatcagcggcctgcccagcggcgaggtgctggagaccgccgcccccggcgtggaggacatcagcggcctgcccagcggcgaggtgctggagaccaccgcccccggcgtggaggagatcagcggcctgcccagcggcgaggtgctggagaccaccgcccccggcgtggacgagatcagcggcctgcccagcggcgaggtgctggagaccaccgcccccggcgtggaggagatcagcggcctgcccagcggcgaggtgctggagaccagcaccagcgccgtgggcgacctgagcggcctgcccagcggcggcgaggtgctggagatcagcgtgagcggcgtggaggacatcagcggcctgcccagcggcgaggtggtggagaccagcgccagcggcatcgaggacgtgagcgagctgcccagcggcgagggcctggagaccagcgccagcggcgtggaggacctgagcagactgcccagcggcgaggaggtgctggagatcagcgccagcggcttcggcgacctgagcggcctgcccagcggcggcgagggcctggagaccagcgccagcgaggtgggcaccgacctgagcggcctgcccagcggcagagagggcctggagaccagcgccagcggcgccgaggacctgagcggcctgcccagcggcaaggaggacctggtgggcagcgccagcggcgacctggacctgggcaagctgcccagcggcaccctgggcagcggccaggcccccgagaccagcggcctgcccagcggcttcagcggcgagtacagcggcgtggacctgggcagcggcccccccagcggcctgcccgacttcagcggcctgcccagcggcttccccaccgtgagcctggtggacagcaccctggtggaggtggtgaccgccagcaccgccagcgagctggagggcagaggcaccatcggcatcagcggcgccggcgagatcagcggcctgcccagcagcgagctggacatcagcggcagagccagcggcctgcccagcggcaccgagctgagcggccaggccagcggcagccccgacgtgagcggcgagatccccggcctgttcggcgtgagcggccagcccagcggcttccccgacaccagcggcgagaccagcggcgtgaccgagctgagcggcctgagcagcggccagcccggcatcagcggcgaggccagcggcgtgctgtacggcaccagccagcccttcggcatcaccgacctgagcggcgagaccagcggcgtgcccgacctgagcggccagcccagcggcctgcccggcttcagcggcgccaccagcggcgtgcccgacctggtgagcggcaccaccagcggcagcggcgagagcagcggcatcaccttcgtggacaccagcctggtggaggtggcccccaccaccttcaaggaggaggagggcctgggcagcgtggagctgagcggcctgcccagcggcgaggccgacctgagcggcaagagcggcatggtggacgtgagcggccagttcagcggcaccgtggacagcagcggcttcaccagccagacccccgagttcagcggcctgcccagcggcatcgccgaggtgagcggcgagagcagcagagccgagatcggcagcagcctgcccagcggcgcctactacggcagcggcacccccagcagcttccccaccgtgagcctggtggacagaaccctggtggagagcgtgacccaggcccccaccgcccaggaggccggcgagggccccagcggcatcctggagctgagcggcgcccacagcggcgcccccgacatgagcggcgagcacagcggcttcctggacctgagcggcctgcagagcggcctgatcgagcccagcggcgagccccccggcaccccctacttcagcggcgacttcgccagcaccaccaacgtgagcggcgagagcagcgtggccatgggcaccagcggcgaggccagcggcctgcccgaggtgaccctgatcaccagcgagttcgtggagggcgtgaccgagcccaccatcagccaggagctgggccagagaccccccgtgacccacaccccccagctgttcgagagcagcggcaaggtgagcaccgccggcgacatcagcggcgccacccccgtgctgcccggcagcggcgtggaggtgagcagcgtgcccgagagcagcagcgagaccagcgcctaccccgaggccggcttcggcgccagcgccgcccccgaggccagcagagaggacagcggcagccccgacctgagcgagaccaccagcgccttccacgaggccaacctggagagaagcagcggcctgggcgtgagcggcagcaccctgaccttccaggagggcgaggccagcgccgcccccgaggtgagcggcgagagcaccaccaccagcgacgtgggcaccgaggcccccggcctgcccagcgccacccccaccgccagcggcgacagaaccgagatcagcggcgacctgagcggccacaccagccagctgggcgtggtgatcagcaccagcatccccgagagcgagtggacccagcagacccagagacccgccgagacccacctggagatcgagagcagcagcctgctgtacagcggcgaggagacccacaccgtggagaccgccaccagccccaccgacgccagcatccccgccagccccgagtggaagagagagagcgagagcaccgccgccgaccaggaggtgtgcgaggagggctggaacaagtaccagggccactgctacagacacttccccgacagagagacctgggtggacgccgagagaagatgcagagagcagcagagccacctgagcagcatcgtgacccccgaggagcaggagttcgtgaacaacaacgcccaggactaccagtggatcggcctgaacgacagaaccatcgagggcgacttcagatggagcgacggccaccccatgcagttcgagaactggagacccaaccagcccgacaacttcttcgccgccggcgaggactgcgtggtgatgatctggcacgagaagggcgagtggaacgacgtgccctgcaactaccacctgcccttcacctgcaagaagggcaccgtggcctgcggcgagccccccgtggtggagcacgccagaaccttcggccagaagaaggacagatacgagatcaacagcctggtgagataccagtgcaccgagggcttcgtgcagagacacatgcccaccatcagatgccagcccagcggccactgggaggagccccagatcacctgcaccgaccccaccacctacaagagaagactgcagaagagaagcagcagacaccccagaagaagcagacccagcaccgcccactag

SEQ ID NO: 72339 - DNA, 7593 bp, synthetic construct; identical to SEQ ID NO: 72337
  misc_feature 1..7593: note = Description of Artificial Sequence: Synthetic coding sequence
  source 1..7593: mol_type = other DNA

SEQ ID NO: 72340 - DNA, 399 bp, synthetic construct
  misc_feature 1..399: note = Description of Artificial Sequence: Synthetic coding sequence
  source 1..399: mol_type = other DNA
atgctgaccgccgccgtgctgagctgcgccctgctgctggccctgcccgccaccagaggcgcccagatgggcctggcccccatggagggcatcagaagacccgaccaggccctgctgcccgagctgcccggcctgggcctgagagcccccctgaagaagaccaccgccgagcaggccgaggaggacctgctgcaggaggcccaggccctggccgaggtgctggacctgcaggacagagagcccagaagcagcagaagatgcgtgagactgcacgagagctgcctgggccagcaggtgccctgctgcgacccctgcgccacctgctactgcagattcttcaacgccttctgctactgcagaaagctgggcaccgccatgaacccctgcagcagaacctag

SEQ ID NO: 72341 - DNA, 399 bp, synthetic construct
  misc_feature 1..399: note = Description of Artificial Sequence: Synthetic coding sequence
  source 1..399: mol_type = other DNA
atggacgtgaccagactgctgctggccaccctgctggtgttcctgtgcttcttcaccgccaacagccacctgccccccgaggagaagctgagagacgacagaagcctgagaagcaacagcagcgtgaacctgctggacgtgcccagcgtgagcatcgtggccctgaacaagaagagcaagcagatcggcagaaaggccgccgagaagaagagaagcagcaagaaggaggccagcatgaagaaggtggtgagacccagaacccccctgagcgccccctgcgtggccaccagaaacagctgcaagccccccgcccccgcctgctgcgacccctgcgccagctgccagtgcagattcttcagaagcgcctgcagctgcagagtgctgagcctgaactgctag

SEQ ID NO: 72342 - DNA, 936 bp, synthetic construct
  misc_feature 1..936: note = Description of Artificial Sequence: Synthetic coding sequence
  source 1..936: mol_type = other DNA
atggccctggaggtggtgttcctggccagaggccccagcggcctgctgctgtacaacggccagaagaccgacggcaagggcgacttcgtgagcctggccctgagagacagaagactggagttcagatacgacctgggcaagggcgccgccgtgatcagaagcagagagcccgtgaccctgggcgcctggaccagagtgagcctggagagaaacggcagaaagggcgccctgagagtgggcgacggccccagagtgctgggcgagagccccaagagcagaaaggtgccccacaccgtgctgaacctgaaggagcccctgtacgtgggcggcgcccccgacttcagcaagctggccagagccgccgccgtgagcagcggcttcgacggcgccatccagctggtgagcctgggcggcagacagctgctgacccccgagcacgtgctgagacaggtggacgtgaccagcttcgccggccacccctgcaccagagccagcggccacccctgcctgaacggcgccagctgcgtgcccagagaggccgcctacgtgtgcctgtgccccggcggcttcagcggcccccactgcgagaagggcctggtggagaagagcgccggcgacgtggacaccctggccttcgacggcagaaccttcgtggagtacctgaacgccgtgaccgagagcgagctggccaacgagatccccgtgcccgagaccctggacagcggcgccctgcacagcgagaaggccctgcagagcaaccacttcgagctgagcctgagaaccgaggccacccagggcctggtgctgtggagcggcaaggccaccgagagagccgactacgtggccctggccatcgtggacggccacctgcagctgagctacaacctgggcagccagcccgtggtgctgagaagcaccgtgcccgtgaacacctag

SEQ ID NO: 72343 - DNA, 6138 bp, synthetic construct
  misc_feature 1..6138: note = Description of Artificial Sequence: Synthetic coding sequence
  source 1..6138: mol_type = other DNA
atggccggcagaagccaccccggccccctgagacccctgctgcccctgctggtggtggccgcctgcgtgctgcccggcgccggcggcacctgccccgagagagccctggagagaagagaggaggaggccaacgtggtgctgaccggcaccgtggaggagatcctgaacgtggaccccgtgcagcacacctacagctgcaaggtgagagtgtggagatacctgaagggcaaggacctggtggccagagagagcctgctggacggcggcaacaaggtggtgatcagcggcttcggcgaccccctgatctgcgacaaccaggtgagcaccggcgacaccagaatcttcttcgtgaaccccgcccccccctacctgtggcccgcccacaagaacgagctgatgctgaacagcagcctgatgagaatcaccctgagaaacctggaggaggtggagttctgcgtggaggacaagcccggcacccacttcacccccgtgccccccaccccccccgacgcctgcagaggcatgctgtgcggcttcggcgccgtgtgcgagcccaacgccgagggccccggcagagccagctgcgtgtgcaagaagagcccctgccccagcgtggtggcccccgtgtgcggcagcgacgccagcacctacagcaacgagtgcgagctgcagagagcccagtgcagccagcagagaagaatcagactgctgagcagaggcccctgcggcagcagagacccctgcagcaacgtgacctgcagcttcggcagcacctgcgccagaagcgccgacggcctgaccgccagctgcctgtgccccgccacctgcagaggcgcccccgagggcaccgtgtgcggcagcgacggcgccgactaccccggcgagtgccagctgctgagaagagcctgcgccagacaggagaacgtgttcaagaagttcgacggcccctgcgacccctgccagggcgccctgcccgaccccagcagaagctgcagagtgaaccccagaaccagaagacccgagatgctgctgagacccgagagctgccccgccagacaggcccccgtgtgcggcgacgacggcgtgacctacgagaacgactgcgtgatgggcagaagcggcgccgccagaggcctgctgctgcagaaggtgagaagcggccagtgccagggcagagaccagtgccccgagccctgcagattcaacgccgtgtgcctgagcagaagaggcagacccagatgcagctgcgacagagtgacctgcgacggcgcctacagacccgtgtgcgcccaggacggcagaacctacgacagcgactgctggagacagcaggccgagtgcagacagcagagagccatccccagcaagcaccagggcccctgcgaccaggcccccagcccctgcctgggcgtgcagtgcgccttcggcgccacctgcgccgtgaagaacggccaggccgcctgcgagtgcctgcaggcctgcagcagcctgtacgaccccgtgtgcggcagcgacggcgtgacctacggcagcgcctgcgagctggaggccaccgcctgcaccctgggcagagagatccaggtggccagaaagggcccctgcgacagatgcggccagtgcagattcggcgccctgtgcgaggccgagaccggcagatgcgtgtgccccagcgagtgcgtggccctggcccagcccgtgtgcggcagcgacggccacacctaccccagcgagtgcatgctgcacgtgcacgcctgcacccaccagatcagcctgcacgtggccagcgccggcccctgcgagacctgcggcgacgccgtgtgcgccttcggcgccgtgtgcagcgccggccagtgcgtgtgccccagatgcgagcaccccccccccggccccgtgtgcggcagcgacggcgtgacctacggcagcgcctgcgagctgagagaggccgcctgcctgcagcagacccagatcgaggaggccagagccggcccctgcgagcaggccgagtgcggcagcggcggcagcggcagcggcgaggacggcgactgcgagcaggagctgtgcagacagagaggcggcatctgggacgaggacagcgaggacggcccctgcgtgtgcgacttcagctgccagagcgtgcccggcagccccgtgtgcggcagcgacggcgtgacctacagcaccgagtgcgagctgaagaaggccagatgcgagagccagagaggcctgtacgtggccgcccagggcgcctgcagaggccccaccttcgcccccctgccccccgtggcccccctgcactgcgcccagaccccctacggctgctgccaggacaacatcaccgccgccagaggcgtgggcctggccggctgccccagcgcctgccagtgcaacccccacggcagctacggcggcacctgcgaccccgccaccggccagtgcagctgcagacccggcgtgggcggcctgagatgcgacagatgcgagcccggcttctggaacttcagaggcatcgtgaccgacggcagaagcggctgcaccccctgcagctgcgacccccagggcgccgtgagagacgactgcgagcagatgaccggcctgtgcagctgcaagcccggcgtggccggccccaagtgcggccagtgccccgacggcagagccctgggccccgccggctgcgaggccgacgccagcgcccccgccacctgcgccgagatgagatgcgagttcggcgccagatgcgtggaggagagcggcagcgcccactgcgtgtgccccatgctgacctgccccgaggccaacgccaccaaggtgtgcggcagcgacggcgtgacctacggcaacgagtgccagctgaagaccatcgcctgcagacagggcctgcagatcagcatccagagcctgggcccctgccaggaggccgtggcccccagcacccaccccaccagcgccagcgtgaccgtgaccacccccggcctgctgctgagccaggccctgcccgccccccccggcgccctgcccctggcccccagcagcaccgcccacagccagaccacccccccccccagcagcagacccagaaccaccgccagcgtgcccagaaccaccgtgtggcccgtgctgaccgtgccccccaccgcccccagccccgcccccagcctggtggccagcgccttcggcgagagcggcagcaccgacggcagcagcgacgaggagctgagcggcgaccaggaggccagcggcggcggcagcggcggcctggagcccctggagggcagcagcgtggccacccccggcccccccgtggagagagccagctgctacaacagcgccctgggctgctgcagcgacggcaagacccccagcctggacgccgagggcagcaactgccccgccaccaaggtgttccagggcgtgctggagctggagggcgtggagggccaggagctgttctacacccccgagatggccgaccccaagagcgagctgttcggcgagaccgccagaagcatcgagagcaccctggacgacctgttcagaaacagcgacgtgaagaaggacttcagaagcgtgagactgagagacctgggccccggcaagagcgtgagagccatcgtggacgtgcacttcgaccccaccaccgccttcagagcccccgacgtggccagagccctgctgagacagatccaggtgagcagaagaagaagcctgggcgtgagaagacccctgcaggagcacgtgagattcatggacttcgactggttccccgccttcatcaccggcgccaccagcggcgccatcgccgccggcgccaccgccagagccaccaccgccagcagactgcccagcagcgccgtgacccccagagccccccaccccagccacaccagccagcccgtggccaagaccaccgccgcccccaccaccagaagaccccccaccaccgcccccagcagagtgcccggcagaagaccccccgccccccagcagccccccaagccctgcgacagccagccctgcttccacggcggcacctgccaggactgggccctgggcggcggcttcacctgcagctgccccgccggcagaggcggcgccgtgtgcgagaaggtgctgggcgcccccgtgcccgccttcgagggcagaagcttcctggccttccccaccctgagagcctaccacaccctgagactggccctggagttcagagccctggagccccagggcctgctgctgtacaacggcaacgccagaggcaaggacttcctggccctggccctgctggacggcagagtgcagctgagattcgacaccggcagcggccccgccgtgctgaccagcgccgtgcccgtggagcccggccagtggcacagactggagctgagcagacactggagaagaggcaccctgagcgtggacggcgagacccccgtgctgggcgagagccccagcggcaccgacggcctgaacctggacaccgacctgttcgtgggcggcgtgcccgaggaccaggccgccgtggccctggagagaaccttcgtgggcgccggcctgagaggctgcatcagactgctggacgtgaacaaccagagactggagctgggcatcggccccggcgccgccaccagaggcagcggcgtgggcgagtgcggcgaccacccctgcctgcccaacccctgccacggcggcgccccctgccagaacctggaggccggcagattccactgccagtgcccccccggcagagtgggccccacctgcgccgacgagaagagcccctgccagcccaacccctgccacggcgccgccccctgcagagtgctgcccgagggcggcgcccagtgcgagtgccccctgggcagagagggcaccttctgccagaccgccagcggccaggacggcagcggccccttcctggccgacttcaacggcttcagccacctggagctgagaggcctgcacaccttcgccagagacctgggcgagaagatggccctggaggtggtgttcctggccagaggccccagcggcctgctgctgtacaacggccagaagaccgacggcaagggcgacttcgtgagcctggccctgagagacagaagactggagttcagatacgacctgggcaagggcgccgccgtgatcagaagcagagagcccgtgaccctgggcgcctggaccagagtgagcctggagagaaacggcagaaagggcgccctgagagtgggcgacggccccagagtgctgggcgagagccccgtgccccacaccgtgctgaacctgaaggagcccctgtacgtgggcggcgcccccgacttcagcaagctggccagagccgccgccgtgagcagcggcttcgacggcgccatccagctggtgagcctgggcggcagacagctgctgacccccgagcacgtgctgagacaggtggacgtgaccagcttcgccggccacccctgcaccagagccagcggccacccctgcctgaacggcgccagctgcgtgcccagagaggccgcctacgtgtgcctgtgccccggcggcttcagcggcccccactgcgagaagggcctggtggagaagagcgccggcgacgtggacaccctggccttcgacggcagaaccttcgtggagtacctgaacgccgtgaccgagagcgagaaggccctgcagagcaaccacttcgagctgagcctgagaaccgaggccacccagggcctggtgctgtggagcggcaaggccaccgagagagccgactacgtggccctggccatcgtggacggccacctgcagctgagctacaacctgggcagccagcccgtggtgctgagaagcaccgtgcccgtgaacaccaacagatggctgagagtggtggcccacagagagcagagagagggcagcctgcaggtgggcaacgaggcccccgtgaccggcagcagccccctgggcgccacccagctggacaccgacggcgccctgtggctgggcggcctgcccgagctgcccgtgggccccgccctgcccaaggcctacggcaccggcttcgtgggctgcctgagagacgtggtggtgggcagacaccccctgcacctgctggaggacgccgtgaccaagcccgagctgagaccctgccccaccccctag

SEQ ID NO: 72344 - DNA, 816 bp, synthetic construct
  misc_feature 1..816: note = Description of Artificial Sequence: Synthetic coding sequence
  source 1..816: mol_type = other DNA
tgaagatacgacctgggcaagggcgccgccgtgatcagaagcagagagcccgtgaccctgggcgcctggaccagagtgagcctggagagaaacggcagaaagggcgccctgagagtgggcgacggccccagagtgctgggcgagagccccaagagcagaaaggtgccccacaccgtgctgaacctgaaggagcccctgtacgtgggcggcgcccccgacttcagcaagctggccagagccgccgccgtgagcagcggcttcgacggcgccatccagctggtgagcctgggcggcagacagctgctgacccccgagcacgtgctgagacaggtggacgtgaccagcttcgccggccacccctgcaccagagccagcggccacccctgcctgaacggcgccagctgcgtgcccagagaggccgcctacgtgtgcctgtgccccggcggcttcagcggcccccactgcgagaagggcctggtggagaagagcgccggcgacgtggacaccctggccttcgacggcagaaccttcgtggagtacctgaacgccgtgaccgagagcgagctggccaacgagatccccgtgcccgagaccctggacagcggcgccctgcacagcgagaaggccctgcagagcaaccacttcgagctgagcctgagaaccgaggccacccagggcctggtgctgtggagcggcaaggccaccgagagagccgactacgtggccctggccatcgtggacggccacctgcagctgagctacaacctgggcagccagcccgtggtgctgagaagcaccgtgcccgtgaacacctag

SEQ ID NO: 72345 - DNA, 462 bp, synthetic construct
  misc_feature 1..462: note = Description of Artificial Sequence: Synthetic coding sequence
  source 1..462: mol_type = other DNA
atggccctggtgttcgtgtacggcaccctgaagagaggccagcccaaccacagagtgctgagagacggcgcccacggcagcgccgccttcagagccagaggcagaaccctggagccctaccccctggtgatcgccggcgagcacaacatcccctggctgctgcacctgcccggcagcggcagactggtggagggcgaggtgtacgccgtggacgagagaatgctgagattcctggacgacttcgagagctgccccgccctgtaccagagaaccgtgctgagagtgcagctgctggaggacagagcccccggcgccgaggagccccccgcccccaccgccgtgcagtgcttcgtgtacagcagagccaccttcccccccgagtgggcccagctgccccaccacgacagctacgacagcgagggcccccacggcctgagatacaaccccagagagaacagatag

SEQ ID NO: 72346 - DNA, 462 bp, synthetic construct; identical to SEQ ID NO: 72345
  misc_feature 1..462: note = Description of Artificial Sequence: Synthetic coding sequence
  source 1..462: mol_type = other DNA

SEQ ID NO: 72347 - DNA, 879 bp, synthetic construct
  misc_feature 1..879: note = Description of Artificial Sequence: Synthetic coding sequence
  source 1..879: mol_type = other DNA
atgaaccccttctggagcatgagcaccagcagcgtgagaaagagaagcgagggcgaggagaagaccctgaccggcgacgtgaagaccagcccccccagaaccgcccccaagaagcagctgcccagcatccccaagaacgccctgcccatcaccaagcccaccagccccgcccccgccgcccagagcaccaacggcacccacgccagctacggccccttctacctggagtacagcctgctggccgagttcaccctggtggtgaagcagaagctgcccggcgtgtacgtgcagcccagctacagaagcgccctgatgtggttcggcgtgatcttcatcagacacggcctgtaccaggacggcgtgttcaagttcaccgtgtacatccccgacaactaccccgacggcgactgccccagactggtgttcgacatccccgtgttccaccccctggtggaccccaccagcggcgagctggacgtgaagagagccttcgccaagtggagaagaaaccacaaccacatctggcaggtgctgatgtacgccagaagagtgttctacaagatcgacaccgccagccccctgaaccccgaggccgccgtgctgtacgagaaggacatccagctgttcaagagcaaggtggtggacagcgtgaaggtgtgcaccgccagactgttcgaccagcccaagatcgaggacccctacgccatcagcttcagcccctggaaccccagcgtgcacgacgaggccagagagaagatgctgacccagaagaagcccgaggagcagcacaacaagagcgtgcacgtggccggcctgagctgggtgaagcccggcagcgtgcagcccttcagcaaggaggagaagaccgtggccacctag

SEQ ID NO: 72348 - DNA, 879 bp, synthetic construct; identical to SEQ ID NO: 72347
  misc_feature 1..879: note = Description of Artificial Sequence: Synthetic coding sequence
  source 1..879: mol_type = other DNA

SEQ ID NO: 72349 - DNA, 1179 bp, synthetic construct
  misc_feature 1..1179: note = Description of Artificial Sequence: Synthetic coding sequence
  source 1..1179: mol_type = other DNA
atggccagccacaagctgctggtgaccccccccaaggccctgctgaagcccctgagcatccccaaccagctgctgctgggccccggccccagcaacctgccccccagaatcatggccgccggcggcctgcagatgatcggcagcatgagcaaggacatgtaccagatcatggacgagatcaaggagggcatccagtacgtgttccagaccagaaaccccctgaccctggtgatcagcggcagcggccactgcgccctggaggccgccctggtgaacgtgctggagcccggcgacagcttcctggtgggcgccaacggcatctggggccagagagccgtggacatcggcgagagaatcggcgccagagtgcaccccatgaccaaggaccccggcggccactacaccctgcaggaggtggaggagggcctggcccagcacaagcccgtgctgctgttcctgacccacggcgagagcagcaccggcgtgctgcagcccctggacggcttcggcgagctgtgccacagatacaagtgcctgctgctggtggacagcgtggccagcctgggcggcacccccctgtacatggacagacagggcatcgacatcctgtacagcggcagccagaaggccctgaacgccccccccggcaccagcctgatcagcttcagcgacaaggccaagaagaagatgtacagcagaaagaccaagcccttcagcttctacctggacatcaagtggctggccaacttctggggctgcgacgaccagcccagaatgtaccaccacaccatccccgtgatcagcctgtacagcctgagagagagcctggccctgatcgccgagcagggcctggagaacagctggagacagcacagagaggccgccgcctacctgcacggcagactgcaggccctgggcctgcagctgttcgtgaaggaccccgccctgagactgcccaccgtgaccaccgtggccgtgcccgccggctacgactggagagacatcgtgagctacgtgatcgaccacttcgacatcgagatcatgggcggcctgggccccagcaccggcaaggtgctgagaatcggcctgctgggctgcaacgccaccagagagaacgtggacagagtgaccgaggccctgagagccgccctgcagcactgccccaagaagaagctgtag

SEQ ID NO: 72350 - DNA, 3078 bp, synthetic construct
  misc_feature 1..3078: note = Description of Artificial Sequence: Synthetic coding sequence
  source 1..3078: mol_type = other DNA
atggagcccttcaccaacgacagactgcagctgcccagaaacatgatcgagaacagcatgttcgaggaggagcccgacgtggtggacctggccaaggagccctgcctgcaccccctggagcccgacgaggtggagtacgagcccagaggcagcagactgctggtgagaggcctgggcgagcacgagatggaggaggacgaggaggactacgagagcagcgccaagctgctgggcatgagcttcatgaacagaagcagcggcctgagaaacagcgccaccggctacagacagagccccgacggcgcctgcagcgtgcccagcgccagaaccatggtggtgtgcgccttcgtgatcgtggtggccgtgagcgtgatcatggtgatctacctgctgcccagatgcaccttcaccaaggagggctgccacaagaagaaccagagcatcggcctgatccagcccttcgccaccaacggcaagctgttcccctgggcccagatcagactgcccaccgccgtggtgcccctgagatacgagctgagcctgcaccccaacctgaccagcatgaccttcagaggcagcgtgaccatcagcgtgcaggccctgcaggtgacctggaacatcatcctgcacagcaccggccacaacatcagcagagtgaccttcatgagcgccgtgagcagccaggagaagcaggccgagatcctggagtacgcctaccacggccagatcgccatcgtggcccccgaggccctgctggccggccacaactacaccctgaagatcgagtacagcgccaacatcagcagcagctactacggcttctacggcttcagctacaccgacgagagcaacgagaagaagtacttcgccgccacccagttcgagcccctggccgccagaagcgccttcccctgcttcgacgagcccgccttcaaggccaccttcatcatcaagatcatcagagacgagcagtacaccgccctgagcaacatgcccaagaagagcagcgtggtgctggacgacggcctggtgcaggacgagttcagcgagagcgtgaagatgagcacctacctggtggccttcatcgtgggcgagatgaagaacctgagccaggacgtgaacggcaccctggtgagcatctacgccgtgcccgagaagatcggccaggtgcactacgccctggagaccaccgtgaagctgctggagttcttccagaactacttcgagatccagtaccccctgaagaagctggacctggtggccatccccgacttcgaggccggcgccatggagaactggggcctgctgaccttcagagaggagaccctgctgtacgacagcaacaccagcagcatggccgacagaaagctggtgaccaagatcatcgcccacgagctggcccaccagtggttcggcaacctggtgaccatgaagtggtggaacgacctgtggctgaacgagggcttcgccaccttcatggagtacttcagcctggagaagatcttcaaggagctgagcagctacgaggacttcctggacgccagattcaagaccatgaagaaggacagcctgaacagcagccaccccatcagcagcagcgtgcagagcagcgagcagatcgaggagatgttcgacagcctgagctacttcaagggcagcagcctgctgctgatgctgaagacctacctgagcgaggacgtgttccagcacgccgtggtgctgtacctgcacaaccacagctacgccagcatccagagcgacgacctgtgggacagcttcaacgaggtgaccaaccagaccctggacgtgaagagaatgatgaagacctggaccctgcagaagggcttccccctggtgaccgtgcagaagaagggcaaggagctgttcatccagcaggagagattcttcctgaacatgaagcccgagatccagcccagcgacaccagctacctgtggcacatccccctgagctacgtgaccgagggcagaaactacagcaagtaccagagcgtgagcctgctggacaagaagagcggcgtgatcaacctgaccgaggaggtgctgtgggtgaaggtgaacatcaacatgaacggctactacatcgtgcactacgccgacgacgactgggaggccctgatccaccagctgaagatcaacccctacgtgctgagcgacaaggacagagccaacctgatcaacaacatcttcgagctggccggcctgggcaaggtgcccctgaagagagccttcgacctgatcaactacctgggcaacgagaaccacaccgcccccatcaccgaggccctgttccagaccgacctgatctacaacctgctggagaagctgggctacatggacctggccagcagactggtgaccagagtgttcaagctgctgcagaaccagatccagcagcagacctggaccgacgagggcacccccagcatgagagagctgagaagcgccctgctggagttcgcctgcacccacaacctgggcaactgcagcaccaccgccatgaagctgttcgacgactggatggccagcaacggcacccagagcctgcccaccgacgtgatgaccaccgtgttcaaggtgggcgccaagaccgacaagggctggagcttcctgctgggcaagtacatcagcatcggcagcgaggccgagaagaacaagatcctggaggccctggccagcagcgaggacgtgagaaagctgtactggctgatgaagagcagcctgaacggcgacaacttcagaacccagaagctgagcttcatcatcagaaccgtgggcagacacttccccggccacctgctggcctgggacttcgtgaaggagaactggaacaagctggtgcagaagttccccctgggcagctacaccatccagaacatcgtggccggcagcacctacctgttcagcaccaagacccacctgagcgaggtgcaggccttcttcgagaaccagagcgaggccaccttcagactgagatgcgtgcaggaggccctggaggtgatccagctgaacatccagtggatggagaagaacctgaagagcctgacctggtggctgtag

SEQ ID NO: 72351 - DNA, 2907 bp, synthetic construct
  misc_feature 1..2907: note = Description of Artificial Sequence: Synthetic coding sequence
  source 1..2907: mol_type = other DNA
atggacagcaccctgaccgccagcgagatcagacagagattcatcgacttcttcaagagaaacgagcacacctacgtgcacagcagcgccaccatccccctggacgaccccaccctgctgttcgccaacgccggcatgaaccagttcaagcccatcttcctgaacaccatcgaccccagccaccccatggccaagctgagcagagccgccaacacccagaagtgcatcagagccggcggcaagcacaacgacctggacgacgtgggcaaggacgtgtaccaccacaccttcttcgagatgctgggcagctggagcttcggcgactacttcaaggagctggcctgcaagatggccctggagctgctgacccaggagttcggcatccccatcgagagactgtacgtgacctacttcggcggcgacgaggccgccggcctggaggccgacctggagtgcaagcagatctggcagaacctgggcctggacgacaccaagatcctgcccggcaacatgaaggacaacttctgggagatgggcgacaccggcccctgcggcccctgcagcgagatccactacgacagaatcggcggcagagacgccgcccacctggtgaaccaggacgaccccaacgtgctggagatctggaacctggtgttcatccagtacaacagagaggccgacggcatcctgaagcccctgcccaagaagagcatcgacaccggcatgggcctggagagactggtgagcgtgctgcagaacaagatgagcaactacgacaccgacctgttcgtgccctacttcgaggccatccagaagggcaccggcgccagaccctacaccggcaaggtgggcgccgaggacgccgacggcatcgacatggcctacagagtgctggccgaccacgccagaaccatcaccgtggccctggccgacggcggcagacccgacaacaccggcagaggctacgtgctgagaagaatcctgagaagagccgtgagatacgcccacgagaagctgaacgccagcagaggcttcttcgccaccctggtggacgtggtggtgcagagcctgggcgacgccttccccgagctgaagaaggaccccgacatggtgaaggacatcatcaacgaggaggaggtgcagttcctgaagaccctgagcagaggcagaagaatcctggacagaaagatccagagcctgggcgacagcaagaccatccccggcgacaccgcctggctgctgtacgacacctacggcttccccgtggacctgaccggcctgatcgccgaggagaagggcctggtggtggacatggacggcttcgaggaggagagaaagctggcccagctgaagagccagggcaagggcgccggcggcgaggacctgatcatgctggacatctacgccatcgaggagctgagagccagaggcctggaggtgaccgacgacagccccaagtacaactaccacctggacagcagcggcagctacgtgttcgagaacaccgtggccaccgtgatggccctgagaagagagaagatgttcgtggaggaggtgagcaccggccaggagtgcggcgtggtgctggacaagacctgcttctacgccgagcagggcggccagatctacgacgagggctacctggtgaaggtggacgacagcagcgaggacaagaccgagttcaccgtgaagaacgcccaggtgagaggcggctacgtgctgcacatcggcaccatctacggcgacctgaaggtgggcgaccaggtgtggctgttcatcgacgagcccagaagaagacccatcatgagcaaccacaccgccacccacatcctgaacttcgccctgagaagcgtgctgggcgaggccgaccagaagggcagcctggtggcccccgacagactgagattcgacttcaccgccaagggcgccatgagcacccagcagatcaagaaggccgaggagatcgccaacgagatgatcgaggccgccaaggccgtgtacacccaggactgccccctggccgccgccaaggccatccagggcctgagagccgtgttcgacgagacctaccccgaccccgtgagagtggtgagcatcggcgtgcccgtgagcgagctgctggacgaccccagcggccccgccggcagcctgaccagcgtggagttctgcggcggcacccacctgagaaacagcagccacgccggcgccttcgtgatcgtgaccgaggaggccatcgccaagggcatcagaagaatcgtggccgtgaccggcgccgaggcccagaaggccctgagaaaggccgagagcctgaagaagtgcctgagcgtgatggaggccaaggtgaaggcccagaccgcccccaacaaggacgtgcagagagagatcgccgacctgggcgaggccctggccaccgccgtgatcccccagtggcagaaggacgagctgagagagaccctgaagagcctgaagaaggtgatggacgacctggacagagccagcaaggccgacgtgcagaagagagtgctggagaagaccaagcagttcatcgacagcaaccccaaccagcccctggtgatcctggagatggagagcggcgccagcgccaaggccctgaacgaggccctgaagctgttcaagatgcacagcccccagaccagcgccatgctgttcaccgtggacaacgaggccggcaagatcacctgcctgtgccaggtgccccagaacgccgccaacagaggcctgaaggccagcgagtgggtgcagcaggtgagcggcctgatggacggcaagggcggcggcaaggacgtgagcgcccaggccaccggcaagaacgtgggctgcctgcaggaggccctgcagctggccaccagcttcgcccagctgagactgggcgacgtgaagaactag

SEQ ID NO: 72352 - DNA, 2958 bp, synthetic construct
  misc_feature 1..2958: note = Description of Artificial Sequence: Synthetic coding sequence
  source 1..2958: mol_type = other DNA
atggccgccagcgtggccgccgccgccagaagactgagaagagccatcagaagaagccccgcctggagaggcctgagccacagacccctgagcagcgagccccccgccgccaaggccagcgccgtgagagccgccttcctgaacttcttcagagacagacacggccacagactggtgcccagcgccagcgtgagacccagaggcgaccccagcctgctgttcgtgaacgccggcatgaaccagttcaagcccatcttcctgggcaccgtggaccccagaagcgagatggccggcttcagaagagtggccaacagccagaagtgcgtgagagccggcggccaccacaacgacctggaggacgtgggcagagacctgagccaccacaccttcttcgagatgctgggcaactgggccttcggcggcgagtacttcaaggaggaggcctgcaacatggcctgggagctgctgacccaggtgtacggcatccccgaggagagactgtggatcagctacttcgacggcgaccccaaggccggcctggaccccgacctggagaccagagacatctggctgagcctgggcgtgcccgccagcagagtgctgagcttcggcccccaggagaacttctgggagatgggcgacaccggcccctgcggcccctgcaccgagatccactacgacctggccggcggcgtgggcgccccccagctggtggagctgtggaacctggtgttcatgcagcacaacagagaggccgacggcagcctgcagcccctgccccagagacacgtggacaccggcatgggcctggagagactggtggccgtgctgcagggcaagcacagcacctacgacaccgacctgttcagccccctgctgaacgccatccagcagggctgcagagcccccccctacctgggcagagtgggcgtggccgacgagggcagaaccgacaccgcctacagagtggtggccgaccacatcagaaccctgagcgtgtgcatcagcgacggcatcttccccggcatgagcggcccccccctggtgctgagaagaatcctgagaagagccgtgagattcagcatggagatcctgaaggccccccccggcttcctgggcagcctggtgcccgtggtggtggagaccctgggcgacgcctaccccgagctgcagagaaacagcgcccagatcgccaacctggtgagcgaggacgaggccgccttcctggccagcctggagagaggcagaagaatcatcgacagaaccctgagaaccctgggccccagcgacatgttccccgccgaggtggcctggagcctgagcctgtgcggcgacctgggcctgcccctggacatggtggagctgatgctggaggagaagggcgtgcagctggacagcgccggcctggagagactggcccaggaggaggcccagcacagagccagacaggccgagcccgtgcagaagcagggcctgtggctggacgtgcacgccctgggcgagctgcagagacagggcgtgccccccaccgacgacagccccaagtacaactacagcctgagacccagcggcagctacgagttcggcacctgcgaggcccaggtgctgcagctgtacaccgaggacggcaccgccgtggccagcgtgggcaagggccagagatgcggcctgctgctggacagaaccaacttctacgccgagcagggcggccaggccagcgacagaggctacctggtgagagccggccaggaggacgtgctgttccccgtggccagagcccaggtgtgcggcggcttcatcctgcacgaggccgtggcccccgagtgcctgagactgggcgaccaggtgcagctgcacgtggacgaggcctggagactgggctgcatggccaagcacaccgccacccacctgctgaactgggccctgagacagaccctgggccccggcaccgagcagcagggcagccacctgaaccccgagcagctgagactggacgtgaccacccagacccccctgacccccgagcagctgagagccgtggagaacaccgtgcaggaggccgtgggccaggacgaggccgtgtacatggaggaggtgcccctggccctgaccgcccaggtgcccggcctgagaagcctggacgaggtgtaccccgaccccgtgagagtggtgagcgtgggcgtgcccgtggcccacgccctggaccccgccagccaggccgccctgcagaccagcgtggagctgtgctgcggcacccacctgctgagaaccggcgccgtgggcgacctggtgatcatcggcgacagacagctgagcaagggcaccaccagactgctggccgtgaccggcgagcaggcccagcaggccagagagctgggccagagcctggcccaggaggtgaaggccgccaccgagagactgagcctgggcagcagagacgtggccgaggccctgagactgagcaaggacatcggcagactgatcgaggccgtggagaccgccgtgatgccccagtggcagagaagagagctgctggccaccgtgaagatgctgcagagaagagccaacaccgccatcagaaagctgcagatgggccaggccgccaagaagacccaggagctgctggagagacacagcaagggccccctgatcgtggacaccgtgagcgccgagagcctgagcgtgctggtgaaggtggtgagacagctgtgcgagcaggcccccagcaccagcgtgctgctgctgagcccccagcccatgggcaaggtgctgtgcgcctgccaggtggcccagggcgccatgcccaccttcaccgccgaggcctgggccctggccgtgtgcagccacatgggcggcaaggcctggggcagcagagtggtggcccagggcaccggcagcaccaccgacctggaggccgccctgagcatcgcccagacctacgccctgagccagctgtag

SEQ ID NO: 72353 - DNA, 1578 bp, synthetic construct
  misc_feature 1..1578: note = Description of Artificial Sequence: Synthetic coding sequence
  source 1..1578: mol_type = other DNA
atggagttctgcgtggaggacagcaccgacgtgcacgtgctgatcgaggaccacagaatcgtgttcagctgcaagaacgccgacggcgtggagctgtacaacgagatcgagttctacgccaaggtgaacagcaaggacagccaggacaagagaagcagcagaagcatcacctgcttcgtgagaaagtggaaggagaaggtggcctggcccagactgaccaaggaggacatcaagcccgtgtggctgagcgtggacttcgacaactggagagactgggagggcgacgaggagatggagctggcccacgtggagcactacgccgagctgctgaagaaggtgagcaccaagagacccccccccgccatggacgacctggacttcaccaccaccgtggtgagctgctgccccgccgagctgcagaccgagggcagcaacggcaagaaggaggtgctgagcggcttccaggtggtgctggaggacaccgtgctgttccccgagggcggcggccagcccgacgacagaggcaccatcaacgacatcagcgtgctgagagtgaccagaagaggcgagcaggccgaccacttcacccagacccccctggaccccggcagccaggtgctggtgagagtggactgggagagaagattcgaccacatgcagcagcacagcggccagcacctgatcaccgccgtggccgaccacctgttcaagctgaagaccaccagctgggagctgggcagattcagaagcgccatcgagctggacacccccagcatgaccgccgagcaggtggccgccatcgagcagagcgtgaacgagaagatcagagacagactgcccgtgaacgtgagagagctgagcctggacgaccccgaggtggagcaggtgagcggcagaggcctgcccgacgaccacgccggccccatcagagtggtgaacatcgagggcgtggacagcaacatgtgctgcggcacccacgtgagcaacctgagcgacctgcaggtgatcaagatcctgggcaccgagaagggcaagaagaacagaaccaacctgatcttcctgagcggcaacagagtgctgaagtggatggagagaagccacggcaccgagaaggccctgaccgccctgctgaagtgcggcgccgaggaccacgtggaggccgtgaagaagctgcagaacagcaccaagatcctgcagaagaacaacctgaacctgctgagagacctggccgtgcacatcgcccacagcctgagaaacagccccgactggggcggcgtggtgatcctgcacagaaaggagggcgacagcgagttcatgaacatcatcgccaacgagatcggcagcgaggagaccctgctgttcctgaccgtgggcgacgagaagggcggcggcctgttcctgctggccggcccccccgccagcgtggagaccctgggccccagagtggccgaggtgctggagggcaagggcgccggcaagaagggcagattccagggcaaggccaccaagatgagcagaagaatggaggcccaggccctgctgcaggactacatcagcacccagagcgccaaggagtag

SEQ ID NO: 72354 - DNA, 1761 bp, synthetic construct
  misc_feature 1..1761: note = Description of Artificial Sequence: Synthetic coding sequence
  source 1..1761: mol_type = other DNA
atgttcagcctgcccctgaactgcagccccgaccacatcagaagaggcagctgctggggcagaccccaggacctgaagatcgccgcccccgcctggaacagcaagtgccaccccggcgccggcgccgccatggccagacagcacgccagaaccctgtggtacgacagacccagatacgtgttcatggagttctgcgtggaggacagcaccgacgtgcacgtgctgatcgaggaccacagaatcgtgttcagctgcaagaacgccgacggcgtggagctgtacaacgagatcgagttctacgccaaggtgaacagcaaggacagccaggacaagagaagcagcagaagcatcacctgcttcgtgagaaagtggaaggagaaggtggcctggcccagactgaccaaggaggacatcaagcccgtgtggctgagcgtggacttcgacaactggagagactgggagggcgacgaggagatggagctggcccacgtggagcactacgccgagctgctgaagaaggtgagcaccaagagacccccccccgccatggacgacctggacttcaccaccaccgtggtgagctgctgccccgccgagctgcagaccgagggcagcaacggcaagaaggaggtgctgagcggcttccaggtggtgctggaggacaccgtgctgttccccgagggcggcggccagcccgacgacagaggcaccatcaacgacatcagcgtgctgagagtgaccagaagaggcgagcaggccgaccacttcacccagacccccctggaccccggcagccaggtgctggtgagagtggactgggagagaagattcgaccacatgcagcagcacagcggccagcacctgatcaccgccgtggccgaccacctgttcaagctgaagaccaccagctgggagctgggcagattcagaagcgccatcgagctggacacccccagcatgaccgccgagcaggtggccgccatcgagcagagcgtgaacgagaagatcagagacagactgcccgtgaacgtgagagagctgagcctggacgaccccgaggtggagcaggtgagcggcagaggcctgcccgacgaccacgccggccccatcagagtggtgaacatcgagggcgtggacagcaacatgtgctgcggcacccacgtgagcaacctgagcgacctgcaggtgatcaagatcctgggcaccgagaagggcaagaagaacagaaccaacctgatcttcctgagcggcaacagagtgctgaagtggatggagagaagccacggcaccgagaaggccctgaccgccctgctgaagtgcggcgccgaggaccacgtggaggccgtgaagaagctgcagaacagcaccaagatcctgcagaagaacaacctgaacctgctgagagacctggccgtgcacatcgcccacagcctgagaaacagccccgactggggcggcgtggtgatcctgcacagaaaggagggcgacagcgagttcatgaacatcatcgccaacgagatcggcagcgaggagaccctgctgttcctgaccgtgggcgacgagaagggcggcggcctgttcctgctggccggcccccccgccagcgtggagaccctgggccccagagtggccgaggtgctggagggcaagggcgccggcaagaagggcagattccagggcaaggccaccaagatgagcagaagaatggaggcccaggccctgctgcaggactacatcagcacccagagcgccaaggagtag

SEQ ID NO: 72355 - DNA, 1761 bp, synthetic construct; identical to SEQ ID NO: 72354
  misc_feature 1..1761: note = Description of Artificial Sequence: Synthetic coding sequence
  source 1..1761: mol_type = other DNA

SEQ ID NO: 72356 - DNA, 1239 bp, synthetic construct
  misc_feature 1..1239: note = Description of Artificial Sequence: Synthetic coding sequence
  source 1..1239: mol_type = other DNA
atggccttctggtgccagagagacagctacgccagagagttcaccaccaccgtggtgagctgctgccccgccgagctgcagaccgagggcagcaacggcaagaaggaggtgctgagcggcttccaggtggtgctggaggacaccgtgctgttccccgagggcggcggccagcccgacgacagaggcaccatcaacgacatcagcgtgctgagagtgaccagaagaggcgagcaggccgaccacttcacccagacccccctggaccccggcagccaggtgctggtgagagtggactgggagagaagattcgaccacatgcagcagcacagcggccagcacctgatcaccgccgtggccgaccacctgttcaagctgaagaccaccagctgggagctgggcagattcagaagcgccatcgagctggacacccccagcatgaccgccgagcaggtggccgccatcgagcagagcgtgaacgagaagatcagagacagactgcccgtgaacgtgagagagctgagcctggacgaccccgaggtggagcaggtgagcggcagaggcctgcccgacgaccacgccggccccatcagagtggtgaacatcgagggcgtggacagcaacatgtgctgcggcacccacgtgagcaacctgagcgacctgcaggtgatcaagatcctgggcaccgagaagggcaagaagaacagaaccaacctgatcttcctgagcggcaacagagtgctgaagtggatggagagaagccacggcaccgagaaggccctgaccgccctgctgaagtgcggcgccgaggaccacgtggaggccgtgaagaagctgcagaacagcaccaagatcctgcagaagaacaacctgaacctgctgagagacctggccgtgcacatcgcccacagcctgagaaacagccccgactggggcggcgtggtgatcctgcacagaaaggagggcgacagcgagttcatgaacatcatcgccaacgagatcggcagcgaggagaccctgctgttcctgaccgtgggcgacgagaagggcggcggcctgttcctgctggccggcccccccgccagcgtggagaccctgggccccagagtggccgaggtgctggagggcaagggcgccggcaagaagggcagattccagggcaaggccaccaagatgagcagaagaatggaggcccaggccctgctgcaggactacatcagcacccagagcgccaaggagtag

SEQ ID NO: 72357 - DNA, 501 bp, synthetic construct
  misc_feature 1..501: note = Description of Artificial Sequence: Synthetic coding sequence
  source 1..501: mol_type = other DNA
atgttcagcctgcccctgaactgcagccccgaccacatcagaagaggcagctgctggggcagaccccaggacctgaagatcgccgcccccgcctggaacagcaagtgccaccccggcgccggcgccgccatggccagacagcacgccagaaccctgtggtacgacagacccagatacgtgttcatggagttctgcgtggaggacagcaccgacgtgcacgtgctgatcgaggaccacagaatcgtgttcagctgcaagaacgccgacggcgtggagctgtacaacgagatcgagttctacgccaaggtgaacagcaagcccgtgtggctgagcgtggacttcgacaactggagagactgggagggcgacgaggagatggagctggcccacgtggagcactacgccgagctgctgaagaaggtgagcaccaagagacccccccccgccatggacgacctggacgacgacagcgacagcgccgacgacgccaccagcaactag

SEQ ID NO: 72358 - DNA, 399 bp, synthetic construct
  misc_feature 1..399: note = Description of Artificial Sequence: Synthetic coding sequence
  source 1..399: mol_type = other DNA
atggagttctgcgtggaggacagcaccgacgtgcacgtgctgatcgaggaccacagaatcgtgttcagctgcaagaacgccgacggcgtggagctgtacaacgagatcgagttctacgccaaggtgaacagcaaggacagccaggacaagagaagcagcagaagcatcacctgcttcgtgagaaagtggaaggagaaggtggcctggcccagactgaccaaggaggacatcaagcccgtgtggctgagcgtggacttcgacaactggagagactgggagggcgacgaggagatggagctggcccacgtggagcactacgccgagctgctgaagaaggtgagcaccaagagacccccccccgccatggacgacctggacttcaccaccaccgtggtgtag

SEQ ID NO: 72359 - DNA, 1830 bp, synthetic construct
  misc_feature 1..1830: note = Description of Artificial Sequence: Synthetic coding sequence
  source 1..1830: mol_type = other DNA
atgaagtgggtgaccttcatcagcctgctgttcctgttcagcagcgcctacagcagaggcgtgttcagaagagacgcccacaagagcgaggtggcccacagattcaaggacctgggcgaggagaacttcaaggccctggtgctgatcgccttcgcccagtacctgcagcagtgccccttcgaggaccacgtgaagctggtgaacgaggtgaccgagttcgccaagacctgcgtggccgacgagagcgccgagaactgcgacaagagcctgcacaccctgttcggcgacaagctgtgcaccgtggccaccctgagagagacctacggcgagatggccgactgctgcgccaagcaggagcccgagagaaacgagtgcttcctgcagcacaaggacgacaaccccaacctgcccagactggtgagacccgaggtggacgtgatgtgcaccgccttccacgacaacgaggagaccttcctgaagaagtacctgtacgagatcgccagaagacacccctacttctacgcccccgagctgctgttcttcgccaagagatacaaggccgccttcaccgagtgctgccaggccgccgacaaggccgcctgcctgctgcccaagctggacgagctgagagacgagggcaaggccagcagcgccaagcagagactgaagtgcgccagcctgcagaagttcggcgagagagccttcaaggcctgggccgtggccagactgagccagagattccccaaggccgagttcgccgaggtgagcaagctggtgaccgacctgaccaaggtgcacaccgagtgctgccacggcgacctgctggagtgcgccgacgacagagccgacctggccaagtacatctgcgagaaccaggacagcatcagcagcaagctgaaggagtgctgcgagaagcccctgctggagaagagccactgcatcgccgaggtggagaacgacgagatgcccgccgacctgcccagcctggccgccgacttcgtggagagcaaggacgtgtgcaagaactacgccgaggccaaggacgtgttcctgggcatgttcctgtacgagtacgccagaagacaccccgactacagcgtggtgctgctgctgagactggccaagacctacgagaccaccctggagaagtgctgcgccgccgccgacccccacgagtgctacgccaaggtgttcgacgagttcaagcccctggtggaggagccccagaacctgatcaagcagaactgcgagctgttcgagcagctgggcgagtacaagttccagaacgccctgctggtgagatacaccaagaaggtgccccaggtgagcacccccaccctggtggaggtgagcagaaacctgggcaaggtgggcagcaagtgctgcaagcaccccgaggccaagagaatgccctgcgccgaggactacctgagcgtggtgctgaaccagctgtgcgtgctgcacgagaagacccccgtgagcgacagagtgaccaagtgctgcaccgagagcctggtgaacagaagaccctgcttcagcgccctggaggtggacgagacctacgtgcccaaggagttcaacgccgagaccttcaccttccacgccgacatctgcaccctgagcgagaaggagagacagatcaagaagcagaccgccctggtggagctggtgaagcacaagcccaaggccaccaaggagcagctgaaggccgtgatggacgacttcgccgccttcgtggagaagtgctgcaaggccgacgacaaggagacctgcttcgccgaggagggcaagaagctggtggccgccagccaggccgccctgggcctgtag

SEQ ID NO: 72360 - DNA, 1191 bp, synthetic construct
  misc_feature 1..1191: note = Description of Artificial Sequence: Synthetic coding sequence
  source 1..1191: mol_type = other DNA
atgaagtgggtgaccttcatcagcctgctgttcctgttcagcagcgcctacagcagaggcgtgttcagaagagacgcccacaagagcgaggtggcccacagattcaaggacctgggcgaggagaacttcaaggccctggtgctgatcgccttcgcccagtacctgcagcagtgccccttcgaggaccacgtgaagctggtgaacgaggtgaccgagttcgccaagacctgcgtggccgacgagagcgccgagaactgcgacaagagcctgcacaccctgttcggcgacaagctgtgcaccgtggccaccctgagagagacctacggcgagatggccgactgctgcgccaagcaggagcccgagagaaacgagtgcttcctgcagcacaaggacgacaaccccaacctgcccagactggtgagacccgaggtggacgtgatgtgcaccgccttccacgacaacgaggagaccttcctgaagaagtacctgtacgagaccaccctggagaagtgctgcgccgccgccgacccccacgagtgctacgccaaggtgttcgacgagttcaagcccctggtggaggagccccagaacctgatcaagcagaactgcgagctgttcgagcagctgggcgagtacaagttccagaacgccctgctggtgagatacaccaagaaggtgccccaggtgagcacccccaccctggtggaggtgagcagaaacctgggcaaggtgggcagcaagtgctgcaagcaccccgaggccaagagaatgccctgcgccgaggactacctgagcgtggtgctgaaccagctgtgcgtgctgcacgagaagacccccgtgagcgacagagtgaccaagtgctgcaccgagagcctggtgaacagaagaccctgcttcagcgccctggaggtggacgagacctacgtgcccaaggagttcaacgccgagaccttcaccttccacgccgacatctgcaccctgagcgagaaggagagacagatcaagaagcagaccgccctggtggagctggtgaagcacaagcccaaggccaccaaggagcagctgaaggccgtgatggacgacttcgccgccttcgtggagaagtgctgcaaggccgacgacaaggagacctgcttcgccgaggagggcaagaagctggtggccgccagccaggccgccctgggcctgtag

SEQ ID NO: 72361 - DNA, 1254 bp, synthetic construct
  misc_feature 1..1254: note = Description of Artificial Sequence: Synthetic coding sequence
  source 1..1254: mol_type = other DNA
atgaagtgggtgaccttcatcagcctgctgttcctgttcagcagcgcctacagcagaggcgtgttcagaagagacgcccacaagagcgaggtggcccacagattcaaggacctgggcgaggagaacttcaaggccctggccgtggccagactgagccagagattccccaaggccgagttcgccgaggtgagcaagctggtgaccgacctgaccaaggtgcacaccgagtgctgccacggcgacctgctggagtgcgccgacgacagagccgacctggccaagtacatctgcgagaaccaggacagcatcagcagcaagctgaaggagtgctgcgagaagcccctgctggagaagagccactgcatcgccgaggtggagaacgacgagatgcccgccgacctgcccagcctggccgccgacttcgtggagagcaaggacgtgtgcaagaactacgccgaggccaaggacgtgttcctgggcatgttcctgtacgagtacgccagaagacaccccgactacagcgtggtgctgctgctgagactggccaagacctacgagaccaccctggagaagtgctgcgccgccgccgacccccacgagtgctacgccaaggtgttcgacgagttcaagcccctggtggaggagccccagaacctgatcaagcagaactgcgagctgttcgagcagctgggcgagtacaagttccagaacgccctgctggtgagatacaccaagaaggtgccccaggtgagcacccccaccctggtggaggtgagcagaaacctgggcaaggtgggcagcaagtgctgcaagcaccccgaggccaagagaatgccctgcgccgaggactacctgagcgtggtgctgaaccagctgtgcgtgctgcacgagaagacccccgtgagcgacagagtgaccaagtgctgcaccgagagcctggtgaacagaagaccctgcttcagcgccctggaggtggacgagacctacgtgcccaaggagttcaacgccgagaccttcaccttccacgccgacatctgcaccctgagcgagaaggagagacagatcaagaagcagaccgccctggtggagctggtgaagcacaagcccaaggccaccaaggagcagctgaaggccgtgatggacgacttcgccgccttcgtggagaagtgctgcaaggccgacgacaaggagacctgcttcgccgaggagggcaagaagctggtggccgccagccaggccgccctgggcctgtag

SEQ ID NO: 72362 - DNA, 1857 bp, synthetic construct
  misc_feature 1..1857: note = Description of Artificial Sequence: Synthetic coding sequence
  source 1..1857: mol_type = other DNA
atgaagtgggtgaccttcatcagcctgctgttcctgttcagcagcgcctacagcagaggcgtgttcagaagagacgccctgttcctgttcttcttcccctgccccgacaagagcgaggtggcccacagattcaaggacctgggcgaggagaacttcaaggccctggtgctgatcgccttcgcccagtacctgcagcagtgccccttcgaggaccacgtgaagctggtgaacgaggtgaccgagttcgccaagacctgcgtggccgacgagagcgccgagaactgcgacaagagcctgcacaccctgttcggcgacaagctgtgcaccgtggccaccctgagagagacctacggcgagatggccgactgctgcgccaagcaggagcccgagagaaacgagtgcttcctgcagcacaaggacgacaaccccaacctgcccagactggtgagacccgaggtggacgtgatgtgcaccgccttccacgacaacgaggagaccttcctgaagaagtacctgtacgagatcgccagaagacacccctacttctacgcccccgagctgctgttcttcgccaagagatacaaggccgccttcaccgagtgctgccaggccgccgacaaggccgcctgcctgctgcccaagctggacgagctgagagacgagggcaaggccagcagcgccaagcagagactgaagtgcgccagcctgcagaagttcggcgagagagccttcaaggcctgggccgtggccagactgagccagagattccccaaggccgagttcgccgaggtgagcaagctggtgaccgacctgaccaaggtgcacaccgagtgctgccacggcgacctgctggagtgcgccgacgacagagccgacctggccaagtacatctgcgagaaccaggacagcatcagcagcaagctgaaggagtgctgcgagaagcccctgctggagaagagccactgcatcgccgaggtggagaacgacgagatgcccgccgacctgcccagcctggccgccgacttcgtggagagcaaggacgtgtgcaagaactacgccgaggccaaggacgtgttcctgggcatgttcctgtacgagtacgccagaagacaccccgactacagcgtggtgctgctgctgagactggccaagacctacgagaccaccctggagaagtgctgcgccgccgccgacccccacgagtgctacgccaaggtgttcgacgagttcaagcccctggtggaggagccccagaacctgatcaagcagaactgcgagctgttcgagcagctgggcgagtacaagttccagaacgccctgctggtgagatacaccaagaaggtgccccaggtgagcacccccaccctggtggaggtgagcagaaacctgggcaaggtgggcagcaagtgctgcaagcaccccgaggccaagagaatgccctgcgccgaggactacctgagcgtggtgctgaaccagctgtgcgtgctgcacgagaagacccccgtgagcgacagagtgaccaagtgctgcaccgagagcctggtgaacagaagaccctgcttcagcgccctggaggtggacgagacctacgtgcccaaggagttcaacgccgagaccttcaccttccacgccgacatctgcaccctgagcgagaaggagagacagatcaagaagcagaccgccctggtggagctggtgaagcacaagcccaaggccaccaaggagcagctgaaggccgtgatggacgacttcgccgccttcgtggagaagtgctgcaaggccgacgacaaggagacctgcttcgccgaggagggcaagaagctggtggccgccagccaggccgccctgggcctgtag

SEQ ID NO: 72363 - DNA, 1161 bp, synthetic construct
  misc_feature 1..1161: note = Description of Artificial Sequence: Synthetic coding sequence
  source 1..1161: mol_type = other DNA
atgttcgccgagatccagatccaggacaaggacagaatgggcaccgccggcaaggtgatcaagtgcaaggccgccgtgctgtgggagcagaagcagcccttcagcatcgaggagatcgaggtggccccccccaagaccaaggaggtgagaatcaagatcctggccaccggcatctgcagaaccgacgaccacgtgatcaagggcaccatggtgagcaagttccccgtgatcgtgggccacgaggccaccggcatcgtggagagcatcggcgagggcgtgaccaccgtgaagcccggcgacaaggtgatccccctgttcctgccccagtgcagagagtgcaacgcctgcagaaaccccgacggcaacctgtgcatcagaagcgacatcaccggcagaggcgtgctggccgacggcaccaccagattcacctgcaagggcaagcccgtgcaccacttcatgaacaccagcaccttcaccgagtacaccgtggtggacgagagcagcgtggccaagatcgacgacgccgccccccccgagaaggtgtgcctgatcggctgcggcttcagcaccggctacggcgccgccgtgaagaccggcaaggtgaagcccggcagcacctgcgtggtgttcggcctgggcggcgtgggcctgagcgtgatcatgggctgcaagagcgccggcgccagcagaatcatcggcatcgacctgaacaaggacaagttcgagaaggccatggccgtgggcgccaccgagtgcatcagccccaaggacagcaccaagcccatcagcgaggtgctgagcgagatgaccggcaacaacgtgggctacaccttcgaggtgatcggccacctggagaccatgatcgacgccctggccagctgccacatgaactacggcaccagcgtggtggtgggcgtgccccccagcgccaagatgctgacctacgaccccatgctgctgttcaccggcagaacctggaagggctgcgtgttcggcggcctgaagagcagagacgacgtgcccaagctggtgaccgagttcctggccaagaagttcgacctggaccagctgatcacccacgtgctgcccttcaagaagatcagcgagggcttcgagctgctgaacagcggccagagcatcagaaccgtgctgaccttctag

SEQ ID NO: 72364 - DNA, 1128 bp, synthetic construct
  misc_feature 1..1128: note = Description of Artificial Sequence: Synthetic coding sequence
  source 1..1128: mol_type = other DNA
atgagcaccgccggcaaggtgatcaagtgcaaggccgccgtgctgtgggaggtgaagaagcccttcagcatcgaggacgtggaggtggccccccccaaggcctacgaggtgagaatcaagatggtggccgtgggcatctgccacaccgacgaccacgtggtgagcggcaacctggtgacccccctgcccgtgatcctgggccacgaggccgccggcatcgtggagagcgtgggcgagggcgtgaccaccgtgaagcccggcgacaaggtgatccccctgttcaccccccagtgcggcaagtgcagagtgtgcaagaaccccgagagcaactactgcctgaagaacgacctgggcaaccccagaggcaccctgcaggacggcaccagaagattcacctgcagaggcaagcccatccaccacttcctgggcaccagcaccttcagccagtacaccgtggtggacgagaacgccgtggccaagatcgacgccgccagccccctggagaaggtgtgcctgatcggctgcggcttcagcaccggctacggcagcgccgtgaacgtggccaaggtgacccccggcagcacctgcgccgtgttcggcctgggcggcgtgggcctgagcgccgtgatgggctgcaaggccgccggcgccgccagaatcatcgccgtggacatcaacaaggacaagttcgccaaggccaaggagctgggcgccaccgagtgcatcaacccccaggactacaagaagcccatccaggaggtgctgaaggagatgaccgacggcggcgtggacttcagcttcgaggtgatcggcagactggacaccatgatggccagcctgctgtgctgccacgaggcctgcggcaccagcgtgatcgtgggcgtgccccccgccagccagaacctgagcatcaaccccatgctgctgctgaccggcagaacctggaagggcgccgtgtacggcggcttcaagagcaaggagggcatccccaagctggtggccgacttcatggccaagaagttcagcctggacgccctgatcacccacgtgctgcccttcgagaagatcaacgagggcttcgacctgctgcacagcggcaagagcatcagaaccgtgctgaccttctag

SEQ ID NO: 72365 - DNA, 1008 bp, synthetic construct
  misc_feature 1..1008: note = Description of Artificial Sequence: Synthetic coding sequence
  source 1..1008: mol_type = other DNA
atggtggccgtgggcatctgccacaccgacgaccacgtggtgagcggcaacctggtgacccccctgcccgtgatcctgggccacgaggccgccggcatcgtggagagcgtgggcgagggcgtgaccaccgtgaagcccggcgacaaggtgatccccctgttcaccccccagtgcggcaagtgcagagtgtgcaagaaccccgagagcaactactgcctgaagaacgacctgggcaaccccagaggcaccctgcaggacggcaccagaagattcacctgcagaggcaagcccatccaccacttcctgggcaccagcaccttcagccagtacaccgtggtggacgagaacgccgtggccaagatcgacgccgccagccccctggagaaggtgtgcctgatcggctgcggcttcagcaccggctacggcagcgccgtgaacgtggccaaggtgacccccggcagcacctgcgccgtgttcggcctgggcggcgtgggcctgagcgccgtgatgggctgcaaggccgccggcgccgccagaatcatcgccgtggacatcaacaaggacaagttcgccaaggccaaggagctgggcgccaccgagtgcatcaacccccaggactacaagaagcccatccaggaggtgctgaaggagatgaccgacggcggcgtggacttcagcttcgaggtgatcggcagactggacaccatgatggccagcctgctgtgctgccacgaggcctgcggcaccagcgtgatcgtgggcgtgccccccgccagccagaacctgagcatcaaccccatgctgctgctgaccggcagaacctggaagggcgccgtgtacggcggcttcaagagcaaggagggcatccccaagctggtggccgacttcatggccaagaagttcagcctggacgccctgatcacccacgtgctgcccttcgagaagatcaacgagggcttcgacctgctgcacagcggcaagagcatcagaaccgtgctgaccttctag

SEQ ID NO: 72366 - DNA, 1089 bp, synthetic construct
  misc_feature 1..1089: note = Description of Artificial Sequence: Synthetic coding sequence
  source 1..1089: mol_type = other DNA
atgagcaccgccggcaaggtgatcaagtgcaaggccgccgtgctgtgggaggtgaagaagcccttcagcatcgaggacgtggaggtggccccccccaaggcctacgaggtgagaatcaagatggtggccgtgggcatctgccacaccgacgaccacgtggtgagcggcaacctggtgacccccctgcccgtgatcctgggccacgaggccgccggcatcgtggagagcgtgggcgagggcgtgaccaccgtgaagcccggcgacaaggtgatccccctgttcaccccccagtgcggcaagtgcagagtgtgcaagaaccccgagagcaactactgcctgaagaacgacctgggcaaccccagaggcaagcccatccaccacttcctgggcaccagcaccttcagccagtacaccgtggtggacgagaacgccgtggccaagatcgacgccgccagccccctggagaaggtgtgcctgatcggctgcggcttcagcaccggctacggcagcgccgtgaacgtggccaaggtgacccccggcagcacctgcgccgtgttcggcctgggcggcgtgggcctgagcgccgtgatgggctgcaaggccgccggcgccgccagaatcatcgccgtggacatcaacaaggacaagttcgccaaggccaaggagctgggcgccaccgagtgcatcaacccccaggactacaagaagcccatccaggaggtgctgaaggagatgaccgacggcggcgtggacttcagcttcgaggtgatcggcagactggacaccatgatggccagcctgctgtgctgccacgaggcctgcggcaccagcgtgatcgtgggcgtgccccccgccagccagaacctgagcatcaaccccatgctgctgctgaccggcagaacctggaagggcgccgtgtacggcggcttcaagagcaaggagggcatccccaagctggtggccgacttcatggccaagaagttcagcctggacgccctgatcacccacgtgctgcccttcgagaagatcaacgagggcttcgacctgctgcacagcggcaagagcatcagaaccgtgctgaccttctag

SEQ ID NO: 72367 - DNA, 1143 bp, synthetic construct
  misc_feature 1..1143: note = Description of Artificial Sequence: Synthetic coding sequence
  source 1..1143: mol_type = other DNA
atgggcaccaagggcaaggtgatcaagtgcaaggccgccatcgcctgggaggccggcaagcccctgtgcatcgaggaggtggaggtggccccccccaaggcccacgaggtgagaatccagatcatcgccaccagcctgtgccacaccgacgccaccgtgatcgacagcaagttcgagggcctggccttccccgtgatcgtgggccacgaggccgccggcatcgtggagagcatcggccccggcgtgaccaacgtgaagcccggcgacaaggtgatccccctgtacgcccccctgtgcagaaagtgcaagttctgcctgagccccctgaccaacctgtgcggcaagatcagcaacctgaagagccccgccagcgaccagcagctgatggaggacaagaccagcagattcacctgcaagggcaagcccgtgtaccacttcttcggcaccagcaccttcagccagtacaccgtggtgagcgacatcaacctggccaagatcgacgacgacgccaacctggagagagtgtgcctgctgggctgcggcttcagcaccggctacggcgccgccatcaacaacgccaaggtgacccccggcagcacctgcgccgtgttcggcctgggcggcgtgggcctgagcgccgtgatgggctgcaaggccgccggcgccagcagaatcatcggcatcgacatcaacagcgagaagttcgtgaaggccaaggccctgggcgccaccgactgcctgaaccccagagacctgcacaagcccatccaggaggtgatcatcgagctgaccaagggcggcgtggacttcgccctggactgcgccggcggcagcgagaccatgaaggccgccctggactgcaccaccgccggctggggcagctgcaccttcatcggcgtggccgccggcagcaagggcctgaccatcttccccgaggagctgatcatcggcagaaccatcaacggcaccttcttcggcggctggaagagcgtggacagcatccccaagctggtgaccgactacaagaacaagaagttcaacctggacgccctggtgacccacaccctgcccttcgacaagatcagcgaggccttcgacctgatgaaccagggcaagagcgtgagaaccatcctgatcttctag

SEQ ID NO: 72368 - DNA, 1200 bp, synthetic construct
  misc_feature 1..1200: note = Description of Artificial Sequence: Synthetic coding sequence
  source 1..1200: mol_type = other DNA
atgctggtgagaggcccccacttcgagctgcagagatgcaagacccacctgttcagcagcaactacctgacccaggtgatcaagtgcaaggccgccatcgcctgggaggccggcaagcccctgtgcatcgaggaggtggaggtggccccccccaaggcccacgaggtgagaatccagatcatcgccaccagcctgtgccacaccgacgccaccgtgatcgacagcaagttcgagggcctggccttccccgtgatcgtgggccacgaggccgccggcatcgtggagagcatcggccccggcgtgaccaacgtgaagcccggcgacaaggtgatccccctgtacgcccccctgtgcagaaagtgcaagttctgcctgagccccctgaccaacctgtgcggcaagatcagcaacctgaagagccccgccagcgaccagcagctgatggaggacaagaccagcagattcacctgcaagggcaagcccgtgtaccacttcttcggcaccagcaccttcagccagtacaccgtggtgagcgacatcaacctggccaagatcgacgacgacgccaacctggagagagtgtgcctgctgggctgcggcttcagcaccggctacggcgccgccatcaacaacgccaaggtgacccccggcagcacctgcgccgtgttcggcctgggcggcgtgggcctgagcgccgtgatgggctgcaaggccgccggcgccagcagaatcatcggcatcgacatcaacagcgagaagttcgtgaaggccaaggccctgggcgccaccgactgcctgaaccccagagacctgcacaagcccatccaggaggtgatcatcgagctgaccaagggcggcgtggacttcgccctggactgcgccggcggcagcgagaccatgaaggccgccctggactgcaccaccgccggctggggcagctgcaccttcatcggcgtggccgccggcagcaagggcctgaccatcttccccgaggagctgatcatcggcagaaccatcaacggcaccttcttcggcggctggaagagcgtggacagcatccccaagctggtgaccgactacaagaacaagaagttcaacctggacgccctggtgacccacaccctgcccttcgacaagatcagcgaggccttcgacctgatgaaccagggcaagagcgtgagaaccatcctgatcttctag

SEQ ID NO: 72369 - DNA, 1125 bp, synthetic construct
  misc_feature 1..1125: note = Description of Artificial Sequence: Synthetic coding sequence
  source 1..1125: mol_type = other DNA
atggccaacgaggtgatcaagtgcaaggccgccgtggcctgggaggccggcaagcccctgagcatcgaggagatcgaggtggccccccccaaggcccacgaggtgagaatcaagatcatcgccaccgccgtgtgccacaccgacgcctacaccctgagcggcgccgaccccgagggctgcttccccgtgatcctgggccacgagggcgccggcatcgtggagagcgtgggcgagggcgtgaccaagctgaaggccggcgacaccgtgatccccctgtacatcccccagtgcggcgagtgcaagttctgcctgaaccccaagaccaacctgtgccagaagatcagagtgacccagggcaagggcctgatgcccgacggcaccagcagattcacctgcaagggcaagaccatcctgcactacatgggcaccagcaccttcagcgagtacaccgtggtggccgacatcagcgtggccaagatcgaccccctggcccccctggacaaggtgtgcctgctgggctgcggcatcagcaccggctacggcgccgccgtgaacaccgccaagctggagcccggcagcgtgtgcgccgtgttcggcctgggcggcgtgggcctggccgtgatcatgggctgcaaggtggccggcgccagcagaatcatcggcgtggacatcaacaaggacaagttcgccagagccaaggagttcggcgccaccgagtgcatcaacccccaggacttcagcaagcccatccaggaggtgctgatcgagatgaccgacggcggcgtggactacagcttcgagtgcatcggcaacgtgaaggtgatgagagccgccctggaggcctgccacaagggctggggcgtgagcgtggtggtgggcgtggccgccagcggcgaggagatcgccaccagacccttccagctggtgaccggcagaacctggaagggcaccgccttcggcggctggaagagcgtggagagcgtgcccaagctggtgagcgagtacatgagcaagaagatcaaggtggacgagttcgtgacccacaacctgagcttcgacgagatcaacaaggccttcgagctgatgcacagcggcaagagcatcagaaccgtggtgaagatctag

SEQ ID NO: 72370 - DNA, 1107 bp, synthetic construct
  misc_feature 1..1107: note = Description of Artificial Sequence: Synthetic coding sequence
  source 1..1107: mol_type = other DNA
atgtgcaccaccggccaggtgatcagatgcaaggccgccatcctgtggaagcccggcgcccccttcagcatcgaggaggtggaggtggccccccccaaggccaaggaggtgagaatcaaggtggtggccaccggcctgtgcggcaccgagatgaaggtgctgggcagcaagcacctggacctgctgtaccccaccatcctgggccacgagggcgccggcatcgtggagagcatcggcgagggcgtgagcaccgtgaagcccggcgacaaggtgatcaccctgttcctgccccagtgcggcgagtgcaccagctgcctgaacagcgagggcaacttctgcatccagttcaagcagagcaagacccagctgatgagcgacggcaccagcagattcacctgcaagggcaagagcatctaccacttcggcaacaccagcaccttctgcgagtacaccgtgatcaaggagatcagcgtggccaagatcgacgccgtggcccccctggagaaggtgtgcctgatcagctgcggcttcagcaccggcttcggcgccgccatcaacaccgccaaggtgacccccggcagcacctgcgccgtgttcggcctgggcggcgtgggcctgagcgtggtgatgggctgcaaggccgccggcgccgccagaatcatcggcgtggacgtgaacaaggagaagttcaagaaggcccaggagctgggcgccaccgagtgcctgaacccccaggacctgaagaagcccatccaggaggtgctgttcgacatgaccgacgccggcatcgacttctgcttcgaggccatcggcaacctggacgtgctggccgccgccctggccagctgcaacgagagctacggcgtgtgcgtggtggtgggcgtgctgcccgccagcgtgcagctgaagatcagcggccagctgttcttcagcggcagaagcctgaagggcagcgtgttcggcggctggaagagcagacagcacatccccaagctggtggccgactacatggccgagaagctgaacctggaccccctgatcacccacaccctgaacctggacaagatcaacgaggccgtggagctgatgaagaccggcaagtggtag

SEQ ID NO: 72371 - DNA, 1128 bp, synthetic construct
  misc_feature 1..1128: note = Description of Artificial Sequence: Synthetic coding sequence
  source 1..1128: mol_type = other DNA
atgtgcaccaccggccaggtgatcagatgcaaggccgccatcctgtggaagcccggcgcccccttcagcatcgaggaggtggaggtggccccccccaaggccaaggaggtgagaatcaaggtggtggccaccggcctgtgcggcaccgagatgaaggtgctgggcagcaagcacctggacctgctgtaccccaccatcctgggccacgagggcgccggcatcgtggagagcatcggcgagggcgtgagcaccgtgaagcccggcgacaaggtgatcaccctgttcctgccccagtgcggcgagtgcaccagctgcctgaacagcgagggcaacttctgcatccagttcaagcagagcaagacccagctgatgagcgacggcaccagcagattcacctgcaagggcaagagcatctaccacttcggcaacaccagcaccttctgcgagtacaccgtgatcaaggagatcagcgtggccaagatcgacgccgtggcccccctggagaaggtgtgcctgatcagctgcggcttcagcaccggcttcggcgccgccatcaacaccgccaaggtgacccccggcagcacctgcgccgtgttcggcctgggcggcgtgggcctgagcgtggtgatgggctgcaaggccgccggcgccgccagaatcatcggcgtggacgtgaacaaggagaagttcaagaaggcccaggagctgggcgccaccgagtgcctgaacccccaggacctgaagaagcccatccaggaggtgctgttcgacatgaccgacgccggcatcgacttctgcttcgaggccatcggcaacctggacgtgctggccgccgccctggccagctgcaacgagagctacggcgtgtgcgtggtggtgggcgtgctgcccgccagcgtgcagctgaagatcagcggccagctgttcttcagcggcagaagcctgaagggcagcgtgttcggcggctggaagagcagacagcacatccccaagctggtggccgactacatggccgagaagctgaacctggaccccctgatcacccacaccctgaacctggacaagatcaacgaggccgtggagctgatgaagaccggcaagtgcatcagatgcatcctgctgctgtag

SEQ ID NO: 72372 - DNA, 501 bp, synthetic construct
  misc_feature 1..501: note = Description of Artificial Sequence: Synthetic coding sequence
  source 1..501: mol_type = other DNA
atgggctgcaaggccgccggcgccgccagaatcatcggcgtggacgtgaacaaggagaagttcaagaaggcccaggagctgggcgccaccgagtgcctgaacccccaggacctgaagaagcccatccaggaggtgctgttcgacatgaccgacgccggcatcgacttctgcttcgaggccatcggcaacctggacgtgctggccgccgccctggccagctgcaacgagagctacggcgtgtgcgtggtggtgggcgtgctgcccgccagcgtgcagctgaagatcagcggccagctgttcttcagcggcagaagcctgaagggcagcgtgttcggcggctggaagagcagacagcacatccccaagctggtggccgactacatggccgagaagctgaacctggaccccctgatcacccacaccctgaacctggacaagatcaacgaggccgtggagctgatgaagaccggcaagtgcatcagatgcatcctgctgctgtag

SEQ ID NO: 72373 - DNA, 1068 bp, synthetic construct
  misc_feature 1..1068: note = Description of Artificial Sequence: Synthetic coding sequence
  source 1..1068: mol_type = other DNA
atggagcccgagaagcagaccgagatcagcgagttcttcctgcagggcctgagcgagaagcccgagcaccagaccctgctgttcaccatgttcctgagcacctacctggtgaccatcatcggcaacgccctgatcatcctggccatcatcaccgacagccacctgcacacccccatgtacttcttcctgttcaacctgagcctggtggacaccctgctgagcagcaccaccgtgcccaagatgctggccaacatccaggcccagagcagagccatccccttcgtgggctgcctgacccagatgtacgccttccacctgttcggcaccatggacagcttcctgctggccgtgatggccatcgacagattcgtggccatcgtgcacccccagagatacctggtgctgatgtgcagccccgtgtgcggcctgctgctgggcgccagctggatgatcaccaacctgcagagcctgatccacacctgcctgatggcccagctgaccttctgcgccggcagcgagatcagccacttcttctgcgacctgatgcccctgctgaagctgagcggcagcgacacccacaccaacgagctggtgatcttcgccttcggcatcgtggtgggcaccagccccttcagctgcatcctgctgagctacatcagaatcttctggaccgtgttcaagatccccagcaccagaggcaagtggaaggccttcagcacctgcggcctgcacctgaccgtggtgagcctgagctacggcaccatcttcgccgtgtacctgcagcccaccagccccagcagcagccagaaggacaaggccgccgccctgatgtgcggcgtgttcatccccatgctgaaccccttcatctacagcatcagaaacaaggacatgaaggccgccctgggcaagctgatcggcaaggtggccgtgccctgccccagacccgagcagctgctggacgtgtaccacgtgcccggcagcctgctggccgccagagacaccgagatgcaccccatcccctaccccggcggcgtgcagagcctggccggcaacagagacatggagtag

SEQ ID NO: 72374 - DNA, 1125 bp, synthetic construct
  misc_feature 1..1125: note = Description of Artificial Sequence: Synthetic coding sequence
  source 1..1125: mol_type = other DNA
atgggcaccgccggcaaggtgatcaagtgcaaggccgccgtgctgtgggagcagaagcagcccttcagcatcgaggagatcgaggtggccccccccaagaccaaggaggtgagaatcaagatcctggccaccggcatctgcagaaccgacgaccacgtgatcaagggcaccatggtgagcaagttccccgtgatcgtgggccacgaggccaccggcatcgtggagagcatcggcgagggcgtgaccaccgtgaagcccggcgacaaggtgatccccctgttcctgccccagtgcagagagtgcaacgcctgcagaaaccccgacggcaacctgtgcatcagaagcgacatcaccggcagaggcgtgctggccgacggcaccaccagattcacctgcaagggcaagcccgtgcaccacttcatgaacaccagcaccttcaccgagtacaccgtggtggacgagagcagcgtggccaagatcgacgacgccgccccccccgagaaggtgtgcctgatcggctgcggcttcagcaccggctacggcgccgccgtgaagaccggcaaggtgaagcccggcagcacctgcgtggtgttcggcctgggcggcgtgggcctgagcgtgatcatgggctgcaagagcgccggcgccagcagaatcatcggcatcgacctgaacaaggacaagttcgagaaggccatggccgtgggcgccaccgagtgcatcagccccaaggacagcaccaagcccatcagcgaggtgctgagcgagatgaccggcaacaacgtgggctacaccttcgaggtgatcggccacctggagaccatgatcgacgccctggccagctgccacatgaactacggcaccagcgtggtggtgggcgtgccccccagcgccaagatgctgacctacgaccccatgctgctgttcaccggcagaacctggaagggctgcgtgttcggcggcctgaagagcagagacgacgtgcccaagctggtgaccgagttcctggccaagaagttcgacctggaccagctgatcacccacgtgctgcccttcaagaagatcagcgagggcttcgagctgctgaacagcggccagagcatcagaaccgtgctgaccttctag

SEQ ID NO: 72375 - DNA, 1185 bp, synthetic construct
  misc_feature 1..1185: note = Description of Artificial Sequence: Synthetic coding sequence
  source 1..1185: mol_type = other DNA
atgaagtgcctggtgagcagacacaccgtgagagagaccctggacatggtgttccagagaatgagcgtggaggccggcgtgatcaagtgcaaggccgccgtgctgtgggagcagaagcagcccttcagcatcgaggagatcgaggtggccccccccaagaccaaggaggtgagaatcaagatcctggccaccggcatctgcagaaccgacgaccacgtgatcaagggcaccatggtgagcaagttccccgtgatcgtgggccacgaggccaccggcatcgtggagagcatcggcgagggcgtgaccaccgtgaagcccggcgacaaggtgatccccctgttcctgccccagtgcagagagtgcaacgcctgcagaaaccccgacggcaacctgtgcatcagaagcgacatcaccggcagaggcgtgctggccgacggcaccaccagattcacctgcaagggcaagcccgtgcaccacttcatgaacaccagcaccttcaccgagtacaccgtggtggacgagagcagcgtggccaagatcgacgacgccgccccccccgagaaggtgtgcctgatcggctgcggcttcagcaccggctacggcgccgccgtgaagaccggcaaggtgaagcccggcagcacctgcgtggtgttcggcctgggcggcgtgggcctgagcgtgatcatgggctgcaagagcgccggcgccagcagaatcatcggcatcgacctgaacaaggacaagttcgagaaggccatggccgtgggcgccaccgagtgcatcagccccaaggacagcaccaagcccatcagcgaggtgctgagcgagatgaccggcaacaacgtgggctacaccttcgaggtgatcggccacctggagaccatgatcgacgccctggccagctgccacatgaactacggcaccagcgtggtggtgggcgtgccccccagcgccaagatgctgacctacgaccccatgctgctgttcaccggcagaacctggaagggctgcgtgttcggcggcctgaagagcagagacgacgtgcccaagctggtgaccgagttcctggccaagaagttcgacctggaccagctgatcacccacgtgctgcccttcaagaagatcagcgagggcttcgagctgctgaacagcggccagagcatcagaaccgtgctgaccttctag

SEQ ID NO: 72376 - DNA, 954 bp, synthetic construct
  misc_feature 1..954: note = Description of Artificial Sequence: Synthetic coding sequence
  source 1..954: mol_type = other DNA
atggtgagcaagttccccgtgatcgtgggccacgaggccaccggcatcgtggagagcatcggcgagggcgtgaccaccgtgaagcccggcgacaaggtgatccccctgttcctgccccagtgcagagagtgcaacgcctgcagaaaccccgacggcaacctgtgcatcagaagcgacatcaccggcagaggcgtgctggccgacggcaccaccagattcacctgcaagggcaagcccgtgcaccacttcatgaacaccagcaccttcaccgagtacaccgtggtggacgagagcagcgtggccaagatcgacgacgccgccccccccgagaaggtgtgcctgatcggctgcggcttcagcaccggctacggcgccgccgtgaagaccggcaaggtgaagcccggcagcacctgcgtggtgttcggcctgggcggcgtgggcctgagcgtgatcatgggctgcaagagcgccggcgccagcagaatcatcggcatcgacctgaacaaggacaagttcgagaaggccatggccgtgggcgccaccgagtgcatcagccccaaggacagcaccaagcccatcagcgaggtgctgagcgagatgaccggcaacaacgtgggctacaccttcgaggtgatcggccacctggagaccatgatcgacgccctggccagctgccacatgaactacggcaccagcgtggtggtgggcgtgccccccagcgccaagatgctgacctacgaccccatgctgctgttcaccggcagaacctggaagggctgcgtgttcggcggcctgaagagcagagacgacgtgcccaagctggtgaccgagttcctggccaagaagttcgacctggaccagctgatcacccacgtgctgcccttcaagaagatcagcgagggcttcgagctgctgaacagcggccagagcatcagaaccgtgctgaccttctag

SEQ ID NO: 72377 - DNA, 912 bp, synthetic construct
  misc_feature 1..912: note = Description of Artificial Sequence: Synthetic coding sequence
  source 1..912: mol_type = other DNA
atggccgccgccgccagagccagagtggcctacctgctgagacagctgcagagagccgcctgccagtgccccacccacagccacacctacagccaggcccccggcctgagccccagcggcaagaccaccgactacgccttcgagatggccgtgagcaacatcagatacggcgccgccgtgaccaaggaggtgggcatggacctgaagaacatgggcgccaagaacgtgtgcctgatgaccgacaagaacctgagcaagctgccccccgtgcaggtggccatggacagcctggtgaagaacggcatccccttcaccgtgtacgacaacgtgagagtggagcccaccgacagcagcttcatggaggccatcgagttcgcccagaagggcgccttcgacgcctacgtggccgtgggcggcggcagcaccatggacacctgcaaggccgccaacctgtacgccagcagcccccacagcgacttcctggactacgtgagcgcccccatcggcaagggcaagcccgtgagcgtgcccctgaagcccctgatcgccgtgcccaccaccagcggcaccggcagcgagaccaccggcgtggccatcttcgactacgagcacctgaaggtgaagatcggcatcaccagcagagccatcaagcccaccctgggcctgatcgaccccctgcacaccctgcacatgcccgccagagtggtggccaacagcggcttcgacgtgctgtgccacgccctggagagctacaccaccctgccctaccacctgagaagcccctgccccagcaaccccatcaccagacccgcctaccagggcagcaaccccatcagcgacatctgggccatccacgccctgagaatcgtggccaagtacctgaagagagccgtgaacagcaccgacaagtag

SEQ ID NO: 72378 - DNA, 1404 bp, synthetic construct
  misc_feature 1..1404: note = Description of Artificial Sequence: Synthetic coding sequence
  source 1..1404: mol_type = other DNA
atggccgccgccgccagagccagagtggcctacctgctgagacagctgcagagagccgcctgccagtgccccacccacagccacacctacagccaggcccccggcctgagccccagcggcaagaccaccgactacgccttcgagatggccgtgagcaacatcagatacggcgccgccgtgaccaaggaggtgggcatggacctgaagaacatgggcgccaagaacgtgtgcctgatgaccgacaagaacctgagcaagctgccccccgtgcaggtggccatggacagcctggtgaagaacggcatccccttcaccgtgtacgacaacgtgagagtggagcccaccgacagcagcttcatggaggccatcgagttcgcccagaagggcgccttcgacgcctacgtggccgtgggcggcggcagcaccatggacacctgcaaggccgccaacctgtacgccagcagcccccacagcgacttcctggactacgtgagcgcccccatcggcaagggcaagcccgtgagcgtgcccctgaagcccctgatcgccgtgcccaccaccagcggcaccggcagcgagaccaccggcgtggccatcttcgactacgagcacctgaaggtgaagatcggcatcaccagcagagccatcaagcccaccctgggcctgatcgaccccctgcacaccctgcacatgcccgccagagtggtggccaacagcggcttcgacgtgctgtgccacgccctggagagctacaccaccctgccctaccacctgagaagcccctgccccagcaaccccatcaccagacccgcctaccagggcagcaaccccatcagcgacatctgggccatccacgccctgagaatcgtggccaagtacctgaagagagccgtgagaaaccccgacgacctggaggccagaagccacatgcacctggccagcgccttcgccggcatcggcttcggcaacgccggcgtgcacctgtgccacggcatgagctaccccatcagcggcctggtgaagatgtacaaggccaaggactacaacgtggaccaccccctggtgccccacggcctgagcgtggtgctgaccagccccgccgtgttcaccttcaccgcccagatgttccccgagagacacctggagatggccgagatcctgggcgccgacaccagaaccgccagaatccaggacgccggcctggtgctggccgacaccctgagaaagttcctgttcgacctggacgtggacgacggcctggccgccgtgggctacagcaaggccgacatccccgccctggtgaagggcaccctgccccaggagagagtgaccaagctggccccctgcccccagagcgaggaggacctggccgccctgttcgaggccagcatgaagctgtactag

SEQ ID NO: 72379 - DNA, 2406 bp, synthetic construct
  misc_feature 1..2406: note = Description of Artificial Sequence: Synthetic coding sequence
  source 1..2406: mol_type = other DNA
atgaagatcgccgtgatcggccagagcctgttcggccaggaggtgtactgccacctgagaaaggagggccacgaggtggtgggcgtgttcaccgtgcccgacaaggacggcaaggccgaccccctgggcctggaggccgagaaggacggcgtgcccgtgttcaagtacagcagatggagagccaagggccaggccctgcccgacgtggtggccaagtaccaggccctgggcgccgagctgaacgtgctgcccttctgcagccagttcatccccatggagatcatcagcgcccccagacacggcagcatcatctaccaccccagcctgctgcccagacacagaggcgccagcgccatccacaactggatcagaggcaacgacaaggtgcccggcgcctggaccgaggcctgcgagcagaagctgaccttcttcaacagcaccctgaacaccagcggcctggtgcccgagggcgacgccctgcccatccccggcgcccacagacccggcgtggtgaccaaggccggcctgatcctgttcggcaacgacgacaagatgctgctggtgaagaacatccagctggaggacggcaagatgatcctggccagcaacttcttcaagggcgccgccagcagcgtgctggagctgaccgaggccgagctggtgaccgccgaggccgtgagaagcgtgtggcagagaatcctgcccaaggtgctggaggtggaggacagcaccgacttcttcaagagcggcgccgccagcgtggacgtggtgagactggtggaggaggtgaaggagctgtgcgacggcctggagctggagaacgaggacgtgtacatggccagcaccttcggcgacttcatccagctgctggtgagaaagctgagaggcgacgacgaggagggcgagtgcagcatcgactacgtggagatggccgtgaacaagagaaccgtgagaatgccccaccagctgttcatcggcggcgagttcgtggacgccgagggcgccaagaccagcgagaccatcaaccccaccgacggcagcgtgatctgccaggtgagcctggcccaggtgaccgacgtggacaaggccgtggccgccgccaaggacgccttcgagaacggcagatggggcaagatcagcgccagagacagaggcagactgatgtacagactggccgacctgatggagcagcaccaggaggagctggccaccatcgaggccctggacgccggcgccgtgtacaccctggccctgaagacccacgtgggcatgagcatccagaccttcagatacttcgccggctggtgcgacaagatccagggcagcaccatccccatcaaccaggccagacccaacagaaacctgaccctgaccagaaaggagcccgtgggcgtgtgcggcatcatcatcccctggaactaccccctgatgatgctgagctggaagaccgccgcctgcctggccgccggcaacaccgtggtgatcaagcccgcccaggtgacccccctgaccgccctgaagttcgccgagctgaccctgaaggccggcatccccaagggcgtggtgaacgtgctgcccggcagcggcagcctggtgggccagagactgagcgaccaccccgacgtgagaaagatcggcttcaccggcagcaccgaggtgggcaagcacatcatgaagagctgcgccatcagcaacgtgaagaaggtgagcctggagctgggcggcaagagccccctgatcatcttcgccgactgcgacctgaacaaggccgtgcagatgggcatgagcagcgtgttcttcaacaagggcgagaactgcatcgccgccggcagactgttcgtggaggacagcatccacgacgagttcgtgagaagagtggtggaggaggtgagaaagatgaaggtgggcaaccccctggacagagacaccgaccacggcccccagaaccaccacgcccacctggtgaagctgatggagtactgccagcacggcgtgaaggagggcgccaccctggtgtgcggcggcaaccaggtgcccagacccggcttcttcttcgagcccaccgtgttcaccgacgtggaggaccacatgttcatcgccaaggaggagagcttcggccccgtgatgatcatcagcagattcgccgacggcgacctggacgccgtgctgagcagagccaacgccaccgagttcggcctggccagcggcgtgttcaccagagacatcaacaaggccctgtacgtgagcgacaagctgcaggccggcaccgtgttcgtgaacacctacaacaagaccgacgtggccgcccccttcggcggcttcaagcagagcggcttcggcaaggacctgggcgaggccgccctgaacgagtacctgagagtgaagaccgtgaccttcgagtactag

SEQ ID NO: 72380 - DNA, 1506 bp, synthetic construct
  misc_feature 1..1506: note = Description of Artificial Sequence: Synthetic coding sequence
  source 1..1506: mol_type = other DNA
atgagcagcagcggcacccccgacctgcccgtgctgctgaccgacctgaagatccagtacaccaagatcttcatcaacaacgagtggcacgacagcgtgagcggcaagaagttccccgtgttcaaccccgccaccgaggaggagctgtgccaggtggaggagggcgacaaggaggacgtggacaaggccgtgaaggccgccagacaggccttccagatcggcagcccctggagaaccatggacgccagcgagagaggcagactgctgtacaagctggccgacctgatcgagagagacagactgctgctggccaccatggagagcatgaacggcggcaagctgtacagcaacgcctacctgaacgacctggccggctgcatcaagaccctgagatactgcgccggctgggccgacaagatccagggcagaaccatccccatcgacggcaacttcttcacctacaccagacacgagcccatcggcgtgtgcggccagatcatcccctggaacttccccctggtgatgctgatctggaagatcggccccgccctgagctgcggcaacaccgtggtggtgaagcccgccgagcagacccccctgaccgccctgcacgtggccagcctgatcaaggaggccggcttcccccccggcgtggtgaacatcgtgcccggctacggccccaccgccggcgccgccatcagcagccacatggacatcgacaaggtggccttcaccggcagcaccgaggtgggcaagctgatcaaggaggccgccggcaagagcaacctgaagagagtgaccctggagctgggcggcaagagcccctgcatcgtgctggccgacgccgacctggacaacgccgtggagttcgcccaccacggcgtgttctaccaccagggccagtgctgcatcgccgccagcagaatcttcgtggaggagagcatctacgacgagttcgtgagaagaagcgtggagagagccaagaagtacatcctgggcaaccccctgacccccggcgtgacccagggcccccagatcgacaaggagcagtacgacaagatcctggacctgatcgagagcggcaagaaggagggcgccaagctggagtgcggcggcggcccctggggcaacaagggctacttcgtgcagcccaccgtgttcagcaacgtgaccgacgagatgagaatcgccaaggaggagatcttcggccccgtgcagcagatcatgaagttcaagagcctggacgacgtgatcaagagagccaacaacaccttctacggcctgagcgccggcgtgttcaccaaggacatcgacaaggccatcaccatcagcagcgccctgcaggccggcaccgtgtgggtgaactgctacggcgtggtgagcgcccagtgccccttcggcggcttcaagatgagcggcaacggcagagagctgggcgagtacggcttccacgagtacaccgaggtgaagaccgtgaccgtgaagatcagccagaagaacagctag

SEQ ID NO: 72381 - DNA, 693 bp, synthetic construct
  misc_feature 1..693: note = Description of Artificial Sequence: Synthetic coding sequence
  source 1..693: mol_type = other DNA
atgagcagcagcggcacccccgacctgcccgtgctgctgaccgacctgaagatccagtacaccaagatcttcatcaacaacgagtggcacgacagcgtgagcggcaagaagttccccgtgttcaaccccgccaccgaggaggagctgtgccaggtggaggagggcgacaaggaggacgtggacaaggccgtgaaggccgccagacaggccttccagatcggcagcccctggagaaccatggacgccagcgagagaggcagactgctgtacaagctggccgacctgatcgagagagacagactgctgctggccaccatggagagcatgaacggcggcaagctgtacagcaacgcctacctgaacgacctggccggctgcatcaagaccctgagatactgcgccggctgggccgacaagatccagggcagaaccatccccatcgacggcaacttcttcacctacaccagacacgagcccatcggcgtgtgcggccagatcatcccctggaacttccccctggtgatgctgatctggaagatcggccccgccctgagctgcggcaacaccgtggtggtgaagcccgccgagcagacccccctgaccgccctgcacgtggccagcctgatcaaggaggccggcttcccccccggcgtggtgaacatcgtgcccggctacggcgccagcgtggtgtag

SEQ ID NO: 72382 - DNA, 717 bp, synthetic construct
  misc_feature 1..717: note = Description of Artificial Sequence: Synthetic coding sequence
  source 1..717: mol_type = other DNA
atgagcagcagcggcacccccgacctgcccgtgctgctgaccgacctgaagatccagtacaccaagatcttcatcaacaacgagtggcacgacagcgtgagcggcaagaagttccccgtgttcaaccccgccaccgaggaggagctgtgccaggtggaggagggcgacaaggaggacgtggacaaggccgtgaaggccgccagacaggccttccagatcggcagcccctggagaaccatggacgccagcgagagaggcagactgctgtacaagctggccgacctgatcgagagagacagactgctgctggccaccatggagagcatgaacggcggcaagctgtacagcaacgcctacctgaacgacctggccggctgcatcaagaccctgagatactgcgccggctgggccgacaagatccagggcagaaccatccccatcgacggcaacttcttcacctacaccagacacgagcccatcggcgtgtgcggccagatcatcccctggaacttccccctggtgatgctgatctggaagatcggccccgccctgagctgcggcaacaccgtggtggtgaagcccgccgagcagacccccctgaccgccctgcacgtggccagcctgatcaaggaggccggcttcccccccggcgtggtgaacatcgtgcccggctacggccccaccgccggcgccgccatcagcagccacatggactag

SEQ ID NO: 72383 - DNA, 990 bp, synthetic construct
  misc_feature 1..990: note = Description of Artificial Sequence: Synthetic coding sequence
  source 1..990: mol_type = other DNA
atcgccgagcccgtgacctgcgtgcccggcgccgagagcgagatgagcagcagcggcacccccgacctgcccgtgctgctgaccgacctgaagatccagtacaccaagatcttcatcaacaacgagtggcacgacagcgtgagcggcaagaagttccccgtgttcaaccccgccaccgaggaggagctgtgccaggtggaggagggcgacaaggaggacgtggacaaggccgtgaaggccgccagacaggccttccagatcggcagcccctggagaaccatggacgccagcgagagaggcagactgctgtacaagctggccgacctgatcgagagagacagactgctgctggccaccatggagagcatgaacggcggcaagctgtacagcaacgcctacctgaacgacctggccggctgcatcaagaccctgagatactgcgccggctgggccgacaagatccagggcagaaccatccccatcgacggcaacttcttcacctacaccagacacgagcccatcggcgtgtgcggccagatcatcccctggaacttccccctggtgatgctgatctggaagatcggccccgccctgagctgcggcaacaccgtggtggtgaagcccgccgagcagacccccctgaccgccctgcacgtggccagcctgatcaaggaggccggcttcccccccggcgtggtgaacatcgtgcccggctacggccccaccgccggcgccgccatcagcagccacatggacatcgacaaggtggccttcaccggcagcaccgaggtgggcaagctgatcaaggaggccgccggcaagagcaacctgaagagagtgaccctggagctgggcggcaagagcccctgcatcgtgctggccgacgccgacctggacaacgccgtggagttcgcccaccacggcgtgttctaccaccagggccagtgctgcatcgccgccagcagattctgcggcagaatcaacctgtag

SEQ ID NO: 72384 - DNA, 612 bp, synthetic construct
  misc_feature 1..612: note = Description of Artificial Sequence: Synthetic coding sequence
  source 1..612: mol_type = other DNA
atgagcagcagcggcacccccgacctgcccgtgctgctgaccgacctgaagatccagtacaccaagatcttcatcaacaacgagtggcacgacagcgtgagcggcaagaagttccccgtgttcaaccccgccaccgaggaggagctgtgccaggtggaggagggcgacaaggaggacgtggacaaggccgtgaaggccgccagacaggccttccagatcggcagcccctggagaaccatggacgccagcgagagaggcagactgctgtacaagctggccgacctgatcgagagagacagactgctgctggccaccatggagagcatgaacggcggcaagctgtacagcaacgcctacctgaacgacctggccggctgcatcaagaccctgagatactgcgccggctgggccgacaagatccagggcagaaccatccccatcgacggcaacttcttcacctacaccagacacgagcccatcggcgtgtgcggccagatcatcccctggaacttccccctggtgatgctgatctggaagatcggccccgccctgagctgcggcaacaccgtggtggtgaagcccgccgagcagacccccctgaccgccctgtag

SEQ ID NO: 72385 - DNA, 1557 bp, synthetic construct
  misc_feature 1..1557: note = Description of Artificial Sequence: Synthetic coding sequence
  source 1..1557: mol_type = other DNA
atgaccagcagcaagatcgagatgcccggcgaggtgaaggccgaccccgccgccctgatggccagcctgcacctgctgcccagccccacccccaacctggagatcaagtacaccaagatcttcatcaacaacgagtggcagaacagcgagagcggcagagtgttccccgtgtacaaccccgccaccggcgagcaggtgtgcgaggtgcaggaggccgacaaggccgacatcgacaaggccgtgcaggccgccagactggccttcagcctgggcagcgtgtggagaagaatggacgccagcgagagaggcagactgctggacaagctggccgacctggtggagagagacagagccgtgctggccaccatggagagcctgaacggcggcaagcccttcctgcaggccttctacgtggacctgcagggcgtgatcaagaccttcagatactacgccggctgggccgacaagatccacggcatgaccatccccgtggacggcgactacttcaccttcaccagacacgagcccatcggcgtgtgcggccagatcatcccctggaacttccccctgctgatgttcgcctggaagatcgcccccgccctgtgctgcggcaacaccgtggtgatcaagcccgccgagcagacccccctgagcgccctgtacatgggcgccctgatcaaggaggccggcttcccccccggcgtgatcaacatcctgcccggctacggccccaccgccggcgccgccatcgccagccacatcggcatcgacaagatcgccttcaccggcagcaccgaggtgggcaagctgatccaggaggccgccggcagaagcaacctgaagagagtgaccctggagctgggcggcaagagccccaacatcatcttcgccgacgccgacctggactacgccgtggagcaggcccaccagggcgtgttcttcaaccagggccagtgctgcaccgccggcagcagaatcttcgtggaggagagcatctacgaggagttcgtgagaagaagcgtggagagagccaagagaagagtggtgggcagccccttcgaccccaccaccgagcagggcccccagatcgacaagaagcagtacaacaagatcctggagctgatccagagcggcgtggccgagggcgccaagctggagtgcggcggcaagggcctgggcagaaagggcttcttcatcgagcccaccgtgttcagcaacgtgaccgacgacatgagaatcgccaaggaggagatcttcggccccgtgcaggagatcctgagattcaagaccatggacgaggtgatcgagagagccaacaacagcgacttcggcctggtggccgccgtgttcaccaacgacatcaacaaggccctgaccgtgagcagcgccatgcaggccggcaccgtgtggatcaactgctacaacgccctgaacgcccagagccccttcggcggcttcaagatgagcggcaacggcagagagatgggcgagttcggcctgagagagtacagcgaggtgaagaccgtgaccgtgaagatcccccagaagaacagctag

SEQ ID NO: 72386 - DNA, 1443 bp, synthetic construct
  misc_feature 1..1443: note = Description of Artificial Sequence: Synthetic coding sequence
  source 1..1443: mol_type = other DNA
atgaccagcagcaagatcgagatgcccggcgaggtgaaggccgaccccgccgccctgatggccagcctgcacctgctgcccagccccacccccaacctggagatcaagtacaccaagatcttcatcaacaacgagtggcagaacagcgagagcggcagagtgttccccgtgtacaaccccgccaccggcgagcaggtgtgcgaggtgcaggaggccgacaaggccgacatcgacaaggccgtgcaggccgccagactggccttcagcctgggcagcgtgtggagaagaatggacgccagcgagagaggcagactgctggacaagctggccgacctggtggagagagacagagccgtgctggccaccatggagagcctgaacggcggcaagcccttcctgcaggccttctacgtggacctgcagggcgtgatcaagaccttcagatactacgccggctgggccgacaagatccacggcatgaccatccccgtggacggcgactacttcaccttcaccagacacgagcccatcggcgtgtgcggccagatcatcccctggaacttccccctgctgatgttcgcctggaagatcgcccccgccctgtgctgcggcaacaccgtggtgatcaagcccgccgagcagacccccctgagcgccctgtacatgggcgccctgatcaaggaggtgggcaagctgatccaggaggccgccggcagaagcaacctgaagagagtgaccctggagctgggcggcaagagccccaacatcatcttcgccgacgccgacctggactacgccgtggagcaggcccaccagggcgtgttcttcaaccagggccagtgctgcaccgccggcagcagaatcttcgtggaggagagcatctacgaggagttcgtgagaagaagcgtggagagagccaagagaagagtggtgggcagccccttcgaccccaccaccgagcagggcccccagatcgacaagaagcagtacaacaagatcctggagctgatccagagcggcgtggccgagggcgccaagctggagtgcggcggcaagggcctgggcagaaagggcttcttcatcgagcccaccgtgttcagcaacgtgaccgacgacatgagaatcgccaaggaggagatcttcggccccgtgcaggagatcctgagattcaagaccatggacgaggtgatcgagagagccaacaacagcgacttcggcctggtggccgccgtgttcaccaacgacatcaacaaggccctgaccgtgagcagcgccatgcaggccggcaccgtgtggatcaactgctacaacgccctgaacgcccagagccccttcggcggcttcaagatgagcggcaacggcagagagatgggcgagttcggcctgagagagtacagcgaggtgaagaccgtgaccgtgaagatcccccagaagaacagctag

SEQ ID NO: 72387 - DNA, 1494 bp, synthetic construct
  misc_feature 1..1494: note = Description of Artificial Sequence: Synthetic coding sequence
  source 1..1494: mol_type = other DNA
atgaagaaccagtgcgagaccgtgtggctgaagagccccatcaagctgaagctgatcttcatcaacaacgagtggcagaacagcgagagcggcagagtgttccccgtgtacaaccccgccaccggcgagcaggtgtgcgaggtgcaggaggccgacaaggccgacatcgacaaggccgtgcaggccgccagactggccttcagcctgggcagcgtgtggagaagaatggacgccagcgagagaggcagactgctggacaagctggccgacctggtggagagagacagagccgtgctggccaccatggagagcctgaacggcggcaagcccttcctgcaggccttctacgtggacctgcagggcgtgatcaagaccttcagatactacgccggctgggccgacaagatccacggcatgaccatccccgtggacggcgactacttcaccttcaccagacacgagcccatcggcgtgtgcggccagatcatcccctggaacttccccctgctgatgttcgcctggaagatcgcccccgccctgtgctgcggcaacaccgtggtgatcaagcccgccgagcagacccccctgagcgccctgtacatgggcgccctgatcaaggaggccggcttcccccccggcgtgatcaacatcctgcccggctacggccccaccgccggcgccgccatcgccagccacatcggcatcgacaagatcgccttcaccggcagcaccgaggtgggcaagctgatccaggaggccgccggcagaagcaacctgaagagagtgaccctggagctgggcggcaagagccccaacatcatcttcgccgacgccgacctggactacgccgtggagcaggcccaccagggcgtgttcttcaaccagggccagtgctgcaccgccggcagcagaatcttcgtggaggagagcatctacgaggagttcgtgagaagaagcgtggagagagccaagagaagagtggtgggcagccccttcgaccccaccaccgagcagggcccccagatcgacaagaagcagtacaacaagatcctggagctgatccagagcggcgtggccgagggcgccaagctggagtgcggcggcaagggcctgggcagaaagggcttcttcatcgagcccaccgtgttcagcaacgtgaccgacgacatgagaatcgccaaggaggagatcttcggccccgtgcaggagatcctgagattcaagaccatggacgaggtgatcgagagagccaacaacagcgacttcggcctggtggccgccgtgttcaccaacgacatcaacaaggccctgaccgtgagcagcgccatgcaggccggcaccgtgtggatcaactgctacaacgccctgaacgcccagagccccttcggcggcttcaagatgagcggcaacggcagagagatgggcgagttcggcctgagagagtacagcgaggtgaagaccgtgaccgtgaagatcccccagaagaacagctag

SEQ ID NO: 72388 - DNA, 1470 bp, synthetic construct
  misc_feature 1..1470: note = Description of Artificial Sequence: Synthetic coding sequence
  source 1..1470: mol_type = other DNA
atgaagggcaagaactgcaacgacgtgaagatcttcatcaacaacgagtggcagaacagcgagagcggcagagtgttccccgtgtacaaccccgccaccggcgagcaggtgtgcgaggtgcaggaggccgacaaggccgacatcgacaaggccgtgcaggccgccagactggccttcagcctgggcagcgtgtggagaagaatggacgccagcgagagaggcagactgctggacaagctggccgacctggtggagagagacagagccgtgctggccaccatggagagcctgaacggcggcaagcccttcctgcaggccttctacgtggacctgcagggcgtgatcaagaccttcagatactacgccggctgggccgacaagatccacggcatgaccatccccgtggacggcgactacttcaccttcaccagacacgagcccatcggcgtgtgcggccagatcatcccctggaacttccccctgctgatgttcgcctggaagatcgcccccgccctgtgctgcggcaacaccgtggtgatcaagcccgccgagcagacccccctgagcgccctgtacatgggcgccctgatcaaggaggccggcttcccccccggcgtgatcaacatcctgcccggctacggccccaccgccggcgccgccatcgccagccacatcggcatcgacaagatcgccttcaccggcagcaccgaggtgggcaagctgatccaggaggccgccggcagaagcaacctgaagagagtgaccctggagctgggcggcaagagccccaacatcatcttcgccgacgccgacctggactacgccgtggagcaggcccaccagggcgtgttcttcaaccagggccagtgctgcaccgccggcagcagaatcttcgtggaggagagcatctacgaggagttcgtgagaagaagcgtggagagagccaagagaagagtggtgggcagccccttcgaccccaccaccgagcagggcccccagatcgacaagaagcagtacaacaagatcctggagctgatccagagcggcgtggccgagggcgccaagctggagtgcggcggcaagggcctgggcagaaagggcttcttcatcgagcccaccgtgttcagcaacgtgaccgacgacatgagaatcgccaaggaggagatcttcggccccgtgcaggagatcctgagattcaagaccatggacgaggtgatcgagagagccaacaacagcgacttcggcctggtggccgccgtgttcaccaacgacatcaacaaggccctgaccgtgagcagcgccatgcaggccggcaccgtgtggatcaactgctacaacgccctgaacgcccagagccccttcggcggcttcaagatgagcggcaacggcagagagatgggcgagttcggcctgagagagtacagcgaggtgaagaccgtgaccgtgaagatcccccagaagaacagctag

SEQ ID NO: 72389 - DNA, 30 bp, synthetic construct
  misc_feature 1..30: note = Description of Artificial Sequence: Synthetic coding sequence
  source 1..30: mol_type = other DNA
atggacgccagcgagagaggcagactgtag

SEQ ID NO: 72390 - DNA, 1470 bp, synthetic construct
  misc_feature 1..1470: note = Description of Artificial Sequence: Synthetic coding sequence
  source 1..1470: mol_type = other DNA
atgaagggcagaaactggaagaccaccaagatcttcatcaacaacgagtggcagaacagcgagagcggcagagtgttccccgtgtacaaccccgccaccggcgagcaggtgtgcgaggtgcaggaggccgacaaggccgacatcgacaaggccgtgcaggccgccagactggccttcagcctgggcagcgtgtggagaagaatggacgccagcgagagaggcagactgctggacaagctggccgacctggtggagagagacagagccgtgctggccaccatggagagcctgaacggcggcaagcccttcctgcaggccttctacgtggacctgcagggcgtgatcaagaccttcagatactacgccggctgggccgacaagatccacggcatgaccatccccgtggacggcgactacttcaccttcaccagacacgagcccatcggcgtgtgcggccagatcatcccctggaacttccccctgctgatgttcgcctggaagatcgcccccgccctgtgctgcggcaacaccgtggtgatcaagcccgccgagcagacccccctgagcgccctgtacatgggcgccctgatcaaggaggccggcttcccccccggcgtgatcaacatcctgcccggctacggccccaccgccggcgccgccatcgccagccacatcggcatcgacaagatcgccttcaccggcagcaccgaggtgggcaagctgatccaggaggccgccggcagaagcaacctgaagagagtgaccctggagctgggcggcaagagccccaacatcatcttcgccgacgccgacctggactacgccgtggagcaggcccaccagggcgtgttcttcaaccagggccagtgctgcaccgccggcagcagaatcttcgtggaggagagcatctacgaggagttcgtgagaagaagcgtggagagagccaagagaagagtggtgggcagccccttcgaccccaccaccgagcagggcccccagatcgacaagaagcagtacaacaagatcctggagctgatccagagcggcgtggccgagggcgccaagctggagtgcggcggcaagggcctgggcagaaagggcttcttcatcgagcccaccgtgttcagcaacgtgaccgacgacatgagaatcgccaaggaggagatcttcggccccgtgcaggagatcctgagattcaagaccatggacgaggtgatcgagagagccaacaacagcgacttcggcctggtggccgccgtgttcaccaacgacatcaacaaggccctgaccgtgagcagcgccatgcaggccggcaccgtgtggatcaactgctacaacgccctgaacgcccagagccccttcggcggcttcaagatgagcggcaacggcagagagatgggcgagttcggcctgagagagtacagcgaggtgaagaccgtgaccgtgaagatcccccagaagaacagctag

SEQ ID NO: 72391 - DNA, 78 bp, synthetic construct
  misc_feature 1..78: note = Description of Artificial Sequence: Synthetic coding sequence
  source 1..78: mol_type = other DNA
atggacgccagcgagagaggcagactgctggacaagctggccgacctggtggagagagacagagccgtgctggcctag

SEQ ID NO: 72392 - DNA, 1269 bp, synthetic construct
  misc_feature 1..1269: note = Description of Artificial Sequence: Synthetic coding sequence
  source 1..1269: mol_type = other DNA
atggacgccagcgagagaggcagactgctggacaagctggccgacctggtggagagagacagagccgtgctggccaccatggagagcctgaacggcggcaagcccttcctgcaggccttctacgtggacctgcagggcgtgatcaagaccttcagatactacgccggctgggccgacaagatccacggcatgaccatccccgtggacggcgactacttcaccttcaccagacacgagcccatcggcgtgtgcggccagatcatcccctggaacttccccctgctgatgttcgcctggaagatcgcccccgccctgtgctgcggcaacaccgtggtgatcaagcccgccgagcagacccccctgagcgccctgtacatgggcgccctgatcaaggaggccggcttcccccccggcgtgatcaacatcctgcccggctacggccccaccgccggcgccgccatcgccagccacatcggcatcgacaagatcgccttcaccggcagcaccgaggtgggcaagctgatccaggaggccgccggcagaagcaacctgaagagagtgaccctggagctgggcggcaagagccccaacatcatcttcgccgacgccgacctggactacgccgtggagcaggcccaccagggcgtgttcttcaaccagggccagtgctgcaccgccggcagcagaatcttcgtggaggagagcatctacgaggagttcgtgagaagaagcgtggagagagccaagagaagagtggtgggcagccccttcgaccccaccaccgagcagggcccccagatcgacaagaagcagtacaacaagatcctggagctgatccagagcggcgtggccgagggcgccaagctggagtgcggcggcaagggcctgggcagaaagggcttcttcatcgagcccaccgtgttcagcaacgtgaccgacgacatgagaatcgccaaggaggagatcttcggccccgtgcaggagatcctgagattcaagaccatggacgaggtgatcgagagagccaacaacagcgacttcggcctggtggccgccgtgttcaccaacgacatcaacaaggccctgaccgtgagcagcgccatgcaggccggcaccgtgtggatcaactgctacaacgccctgaacgcccagagccccttcggcggcttcaagatgagcggcaacggcagagagatgggcgagttcggcctgagagagtacagcgaggtgaagaccgtgaccgtgaagatcccccagaagaacagctag

SEQ ID NO: 72393 - DNA, 258 bp, synthetic construct
  misc_feature 1..258: note = Description of Artificial Sequence: Synthetic coding sequence
  source 1..258: mol_type = other DNA
atggacgccagcgagagaggcagactgctggacaagctggccgacctggtggagagagacagagccgtgctggccaccatggagagcctgaacggcggcaagcccttcctgcaggccttctacgtggacctgcagggcgtgatcaagaccttcagatactacgccggctgggccgacaagatccacggcatgaccatccccgtggacggcgactacttcaccttcaccagacacgagcccatcggcgtgtgcggctag

SEQ ID NO: 72394 - DNA, 1539 bp, synthetic construct
  misc_feature 1..1539: note = Description of Artificial Sequence: Synthetic coding sequence
  source 1..1539: mol_type = other DNA
atggccaccgccaacggcgccgtggagaacggccagcccgacagaaagccccccgccctgcccagacccatcagaaacctggaggtgaagttcaccaagatcttcatcaacaacgagtggcacgagagcaagagcggcaagaagttcgccacctgcaaccccagcaccagagagcagatctgcgaggtggaggagggcgacaagcccgacgtggacaaggccgtggaggccgcccaggtggccttccagagaggcagcccctggagaagactggacgccctgagcagaggcagactgctgcaccagctggccgacctggtggagagagacagagccaccctggccgccctggagaccatggacaccggcaagcccttcctgcacgccttcttcatcgacctggagggctgcatcagaaccctgagatacttcgccggctgggccgacaagatccagggcaagaccatccccaccgacgacaacgtggtgtgcttcaccagacacgagcccatcggcgtgtgcggcgccatcaccccctggaacttccccctgctgatgctggtgtggaagctggcccccgccctgtgctgcggcaacaccatggtgctgaagcccgccgagcagacccccctgaccgccctgtacctgggcagcctgatcaaggaggccggcttcccccccggcgtggtgaacatcgtgcccggcttcggccccaccgtgggcgccgccatcagcagccacccccagatcaacaagatcgccttcaccggcagcaccgaggtgggcaagctggtgaaggaggccgccagcagaagcaacctgaagagagtgaccctggagctgggcggcaagaacccctgcatcgtgtgcgccgacgccgacctggacctggccgtggagtgcgcccaccagggcgtgttcttcaaccagggccagtgctgcaccgccgccagcagagtgttcgtggaggagcaggtgtacagcgagttcgtgagaagaagcgtggagtacgccaagaagagacccgtgggcgaccccttcgacgtgaagaccgagcagggcccccagatcgaccagaagcagttcgacaagatcctggagctgatcgagagcggcaagaaggagggcgccaagctggagtgcggcggcagcgccatggaggacaagggcctgttcatcaagcccaccgtgttcagcgaggtgaccgacaacatgagaatcgccaaggaggagatcttcggccccgtgcagcccatcctgaagttcaagagcatcgaggaggtgatcaagagagccaacagcaccgactacggcctgaccgccgccgtgttcaccaagaacctggacaaggccctgaagctggccagcgccctggagagcggcaccgtgtggatcaactgctacaacgccctgtacgcccaggcccccttcggcggcttcaagatgagcggcaacggcagagagctgggcgagtacgccctggccgagtacaccgaggtgaagaccgtgaccatcaagctgggcgacaagaacccctag

SEQ ID NO: 72395 - DNA, 456 bp, synthetic construct
  misc_feature 1..456: note = Description of Artificial Sequence: Synthetic coding sequence
  source 1..456: mol_type = other DNA
atggccaccgccaacggcgccgtggagaacggccagcccgacagaaagccccccgccctgcccagacccatcagaaacctggaggtgaagttcaccaagatcttcatcaacaacgagtggcacgagagcaagagcggcaagaagttcgccacctgcaaccccagcaccagagagcagatctgcgaggtggaggagggcgacaagcccgacgtggacaaggccgtggaggccgcccaggtggccttccagagaggcagcccctggagaagactggacgccctgagcagaggcagactgctgcaccagctggccgacctggtggagagagacagagccaccctggccgccctggagaccatggacaccggcaagcccttcctgcacgccttcttcatcgacctggagggctgcatcagaaccctgagactgatcaagagcagcagcaccaagagctag

SEQ ID NO: 72396 - DNA, 1554 bp, synthetic construct
  misc_feature 1..1554: note = Description of Artificial Sequence: Synthetic coding sequence
  source 1..1554: mol_type = other DNA
atgctgagattcctggcccccagactgctgagcctgcagggcagaaccgccagatacagcagcgccgccgccctgcccagccccatcctgaaccccgacatcccctacaaccagctgttcatcaacaacgagtggcaggacgccgtgagcaagaagaccttccccaccgtgaaccccaccaccggcgaggtgatcggccacgtggccgagggcgacagagccgacgtggacagagccgtgaaggccgccagagaggccttcagactgggcagcccctggagaagaatggacgccagcgagagaggcagactgctgaacagactggccgacctggtggagagagacagagtgtacctggccagcctggagaccctggacaacggcaagcccttccaggagagctacgccctggacctggacgaggtgatcaaggtgtacagatacttcgccggctgggccgacaagtggcacggcaagaccatccccatggacggccagcacttctgcttcaccagacacgagcccgtgggcgtgtgcggccagatcatcccctggaacttccccctggtgatgcagggctggaagctggcccccgccctggccaccggcaacaccgtggtgatgaaggtggccgagcagacccccctgagcgccctgtacctggccagcctgatcaaggaggccggcttcccccccggcgtggtgaacatcatcaccggctacggccccaccgccggcgccgccatcgcccagcacgtggacgtggacaaggtggccttcaccggcagcaccgaggtgggccacctgatccagaaggccgccggcgacagcaacctgaagagagtgaccctggagctgggcggcaagagccccagcatcgtgctggccgacgccgacatggagcacgccgtggagcagtgccacgaggccctgttcttcaacatgggccagtgctgctgcgccggcagcagaaccttcgtggaggagagcatctacaacgagttcctggagagaaccgtggagaaggccaagcagagaaaggtgggcaaccccttcgagctggacacccagcagggcccccaggtggacaaggagcagttcgagagagtgctgggctacatccagctgggccagaaggagggcgccaagctgctgtgcggcggcgagagattcggcgagagaggcttcttcatcaagcccaccgtgttcggcggcgtgcaggacgacatgagaatcgccaaggaggagatcttcggccccgtgcagcccctgttcaagttcaagaagatcgaggaggtggtggagagagccaacaacaccagatacggcctggccgccgccgtgttcaccagagacctggacaaggccatgtacttcacccaggccctgcaggccggcaccgtgtgggtgaacacctacaacatcgtgacctgccacacccccttcggcggcttcaaggagagcggcaacggcagagagctgggcgaggacggcctgaaggcctacaccgaggtgaagaccgtgaccatcaaggtgccccagaagaacagctag

SEQ ID NO: 72397 - DNA, 657 bp, synthetic construct
  misc_feature 1..657: note = Description of Artificial Sequence: Synthetic coding sequence
  source 1..657: mol_type = other DNA
atggagcacgccgtggagcagtgccacgaggccctgttcttcaacatgggccagtgctgctgcgccggcagcagaaccttcgtggaggagagcatctacaacgagttcctggagagaaccgtggagaaggccaagcagagaaaggtgggcaaccccttcgagctggacacccagcagggcccccaggtggacaaggagcagttcgagagagtgctgggctacatccagctgggccagaaggagggcgccaagctgctgtgcggcggcgagagattcggcgagagaggcttcttcatcaagcccaccgtgttcggcggcgtgcaggacgacatgagaatcgccaaggaggagatcttcggccccgtgcagcccctgttcaagttcaagaagatcgaggaggtggtggagagagccaacaacaccagatacggcctggccgccgccgtgttcaccagagacctggacaaggccatgtacttcacccaggccctgcaggccggcaccgtgtgggtgaacacctacaacatcgtgacctgccacacccccttcggcggcttcaaggagagcggcaacggcagagagctgggcgaggacggcctgaaggcctacaccgaggtgaagaccgtgaccatcaaggtgccccagaagaacagctag

SEQ ID NO: 72398 - DNA, 2739 bp, synthetic construct
  misc_feature 1..2739: note = Description of Artificial Sequence: Synthetic coding sequence
  source 1..2739: mol_type = other DNA
atggccggccccagcaacccccccgccaccatgaagatcgccgtgatcggccagagcctgttcggccaggaggtgtactgccacctgagaaaggagggccacgaggtggtgggcgtgttcaccgtgcccgacaaggacggcaaggccgaccccctgggcctggaggccgagaaggacggcgtgcccgtgttcaagtacagcagatggagagccaagggccaggccctgcccgacgtggtggccaagtaccaggccctgggcgccgagctgaacgtgctgcccttctgcagccagttcatccccatggagatcatcagcgcccccagacacggcagcatcatctaccaccccagcctgctgcccagacacagaggcgccagcgccatcaactggaccctgatccacggcgacaagaagggcggcttcagcatcttctgggccgacgacggcctggacaccggcgacctgctgctgcagaaggagtgcgaggtgctgcccgacgacaccgtgagcaccctgtacaacagattcctgttccccgagggcatcaagggcatggtgcaggccgtgagactgatcgccgagggcaaggcccccagactgccccagcccgaggagggcgccacctacgagggcatccagaagaaggagaccgccaagatcaactgggaccagcccgccgaggccatccacaactggatcagaggcaacgacaaggtgcccggcgcctggaccgaggcctgcgagcagaagctgaccttcttcaacagcaccctgaacaccagcggcctggtgcccgagggcgacgccctgcccatccccggcgcccacagacccggcgtggtgaccaaggccggcctgatcctgttcggcaacgacgacaagatgctgctggtgaagaacatccagctggaggacggcaagatgatcctggccagcaacttcttcaagggcgccgccagcagcgtgctggagctgaccgaggccgagctggtgaccgccgaggccgtgagaagcgtgtggcagagaatcctgcccaaggtgctggaggtggaggacagcaccgacttcttcaagagcggcgccgccagcgtggacgtggtgagactggtggaggaggtgaaggagctgtgcgacggcctggagctggagaacgaggacgtgtacatggccagcaccttcggcgacttcatccagctgctggtgagaaagctgagaggcgacgacgaggagggcgagtgcagcatcgactacgtggagatggccgtgaacaagagaaccgtgagaatgccccaccagctgttcatcggcggcgagttcgtggacgccgagggcgccaagaccagcgagaccatcaaccccaccgacggcagcgtgatctgccaggtgagcctggcccaggtgaccgacgtggacaaggccgtggccgccgccaaggacgccttcgagaacggcagatggggcaagatcagcgccagagacagaggcagactgatgtacagactggccgacctgatggagcagcaccaggaggagctggccaccatcgaggccctggacgccggcgccgtgtacaccctggccctgaagacccacgtgggcatgagcatccagaccttcagatacttcgccggctggtgcgacaagatccagggcagcaccatccccatcaaccaggccagacccaacagaaacctgaccctgaccagaaaggagcccgtgggcgtgtgcggcatcatcatcccctggaactaccccctgatgatgctgagctggaagaccgccgcctgcctggccgccggcaacaccgtggtgatcaagcccgcccaggtgacccccctgaccgccctgaagttcgccgagctgaccctgaaggccggcatccccaagggcgtggtgaacgtgctgcccggcagcggcagcctggtgggccagagactgagcgaccaccccgacgtgagaaagatcggcttcaccggcagcaccgaggtgggcaagcacatcatgaagagctgcgccatcagcaacgtgaagaaggtgagcctggagctgggcggcaagagccccctgatcatcttcgccgactgcgacctgaacaaggccgtgcagatgggcatgagcagcgtgttcttcaacaagggcgagaactgcatcgccgccggcagactgttcgtggaggacagcatccacgacgagttcgtgagaagagtggtggaggaggtgagaaagatgaaggtgggcaaccccctggacagagacaccgaccacggcccccagaaccaccacgcccacctggtgaagctgatggagtactgccagcacggcgtgaaggagggcgccaccctggtgtgcggcggcaaccaggtgcccagacccggcttcttcttcgagcccaccgtgttcaccgacgtggaggaccacatgttcatcgccaaggaggagagcttcggccccgtgatgatcatcagcagattcgccgacggcgacctggacgccgtgctgagcagagccaacgccaccgagttcggcctggccagcggcgtgttcaccagagacatcaacaaggccctgtacgtgagcgacaagctgcaggccggcaccgtgttcgtgaacacctacaacaagaccgacgtggccgcccccttcggcggcttcaagcagagcggcttcggcaaggacctgggcgaggccgccctgaacgagtacctgagagtgaagaccgtgaccttcgagtactag

SEQ ID NO: 72399 - DNA, 1518 bp, synthetic construct
  misc_feature 1..1518: note = Description of Artificial Sequence: Synthetic coding sequence
  source 1..1518: mol_type = other DNA
atgaagatcgccgtgatcggccagagcctgttcggccaggaggtgtactgccacctgagaaaggagggccacgaggtggtgggcgtgttcaccgtgcccgacaaggacggcaaggccgaccccctgggcctggaggccgagaaggacggcgtgcccgtgttcaagtacagcagatggagagccaagggccaggccctgcccgacgtggtggccaagtaccaggccctgggcgccgagctgaacgtgctgcccttctgcagccagttcatccccatggagatcatcagcgcccccagacacggcagcatcatctaccaccccagcctgctgcccagacacagaggcgccagcgccatcaactggaccctgatccacggcgacaagaagggcggcttcagcatcttctgggccgacgacggcctggacaccggcgacctgctgctgcagaaggagtgcgaggtgctgcccgacgacaccgtgagcaccctgtacaacagattcctgttccccgagggcatcaagggcatggtgcaggccgtgagactgatcgccgagggcaaggcccccagactgccccagcccgaggagggcgccacctacgagggcatccagaagaaggagaccgccaagatcaactgggaccagcccgccgaggccatccacaactggatcagaggcaacgacaaggtgcccggcgcctggaccgaggcctgcgagcagaagctgaccttcttcaacagcaccctgaacaccagcggcctggtgcccgagggcgacgccctgcccatccccggcgcccacagacccggcgtggtgaccaaggccggcctgatcctgttcggcaacgacgacaagatgctgctggtgaagaacatccagctggaggacggcaagatgatcctggccagcaacttcttcaagggcgccgccagcagcgtgctggagctgaccgaggccgagctggtgaccgccgaggccgtgagaagcgtgtggcagagaatcctgcccaaggtgctggaggtggaggacagcaccgacttcttcaagagcggcgccgccagcgtggacgtggtgagactggtggaggaggtgaaggagctgtgcgacggcctggagctggagaacgaggacgtgtacatggccagcaccttcggcgacttcatccagctgctggtgagaaagctgagaggcgacgacgaggagggcgagtgcagcatcgactacgtggagatggccgtgaacaagagaaccgtgagaatgccccaccagctgttcatcggcggcgagttcgtggacgccgagggcgccaagaccagcgagaccatcaaccccaccgacggcagcgtgatctgccaggtgagcctggcccaggtgaccgacgtggacaaggccgtggccgccgccaaggacgccttcgagaacggcagatggggcaagatcagcgccagagacagaggcagactgatgtacagagccccccccagccccagcaccagacccgaccccaccgccacctag

SEQ ID NO: 72400 - DNA, 2709 bp, synthetic construct
  misc_feature 1..2709: note = Description of Artificial Sequence: Synthetic coding sequence
  source 1..2709: mol_type = other DNA
atgaagatcgccgtgatcggccagagcctgttcggccaggaggtgtactgccacctgagaaaggagggccacgaggtggtgggcgtgttcaccgtgcccgacaaggacggcaaggccgaccccctgggcctggaggccgagaaggacggcgtgcccgtgttcaagtacagcagatggagagccaagggccaggccctgcccgacgtggtggccaagtaccaggccctgggcgccgagctgaacgtgctgcccttctgcagccagttcatccccatggagatcatcagcgcccccagacacggcagcatcatctaccaccccagcctgctgcccagacacagaggcgccagcgccatcaactggaccctgatccacggcgacaagaagggcggcttcagcatcttctgggccgacgacggcctggacaccggcgacctgctgctgcagaaggagtgcgaggtgctgcccgacgacaccgtgagcaccctgtacaacagattcctgttccccgagggcatcaagggcatggtgcaggccgtgagactgatcgccgagggcaaggcccccagactgccccagcccgaggagggcgccacctacgagggcatccagaagaaggagaccgccaagatcaactgggaccagcccgccgaggccatccacaactggatcagaggcaacgacaaggtgcccggcgcctggaccgaggcctgcgagcagaagctgaccttcttcaacagcaccctgaacaccagcggcctggtgcccgagggcgacgccctgcccatccccggcgcccacagacccggcgtggtgaccaaggccggcctgatcctgttcggcaacgacgacaagatgctgctggtgaagaacatccagctggaggacggcaagatgatcctggccagcaacttcttcaagggcgccgccagcagcgtgctggagctgaccgaggccgagctggtgaccgccgaggccgtgagaagcgtgtggcagagaatcctgcccaaggtgctggaggtggaggacagcaccgacttcttcaagagcggcgccgccagcgtggacgtggtgagactggtggaggaggtgaaggagctgtgcgacggcctggagctggagaacgaggacgtgtacatggccagcaccttcggcgacttcatccagctgctggtgagaaagctgagaggcgacgacgaggagggcgagtgcagcatcgactacgtggagatggccgtgaacaagagaaccgtgagaatgccccaccagctgttcatcggcggcgagttcgtggacgccgagggcgccaagaccagcgagaccatcaaccccaccgacggcagcgtgatctgccaggtgagcctggcccaggtgaccgacgtggacaaggccgtggccgccgccaaggacgccttcgagaacggcagatggggcaagatcagcgccagagacagaggcagactgatgtacagactggccgacctgatggagcagcaccaggaggagctggccaccatcgaggccctggacgccggcgccgtgtacaccctggccctgaagacccacgtgggcatgagcatccagaccttcagatacttcgccggctggtgcgacaagatccagggcagcaccatccccatcaaccaggccagacccaacagaaacctgaccctgaccagaaaggagcccgtgggcgtgtgcggcatcatcatcccctggaactaccccctgatgatgctgagctggaagaccgccgcctgcctggccgccggcaacaccgtggtgatcaagcccgcccaggtgacccccctgaccgccctgaagttcgccgagctgaccctgaaggccggcatccccaagggcgtggtgaacgtgctgcccggcagcggcagcctggtgggccagagactgagcgaccaccccgacgtgagaaagatcggcttcaccggcagcaccgaggtgggcaagcacatcatgaagagctgcgccatcagcaacgtgaagaaggtgagcctggagctgggcggcaagagccccctgatcatcttcgccgactgcgacctgaacaaggccgtgcagatgggcatgagcagcgtgttcttcaacaagggcgagaactgcatcgccgccggcagactgttcgtggaggacagcatccacgacgagttcgtgagaagagtggtggaggaggtgagaaagatgaaggtgggcaaccccctggacagagacaccgaccacggcccccagaaccaccacgcccacctggtgaagctgatggagtactgccagcacggcgtgaaggagggcgccaccctggtgtgcggcggcaaccaggtgcccagacccggcttcttcttcgagcccaccgtgttcaccgacgtggaggaccacatgttcatcgccaaggaggagagcttcggccccgtgatgatcatcagcagattcgccgacggcgacctggacgccgtgctgagcagagccaacgccaccgagttcggcctggccagcggcgtgttcaccagagacatcaacaaggccctgtacgtgagcgacaagctgcaggccggcaccgtgttcgtgaacacctacaacaagaccgacgtggccgcccccttcggcggcttcaagcagagcggcttcggcaaggacctgggcgaggccgccctgaacgagtacctgagagtgaagaccgtgaccttcgagtactag

SEQ ID NO: 72401 - DNA, 483 bp, synthetic construct
  misc_feature 1..483: note = Description of Artificial Sequence: Synthetic coding sequence
  source 1..483: mol_type = other DNA
atggtgcaggccgtgagactgatcgccgagggcaaggcccccagactgccccagcccgaggagggcgccacctacgagggcatccagaagaaggagaccgccaagatcaactgggaccagcccgccgaggccatccacaactggatcagaggcaacgacaaggtgcccggcgcctggaccgaggcctgcgagcagaagctgaccttcttcaacagcaccctgaacaccagcggcctggtgcccgagggcgacgccctgcccatccccggcgcccacagacccggcgtggtgaccaaggccggcctgatcctgttcggcaacgacgacaagatggtgagagccagactgtgggtgacctgcctgctgaaggccacccacgcccccgtgctgggcctgagaccccacagaaagaccctgggcagcagcggcgagaacggcaagaaccagacccaggagggcaccctgaccctgatctgcccctag

SEQ ID NO: 72402 - DNA, 507 bp, synthetic construct
  misc_feature 1..507: note = Description of Artificial Sequence: Synthetic coding sequence
  source 1..507: mol_type = other DNA
atgaagatcgccgtgatcggccagagcctgttcggccaggaggtgtactgccacctgagaaaggagggccacgaggtggtgggcgtgttcaccgtgcccgacaaggacggcaaggccgaccccctgggcctggaggccgagaaggacggcgtgcccgtgttcaagtacagcagatggagagccaagggccaggccctgcccgacgtggtggccaagtaccaggccctgggcgccgagctgaacgtgctgcccttctgcagccagttcatccccatggagatcatcagcgcccccagacacggcagcatcatctaccaccccagcctgctgcccagacacagaggcgccagcgccatcaactggaccctgatccacggcgacaagaagggcggcttcagcatcttctgggccgacgacggcctggacaccggcgacctgctgctgcagaaggagtgcgaggtgctgcccgacgacaccgtgagcaccctgtacaacagattcctgtag

SEQ ID NO: 72403 - DNA, 2709 bp, synthetic construct; identical to SEQ ID NO: 72400
  misc_feature 1..2709: note = Description of Artificial Sequence: Synthetic coding sequence
  source 1..2709: mol_type = other DNA

SEQ ID NO: 72404 - DNA, 474 bp, synthetic construct
  misc_feature 1..474: note = Description of Artificial Sequence: Synthetic coding sequence
  source 1..474: mol_type = other DNA
atgaagatcgccgtgatcggccagagcctgttcggccaggaggtgtactgccacctgagaaaggagggccacgaggtggtgggcgtgttcaccgtgcccgacaaggacggcaaggccgaccccctgggcctggaggccgagaaggacggcgtgcccgtgttcaagtacagcagatggagagccaagggccaggccctgcccgacgtggtggccaagtaccaggccctgggcgccgagctgaacgtgctgcccttctgcagccagttcatccccatggagatcatcagcgcccccagacacggcagcatcatctaccaccccagcctgctgcccagacacagaggcgccagcgccatcaactggaccctgatccacggcgacaagaagggcggcttcagcatcttctgggccgacgacggcctggacaccggcgacctgctgctgcagaaggagtgcgaggtgctgcccgactag

SEQ ID NO: 72405 - DNA, 534 bp, synthetic construct
  misc_feature 1..534: note = Description of Artificial Sequence: Synthetic coding sequence
  source 1..534: mol_type = other DNA
atgaagatcgccgtgatcggccagagcctgttcggccaggaggtgtactgccacctgagaaaggagggccacgaggtggtgggcgtgttcaccgtgcccgacaaggacggcaaggccgaccccctgggcctggaggccgagaaggacggcgtgcccgtgttcaagtacagcagatggagagccaagggccaggccctgcccgacgtggtggccaagtaccaggccctgggcgccgagctgaacgtgctgcccttctgcagccagttcatccccatggagatcatcagcgcccccagacacggcagcatcatctaccaccccagcctgctgcccagacacagaggcgccagcgccatcaactggaccctgatccacggcgacaagaagggcggcttcagcatcttctgggccgacgacggcctggacaccggcgacctgctgctgcagaaggagtgcgaggtgctgcccgacgacaccgtgagcaccctgtacaacagattcctgttccccgagggcatcaagggcatggtgtag

SEQ ID NO: 72406 - DNA, 303 bp, synthetic construct
  misc_feature 1..303: note = Description of Artificial Sequence: Synthetic coding sequence
  source 1..303: mol_type = other DNA
atgaagatcgccgtgatcggccagagcctgttcggccaggaggtgtactgccacctgagaaaggagggccacgaggtggtgggcgtgttcaccgtgcccgacaaggacggcaaggccgaccccctgggcctggaggccgagaaggacggcgtgcccgtgttcaagtacagcagatggagagccaagggccaggccctgcccgacgtggtggccaagtaccaggccctgggcgccgagctgaacgtgctgcccttctgcagccagttcatccccatggagatcatcagcgcccccagacactag

SEQ ID NO: 72407 - DNA, 2409 bp, synthetic construct
  misc_feature 1..2409: note = Description of Artificial Sequence: Synthetic coding sequence
  source 1..2409: mol_type = other DNA
atggccgccaccagagccggccccagagccagagagatcttcaccagcctggagtacggccccgtgcccgagagccacgcctgcgccctggcctggctggacacccaggacagatgcctgggccactacgtgaacggcaagtggctgaagcccgagcacagaaacagcgtgccctgccaggaccccatcaccggcgagaacctggccagctgcctgcaggcccaggccgaggacgtggccgccgccgtggaggccgccagaatggccttcaagggctggagcgcccaccccggcgtggtgagagcccagcacctgaccagactggccgaggtgatccagaagcaccagagactgctgtggaccctggagagcctggtgaccggcagagccgtgagagaggtgagagacggcgacgtgcagctggcccagcagctgctgcactaccacgccatccaggccagcacccaggaggaggccctggccggctgggagcccatgggcgtgatcggcctgatcctgccccccaccttcagcttcctggagatgatgtggagaatctgccccgccctggccgtgggctgcaccgtggtggccctggtgccccccgccagccccgcccccctgctgctggcccagctggccggcgagctgggccccttccccggcatcctgaacgtgctgagcggccccgccagcctggtgcccatcctggccagccagcccggcatcagaaaggtggccttctgcggcgcccccgaggagggcagagccctgagaagaagcctggccggcgagtgcgccgagctgggcctggccctgggcaccgagagcctgctgctgctgaccgacaccgccgacgtggacagcgccgtggagggcgtggtggacgccgcctggagcgacagaggccccggcggcctgagactgctgatccaggagagcgtgtgggacgaggccatgagaagactgcaggagagaatgggcagactgagaagcggcagaggcctggacggcgccgtggacatgggcgccagaggcgccgccgcctgcgacctggtgcagagattcgtgagagaggcccagagccagggcgcccaggtgttccaggccggcgacgtgcccagcgagagacccttctacccccccaccctggtgagcaacctgccccccgccagcccctgcgcccaggtggaggtgccctggcccgtggtggtggccagccccttcagaaccgccaaggaggccctgctggtggccaacggcacccccagaggcggcagcgccagcgtgtggagcgagagactgggccaggccctggagctgggctacggcctgcaggtgggcaccgtgtggatcaacgcccacggcctgagagaccccagcgtgcccaccggcggctgcaaggagagcggctgcagctggcacggcggccccgacggcctgtacgagtacctgagacccagcggcacccccgccagactgagctgcctgagcaagaacctgaactacgacaccttcggcctggccgtgcccagcaccctgcccgccggccccgagatcggccccagccccgcccccccctacggcctgttcgtgggcggcagattccaggcccccggcgccagaagcagcagacccatcagagacagcagcggcaacctgcacggctacgtggccgagggcggcgccaaggacatcagaggcgccgtggaggccgcccaccaggccttccccggctgggccggccagagccccggcgccagagccgccctgctgtgggccctggccgccgccctggagagaagaaagagcaccctggccagcagactggagagacagggcgccgagctgaaggccgccgaggccgaggtggagctgagcgccagaagactgagagcctggggcgccagagtgcaggcccagggccacaccctgcaggtggccggcctgagaggccccgtgctgagactgagagagcccctgggcgtgctggccgtggtgtgccccgacgagtggcccctgctggccttcgtgagcctgctggcccccgccctggcctacggcaacaccgtggtgatggtgcccagcgccgcctgccccctgctggccctggaggtgtgccaggacatggccaccgtgttccccgccggcctggccaacgtggtgaccggcgacagagaccacctgaccagatgcctggccctgcaccaggacgtgcaggccatgtggtacttcggcagcgcccagggcagccagttcgtggagtgggccagcgccggcaacctgaagcccgtgtgggccagcagaggctgccccagagcctgggaccaggaggccgagggcgccggccccgagctgggcctgagagtggccagaaccaaggccctgtggctgcccatgggcgactag

SEQ ID NO: 72408 - DNA, 1914 bp, synthetic construct
  misc_feature 1..1914: note = Description of Artificial Sequence: Synthetic coding sequence
  source 1..1914: mol_type = other DNA
atgggcgtgatcggcctgatcctgccccccaccttcagcttcctggagatgatgtggagaatctgccccgccctggccgtgggctgcaccgtggtggccctggtgccccccgccagccccgcccccctgctgctggcccagctggccggcgagctgggccccttccccggcatcctgaacgtgctgagcggccccgccagcctggtgcccatcctggccagccagcccggcatcagaaaggtggccttctgcggcgcccccgaggagggcagagccctgagaagaagcctggccggcgagtgcgccgagctgggcctggccctgggcaccgagagcctgctgctgctgaccgacaccgccgacgtggacagcgccgtggagggcgtggtggacgccgcctggagcgacagaggccccggcggcctgagactgctgatccaggagagcgtgtgggacgaggccatgagaagactgcaggagagaatgggcagactgagaagcggcagaggcctggacggcgccgtggacatgggcgccagaggcgccgccgcctgcgacctggtgcagagattcgtgagagaggcccagagccagggcgcccaggtgttccaggccggcgacgtgcccagcgagagacccttctacccccccaccctggtgagcaacctgccccccgccagcccctgcgcccaggtggaggtgccctggcccgtggtggtggccagccccttcagaaccgccaaggaggccctgctggtggccaacggcacccccagaggcggcagcgccagcgtgtggagcgagagactgggccaggccctggagctgggctacggcctgcaggtgggcaccgtgtggatcaacgcccacggcctgagagaccccagcgtgcccaccggcggctgcaaggagagcggctgcagctggcacggcggccccgacggcctgtacgagtacctgagacccagcggcacccccgccagactgagctgcctgagcaagaacctgaactacgacaccttcggcctggccgtgcccagcaccctgcccgccggccccgagatcggccccagccccgcccccccctacggcctgttcgtgggcggcagattccaggcccccggcgccagaagcagcagacccatcagagacagcagcggcaacctgcacggctacgtggccgagggcggcgccaaggacatcagaggcgccgtggaggccgcccaccaggccttccccggctgggccggccagagccccggcgccagagccgccctgctgtgggccctggccgccgccctggagagaagaaagagcaccctggccagcagactggagagacagggcgccgagctgaaggccgccgaggccgaggtggagctgagcgccagaagactgagagcctggggcgccagagtgcaggcccagggccacaccctgcaggtggccggcctgagaggccccgtgctgagactgagagagcccctgggcgtgctggccgtggtgtgccccgacgagtggcccctgctggccttcgtgagcctgctggcccccgccctggcctacggcaacaccgtggtgatggtgcccagcgccgcctgccccctgctggccctggaggtgtgccaggacatggccaccgtgttccccgccggcctggccaacgtggtgaccggcgacagagaccacctgaccagatgcctggccctgcaccaggacgtgcaggccatgtggtacttcggcagcgcccagggcagccagttcgtggagtgggccagcgccggcaacctgaagcccgtgtgggccagcagaggctgccccagagcctgggaccaggaggccgagggcgccggccccgagctgggcctgagagtggccagaaccaaggccctgtggctgcccatgggcgactag

SEQ ID NO: 72409 - DNA, 2256 bp, synthetic construct
  misc_feature 1..2256: note = Description of Artificial Sequence: Synthetic coding sequence
  source 1..2256: mol_type = other DNA
atggccgccaccagagccggccccagagccagagagatcttcaccagcctggagtacggccccgtgcccgagagccacgcctgcgccctggcctggctggacacccaggacagatgcctgggccactacgtgaacggcaagtggctgaagcccgagcacagaaacagcgtgccctgccaggaccccatcaccggcgagaacctggccagctgcctgcaggcccaggccgaggacgtggccgccgccgtggaggccgccagaatggccttcaagggctggagcgcccaccccggcgtggtgagagcccagcacctgaccagactggccgaggtgatccagaagcaccagagactgctgtggaccctggagagcctggtgaccggcagagccgtgagagaggtgagagacggcgacgtgcagctggcccagcagctgctgcactaccacgccatccaggccagcacccaggaggaggccctggccggctgggagcccatgggcgtgatcggcctgatcctgccccccaccttcagcttcctggagatgatgtggagaatctgccccgccctggccgtgggctgcaccgtggtggccctggtgccccccgccagccccgcccccctgctgctggcccagctggccggcgagctgggccccttccccggcatcctgaacgtgctgagcggccccgccagcctggtgcccatcctggccagccagcccggcatcagaaaggtggccttctgcggcgcccccgagggcggcctgagactgctgatccaggagagcgtgtgggacgaggccatgagaagactgcaggagagaatgggcagactgagaagcggcagaggcctggacggcgccgtggacatgggcgccagaggcgccgccgcctgcgacctggtgcagagattcgtgagagaggcccagagccagggcgcccaggtgttccaggccggcgacgtgcccagcgagagacccttctacccccccaccctggtgagcaacctgccccccgccagcccctgcgcccaggtggaggtgccctggcccgtggtggtggccagccccttcagaaccgccaaggaggccctgctggtggccaacggcacccccagaggcggcagcgccagcgtgtggagcgagagactgggccaggccctggagctgggctacggcctgcaggtgggcaccgtgtggatcaacgcccacggcctgagagaccccagcgtgcccaccggcggctgcaaggagagcggctgcagctggcacggcggccccgacggcctgtacgagtacctgagacccagcggcacccccgccagactgagctgcctgagcaagaacctgaactacgacaccttcggcctggccgtgcccagcaccctgcccgccggccccgagatcggccccagccccgcccccccctacggcctgttcgtgggcggcagattccaggcccccggcgccagaagcagcagacccatcagagacagcagcggcaacctgcacggctacgtggccgagggcggcgccaaggacatcagaggcgccgtggaggccgcccaccaggccttccccggctgggccggccagagccccggcgccagagccgccctgctgtgggccctggccgccgccctggagagaagaaagagcaccctggccagcagactggagagacagggcgccgagctgaaggccgccgaggccgaggtggagctgagcgccagaagactgagagcctggggcgccagagtgcaggcccagggccacaccctgcaggtggccggcctgagaggccccgtgctgagactgagagagcccctgggcgtgctggccgtggtgtgccccgacgagtggcccctgctggccttcgtgagcctgctggcccccgccctggcctacggcaacaccgtggtgatggtgcccagcgccgcctgccccctgctggccctggaggtgtgccaggacatggccaccgtgttccccgccggcctggccaacgtggtgaccggcgacagagaccacctgaccagatgcctggccctgcaccaggacgtgcaggccatgtggtacttcggcagcgcccagggcagccagttcgtggagtgggccagcgccggcaacctgaagcccgtgtgggccagcagaggctgccccagagcctgggaccaggaggccgagggcgccggccccgagctgggcctgagagtggccagaaccaaggccctgtggctgcccatgggcgactag

SEQ ID NO: 72410 - DNA, 1920 bp, synthetic construct
  misc_feature 1..1920: note = Description of Artificial Sequence: Synthetic coding sequence
  source 1..1920: mol_type = other DNA
atgagaaccggcgtgatcggcctgatcctgccccccaccttcagcttcctggagatgatgtggagaatctgccccgccctggccgtgggctgcaccgtggtggccctggtgccccccgccagccccgcccccctgctgctggcccagctggccggcgagctgggccccttccccggcatcctgaacgtgctgagcggccccgccagcctggtgcccatcctggccagccagcccggcatcagaaaggtggccttctgcggcgcccccgaggagggcagagccctgagaagaagcctggccggcgagtgcgccgagctgggcctggccctgggcaccgagagcctgctgctgctgaccgacaccgccgacgtggacagcgccgtggagggcgtggtggacgccgcctggagcgacagaggccccggcggcctgagactgctgatccaggagagcgtgtgggacgaggccatgagaagactgcaggagagaatgggcagactgagaagcggcagaggcctggacggcgccgtggacatgggcgccagaggcgccgccgcctgcgacctggtgcagagattcgtgagagaggcccagagccagggcgcccaggtgttccaggccggcgacgtgcccagcgagagacccttctacccccccaccctggtgagcaacctgccccccgccagcccctgcgcccaggtggaggtgccctggcccgtggtggtggccagccccttcagaaccgccaaggaggccctgctggtggccaacggcacccccagaggcggcagcgccagcgtgtggagcgagagactgggccaggccctggagctgggctacggcctgcaggtgggcaccgtgtggatcaacgcccacggcctgagagaccccagcgtgcccaccggcggctgcaaggagagcggctgcagctggcacggcggccccgacggcctgtacgagtacctgagacccagcggcacccccgccagactgagctgcctgagcaagaacctgaactacgacaccttcggcctggccgtgcccagcaccctgcccgccggccccgagatcggccccagccccgcccccccctacggcctgttcgtgggcggcagattccaggcccccggcgccagaagcagcagacccatcagagacagcagcggcaacctgcacggctacgtggccgagggcggcgccaaggacatcagaggcgccgtggaggccgcccaccaggccttccccggctgggccggccagagccccggcgccagagccgccctgctgtgggccctggccgccgccctggagagaagaaagagcaccctggccagcagactggagagacagggcgccgagctgaaggccgccgaggccgaggtggagctgagcgccagaagactgagagcctggggcgccagagtgcaggcccagggccacaccctgcaggtggccggcctgagaggccccgtgctgagactgagagagcccctgggcgtgctggccgtggtgtgccccgacgagtggcccctgctggccttcgtgagcctgctggcccccgccctggcctacggcaacaccgtggtgatggtgcccagcgccgcctgccccctgctggccctggaggtgtgccaggacatggccaccgtgttccccgccggcctggccaacgtggtgaccggcgacagagaccacctgaccagatgcctggccctgcaccaggacgtgcaggccatgtggtacttcggcagcgcccagggcagccagttcgtggagtgggccagcgccggcaacctgaagcccgtgtgggccagcagaggctgccccagagcctgggaccaggaggccgagggcgccggccccgagctgggcctgagagtggccagaaccaaggccctgtggctgcccatgggcgactag

SEQ ID NO: 72411 - DNA, 2382 bp, synthetic construct
  misc_feature 1..2382: note = Description of Artificial Sequence: Synthetic coding sequence
  source 1..2382: mol_type = other DNA
atgctgagccaggtgtacagatgcggcttccagcccttcaaccagcacctgctgccctgggtgaagtgcaccaccgtgttcagaagccactgcatccagcccagcgtgatcagacacgtgagaagctggagcaacatccccttcatcaccgtgcccctgagcagaacccacggcaagagcttcgcccacagaagcgagctgaagcacgccaagagaatcgtggtgaagctgggcagcgccgtggtgaccagaggcgacgagtgcggcctggccctgggcagactggccagcatcgtggagcaggtgagcgtgctgcagaaccagggcagagagatgatgctggtgaccagcggcgccgtggccttcggcaagcagagactgagacacgagatcctgctgagccagagcgtgagacaggccctgcacagcggccagaaccagctgaaggagatggccatccccgtgctggaggccagagcctgcgccgccgccggccagagcggcctgatggccctgtacgaggccatgttcacccagtacagcatctgcgccgcccagatcctggtgaccaacctggacttccacgacgagcagaagagaagaaacctgaacggcaccctgcacgagctgctgagaatgaacatcgtgcccatcgtgaacaccaacgacgccgtggtgccccccgccgagcccaacagcgacctgcagggcgtgatcagcgtgaaggacaacgacagcctggccgccagactggccgtggagatgaagaccgacctgctgatcgtgctgagcgacgtggagggcctgttcgacagcccccccggcagcgacgacgccaagctgatcgacatcttctaccccggcgaccagcagagcgtgaccttcggcaccaagagcagagtgggcatgggcggcatggaggccaaggtgaaggccgccctgtgggccctgcagggcggcaccagcgtggtgatcgccaacggcacccaccccaaggtgagcggccacgtgatcaccgacatcgtggagggcaagaaggtgggcaccttcttcagcgaggtgaagcccgccggccccaccgtggagcagcagggcgagatggccagaagcggcggcagaatgctggccaccctggagcccgagcagagagccgagatcatccaccacctggccgacctgctgaccgaccagagagacgagatcctgctggccaacaagaaggacctggaggaggccgagggcagactggccgcccccctgctgaagagactgagcctgagcaccagcaagctgaacagcctggccatcggcctgagacagatcgccgccagcagccaggacagcgtgggcagagtgctgagaagaaccagaatcgccaagaacctggagctggagcaggtgaccgtgcccatcggcgtgctgctggtgatcttcgagagcagacccgactgcctgccccaggtggccgccctggccatcgccagcggcaacggcctgctgctgaagggcggcaaggaggccgcccacagcaacagaatcctgcacctgctgacccaggaggccctgagcatccacggcgtgaaggaggccgtgcagctggtgaacaccagagaggaggtggaggacctgtgcagactggacaagatgatcgacctgatcatccccagaggcagcagccagctggtgagagacatccagaaggccgccaagggcatccccgtgatgggccacagcgagggcatctgccacatgtacgtggacagcgaggccagcgtggacaaggtgaccagactggtgagagacagcaagtgcgagtaccccgccgcctgcaacgccctggagaccctgctgatccacagagacctgctgagaacccccctgttcgaccagatcatcgacatgctgagagtggagcaggtgaagatccacgccggccccaagttcgccagctacctgaccttcagccccagcgaggtgaagagcctgagaaccgagtacggcgacctggagctgtgcatcgaggtggtggacaacgtgcaggacgccatcgaccacatccacaagtacggcagcagccacaccgacgtgatcgtgaccgaggacgagaacaccgccgagttcttcctgcagcacgtggacagcgcctgcgtgttctggaacgccagcaccagattcagcgacggctacagattcggcctgggcgccgaggtgggcatcagcaccagcagaatccacgccagaggccccgtgggcctggagggcctgctgaccaccaagtggctgctgagaggcaaggaccacgtggtgagcgacttcagcgagcacggcagcctgaagtacctgcacgagaacctgcccatcccccagagaaacaccaactag

SEQ ID NO: 72412 - DNA, 2388 bp, synthetic construct
  misc_feature 1..2388: note = Description of Artificial Sequence: Synthetic coding sequence
  source 1..2388: mol_type = other DNA
atgctgagccaggtgtacagatgcggcttccagcccttcaaccagcacctgctgccctgggtgaagtgcaccaccgtgttcagaagccactgcatccagcccagcgtgatcagacacgtgagaagctggagcaacatccccttcatcaccgtgcccctgagcagaacccacggcaagagcttcgcccacagaagcgagctgaagcacgccaagagaatcgtggtgaagctgggcagcgccgtggtgaccagaggcgacgagtgcggcctggccctgggcagactggccagcatcgtggagcaggtgagcgtgctgcagaaccagggcagagagatgatgctggtgaccagcggcgccgtggccttcggcaagcagagactgagacacgagatcctgctgagccagagcgtgagacaggccctgcacagcggccagaaccagctgaaggagatggccatccccgtgctggaggccagagcctgcgccgccgccggccagagcggcctgatggccctgtacgaggccatgttcacccagtacagcatctgcgccgcccagatcctggtgaccaacctggacttccacgacgagcagaagagaagaaacctgaacggcaccctgcacgagctgctgagaatgaacatcgtgcccatcgtgaacaccaacgacgccgtggtgccccccgccgagcccaacagcgacctgcagggcgtgaacgtgatcagcgtgaaggacaacgacagcctggccgccagactggccgtggagatgaagaccgacctgctgatcgtgctgagcgacgtggagggcctgttcgacagcccccccggcagcgacgacgccaagctgatcgacatcttctaccccggcgaccagcagagcgtgaccttcggcaccaagagcagagtgggcatgggcggcatggaggccaaggtgaaggccgccctgtgggccctgcagggcggcaccagcgtggtgatcgccaacggcacccaccccaaggtgagcggccacgtgatcaccgacatcgtggagggcaagaaggtgggcaccttcttcagcgaggtgaagcccgccggccccaccgtggagcagcagggcgagatggccagaagcggcggcagaatgctggccaccctggagcccgagcagagagccgagatcatccaccacctggccgacctgctgaccgaccagagagacgagatcctgctggccaacaagaaggacctggaggaggccgagggcagactggccgcccccctgctgaagagactgagcctgagcaccagcaagctgaacagcctggccatcggcctgagacagatcgccgccagcagccaggacagcgtgggcagagtgctgagaagaaccagaatcgccaagaacctggagctggagcaggtgaccgtgcccatcggcgtgctgctggtgatcttcgagagcagacccgactgcctgccccaggtggccgccctggccatcgccagcggcaacggcctgctgctgaagggcggcaaggaggccgcccacagcaacagaatcctgcacctgctgacccaggaggccctgagcatccacggcgtgaaggaggccgtgcagctggtgaacaccagagaggaggtggaggacctgtgcagactggacaagatgatcgacctgatcatccccagaggcagcagccagctggtgagagacatccagaaggccgccaagggcatccccgtgatgggccacagcgagggcatctgccacatgtacgtggacagcgaggccagcgtggacaaggtgaccagactggtgagagacagcaagtgcgagtaccccgccgcctgcaacgccctggagaccctgctgatccacagagacctgctgagaacccccctgttcgaccagatcatcgacatgctgagagtggagcaggtgaagatccacgccggccccaagttcgccagctacctgaccttcagccccagcgaggtgaagagcctgagaaccgagtacggcgacctggagctgtgcatcgaggtggtggacaacgtgcaggacgccatcgaccacatccacaagtacggcagcagccacaccgacgtgatcgtgaccgaggacgagaacaccgccgagttcttcctgcagcacgtggacagcgcctgcgtgttctggaacgccagcaccagattcagcgacggctacagattcggcctgggcgccgaggtgggcatcagcaccagcagaatccacgccagaggccccgtgggcctggagggcctgctgaccaccaagtggctgctgagaggcaaggaccacgtggtgagcgacttcagcgagcacggcagcctgaagtacctgcacgagaacctgcccatcccccagagaaacaccaactag

SEQ ID NO: 72413 - DNA, 1554 bp, synthetic construct
  misc_feature 1..1554: note = Description of Artificial Sequence: Synthetic coding sequence
  source 1..1554: mol_type = other DNA
atgctgagagccgccgccagattcggccccagactgggcagaagactgctgagcgccgccgccacccaggccgtgcccgcccccaaccagcagcccgaggtgttctgcaaccagatcttcatcaacaacgagtggcacgacgccgtgagcagaaagaccttccccaccgtgaaccccagcaccggcgaggtgatctgccaggtggccgagggcgacaaggaggacgtggacaaggccgtgaaggccgccagagccgccttccagctgggcagcccctggagaagaatggacgccagccacagaggcagactgctgaacagactggccgacctgatcgagagagacagaacctacctggccgccctggagaccctggacaacggcaagccctacgtgatcagctacctggtggacctggacatggtgctgaagtgcctgagatactacgccggctgggccgacaagtaccacggcaagaccatccccatcgacggcgacttcttcagctacaccagacacgagcccgtgggcgtgtgcggccagatcatcccctggaacttccccctgctgatgcaggcctggaagctgggccccgccctggccaccggcaacgtggtggtgatgaaggtggccgagcagacccccctgaccgccctgtacgtggccaacctgatcaaggaggccggcttcccccccggcgtggtgaacatcgtgcccggcttcggccccaccgccggcgccgccatcgccagccacgaggacgtggacaaggtggccttcaccggcagcaccgagatcggcagagtgatccaggtggccgccggcagcagcaacctgaagagagtgaccctggagctgggcggcaagagccccaacatcatcatgagcgacgccgacatggactgggccgtggagcaggcccacttcgccctgttcttcaaccagggccagtgctgctgcgccggcagcagaaccttcgtgcaggaggacatctacgacgagttcgtggagagaagcgtggccagagccaagagcagagtggtgggcaaccccttcgacagcaagaccgagcagggcccccaggtggacgagacccagttcaagaagatcctgggctacatcaacaccggcaagcaggagggcgccaagctgctgtgcggcggcggcatcgccgccgacagaggctacttcatccagcccaccgtgttcggcgacgtgcaggacggcatgaccatcgccaaggaggagatcttcggccccgtgatgcagatcctgaagttcaagaccatcgaggaggtggtgggcagagccaacaacagcacctacggcctggccgccgccgtgttcaccaaggacctggacaaggccaactacctgagccaggccctgcaggccggcaccgtgtgggtgaactgctacgacgtgttcggcgcccagagccccttcggcggctacaagatgagcggcagcggcagagagctgggcgagtacggcctgcaggcctacaccgaggtgaagaccgtgaccgtgaaggtgccccagaagaacagctag

SEQ ID NO: 72414 - DNA, 1413 bp, synthetic construct
  misc_feature 1..1413: note = Description of Artificial Sequence: Synthetic coding sequence
  source 1..1413: mol_type = other DNA
atgctgagagccgccgccagattcggccccagactgggcagaagactgctgagcgccgccgccacccaggccgtgcccgcccccaaccagcagcccgaggtgttctgcaaccagatcttcatcaacaacgagtggcacgacgccgtgagcagaaagaccttccccaccgtgaaccccagcaccggcgaggtgatctgccaggtggccgagggcgacaaggccctggagaccctggacaacggcaagccctacgtgatcagctacctggtggacctggacatggtgctgaagtgcctgagatactacgccggctgggccgacaagtaccacggcaagaccatccccatcgacggcgacttcttcagctacaccagacacgagcccgtgggcgtgtgcggccagatcatcccctggaacttccccctgctgatgcaggcctggaagctgggccccgccctggccaccggcaacgtggtggtgatgaaggtggccgagcagacccccctgaccgccctgtacgtggccaacctgatcaaggaggccggcttcccccccggcgtggtgaacatcgtgcccggcttcggccccaccgccggcgccgccatcgccagccacgaggacgtggacaaggtggccttcaccggcagcaccgagatcggcagagtgatccaggtggccgccggcagcagcaacctgaagagagtgaccctggagctgggcggcaagagccccaacatcatcatgagcgacgccgacatggactgggccgtggagcaggcccacttcgccctgttcttcaaccagggccagtgctgctgcgccggcagcagaaccttcgtgcaggaggacatctacgacgagttcgtggagagaagcgtggccagagccaagagcagagtggtgggcaaccccttcgacagcaagaccgagcagggcccccaggtggacgagacccagttcaagaagatcctgggctacatcaacaccggcaagcaggagggcgccaagctgctgtgcggcggcggcatcgccgccgacagaggctacttcatccagcccaccgtgttcggcgacgtgcaggacggcatgaccatcgccaaggaggagatcttcggccccgtgatgcagatcctgaagttcaagaccatcgaggaggtggtgggcagagccaacaacagcacctacggcctggccgccgccgtgttcaccaaggacctggacaaggccaactacctgagccaggccctgcaggccggcaccgtgtgggtgaactgctacgacgtgttcggcgcccagagccccttcggcggctacaagatgagcggcagcggcagagagctgggcgagtacggcctgcaggcctacaccgaggtgaagaccgtgaccgtgaaggtgccccagaagaacagctag

SEQ ID NO: 72415 - DNA, 1989 bp, synthetic construct
  misc_feature 1..1989: note = Description of Artificial Sequence: Synthetic coding sequence
  source 1..1989: mol_type = other DNA
atgagaggcgccggccccagccccagacagagccccagaaccctgagacccgaccccggccccgccatgagcttcttcagaagaaaggtgaagggcaaggagcaggagaagaccagcgacgtgaagagcatcaaggccagcatcagcgtgcacagcccccagaagagcaccaagaaccacgccctgctggaggccgccggccccagccacgtggccatcaacgccatcagcgccaacatggacagcttcagcagcagcagaaccgccaccctgaagaagcagcccagccacatggaggccgcccacttcggcgacctgggcagaagctgcctggactaccagacccaggagaccaagagcagcctgagcaagaccctggagcaggtgctgcacgacaccatcgtgctgccctacttcatccagttcatggagctgagaagaatggagcacctggtgaagttctggctggaggccgagagcttccacagcaccacctggagcagaatcagagcccacagcctgaacaccgtgaagcagagcagcctggccgagcccgtgagccccagcaagaagcacgagaccaccgccagcttcctgaccgacagcctggacaagagactggaggacagcggcagcgcccagctgttcatgacccacagcgagggcatcgacctgaacaacagaaccaacagcacccagaaccacctgctgctgagccaggagtgcgacagcgcccacagcctgagactggagatggccagagccggcacccaccaggtgagcatggagacccaggagagcagcagcaccctgaccgtggccagcagaaacagccccgccagccccctgaaggagctgagcggcaagctgatgaagagcatcgagcaggacgccgtgaacaccttcaccaagtacatcagccccgacgccgccaagcccatccccatcaccgaggccatgagaaacgacatcatcgccagaatctgcggcgaggacggccaggtggaccccaactgcttcgtgctggcccagagcatcgtgttcagcgccatggagcaggagcacttcagcgagttcctgagaagccaccacttctgcaagtaccagatcgaggtgctgaccagcggcaccgtgtacctggccgacatcctgttctgcgagagcgccctgttctacttcagcgagtacatggagaaggaggacgccgtgaacatcctgcagttctggctggccgccgacaacttccagagccagctggccgccaagaagggccagtacgacggccaggaggcccagaacgacgccatgatcctgtacgacaagtacttcagcctgcaggccacccaccccctgggcttcgacgacgtggtgagactggagatcgagagcaacatctgcagagagggcggccccctgcccaactgcttcaccacccccctgagacaggcctggaccaccatggagaaggtgttcctgcccggcttcctgagcagcaacctgtactacaagtacctgaacgacctgatccacagcgtgagaggcgacgagttcctgggcggcaacgtgagcctgaccgcccccggcagcgtgggcccccccgacgagagccaccccggcagcagcgacagcagcgccagccagagcagcgtgaagaaggccagcatcaagatcctgaagaacttcgacgaggccatcatcgtggacgccgccagcctggaccccgagagcctgtaccagagaacctacgccggcaagatgaccttcggcagagtgagcgacctgggccagttcatcagagagagcgagcccgagcccgacgtgagaaagagcaagggcagcatgttcagccaggccatgaagaagtgggtgcagggcaacaccgacgaggcccaggaggagctggcctggaagatcgccaagatgatcgtgagcgacatcatgcagcaggcccagtacgaccagcccctggagaagagcaccaagctgtag

SEQ ID NO: 72416 - DNA, 1536 bp, synthetic construct
  misc_feature 1..1536: note = Description of Artificial Sequence: Synthetic coding sequence
  source 1..1536: mol_type = other DNA
gaggtgcagagaaccccccaccccaccttcgagtacttcttcttcctgagcagaaagctgcccggccaggagctgcagggcctgaacggcagagaggccggcagcctgaacaccagccccctgggcagctgcagaagcagaagccccagctacagagagagactgtgccagagaagacacgagcaggaccagagaggcagagaggccagacccagaagactgcagggcagaaccagacccctgcagttcagaatccagcagctggaggccctgcagagactgatccaggagcaggagcaggagctggtgggcgccctggccgccgacctgcacaagaacgagtggaacgcctactacgaggaggtggtgtacgtgctggaggagatcgagtacatgatccagaagctgcccgagtgggccgccgacgagcccgtggagaagaccccccagacccagcaggacgagctgtacatccacagcgagcccctgggcgtggtgctggtgatcggcacctggaactaccccttcaacctgaccatccagcccatggtgggcgccatcgccgccggcaacagcgtggtgctgaagcccagcgagctgagcgagaacatggccagcctgctggccaccatcatcccccagtacctggacaaggacctgtaccccgtgatcaacggcggcgtgcccgagaccaccgagctgctgaaggagagattcgaccacatcctgtacaccggcagcaccggcgtgggcaagatcatcatgaccgccgccgccaagcacctgacccccgtgaccctggagctgggcggcaagagcccctgctacgtggacaagaactgcgacctggacgtggcctgcagaagaatcgcctggggcaagttcatgaacagcggccagacctgcgtggcccccgactacatcctgtgcgaccccagcatccagaaccagatcgtggagaagctgaagaagagcctgaaggagttctacggcgaggacgccaagaagagcagagactacggcagaatcatcagcgccagacacttccagagagtgatgggcctgatcgagggccagaaggtggcctacggcggcaccggcgacgccgccaccagatacatcgcccccaccatcctgaccgacgtggacccccagagccccgtgatgcaggaggagatcttcggccccgtgctgcccatcgtgtgcgtgagaagcctggaggaggccatccagttcatcaaccagagagagaagcccctggccctgtacatgttcagcagcaacgacaaggtgatcaagaagatgatcgccgagaccagcagcggcggcgtggccgccaacgacgtgatcgtgcacatcaccctgcacagcctgcccttcggcggcgtgggcaacagcggcatgggcagctaccacggcaagaagagcttcgagaccttcagccacagaagaagctgcctggtgagacccctgatgaacgacgagggcctgaaggtgagatacccccccagccccgccaagatgacccagcactag

SEQ ID NO: 72417 - DNA, 1170 bp, synthetic construct
  misc_feature 1..1170: note = Description of Artificial Sequence: Synthetic coding sequence
  source 1..1170: mol_type = other DNA
atgagcaagatcagcgaggccgtgaagagagccagagccgccttcagcagcggcagaaccagacccctgcagttcagaatccagcagctggaggccctgcagagactgatccaggagcaggagcaggagctggtgggcgccctggccgccgacctgcacaagaacgagtggaacgcctactacgaggaggtggtgtacgtgctggaggagatcgagtacatgatccagaagctgcccgagtgggccgccgacgagcccgtggagaagaccccccagacccagcaggacgagctgtacatccacagcgagcccctgggcgtggtgctggtgatcggcacctggaactaccccttcaacctgaccatccagcccatggtgggcgccatcgccgccggcaacagcgtggtgctgaagcccagcgagctgagcgagaacatggccagcctgctggccaccatcatcccccagtacctggacaaggacctgtaccccgtgatcaacggcggcgtgcccgagaccaccgagctgctgaaggagagattcgaccacatcctgtacaccggcagcaccggcgtgggcaagatcatcatgaccgccgccgccaagcacctgacccccgtgaccctggagctgggcggcaagagcccctgctacgtggacaagaactgcgacctggacgtggcctgcagaagaatcgcctggggcaagttcatgaacagcggccagacctgcgtggcccccgactacatcctgtgcgaccccagcatccagaaccagatcgtggagaagctgaagaagagcctgaaggagatcttcggccccgtgctgcccatcgtgtgcgtgagaagcctggaggaggccatccagttcatcaaccagagagagaagcccctggccctgtacatgttcagcagcaacgacaaggtgatcaagaagatgatcgccgagaccagcagcggcggcgtggccgccaacgacgtgatcgtgcacatcaccctgcacagcctgcccttcggcggcgtgggcaacagcggcatgggcagctaccacggcaagaagagcttcgagaccttcagccacagaagaagctgcctggtgagacccctgatgaacgacgagggcctgaaggtgagatacccccccagccccgccaagatgacccagcactag

SEQ ID NO: 72418 - DNA, 693 bp, synthetic construct
  misc_feature 1..693: note = Description of Artificial Sequence: Synthetic coding sequence
  source 1..693: mol_type = other DNA
atgagcaagatcagcgaggccgtgaagagagccagagccgccttcagcagcggcagaaccagacccctgcagttcagaatccagcagctggaggccctgcagagactgatccaggagcaggagcaggagctggtgggcgccctggccgccgacctgcacaagaacgagtggaacgcctactacgaggaggtggtgtacgtgctggaggagatcgagtacatgatccagaagctgcccgagtgggccgccgacgagcccgtggagaagaccccccagacccagcaggacgagctgtacatccacagcgagcccctgggcgtggtgctggtgatcggcacctggaactaccccttcaacctgaccatccagcccatggtgggcgccatcgccgccggcaacagcgtggtgctgaagcccagcgagctgagcgagaacatggccagcctgctggccaccatcatcccccagtacctggacaaggacctgtaccccgtgatcaacggcggcgtgcccgagaccaccgagctgctgaaggagagattcgaccacatcctgtacaccggcagcaccggcgtgggcaagatcatcatgaccgccgccgccaagcacctgacccccgtgaccctggagctgggcggcaagagcccctgctacgtggacaagaactgcgacctggacgtggcctgcagatag

SEQ ID NO: 72419 - DNA, 1119 bp, synthetic construct
  misc_feature 1..1119: note = Description of Artificial Sequence: Synthetic coding sequence
  source 1..1119: mol_type = other DNA
atgagcaagatcagcgaggccgtgaagagagccagagccgccttcagcagcggcagaaccagacccctgcagttcagaatccagcagctggaggccctgcagagactgatccaggagcaggagcaggagctggtgggcgccctggccgccgacctgcacaagaacgagtggaacgcctactacgaggaggtggtgtacgtgctggaggagatcgagtacatgatccagaagctgcccgagtgggccgccgacgagcccgtggagaagaccccccagacccagcaggacgagctgtacatccacagcgagcccctgggcgtggtgctggtgatcggcacctggaactaccccttcaacctgaccatccagcccatggtgggcgccatcgccgccggcaacagcgtggtgctgaagcccagcgagctgagcgagaacatggccagcctgctggccaccatcatcccccagtacctggacaaggacctgtaccccgtgatcaacggcggcgtgcccgagaccaccgagctgctgaaggagagattcgaccacatcctgtacaccggcagcaccggcgtgggcaagatcatcatgaccgccgccgccaagcacctgacccccgtgaccctggagctgggcggcaagagcccctgctacgtggacaagaactgcgacctggacgtggcctgcagaagaatcgcctggggcaagttcatgaacagcggccagacctgcgtggcccccgactacatcctgtgcgaccccagcatccagaaccagatcgtggagaagctgaagaagagcctgaaggagttctacggcgaggacgccaagaagagcagagactacggcagaatcatcagcgccagacacttccagagagtgatgggcctgatcgagggccagaaggtggcctacggcggcaccggcgacgccgccaccagatacatcgcccccaccatcctgaccgacgtggacccccagagccccgtgatgcaggaggagatcttcggccccgtgctgcccatcgtgtgcgtgagaagcctggaggaggccatccagttcatcaaccagagagagaagcccctggccctgtacatgttcagcagcaacgacaagtag

SEQ ID NO: 72420 - DNA, 1362 bp, synthetic construct
  misc_feature 1..1362: note = Description of Artificial Sequence: Synthetic coding sequence
  source 1..1362: mol_type = other DNA
atgagcaagatcagcgaggccgtgaagagagccagagccgccttcagcagcggcagaaccagacccctgcagttcagaatccagcagctggaggccctgcagagactgatccaggagcaggagcaggagctggtgggcgccctggccgccgacctgcacaagaacgagtggaacgcctactacgaggaggtggtgtacgtgctggaggagatcgagtacatgatccagaagctgcccgagtgggccgccgacgagcccgtggagaagaccccccagacccagcaggacgagctgtacatccacagcgagcccctgggcgtggtgctggtgatcggcacctggaactaccccttcaacctgaccatccagcccatggtgggcgccatcgccgccggcaacagcgtggtgctgaagcccagcgagctgagcgagaacatggccagcctgctggccaccatcatcccccagtacctggacaaggacctgtaccccgtgatcaacggcggcgtgcccgagaccaccgagctgctgaaggagagattcgaccacatcctgtacaccggcagcaccggcgtgggcaagatcatcatgaccgccgccgccaagcacctgacccccgtgaccctggagctgggcggcaagagcccctgctacgtggacaagaactgcgacctggacgtggcctgcagaagaatcgcctggggcaagttcatgaacagcggccagacctgcgtggcccccgactacatcctgtgcgaccccagcatccagaaccagatcgtggagaagctgaagaagagcctgaaggagttctacggcgaggacgccaagaagagcagagactacggcagaatcatcagcgccagacacttccagagagtgatgggcctgatcgagggccagaaggtggcctacggcggcaccggcgacgccgccaccagatacatcgcccccaccatcctgaccgacgtggacccccagagccccgtgatgcaggaggagatcttcggccccgtgctgcccatcgtgtgcgtgagaagcctggaggaggccatccagttcatcaaccagagagagaagcccctggccctgtacatgttcagcagcaacgacaaggtgatcaagaagatgatcgccgagaccagcagcggcggcgtggccgccaacgacgtgatcgtgcacatcaccctgcacagcctgcccttcggcggcgtgggcaacagcggcatgggcagctaccacggcaagaagagcttcgagaccttcagccacagaagaagctgcctggtgagacccctgatgaacgacgagggcctgaaggtgagatacccccccagccccgccaagatgacccagcactag

SEQ ID NO: 72421 - DNA, 1362 bp, synthetic construct; identical to SEQ ID NO: 72420
  misc_feature 1..1362: note = Description of Artificial Sequence: Synthetic coding sequence
  source 1..1362: mol_type = other DNA

SEQ ID NO: 72422 - DNA, 1203 bp, synthetic construct
  misc_feature 1..1203: note = Description of Artificial Sequence: Synthetic coding sequence
  source 1..1203: mol_type = other DNA
atgatccagaagctgcccgagtgggccgccgacgagcccgtggagaagaccccccagacccagcaggacgagctgtacatccacagcgagcccctgggcgtggtgctggtgatcggcacctggaactaccccttcaacctgaccatccagcccatggtgggcgccatcgccgccggcaacagcgtggtgctgaagcccagcgagctgagcgagaacatggccagcctgctggccaccatcatcccccagtacctggacaaggacctgtaccccgtgatcaacggcggcgtgcccgagaccaccgagctgctgaaggagagattcgaccacatcctgtacaccggcagcaccggcgtgggcaagatcatcatgaccgccgccgccaagcacctgacccccgtgaccctggagctgggcggcaagagcccctgctacgtggacaagaactgcgacctggacgtggcctgcagaagaatcgcctggggcaagttcatgaacagcggccagacctgcgtggcccccgactacatcctgtgcgaccccagcatccagaaccagatcgtggagaagctgaagaagagcctgaaggagttctacggcgaggacgccaagaagagcagagactacggcagaatcatcagcgccagacacttccagagagtgatgggcctgatcgagggccagaaggtggcctacggcggcaccggcgacgccgccaccagatacatcgcccccaccatcctgaccgacgtggacccccagagccccgtgatgcaggaggagatcttcggccccgtgctgcccatcgtgtgcgtgagaagcctggaggaggccatccagttcatcaaccagagagagaagcccctggccctgtacatgttcagcagcaacgacaaggtgatcaagaagatgatcgccgagaccagcagcggcggcgtggccgccaacgacgtgatcgtgcacatcaccctgcacagcctgcccttcggcggcgtgggcaacagcggcatgggcagctaccacggcaagaagagcttcgagaccttcagccacagaagaagctgcctggtgagacccctgatgaacgacgagggcctgaaggtgagatacccccccagccccgccaagatgacccagcactggctgagctggccctgggagaacagaagctgcagccccagccccgcccccctgctgtgctag

SEQ ID NO: 72423 - DNA, 1458 bp, synthetic construct
  misc_feature 1..1458: note = Description of Artificial Sequence: Synthetic coding sequence
  source 1..1458: mol_type = other DNA
atggagctggaggtgagaagagtgagacaggccttcctgagcggcagaagcagacccctgagattcagactgcagcagctggaggccctgagaagaatggtgcaggagagagagaaggacatcctgaccgccatcgccgccgacctgtgcaagagcgagttcaacgtgtacagccaggaggtgatcaccgtgctgggcgagatcgacttcatgctggagaacctgcccgagtgggtgaccgccaagcccgtgaagaagaacgtgctgaccatgctggacgaggcctacatccagccccagcccctgggcgtggtgctgatcatcggcgcctggaactaccccttcgtgctgaccatccagcccctgatcggcgccatcgccgccggcaacgccgtgatcatcaagcccagcgagctgagcgagaacaccgccaagatcctggccaagctgctgccccagtacctggaccaggacctgtacatcgtgatcaacggcggcgtggaggagaccaccgagctgctgaagcagagattcgaccacatcttctacaccggcaacaccgccgtgggcaagatcgtgatggaggccgccgccaagcacctgacccccgtgaccctggagctgggcggcaagagcccctgctacatcgacaaggactgcgacctggacatcgtgtgcagaagaatcacctggggcaagtacatgaactgcggccagacctgcatcgcccccgactacatcctgtgcgaggccagcctgcagaaccagatcgtgtggaagatcaaggagaccgtgaaggagttctacggcgagaacatcaaggagagccccgactacgagagaatcatcaacctgagacacttcaagagaatcctgagcctgctggagggccagaagatcgccttcggcggcgagaccgacgaggccaccagatacatcgcccccaccgtgctgaccgacgtggaccccaagaccaaggtgatgcaggaggagatcttcggccccatcctgcccatcgtgcccgtgaagaacgtggacgaggccatcaacttcatcaacgagagagagaagcccctggccctgtacgtgttcagccacaaccacaagctgatcaagagaatgatcgacgagaccagcagcggcggcgtgaccggcaacgacgtgatcatgcacttcaccctgaacagcttccccttcggcggcgtgggcagcagcggcatgggcgcctaccacggcaagcacagcttcgacaccttcagccaccagagaccctgcctgctgaagagcctgaagagagagggcgccaacaagctgagatacccccccaacagccagagcaaggtggactggggcaagttcttcctgctgaagagattcaacaaggagaagctgggcctgctgctgctgaccttcctgggcatcgtggccgccgtgctggtgaaggccgagtactactag

SEQ ID NO: 72424 - DNA, 1527 bp, synthetic construct
  misc_feature 1..1527: note = Description of Artificial Sequence: Synthetic coding sequence
  source 1..1527: mol_type = other DNA
atggagctggaggtgagaagagtgagacaggccttcctgagcggcagaagcagacccctgagattcagactgcagcagctggaggccctgagaagaatggtgcaggagagagagaaggacatcctgaccgccatcgccgccgacctgtgcaagagcgagttcaacgtgtacagccaggaggtgatcaccgtgctgggcgagatcgacttcatgctggagaacctgcccgagtgggtgaccgccaagcccgtgaagaagaacgtgctgaccatgctggacgaggcctacatccagccccagcccctgggcgtggtgctgatcatcggcgcctggaactaccccttcgtgctgaccatccagcccctgatcggcgccatcgccgccggcaacgccgtgatcatcaagcccagcgagctgagcgagaacaccgccaagatcctggccaagctgctgccccagtacctggaccaggacctgtacatcgtgatcaacggcggcgtggaggagaccaccgagctgctgaagcagagattcgaccacatcttctacaccggcaacaccgccgtgggcaagatcgtgatggaggccgccgccaagcacctgacccccgtgaccctggagctgggcggcaagagcccctgctacatcgacaaggactgcgacctggacatcgtgtgcagaagaatcacctggggcaagtacatgaactgcggccagacctgcatcgcccccgactacatcctgtgcgaggccagcctgcagaaccagatcgtgtggaagatcaaggagaccgtgaaggagttctacggcgagaacatcaaggagagccccgactacgagagaatcatcaacctgagacacttcaagagaatcctgagcctgctggagggccagaagatcgccttcggcggcgagaccgacgaggccaccagatacatcgcccccaccgtgctgaccgacgtggaccccaagaccaaggtgatgcaggaggagatcttcggccccatcctgcccatcgtgcccgtgaagaacgtggacgaggccatcaacttcatcaacgagagagagaagcccctggccctgtacgtgttcagccacaaccacaagctgatcaagagaatgatcgacgagaccagcagcggcggcgtgaccggcaacgacgtgatcatgcacttcaccctgaacagcttccccttcggcggcgtgggcagcagcggcatgggcgcctaccacggcaagcacagcttcgacaccttcagccaccagagaccctgcctgctgaagagcctgaagagagagggcgccaacaagctgagatacccccccaacagccagagcaaggtggactggggcaagttcttcctgctgaagagattcaacaaggagaagctgggcctgctgctgctgaccttcctgggcatcgtggccgccgtgctggtgaagaagtaccaggccgtgctgagaagaaaggccctgctgatcttcctggtggtgcacagactgagatggagcagcaagcagagatag

SEQ ID NO: 72425 - DNA, 1458 bp, synthetic construct; identical to SEQ ID NO: 72423
  misc_feature 1..1458: note = Description of Artificial Sequence: Synthetic coding sequence
  source 1..1458: mol_type = other DNA

SEQ ID NO: 72426 - DNA, 501 bp, synthetic construct
  misc_feature 1..501: note = Description of Artificial Sequence: Synthetic coding sequence
  source 1..501: mol_type = other DNA
atggagctggaggtgagaagagtgagacaggccttcctgagcggcagaagcagacccctgagattcagactgcagcagctggaggccctgagaagaatggtgcaggagagagagaaggacatcctgaccgccatcgccgccgacctgtgcaagagcgagttcaacgtgtacagccaggaggtgatcaccgtgctgggcgagatcgacttcatgctggagaacctgcccgagtgggtgaccgccaagcccgtgaagaagaacgtgctgaccatgctggacgaggcctacatccagccccagcccctgggcgtggtgctgatcatcggcgcctggaactaccccttcgtgctgaccatccagcccctgatcggcgccatcgccgccggcaacgccgtgatcatcaagcccagcgagctgagcgagaacaccgccaagatcctggccaagctgctgccccagtacctggaccaggacctgtacatcgtgatcaacggcggctag

SEQ ID NO: 72427 - DNA, 1158 bp, synthetic construct
  misc_feature 1..1158: note = Description of Artificial Sequence: Synthetic coding sequence
  source 1..1158: mol_type = other DNA
atgaaggacgagcccagaagcaccaacctgttcatgaagctggacagcgtgttcatctggaaggagcccttcggcctggtgctgatcatcgccccctggaactaccccctgaacctgaccctggtgctgctggtgggcgccctggccgccggcagctgcgtggtgctgaagcccagcgagatcagccagggcaccgagaaggtgctggccgaggtgctgccccagtacctggaccagagctgcttcgccgtggtgctgggcggcccccaggagaccggccagctgctggagcacaagctggactacatcttcttcaccggcagccccagagtgggcaagatcgtgatgaccgccgccaccaagcacctgacccccgtgaccctggagctgggcggcaagaacccctgctacgtggacgacaactgcgacccccagaccgtggccaacagagtggcctggttctgctacttcaacgccggccagacctgcgtggcccccgactacgtgctgtgcagccccgagatgcaggagagactgctgcccgccctgcagagcaccatcaccagattctacggcgacgacccccagagcagccccaacctgggccacatcatcaaccagaagcagttccagagactgagagccctgctgggctgcagcagagtggccatcggcggccagagcaacgagagcgacagatacatcgcccccaccgtgctggtggacgtgcaggagaccgagcccgtgatgcaggaggagatcttcggccccatcctgcccatcgtgaacgtgcagagcgtggacgaggccatcaagttcatcaacagacaggagaagcccctggccctgtacgccttcagcaacagcagccaggtggtgaaccagatgctggagagaaccagcagcggcagcttcggcggcaacgagggcttcacctacatcagcctgctgagcgtgcccttcggcggcgtgggccacagcggcatgggcagataccacggcaagttcaccttcgacaccttcagccaccacagaacctgcctgctggcccccagcggcctggagaagctgaaggagatccactaccccccctacaccgactggaaccagcagctgctgagatggggcatgggcagccagagctgcaccctgctgtag

SEQ ID NO: 72428 - DNA, 447 bp, synthetic construct
  misc_feature 1..447: note = Description of Artificial Sequence: Synthetic coding sequence
  source 1..447: mol_type = other DNA
atgaaggacgagcccagaagcaccaacctgttcatgaagctggacagcgtgttcatctggaaggagcccttcggcctggtgctgatcatcgccccctggaactaccccctgaacctgaccctggtgctgctggtgggcgccctggccgccggcagctgcgtggtgctgaagcccagcgagatcagccagggcaccgagaaggtgctggccgaggtgctgccccagtacctggaccagagctgcttcgccgtggtgctgggcggcccccaggagaccggccagctgctggagcacaagctggactacatcttcttcaccggcagccccagagtgggcaagatcgtgatgaccgccgccaccaagcacctgacccccgtgaccctggagctgggcggcaagaacccctgctacgtggacgacaactgcgacccccagaccgtggcctag

SEQ ID NO: 72429 - DNA, 288 bp, synthetic construct
  misc_feature 1..288: note = Description of Artificial Sequence: Synthetic coding sequence
  source 1..288: mol_type = other DNA
atgaaggacgagcccagaagcaccaacctgttcatgaagctggacagcgtgttcatctggaaggagcccttcggcctggtgctgatcatcgccccctggaactaccccctgaacctgaccctggtgctgctggtgggcgccctggccgccggcagctgcgtggtgctgaagcccagcgagatcagccagggcaccgagaaggtgctggccgaggtgctgccccagtacctggaccagagctgcttcgccgtggtgctgggcggcccccaggagaccggccagctgtag

SEQ ID NO: 72430 - DNA, 1158 bp, synthetic construct; identical to SEQ ID NO: 72427
  misc_feature 1..1158: note = Description of Artificial Sequence: Synthetic coding sequence
  source 1..1158: mol_type = other DNA

SEQ ID NO: 72431 - DNA, 1692 bp, synthetic construct
  misc_feature 1..1692: note = Description of Artificial Sequence: Synthetic coding sequence
  source 1..1692: mol_type = other DNA
atgctgctgcccgcccccgccctgagaagagccctgctgagcagaccctggaccggcgccggcctgagatggaagcacaccagcagcctgaaggtggccaacgagcccgtgctggccttcacccagggcagccccgagagagacgccctgcagaaggccctgaaggacctgaagggcagaatggaggccatcccctgcgtggtgggcgacgaggaggtgtggaccagcgacgtgcagtaccaggtgagccccttcaaccacggccacaaggtggccaagttctgctacgccgacaagagcctgctgaacaaggccatcgaggccgccctggccgccagaaaggagtgggacctgaagcccatcgccgacagagcccagatcttcctgaaggccgccgacatgctgagcggccccagaagagccgagatcctggccaagaccatggtgggccagggcaagaccgtgatccaggccgagatcgacgccgccgccgagctgatcgacttcttcagattcaacgccaagtacgccgtggagctggagggccagcagcccatcagcgtgccccccagcaccaacagcaccgtgtacagaggcctggagggcttcgtggccgccatcagccccttcaacttcaccgccatcggcggcaacctggccggcgcccccgccctgatgggcaacgtggtgctgtggaagcccagcgacaccgccatgctggccagctacgccgtgtacagaatcctgagagaggccggcctgccccccaacatcatccagttcgtgcccgccgacggccccctgttcggcgacaccgtgaccagcagcgagcacctgtgcggcatcaacttcaccggcagcgtgcccaccttcaagcacctgtggaagcaggtggcccagaacctggacagattccacaccttccccagactggccggcgagtgcggcggcaagaacttccacttcgtgcacagaagcgccgacgtggagagcgtggtgagcggcaccctgagaagcgccttcgagtacggcggccagaagtgcagcgcctgcagcagactgtacgtgccccacagcctgtggccccagatcaagggcagactgctggaggagcacagcagaatcaaggtgggcgaccccgccgaggacttcggcaccttcttcagcgccgtgatcgacgccaagagcttcgccagaatcaagaagtggctggagcacgccagaagcagccccagcctgaccatcctggccggcggcaagtgcgacgacagcgtgggctacttcgtggagccctgcatcgtggagagcaaggacccccaggagcccatcatgaaggaggagatcttcggccccgtgctgagcgtgtacgtgtaccccgacgacaagtacaaggagaccctgcagctggtggacagcaccaccagctacggcctgaccggcgccgtgttcagccaggacaaggacgtggtgcaggaggccaccaaggtgctgagaaacgccgccggcaacttctacatcaacgacaagagcaccggcagcatcgtgggccagcagcccttcggcggcgccagagccagcggcaccaacgacaagcccggcggcccccactacatcctgagatggaccagcccccaggtgatcaaggagacccacaagcccctgggcgactggagctacgcctacatgcagtag

SEQ ID NO: 72432 - DNA, 588 bp, synthetic construct
  misc_feature 1..588: note = Description of Artificial Sequence: Synthetic coding sequence
  source 1..588: mol_type = other DNA
atggaggccatcccctgcgtggtgggcgacgaggaggtgtggaccagcgacgtgcagtaccaggtgagccccttcaaccacggccacaaggtggccaagttctgctacgccgacaagagcctgctgaacaaggccatcgaggccgccctggccgccagaaaggagtgggacctgaagcccatcgccgacagagcccagatcttcctgaaggccgccgacatgctgagcggccccagaagagccgagatcctggccaagaccatggtgggccagggcaagaccgtgatccaggccgagatcgacgccgccgccgagctgatcgacttcttcagattcaacgccaagtacgccgtggagctggagggccagcagcccatcagcgtgccccccagcaccaacagcaccgtgtacagaggcctggagggcttcgtggccgccatcagccccttcaacttcaccgccatcggcggcaacctggccggcgcccccgccctgatgctgagagagggcgtggtgaccctgcccctgtgccagatgaccaagctgagacacaccgccgtgacctacctggccagactgagcgactag

SEQ ID NO: 72433 - DNA, 633 bp, synthetic construct
  misc_feature 1..633: note = Description of Artificial Sequence: Synthetic coding sequence
  source 1..633: mol_type = other DNA
atgctgctgcccgcccccgccctgagaagagccctgctgagcagaccctggaccggcgccggcctgagatggaagcacaccagcagcctgaaggtggccaacgagcccgtgctggccttcacccagggcagccccgagagagacgccctgcagaaggccctgaaggacctgaagggcagaatggaggccatcccctgcgtggtgggcgacgaggaggtgtggaccagcgacgtgcagtaccaggtgagcagcctgctgaacaaggccatcgaggccgccctggccgccagaaaggagtgggacctgaagcccatcgccgacagagcccagatcttcctgaaggccgccgacatgctgagcggccccagaagagccgagatcctggccaagaccatggtgggccagggcaagaccgtgatccaggccgagatcgacgccgccgccgagctgatcgacttcttcagattcaacgccaagtacgccgtggagctggagggccagcagcccatcagcgtgccccccagcaccaacagcaccgtgtacagaggcctggagggcttcgtggccgccatcagccccttcaacttcaccgccatcggcggcaacctggccggcgcccccgccctgatgtag

SEQ ID NO: 72434 - DNA, 1692 bp, synthetic construct; identical to SEQ ID NO: 72431
  misc_feature 1..1692: note = Description of Artificial Sequence: Synthetic coding sequence
  source 1..1692: mol_type = other DNA

SEQ ID NO: 72435 - DNA, 645 bp, synthetic construct
  misc_feature 1..645: note = Description of Artificial Sequence: Synthetic coding sequence
  source 1..645: mol_type = other DNA
atgctgctgcccgcccccgccctgagaagagccctgctgagcagaccctggaccggcgccggcctgagatggaagcacaccagcagcctgaaggtggccaacgagcccgtgctggccttcacccagggcagccccgagagagacgccctgcagaaggccctgaaggacctgaagggcagaatggaggccatcccctgcgtggtgggcgacgaggaggtgtggaccagcgacgtgcagtaccaggtgagcagcctgctgaacaaggccatcgaggccgccctggccgccagaaaggagtgggacctgaagcccatcgccgacagagcccagatcttcctgaaggccgccgacatgctgagcggccccagaagagccgagatcctggccaagaccatggtgggccagggcaagaccgtgatccaggccgagatcgacgccgccgccgagctgatcgacttcttcagattcaacgccaagtacgccgtggagctggagggccagcagcccatcagcgtgccccccagcaccaacagcaccgtgtacagaggcctggagggcttcgtggccgccatcagccccttcaacttcaccgccatcggcggcaacctggccggcgcccccgccctgatggtgagatgcggctag

SEQ ID NO: 72436 - DNA, 462 bp, synthetic construct
  misc_feature 1..462: note = Description of Artificial Sequence: Synthetic coding sequence
  source 1..462: mol_type = other DNA
aacaaggccatcgaggccgccctggccgccagaaaggagtgggacctgaagcccatcgccgacagagcccagatcttcctgaaggccgccgacatgctgagcggccccagaagagccgagatcctggccaagaccatggtgggccagggcaagaccgtgatccaggccgagatcgacgccgccgccgagctgatcgacttcttcagattcaacgccaagtacgccgtggagctggagggccagcagcccatcagcgtgccccccagcaccaacagcaccgtgtacagaggcctggagggcttcgtggccgccatcagccccttcaacttcaccgccatcggcggcaacctggccggcgcccccgccctgatgctgagagagggcgtggtgaccctgcccctgtgccagatgaccaagctgagacacaccgccgtgacctacctggccagactgagcgactag

SEQ ID NO: 72437 - DNA, 1512 bp, synthetic construct
  misc_feature 1..1512: note = Description of Artificial Sequence: Synthetic coding sequence
  source 1..1512: mol_type = other DNA
atggaggccatcccctgcgtggtgggcgacgaggaggtgtggaccagcgacgtgcagtaccaggtgagccccttcaaccacggccacaaggtggccaagttctgctacgccgacaagagcctgctgaacaaggccatcgaggccgccctggccgccagaaaggagtgggacctgaagcccatcgccgacagagcccagatcttcctgaaggccgccgacatgctgagcggccccagaagagccgagatcctggccaagaccatggtgggccagggcaagaccgtgatccaggccgagatcgacgccgccgccgagctgatcgacttcttcagattcaacgccaagtacgccgtggagctggagggccagcagcccatcagcgtgccccccagcaccaacagcaccgtgtacagaggcctggagggcttcgtggccgccatcagccccttcaacttcaccgccatcggcggcaacctggccggcgcccccgccctgatgggcaacgtggtgctgtggaagcccagcgacaccgccatgctggccagctacgccgtgtacagaatcctgagagaggccggcctgccccccaacatcatccagttcgtgcccgccgacggccccctgttcggcgacaccgtgaccagcagcgagcacctgtgcggcatcaacttcaccggcagcgtgcccaccttcaagcacctgtggaagcaggtggcccagaacctggacagattccacaccttccccagactggccggcgagtgcggcggcaagaacttccacttcgtgcacagaagcgccgacgtggagagcgtggtgagcggcaccctgagaagcgccttcgagtacggcggccagaagtgcagcgcctgcagcagactgtacgtgccccacagcctgtggccccagatcaagggcagactgctggaggagcacagcagaatcaaggtgggcgaccccgccgaggacttcggcaccttcttcagcgccgtgatcgacgccaagagcttcgccagaatcaagaagtggctggagcacgccagaagcagccccagcctgaccatcctggccggcggcaagtgcgacgacagcgtgggctacttcgtggagccctgcatcgtggagagcaaggacccccaggagcccatcatgaaggaggagatcttcggccccgtgctgagcgtgtacgtgtaccccgacgacaagtacaaggagaccctgcagctggtggacagcaccaccagctacggcctgaccggcgccgtgttcagccaggacaaggacgtggtgcaggaggccaccaaggtgctgagaaacgccgccggcaacttctacatcaacgacaagagcaccggcagcatcgtgggccagcagcccttcggcggcgccagagccagcggcaccaacgacaagcccggcggcccccactacatcctgagatggaccagcccccaggtgatcaaggagacccacaagcccctgggcgactggagctacgcctacatgcagtag

SEQ ID NO: 72438 - DNA, 1539 bp, synthetic construct
  misc_feature 1..1539: note = Description of Artificial Sequence: Synthetic coding sequence
  source 1..1539: mol_type = other DNA
atgctgctgcccgcccccgccctgagaagagccctgctgagcagaccctggaccggcgccggcctgagatggaagcacaccagcagcctgaaggtggccaacgagcccgtgctggccttcacccagggcagccccgagagagacgccctgcagaaggccctgaaggacctgaagggcagaatggaggccatcccctgcgtggtgggcgacgaggaggtgtggaccagcgacgtgcagtaccaggtgagccccttcaaccacggccacaaggtggccaagttctgctacgccgacaagagcctgctgaacaaggccatcgaggccgccctggccgccagaaaggagtgggacctgaagcccatcgccgacagagcccagatcttcctgaaggccgccgacatgctgagcggccccagaagagccgagatcctggccaagaccatggtgggccagggcaagaccgtgatccaggccgagatcgacgccgccgccgagctgatcgacttcttcagattcaacgccaagtacgccgtggagctggagggccagcagcccatcagcgtgccccccagcaccaacagcaccgtgtacagaggcctggagggcttcgtggccgccatcagccccttcaacttcaccgccatcggcggcaacctggccggcgcccccgccctgatgggcaacgtggtgctgtggaagcccagcgacaccgccatgctggccagctacgccgtgtacagaatcctgagagaggccggcctgccccccaacatcatccagttcgtgcccgccgacggccccctgttcggcgacaccgtgaccagcagcgagcacctgtgcggcatcaacttcaccggcagcgtgcccaccttcaagcacctgtggaagcaggtggcccagaacctggacagattccacaccttccccagactggccggcgagtgcggcggcaagaacttccacttcgtgcacagaagcgccgacgtggagagcgtggtgagcggcaccctgagaagcgccttcgagtacggcggccagaagtgcagcgcctgcagcagactgtacgtgccccacagcctgtggccccagatcaagggcagactgctggaggagcacagcagaatcaaggtgggcgaccccgccgaggacttcggcaccttcttcagcgccgtgatcgacgccaaggagatcttcggccccgtgctgagcgtgtacgtgtaccccgacgacaagtacaaggagaccctgcagctggtggacagcaccaccagctacggcctgaccggcgccgtgttcagccaggacaaggacgtggtgcaggaggccaccaaggtgctgagaaacgccgccggcaacttctacatcaacgacaagagcaccggcagcatcgtgggccagcagcccttcggcggcgccagagccagcggcaccaacgacaagcccggcggcccccactacatcctgagatggaccagcccccaggtgatcaaggagacccacaagcccctgggcgactggagctacgcctacatgcagtag

SEQ ID NO: 72439 - DNA, 1647 bp, synthetic construct
  misc_feature 1..1647: note = Description of Artificial Sequence: Synthetic coding sequence
  source 1..1647: mol_type = other DNA
atggccacctgcatctggctgagaagctgcggcgccagaagactgggcagcaccttccccggctgcagactgagacccagagccggcggcctggtgcccgccagcggccccgcccccggccccgcccagctgagatgctacgccggcagactggccggcctgagcgccgccctgctgagaaccgacagcttcgtgggcggcagatggctgcccgccgccgccaccttccccgtgcaggaccccgccagcggcgccgccctgggcatggtggccgactgcggcgtgagagaggccagagccgccgtgagagccgcctacgaggccttctgcagatggagagaggtgagcgccaaggagagaagcagcctgctgagaaagtggtacaacctgatgatccagaacaaggacgacctggccagaatcatcaccgccgagagcggcaagcccctgaaggaggcccacggcgagatcctgtacagcgccttcttcctggagtggttcagcgaggaggccagaagagtgtacggcgacatcatccacacccccgccaaggacagaagagccctggtgctgaagcagcccatcggcgtggccgccgtgatcaccccctggaacttccccagcgccatgatcaccagaaaggtgggcgccgccctggccgccggctgcaccgtggtggtgaagcccgccgaggacacccccttcagcgccctggccctggccgaggtgaaccagggcttcctgctggacctggaccccctgctgctggccagccaggccggcatccccagcggcgtgtacaacgtgatcccctgcagcagaaagaacgccaaggaggtgggcgaggccatctgcaccgaccccctggtgagcaagatcagcttcaccggcagcaccaccaccggcaagatcctgctgcaccacgccgccaacagcgtgaagagagtgagcatggagctgggcggcctggcccccttcatcgtgttcgacagcgccaacgtggaccaggccgtggccggcgccatggccagcaagttcagaaacaccggccagacctgcgtgtgcagcaaccagttcctggtgcagagaggcatccacgacgccttcgtgaaggccttcgccgaggccatgaagaagaacctgagagtgggcaacggcttcgaggagggcaccacccagggccccctgatcaacgagaaggccgtggagaaggtggagaagcaggtgaacgacgccgtgagcaagggcgccaccgtggtgaccggcggcaagagacaccagctgggcaagaacttcttcgagcccaccctgctgtgcaacgtgacccaggacatgctgtgcacccacgaggagaccttcggccccctggcccccgtgatcaagttcgacaccgaggaggaggccatcgccatcgccaacgccgccgacgtgggcctggccggctacttctacagccaggaccccgcccagatctggagagtggccgagcagctggaggtgggcatggtgggcgtgaacgagggcctgatcagcagcgtggagtgccccttcggcggcgtgaagcagagcggcctgggcagagagggcagcaagtacggcatcgacgagtacctggagctgaagtacgtgtgctacggcggcctgtag

SEQ ID NO: 72440 - DNA, 1608 bp, synthetic construct
  misc_feature 1..1608: note = Description of Artificial Sequence: Synthetic coding sequence
  source 1..1608: mol_type = other DNA
atggccacctgcatctggctgagaagctgcggcgccagaagactgggcagcaccttccccggctgcagactgagacccagagccggcggcctggtgcccgccagcggccccgcccccggccccgcccagctgagatgctacgccggcagactggccggcctgagcgccgccctgctgagaaccgacagcttcgtgggcggcagatggctgcccgccgccgccaccttccccgtgcaggaccccgccagcggcgccgccctgggcatggtggccgactgcggcgtgagagaggccagagccgccgtgagagccgcctacgaggccttctgcagatggagagaggtgagcgccaaggagagaagcagcctgctgagaaagtggtacaacctgatgatccagaacaaggacgacctggccagaatcatcaccgccgagagcggcaagcccctgaaggaggcccacggcgagatcctgtacagcgccttcttcctggagtggttcagcgaggaggccagaagagtgtacggcgacatcatccacacccccgccaaggacagaagagccctggtgctgaagcagcccatcggcgtggccgccgtgatcaccccctggaacttccccagcgccatgatcaccagaaaggtgggcgccgccctggccgccggctgcaccgtggtggtgaagcccgccgaggacacccccttcagcgccctggccctggccgagctggccagccaggccggcatccccagcggcgtgtacaacgtgatcccctgcagcagaaagaacgccaaggaggtgggcgaggccatctgcaccgaccccctggtgagcaagatcagcttcaccggcagcaccaccaccggcaagatcctgctgcaccacgccgccaacagcgtgaagagagtgagcatggagctgggcggcctggcccccttcatcgtgttcgacagcgccaacgtggaccaggccgtggccggcgccatggccagcaagttcagaaacaccggccagacctgcgtgtgcagcaaccagttcctggtgcagagaggcatccacgacgccttcgtgaaggccttcgccgaggccatgaagaagaacctgagagtgggcaacggcttcgaggagggcaccacccagggccccctgatcaacgagaaggccgtggagaaggtggagaagcaggtgaacgacgccgtgagcaagggcgccaccgtggtgaccggcggcaagagacaccagctgggcaagaacttcttcgagcccaccctgctgtgcaacgtgacccaggacatgctgtgcacccacgaggagaccttcggccccctggcccccgtgatcaagttcgacaccgaggaggaggccatcgccatcgccaacgccgccgacgtgggcctggccggctacttctacagccaggaccccgcccagatctggagagtggccgagcagctggaggtgggcatggtgggcgtgaacgagggcctgatcagcagcgtggagtgccccttcggcggcgtgaagcagagcggcctgggcagagagggcagcaagtacggcatcgacgagtacctggagctgaagtacgtgtgctacggcggcctgtag

SEQ ID NO: 72441 - DNA, 1344 bp, synthetic construct
  misc_feature 1..1344: note = Description of Artificial Sequence: Synthetic coding sequence
  source 1..1344: mol_type = other DNA
atggtggccgactgcggcgtgagagaggccagagccgccgtgagagccgcctacgaggccttctgcagatggagagaggtgagcgccaaggagagaagcagcctgctgagaaagtggtacaacctgatgatccagaacaaggacgacctggccagaatcatcaccgccgagagcggcaagcccctgaaggaggcccacggcgagatcctgtacagcgccttcttcctggagtggttcagcgaggaggccagaagagtgtacggcgacatcatccacacccccgccaaggacagaagagccctggtgctgaagcagcccatcggcgtggccgccgtgatcaccccctggaacttccccagcgccatgatcaccagaaaggtgggcgccgccctggccgccggctgcaccgtggtggtgaagcccgccgaggacacccccttcagcgccctggccctggccgagctggccagccaggccggcatccccagcggcgtgtacaacgtgatcccctgcagcagaaagaacgccaaggaggtgggcgaggccatctgcaccgaccccctggtgagcaagatcagcttcaccggcagcaccaccaccggcaagatcctgctgcaccacgccgccaacagcgtgaagagagtgagcatggagctgggcggcctggcccccttcatcgtgttcgacagcgccaacgtggaccaggccgtggccggcgccatggccagcaagttcagaaacaccggccagacctgcgtgtgcagcaaccagttcctggtgcagagaggcatccacgacgccttcgtgaaggccttcgccgaggccatgaagaagaacctgagagtgggcaacggcttcgaggagggcaccacccagggccccctgatcaacgagaaggccgtggagaaggtggagaagcaggtgaacgacgccgtgagcaagggcgccaccgtggtgaccggcggcaagagacaccagctgggcaagaacttcttcgagcccaccctgctgtgcaacgtgacccaggacatgctgtgcacccacgaggagaccttcggccccctggcccccgtgatcaagttcgacaccgaggaggaggccatcgccatcgccaacgccgccgacgtgggcctggccggctacttctacagccaggaccccgcccagatctggagagtggccgagcagctggaggtgggcatggtgggcgtgaacgagggcctgatcagcagcgtggagtgccccttcggcggcgtgaagcagagcggcctgggcagagagggcagcaagtacggcatcgacgagtacctggagctgaagtacgtgtgctacggcggcctgtag

SEQ ID NO: 72442 - DNA, 1608 bp, synthetic construct
  misc_feature 1..1608: note = Description of Artificial Sequence: Synthetic coding sequence
  source 1..1608: mol_type = other DNA
atggccgccctgctggccgccgccgccgtgagagccagaatcctgcaggtgagcagcaaggtgaagagcagccccacctggtacagcgccagcagcttcagcagcagcgtgcccaccgtgaagctgttcatcggcggcaagttcgtggagagcaagagcgacaagtggatcgacatccacaaccccgccaccaacgaggtgatcggcagagtgccccaggccaccaaggccgagatggacgccgccatcgccagctgcaagagagccttccccgcctgggccgacaccagcgtgctgagcagacagcaggtgctgctgagataccagcagctgatcaaggagaacctgaaggagatcgccaagctgatcaccctggagcagggcaagaccctggccgacgccgagggcgacgtgttcagaggcctgcaggtggtggagcacgcctgcagcgtgaccagcctgatgatgggcgagaccatgcccagcatcaccaaggacatggacctgtacagctacagactgcccctgggcgtgtgcgccggcatcgcccccttcaacttccccgccatgatccccctgtggatgttccccatggccatggtgtgcggcaacaccttcctgatgaagcccagcgagagagtgcccggcgccaccatgctgctggccaagctgctgcaggacagcggcgcccccgacggcaccctgaacatcatccacggccagcacgaggccgtgaacttcatctgcgaccaccccgacatcaaggccatcagcttcgtgggcagcaacaaggccggcgagtacatcttcgagagaggcagcagacacggcaagagagtgcaggccaacatgggcgccaagaaccacggcgtggtgatgcccgacgccaacaaggagaacaccctgaaccagctggtgggcgccgccttcggcgccgccggccagagatgcatggccctgagcaccgccgtgctggtgggcgaggccaagaagtggctgcccgagctggtggagcacgccaagaacctgagagtgaacgccggcgaccagcccggcgccgacctgggccccctgatcaccccccaggccaaggagagagtgtgcaacctgatcgacagcggcaccaaggagggcgccagcatcctgctggacggcagaaagatcaaggtgaagggctacgagaacggcaacttcgtgggccccaccatcatcagcaacgtgaagcccaacatgacctgctacaaggaggagatcttcggccccgtgctggtggtgctggagaccgagaccctggacgaggccatccagatcgtgaacaacaacccctacggcaacggcaccgccatcttcaccaccaacggcgccaccgccagaaagtacgcccacctggtggacgtgggccaggtgggcgtgaacgtgcccatccccgtgcccctgcccatgttcagcttcaccggcagcagaagcagcttcagaggcgacaccaacttctacggcaagcagggcatccagttctacacccagctgaagaccatcaccagccagtggaaggaggaggacgccaccctgagcagccccgccgtggtgatgcccaccatgggcagatag

SEQ ID NO: 72443 - DNA, 1620 bp, synthetic construct
  misc_feature 1..1620: note = Description of Artificial Sequence: Synthetic coding sequence
  source 1..1620: mol_type = other DNA
atgtggagactgcccagagccctgtgcgtgcacgccgccaagaccagcaagctgagcggcccctggagcagacccgccgccttcatgagcaccctgctgatcaaccagccccagtacgcctggctgaaggagctgggcctgagagaggagaacgagggcgtgtacaacggcagctggggcggcagaggcgaggtgatcaccacctactgccccgccaacaacgagcccatcgccagagtgagacaggccagcgtggccgactacgaggagaccgtgaagaaggccagagaggcctggaagatctgggccgacatccccgcccccaagagaggcgagatcgtgagacagatcggcgacgccctgagagagaagatccaggtgctgggcagcctggtgagcctggagatgggcaagatcctggtggagggcgtgggcgaggtgcaggagtacgtggacatctgcgactacgccgtgggcctgagcagaatgatcggcggccccatcctgcccagcgagagaagcggccacgccctgatcgagcagtggaaccccgtgggcctggtgggcatcatcaccgccttcaacttccccgtggccgtgtacggctggaacaacgccatcgccatgatctgcggcaacgtgtgcctgtggaagggcgcccccaccaccagcctgatcagcgtggccgtgaccaagatcatcgccaaggtgctggaggacaacaagctgcccggcgccatctgcagcctgacctgcggcggcgccgacatcggcaccgccatggccaaggacgagagagtgaacctgctgagcttcaccggcagcacccaggtgggcaagcaggtgggcctgatggtgcaggagagattcggcagaagcctgctggagctgggcggcaacaacgccatcatcgccttcgaggacgccgacctgagcctggtggtgcccagcgccctgttcgccgccgtgggcaccgccggccagagatgcaccaccgccagaagactgttcatccacgagagcatccacgacgaggtggtgaacagactgaagaaggcctacgcccagatcagagtgggcaacccctgggaccccaacgtgctgtacggccccctgcacaccaagcaggccgtgagcatgttcctgggcgccgtggaggaggccaagaaggagggcggcaccgtggtgtacggcggcaaggtgatggacagacccggcaactacgtggagcccaccatcgtgaccggcctgggccacgacgccagcatcgcccacaccgagaccttcgcccccatcctgtacgtgttcaagttcaagaacgaggaggaggtgttcgcctggaacaacgaggtgaagcagggcctgagcagcagcatcttcaccaaggacctgggcagaatcttcagatggctgggccccaagggcagcgactgcggcatcgtgaacgtgaacatccccaccagcggcgccgagatcggcggcgccttcggcggcgagaagcacaccggcggcggcagagagagcggcagcgacgcctggaagcagtacatgagaagaagcacctgcaccatcaactacagcaaggacctgcccctggcccagggcatcaagttccagtag

SEQ ID NO: 72444 - DNA, 1044 bp, synthetic construct
  misc_feature 1..1044: note = Description of Artificial Sequence: Synthetic coding sequence
  source 1..1044: mol_type = other DNA
atgtggagactgcccagagccctgtgcgtgcacgccgccaagaccagcaagctgagcggcccctggagcagacccgccgccttcatgagcaccagcctgatcagcgtggccgtgaccaagatcatcgccaaggtgctggaggacaacaagctgcccggcgccatctgcagcctgacctgcggcggcgccgacatcggcaccgccatggccaaggacgagagagtgaacctgctgagcttcaccggcagcacccaggtgggcaagcaggtgggcctgatggtgcaggagagattcggcagaagcctgctggagctgggcggcaacaacgccatcatcgccttcgaggacgccgacctgagcctggtggtgcccagcgccctgttcgccgccgtgggcaccgccggccagagatgcaccaccgccagaagactgttcatccacgagagcatccacgacgaggtggtgaacagactgaagaaggcctacgcccagatcagagtgggcaacccctgggaccccaacgtgctgtacggccccctgcacaccaagcaggccgtgagcatgttcctgggcgccgtggaggaggccaagaaggagggcggcaccgtggtgtacggcggcaaggtgatggacagacccggcaactacgtggagcccaccatcgtgaccggcctgggccacgacgccagcatcgcccacaccgagaccttcgcccccatcctgtacgtgttcaagttcaagaacgaggaggaggtgttcgcctggaacaacgaggtgaagcagggcctgagcagcagcatcttcaccaaggacctgggcagaatcttcagatggctgggccccaagggcagcgactgcggcatcgtgaacgtgaacatccccaccagcggcgccgagatcggcggcgccttcggcggcgagaagcacaccggcggcggcagagagagcggcagcgacgcctggaagcagtacatgagaagaagcacctgcaccatcaactacagcaaggacctgcccctggcccagggcatcaagttccagtag

SEQ ID NO: 72445 - DNA, 1509 bp, synthetic construct
  misc_feature 1..1509: note = Description of Artificial Sequence: Synthetic coding sequence
  source 1..1509: mol_type = other DNA
atgggcagccccggcagaggcgccggcctgtacttcagcagcagccagggcctgggcctgatccccagccccggcctgagcatgtggagactgcccagagccctgtgcgtgcacgccgccaagaccagcaagctgagcggcccctggagcagacccgccgccttcatgagcaccctgctgatcaaccagccccagtacgcctggctgaaggagctgggcctgagagaggagaacgagggcgtgtacaacggcagctggggcggcagaggcgaggtgatcaccacctactgccccgccaacaacgagcccatcgccagagtgagacaggccagcgtggccgactacgaggagaccgtgaagaaggccagagaggcctggaagatctgggccgacatccccgcccccaagagaggcgagatcgtgagacagatcggcgacgccctgagagagaagatccaggtgctgggcagcctggtgagcctggagatgggcaagatcctggtggagggcgtgggcgaggtgcaggagtacgtggacatctgcgactacgccgtgggcctgagcagaatgatcggcggccccatcctgcccagcgagagaagcggccacgccctgatcgagcagtggaaccccgtgggcctggtgggcatcatcaccgccttcaacttccccgtggccgtgtacggctggaacaacgccatcgccatgatctgcggcaacgtgtgcctgtggaagggcgcccccaccaccagcctgatcagcgtggccgtgaccaagatcatcgccaaggtgctggaggacaacaagctgcccggcgccatctgcagcctgacctgcggcggcgccgacatcggcaccgccatggccaaggacgagagagtgaacctgctgagcttcaccggcagcacccaggtgggcaagcaggtgggcctgatggtgcaggagagattcggcagaagcctgctggagctgggcggcaacaacgccatcatcgccttcgaggacgccgacctgagcctggtggtgcccagcgccctgttcgccgccgtgggcaccgccggccagagatgcaccaccgccagaagactggtgatggacagacccggcaactacgtggagcccaccatcgtgaccggcctgggccacgacgccagcatcgcccacaccgagaccttcgcccccatcctgtacgtgttcaagttcaagaacgaggaggaggtgttcgcctggaacaacgaggtgaagcagggcctgagcagcagcatcttcaccaaggacctgggcagaatcttcagatggctgggccccaagggcagcgactgcggcatcgtgaacgtgaacatccccaccagcggcgccgagatcggcggcgccttcggcggcgagaagcacaccggcggcggcagagagagcggcagcgacgcctggaagcagtacatgagaagaagcacctgcaccatcaactacagcaaggacctgcccctggcccagggcatcaagttccagtag

SEQ ID NO: 72446 - DNA, 1314 bp, synthetic construct
  misc_feature 1..1314: note = Description of Artificial Sequence: Synthetic coding sequence
  source 1..1314: mol_type = other DNA
atggccggcaccaacgccctgctgatgctggagaacttcatcgacggcaagttcctgccctgcagcagctacatcgacagctacgaccccagcaccggcgaggtgtactgcagagtgcccaacagcggcaaggacgagatcgaggccgccgtgaaggccgccagagaggccttccccagctggagcagcagaagcccccaggagagaagcagagtgctgaaccaggtggccgacctgctggagcagagcctggaggagttcgcccaggccgagagcaaggaccagggcaagaccctggccctggccagaaccatggacatccccagaagcgtgcagaacttcagattcttcgccagcagcagcctgcaccacaccagcgagtgcacccagatggaccacctgggctgcatgcactacaccgtgagagcccccgtgggcgtgggcgtgccccccggcgtggtgaacatcgtgttcggcaccggccccagagtgggcgaggccctggtgagccaccccgaggtgcccctgatcagcttcaccggcagccagcccaccgccgagagaatcacccagctgagcgccccccactgcaagaagctgagcctggagctgggcggcaagaaccccgccatcatcttcgaggacgccaacctggacgagtgcatccccgccaccgtgagaagcagcttcgccaaccagggcgagatctgcctgtgcaccagcagaatcttcgtgcagaagagcatctacagcgagttcctgaagagattcgtggaggccaccagaaagtggaaggtgggcatccccagcgaccccctggtgagcatcggcgccctgatcagcaaggcccacctggagaaggtgagaagctacgtgaagagagccctggccgagggcgcccagatctggtgcggcgagggcgtggacaagctgagcctgcccgccagaaaccaggccggctacttcatgctgcccaccgtgatcaccgacatcaaggacgagagctgctgcatgaccgaggagatcttcggccccgtgacctgcgtggtgcccttcgacagcgaggaggaggtgatcgagagagccaacaacgtgaagtacggcctggccgccaccgtgtggagcagcaacgtgggcagagtgcacagagtggccaagaagctgcagagcggcctggtgtggaccaactgctggctgatcagagagctgaacctgcccttcggcggcatgaagagcagcggcatcggcagagagggcgccaaggacagctacgacttcttcaccgagatcaagaccatcaccgtgaagcactag

SEQ ID NO: 72447 - DNA, 1464 bp, synthetic construct
  misc_feature 1..1464: note = Description of Artificial Sequence: Synthetic coding sequence
  source 1..1464: mol_type = other DNA
atggccggcaccaacgccctgctgatgctggagaacttcatcgacggcaagttcctgccctgcagcagctacatcgacagctacgaccccagcaccggcgaggtgtactgcagagtgcccaacagcggcaaggacgagatcgaggccgccgtgaaggccgccagagaggccttccccagctggagcagcagaagcccccaggagagaagcagagtgctgaaccaggtggccgacctgctggagcagagcctggaggagttcgcccaggccgagagcaaggaccagggcaagaccctggccctggccagaaccatggacatccccagaagcgtgcagaacttcagattcttcgccagcagcagcctgcaccacaccagcgagtgcacccagatggaccacctgggctgcatgcactacaccgtgagagcccccgtgggcgtggccggcctgatcagcccctggaacctgcccctgtacctgctgacctggaagatcgcccccgccatggccgccggcaacaccgtgatcgccaagcccagcgagctgaccagcgtgaccgcctggatgctgtgcaagctgctggacaaggccggcgtgccccccggcgtggtgaacatcgtgttcggcaccggccccagagtgggcgaggccctggtgagccaccccgaggtgcccctgatcagcttcaccggcagccagcccaccgccgagagaatcacccagctgagcgccccccactgcaagaagctgagcctggagctgggcggcaagaaccccgccatcatcttcgaggacgccaacctggacgagtgcatccccgccaccgtgagaagcagcttcgccaaccagggcgagatctgcctgtgcaccagcagaatcttcgtgcagaagagcatctacagcgagttcctgaagagattcgtggaggccaccagaaagtggaaggtgggcatccccagcgaccccctggtgagcatcggcgccctgatcagcaaggcccacctggagaaggtgagaagctacgtgaagagagccctggccgagggcgcccagatctggtgcggcgagggcgtggacaagctgagcctgcccgccagaaaccaggccggctacttcatgctgcccaccgtgatcaccgacatcaaggacgagagctgctgcatgaccgaggagatcttcggccccgtgacctgcgtggtgcccttcgacagcgaggaggaggtgatcgagagagccaacaacgtgaagtacggcctggccgccaccgtgtggagcagcaacgtgggcagagtgcacagagtggccaagaagctgcagagcggcctggtgtggaccaactgctggctgatcagagagctgaacctgcccttcggcggcatgaagagcagcggcatcggcagagagggcgccaaggacagctacgacttcttcaccgagatcaagaccatcaccgtgaagcactag

SEQ ID NO: 72448 - DNA, 1302 bp, synthetic construct
  misc_feature 1..1302: note = Description of Artificial Sequence: Synthetic coding sequence
  source 1..1302: mol_type = other DNA
atggccggcaccaacgccctgctgatgctggagaacttcatcgacggcaagttcctgccctgcagcagctacatcgacagctacgaccccagcaccggcgaggtgtactgcagagtgcccaacagcggcaaggacgagatcgaggccgccgtgaaggccgccagagaggccttccccagctggagcagcagaagcccccaggagagaagcagagtgctgaaccaggtggccgacctgctggagcagagcctggaggagttcgcccaggccgagagcaaggaccagggcaagaccctggccctggccagaaccatggacatccccagaagcgtgcagaacttcagattcttcgccagcagcagcctgcaccacaccagcgagtgcacccagatggaccacctgggctgcatgcactacaccgtgagagcccccgtgggcgtggccggcctgatcagcccctggaacctgcccctgtacctgctgacctggaagatcgcccccgccatggccgccggcaacaccgtgatcgccaagcccagcgagctgaccagcgtgaccgcctggatgctgtgcaagctgctggacaaggccggcgtgccccccggcgtggtgaacatcgtgttcggcaccggccccagagtgggcgaggccctggtgagccaccccgaggtgcccctgatcagcttcaccggcagccagcccaccgccgagagaatcacccagctgagcgccccccactgcaagaagctgagcctggagctgggcggcaagaaccccgccatcatcttcgaggacgccaacctggacgagtgcatccccgccaccgtgagaagcagcttcgccaaccaggtgagaagctacgtgaagagagccctggccgagggcgcccagatctggtgcggcgagggcgtggacaagctgagcctgcccgccagaaaccaggccggctacttcatgctgcccaccgtgatcaccgacatcaaggacgagagctgctgcatgaccgaggagatcttcggccccgtgacctgcgtggtgcccttcgacagcgaggaggaggtgatcgagagagccaacaacgtgaagtacggcctggccgccaccgtgtggagcagcaacgtgggcagagtgcacagagtggccaagaagctgcagagcggcctggtgtggaccaactgctggctgatcagagagctgaacctgcccttcggcggcatgaagagcagcggcatcggcagagagggcgccaaggacagctacgacttcttcaccgagatcaagaccatcaccgtgaagcactag

SEQ ID NO: 72449 - DNA, 1557 bp, synthetic construct
  misc_feature 1..1557: note = Description of Artificial Sequence: Synthetic coding sequence
  source 1..1557: mol_type = other DNA
atgttcctgagagccggcctggccgccctgagccccctgctgagaagcctgagacccagccccgtggccgccatgagcaccggcaccttcgtggtgagccagcccctgaactacagaggcggcgccagagtggagcccgccgacgccagcggcaccgagaaggccttcgagcccgccaccggcagagtgatcgccaccttcacctgcagcggcgagaaggaggtgaacctggccgtgcagaacgccaaggccgccttcaagatctggagccagaagagcggcatggagagatgcagaatcctgctggaggccgccagaatcatcagagagagagaggacgagatcgccaccatggagtgcatcaacaacggcaagagcatcttcgaggccagactggacatcgacatcagctggcagtgcctggagtactacgccggcctggccgccagcatggccggcgagcacatccagctgcccggcggcagcttcggctacaccagaagagagcccctgggcgtgtgcgtgggcatcggcgcctggaactaccccttccagatcgccagctggaagagcgcccccgccctggcctgcggcaacgccatggtgttcaagcccagccccttcacccccgtgagcgccctgctgctggccgagatctacagcgaggccggcgtgccccccggcctgttcaacgtggtgcagggcggcgccgccaccggccagttcctgtgccagcaccccgacgtggccaaggtgagcttcaccggcagcgtgcccaccggcatgaagatcatggagatgagcgccaagggcatcaagcccgtgaccctggagctgggcggcaagagccccctgatcatcttcagcgactgcgacatgaacaacgccgtgaagggcgccctgatggccaacttcctgacccagggccaggtgtgctgcaacggcaccagagtgttcgtgcagaaggagatcctggacaagttcaccgaggaggtggtgaagcagacccagagaatcaagatcggcgaccccctgctggaggacaccagaatgggccccctgatcaacagaccccacctggagagagtgctgggcttcgtgaaggtggccaaggagcagggcgccaaggtgctgtgcggcggcgacatctacgtgcccgaggaccccaagctgaaggacggctactacatgagaccctgcgtgctgaccaactgcagagacgacatgacctgcgtgaaggaggagatcttcggccccgtgatgagcatcctgagcttcgacaccgaggccgaggtgctggagagagccaacgacaccaccttcggcctggccgccggcgtgttcaccagagacatccagagagcccacagagtggtggccgagctgcaggccggcacctgcttcatcaacaactacaacgtgagccccgtggagctgcccttcggcggctacaagaagagcggcttcggcagagagaacggcagagtgaccatcgagtactacagccagctgaagaccgtgtgcgtggagatgggcgacgtggagagcgccttctag

SEQ ID NO: 72450 - DNA, 1275 bp, synthetic construct
  misc_feature 1..1275: note = Description of Artificial Sequence: Synthetic coding sequence
  source 1..1275: mol_type = other DNA
atggagagatgcagaatcctgctggaggccgccagaatcatcagagagagagaggacgagatcgccaccatggagtgcatcaacaacggcaagagcatcttcgaggccagactggacatcgacatcagctggcagtgcctggagtactacgccggcctggccgccagcatggccggcgagcacatccagctgcccggcggcagcttcggctacaccagaagagagcccctgggcgtgtgcgtgggcatcggcgcctggaactaccccttccagatcgccagctggaagagcgcccccgccctggcctgcggcaacgccatggtgttcaagcccagccccttcacccccgtgagcgccctgctgctggccgagatctacagcgaggccggcgtgccccccggcctgttcaacgtggtgcagggcggcgccgccaccggccagttcctgtgccagcaccccgacgtggccaaggtgagcttcaccggcagcgtgcccaccggcatgaagatcatggagatgagcgccaagggcatcaagcccgtgaccctggagctgggcggcaagagccccctgatcatcttcagcgactgcgacatgaacaacgccgtgaagggcgccctgatggccaacttcctgacccagggccaggtgtgctgcaacggcaccagagtgttcgtgcagaaggagatcctggacaagttcaccgaggaggtggtgaagcagacccagagaatcaagatcggcgaccccctgctggaggacaccagaatgggccccctgatcaacagaccccacctggagagagtgctgggcttcgtgaaggtggccaaggagcagggcgccaaggtgctgtgcggcggcgacatctacgtgcccgaggaccccaagctgaaggacggctactacatgagaccctgcgtgctgaccaactgcagagacgacatgacctgcgtgaaggaggagatcttcggccccgtgatgagcatcctgagcttcgacaccgaggccgaggtgctggagagagccaacgacaccaccttcggcctggccgccggcgtgttcaccagagacatccagagagcccacagagtggtggccgagctgcaggccggcacctgcttcatcaacaactacaacgtgagccccgtggagctgcccttcggcggctacaagaagagcggcttcggcagagagaacggcagagtgaccatcgagtactacagccagctgaagaccgtgtgcgtggagatgggcgacgtggagagcgccttctag

SEQ ID NO: 72451 - DNA, 4017 bp, synthetic construct
  misc_feature 1..4017: note = Description of Artificial Sequence: Synthetic coding sequence
  source 1..4017: mol_type = other DNA
atggacagagccagcgagctgctgttctacgtgaacggcagaaaggtgatcgagaagaacgtggaccccgagaccatgctgctgccctacctgagaaagaagctgagactgaccggcaccaagtacggctgcggcggcggcggctgcggcgcctgcaccgtgatgatcagcagatacaaccccatcaccaagagaatcagacaccaccccgccaacgcctgcctgatccccatctgcagcctgtacggcgccgccgtgaccaccgtggagggcatcggcagcacccacaccagaatccaccccgtgcaggagagaatcgccaagtgccacggcacccagtgcggcttctgcacccccggcatggtgatgagcatctacaccctgctgagaaaccaccccgagcccaccctggaccagctgaccgacgccctgggcggcaacctgtgcagatgcaccggctacagacccatcatcgacgcctgcaagaccttctgcaagaccagcggctgctgccagagcaaggagaacggcgtgtgctgcctggaccagggcatcaacggcctgcccgagttcgaggagggcagcaagaccagccccaagctgttcgccgaggaggagttcctgcccctggaccccacccaggagctgatcttcccccccgagctgatgatcatggccgagaagcagagccagagaaccagagtgttcggcagcgagagaatgatgtggttcagccccgtgaccctgaaggagctgctggagttcaagttcaagtacccccaggcccccgtgatcatgggcaacaccagcgtgggccccgaggtgaagttcaagggcgtgttccaccccgtgatcatcagccccgacagaatcgaggagctgagcgtggtgaaccacgcctacaacggcctgaccctgggcgccggcctgagcctggcccaggtgaaggacatcctggccgacgtggtgcagaagctgcccgaggagaagacccagatgtaccacgccctgctgaagcacctgggcaccctggccggcagccagatcagaaacatggccagcctgggcggccacatcatcagcagacaccccgacagcgacctgaaccccatcctggccgtgggcaactgcaccctgaacctgctgagcaaggagggcaagagacagatccccctgaacgagcagttcctgagcaagtgccccaacgccgacctgaagccccaggagatcctggtgagcgtgaacatcccctacagcagaaagtgggagttcgtgagcgccttcagacaggcccagagacaggagaacgccctggccatcgtgaacagcggcatgagagtgttcttcggcgagggcgacggcatcatcagagagctgtgcatcagctacggcggcgtgggccccgccaccatctgcgccaagaacagctgccagaagctgatcggcagacactggaacgagcagatgctggacatcgcctgcagactgatcctgaacgaggtgagcctgctgggcagcgcccccggcggcaaggtggagttcaagagaaccctgatcatcagcttcctgttcaagttctacctggaggtgagccagatcctgaagaagatggaccccgtgcactaccccagcctggccgacaagtacgagagcgccctggaggacctgcacagcaagcaccactgcagcaccctgaagtaccagaacatcggccccaagcagcaccccgaggaccccatcggccaccccatcatgcacctgagcggcgtgaagcacgccaccggcgaggccatctactgcgacgacatgcccctggtggaccaggagctgttcctgaccttcgtgaccagcagcagagcccacgccaagatcgtgagcatcgacctgagcgaggccctgagcatgcccggcgtggtggacatcatgaccgccgagcacctgagcgacgtgaacagcttctgcttcttcaccgaggccgagaagttcctggccaccgacaaggtgttctgcgtgggccagctggtgtgcgccgtgctggccgacagcgaggtgcaggccaagagagccgccaagagagtgaagatcgtgtaccaggacctggagcccctgatcctgaccatcgaggagagcatccagcacaacagcagcttcaagcccgagagaaagctggagtacggcaacgtggacgaggccttcaaggtggtggaccagatcctggagggcgagatccacatgggcggccaggagcacttctacatggagacccagagcatgctggtggtgcccaagggcgaggaccaggagatggacgtgtacgtgagcacccagttccccaagtacatccaggacatcgtggccagcaccctgaagctgcccgccaacaaggtgatgtgccacgtgagaagagtgggcggcgccttcggcggcaaggtgctgaagaccggcatcatcgccgccgtgaccgccttcgccgccaacaagcacggcagagccgtgagatgcgtgctggagagaggcgaggacatgctgatcaccggcggcagacacccctacctgggcaagtacaaggccggcttcatgaacgacggcagaatcctggccctggacatggagcactacagcaacgccggcgccagcctggacgagagcctgttcgtgatcgagatgggcctgctgaagatggacaacgcctacaagttccccaacctgagatgcagaggctgggcctgcagaaccaacctgcccagcaacaccgccttcagaggcttcggcttcccccaggccgccctgatcaccgagagctgcatcaccgaggtggccgccaagtgcggcctgagccccgagaaggtgagaatcatcaacatgtacaaggagatcgaccagaccccctacaagcaggagatcaacgccaagaacctgatccagtgctggagagagtgcatggccatgagcagctacagcctgagaaaggtggccgtggagaagttcaacgccgagaactactggaagaagaagggcctggccatggtgcccctgaagttccccgtgggcctgggcagcagagccgccggccaggccgccgccctggtgcacatctacctggacggcagcgtgctggtgacccacggcggcatcgagatgggccagggcgtgcacaccaagatgatccaggtggtgagcagagagctgagaatgcccatgagcaacgtgcacctgagaggcaccagcaccgagaccgtgcccaacgccaacatcagcggcggcagcgtggtggccgacctgaacggcctggccgtgaaggacgcctgccagaccctgctgaagagactggagcccatcatcagcaagaaccccaagggcacctggaaggactgggcccagaccgccttcgacgagagcatcaacctgagcgccgtgggctacttcagaggctacgagagcgacatgaactgggagaagggcgagggccagcccttcgagtacttcgtgtacggcgccgcctgcagcgaggtggagatcgactgcctgaccggcgaccacaagaacatcagaaccgacatcgtgatggacgtgggctgcagcatcaaccccgccatcgacatcggccagatcgagggcgccttcatccagggcatgggcctgtacaccatcgaggagctgaactacagcccccagggcatcctgcacaccagaggccccgaccagtacaagatccccgccatctgcgacatgcccaccgagctgcacatcgccctgctgccccccagccagaacagcaacaccctgtacagcagcaagggcctgggcgagagcggcgtgttcctgggctgcagcgtgttcttcgccatccacgacgccgtgagcgccgccagacaggagagaggcctgcacggccccctgaccctgaacagccccctgacccccgagaagatcagaatggcctgcgaggacaagttcaccaagatgatccccagagacgagcccggcagctacgtgccctggaacgtgcccatctag

SEQ ID NO: 72452 - DNA, 456 bp, synthetic construct
  misc_feature 1..456: note = Description of Artificial Sequence: Synthetic coding sequence
  source 1..456: mol_type = other DNA
atgctgctgccctacctgagaaagaagctgagactgaccggcaccaagtacggctgcggcggcggcggctgcggcgcctgcaccgtgatgatcagcagatacaaccccatcaccaagagaatcagacaccaccccgccaacgcctgcctgatccccatctgcagcctgtacggcgccgccgtgaccaccgtggagggcatcggcagcacccacaccagaatccaccccgtgcaggagagaatcgccaagtgccacggcacccagtgcggcttctgcacccccggcatggtgatgagcatctacaccctgctgagaaaccaccccgagcccaccctggaccagctgaccgacgccctgggcggcaacctgtgcagatgcaccggctacagacccatcatcgacgcctgcaagaccttctgcaagaccagcggctgctgccagagcaaggagaactag

SEQ ID NO: 72453 - DNA, 858 bp, synthetic construct
  misc_feature 1..858: note = Description of Artificial Sequence: Synthetic coding sequence
  source 1..858: mol_type = other DNA
atggacctgagcgccgccagccacagaatccccctgagcgacggcaacagcatccccatcatcggcctgggcacctacagcgagcccaagagcacccccaagggcgcctgcgccaccagcgtgaaggtggccatcgacaccggctacagacacatcgacggcgcctacatctaccagaacgagcacgaggtgggcgaggccatcagagagaagatcgccgagggcaaggtgagaagagaggacatcttctactgcggcaagctgtgggccaccaaccacgtgcccgagatggtgagacccaccctggagagaaccctgagagtgctgcagctggactacgtggacctgtacatcatcgaggtgcccatggccttcaagcccggcgacgagatctaccccagagacgagaacggcaagtggctgtaccacaagagcaacctgtgcgccacctgggaggtggagtgccacccctacttcacccagcccaagctgctgaagttctgccagcagcacgacatcgtgatcaccgcctacagccccctgggcaccagcagaaaccccatctgggtgaacgtgagcagcccccccctgctgaaggacgccctgctgaacagcctgggcaagagatacaacaagaccgccgcccagatcgtgctgagattcaacatccagagaggcgtggtggtgatccccaagagcttcaacctggagagaatcaaggagaacttccagatcttcgacttcagcctgaccgaggaggagatgaaggacatcgaggccctgaacaagaacgtgagattcgtggagctgctgatgtggagagaccaccccgagtaccccttccacgacgagtactag

SEQ ID NO: 72454 - DNA, 873 bp, synthetic construct
  misc_feature 1..873: note = Description of Artificial Sequence: Synthetic coding sequence
  source 1..873: mol_type = other DNA
atggacctgagcgccgccagccacagaatccccctgagcgacggcaacagcatccccatcatcggcctgggcacctacagcgagcccaagagcacccccaagggcgcctgcgccaccagcgtgaaggtggccatcgacaccggctacagacacatcgacggcgcctacatctaccagaacgagcacgaggtgggcgaggccatcagagagaagatcgccgagggcaaggtgagaagagaggacatcttctactgcggcaagctgtgggccaccaaccacgtgcccgagatggtgagacccaccctggagagaaccctgagagtgctgcagctggactacgtggacctgtacatcatcgaggtgcccatggccttcaagcccggcgacgagatctaccccagagacgagaacggcaagtggctgtaccacaagagcaacctgtgcgccacctgggaggccatggaggcctgcaaggacgccggcctggtgaagagcctgggcgtgagcaacttcaacagaagacagctggagctgatcctgaacaagcccggcctgaagcacaagcccgtgagcaaccaggtggagtgccacccctacttcacccagcccaagctgctgaagttctgccagcagcacgacatcgtgatcaccgcctacagccccctgggcaccagcagaaaccccatctgggtgaacgtgagcagcccccccctgctgaaggacgccctgctgaacagcctgggcaagagatacaacaagaccgccgcccagatcgtgctgagattcaacatccagagaggcgtggtggtgatccccaagagcttcaacctggagagaatcaaggagaacttccaggtggccagaagcagctag

SEQ ID NO: 72455 - DNA, 978 bp, synthetic construct
  misc_feature 1..978: note = Description of Artificial Sequence: Synthetic coding sequence
  source 1..978: mol_type = other DNA
atggccgccagctgcgtgctgctgcacaccggccagaagatgcccctgatcggcctgggcacctggaagagcgagcccggccaggtgaaggccgccgtgaagtacgccctgagcgtgggctacagacacatcgactgcgccgccatctacggcaacgagcccgagatcggcgaggccctgaaggaggacgtgggccccggcaaggccgtgcccagagaggagctgttcgtgaccagcaagctgtggaacaccaagcaccaccccgaggacgtggagcccgccctgagaaagaccctggccgacctgcagctggagtacctggacctgtacctgatgcactggccctacgccttcgagagaggcgacaaccccttccccaagaacgccgacggcaccatctgctacgacagcacccactacaaggagacctggaaggccctggaggccctggtggccaagggcctggtgcaggccctgggcctgagcaacttcaacagcagacagatcgacgacatcctgagcgtggccagcgtgagacccgccgtgctgcaggtggagtgccacccctacctggcccagaacgagctgatcgcccactgccaggccagaggcctggaggtgaccgcctacagccccctgggcagcagcgacagagcctggagagaccccgacgagcccgtgctgctggaggagcccgtggtgctggccctggccgagaagtacggcagaagccccgcccagatcctgctgagatggcaggtgcagagaaaggtgatctgcatccccaagagcatcacccccagcagaatcctgcagaacatcaaggtgttcgacttcaccttcagccccgaggagatgaagcagctgaacgccctgaacaagaactggagatacatcgtgcccatgctgaccgtggacggcaagagagtgcccagagacgccggccaccccctgtaccccttcaacgacccctactag

SEQ ID NO: 72456 - DNA, 978 bp, synthetic construct; identical to SEQ ID NO: 72455
  misc_feature 1..978: note = Description of Artificial Sequence: Synthetic coding sequence
  source 1..978: mol_type = other DNA

SEQ ID NO: 72457 - DNA, 444 bp, synthetic construct
  misc_feature 1..444: note = Description of Artificial Sequence: Synthetic coding sequence
  source 1..444: mol_type = other DNA
atggccgccagctgcgtgctgctgcacaccggccagaagatgcccctgatcggcctgggcacctggaagagcgagcccggccaggtgaaggccgccgtgaagtacgccctgagcgtgggctacagacacatcgactgcgccgccatctacggcaacgagcccgagatcggcgaggccctgaaggaggacgtgggccccggcaaggccgtgcccagagaggagctgttcgtgaccagcaagctgtggaacaccaagcaccaccccgaggacgtggagcccgccctgagaaagaccctggccgacctgcagctggagtacctggacctgtacctgatgcactggccctacgccttcgagagaggcgacaaccccttccccaagaacgccgacggcaccatctgctacgacagcacccactacaaggagacctggaaggccctgtag

SEQ ID NO: 72458 - DNA, 951 bp, synthetic construct
  misc_feature 1..951: note = Description of Artificial Sequence: Synthetic coding sequence
  source 1..951: mol_type = other DNA
atggccagcagactgctgctgaacaacggcgccaagatgcccatcctgggcctgggcacctggaagagcccccccggccaggtgaccgaggccgtgaaggtggccatcgacgtgggctacagacacatcgactgcgcccacgtgtaccagaacgagaacgaggtgggcgtggccatccaggagaagctgagagagcaggtggtgaagagagaggagctgttcatcgtgagcaagctgtggtgcacctaccacgagaagggcctggtgaagggcgcctgccagaagaccctgagcgacctgaagctggactacctggacctgtacctgatccactggcccaccggcttcaagcccggcaaggagttcttccccctggacgagagcggcaacgtggtgcccagcgacaccaacatcctggacacctgggccgccatggaggagctggtggacgagggcctggtgaaggccatcggcatcagcaacttcaaccacctgcaggtggagatgatcctgaacaagcccggcctgaagtacaagcccgccgtgaaccagatcgagtgccacccctacctgacccaggagaagctgatccagtactgccagagcaagggcatcgtggtgaccgcctacagccccctgggcagccccgacagaccctgggccaagcccgaggaccccagcctgctggaggaccccagaatcaaggccatcgccgccaagcacaacaagaccaccgcccaggtgctgatcagattccccatgcagagaaacctggtggtgatccccaagagcgtgacccccgagagaatcgccgagaacttcaaggtgttcgacttcgagctgagcagccaggacatgaccaccctgctgagctacaacagaaactggagagtgtgcgccctgctgagctgcaccagccacaaggactaccccttccacgaggagttctag

SEQ ID NO: 72459 - DNA, 618 bp, synthetic construct
  misc_feature 1..618: note = Description of Artificial Sequence: Synthetic coding sequence
  source 1..618: mol_type = other DNA
atgggcgtggtgagcctgttcctgtgcatcgtggagcagatcttcaccagcagcaagaagatccagttcagaggcatcttcatggccaaggtgcccaagagcaaggccctggaggccaccaagctggccatcgaggccggcttcagacacatcgacagcgcccacctgtacaacaacgaggagcaggtgggcctggccatcagaagcaagatcgccgacggcagcgtgaagagagaggacatcttctacaccagcaagctgtggtgcaacagccacagacccgagctggtgagacccgccctggagagaagcctgaagaacctgcagctggactacgtggacctgtacctgatccacttccccgtgagcgtgaagcccggcgaggaggtgatccccaaggacgagaacggcaagatcctgttcgacaccgtggacctgtgcgccacctgggaggccgtggagaagtgcaaggacgccggcctggccaagagcatcggcgtgagcaacttcaacagaagacagctggagatgatcctgaacaagcccggcctgaagtacaagcccgtgtgcaaccagcccagagacaacagcatcttcagcctgagccccgactggtag

SEQ ID NO: 72460 - DNA, 972 bp, synthetic construct
  misc_feature 1..972: note = Description of Artificial Sequence: Synthetic coding sequence
  source 1..972: mol_type = other DNA
atggacagcaagtaccagtgcgtgaagctgaacgacggccacttcatgcccgtgctgggcttcggcacctacgcccccgccgaggtgcccaagagcaaggccctggaggccaccaagctggccatcgaggccggcttcagacacatcgacagcgcccacctgtacaacaacgaggagcaggtgggcctggccatcagaagcaagatcgccgacggcagcgtgaagagagaggacatcttctacaccagcaagctgtggtgcaacagccacagacccgagctggtgagacccgccctggagagaagcctgaagaacctgcagctggactacgtggacctgtacctgatccacttccccgtgagcgtgaagcccggcgaggaggtgatccccaaggacgagaacggcaagatcctgttcgacaccgtggacctgtgcgccacctgggaggccgtggagaagtgcaaggacgccggcctggccaagagcatcggcgtgagcaacttcaacagaagacagctggagatgatcctgaacaagcccggcctgaagtacaagcccgtgtgcaaccaggtggagtgccacccctacttcaaccagagaaagctgctggacttctgcaagagcaaggacatcgtgctggtggcctacagcgccctgggcagccacagagaggagccctgggtggaccccaacagccccgtgctgctggaggaccccgtgctgtgcgccctggccaagaagcacaagagaacccccgccctgatcgccctgagataccagctgcagagaggcgtggtggtgctggccaagagctacaacgagcagagaatcagacagaacgtgcaggtgttcgagttccagctgaccagcgaggagatgaaggccatcgacggcctgaacagaaacgtgagatacctgaccctggacatcttcgccggcccccccaactaccccttcagcgacgagtactag

SEQ ID NO: 72461 - DNA, 972 bp, synthetic construct; identical to SEQ ID NO: 72460
  misc_feature 1..972: note = Description of Artificial Sequence: Synthetic coding sequence
  source 1..972: mol_type = other DNA

SEQ ID NO: 72462 - DNA, 747 bp, synthetic construct
  misc_feature 1..747: note = Description of Artificial Sequence: Synthetic coding sequence
  source 1..747: mol_type = other DNA
tgaagcaagtaccagtgcgtgaagctgaacgacggccacttcatgcccgtgctgggcttcggcacctacgcccccgccgaggtgggcctggccatcagaagcaagatcgccgacggcagcgtgaagagagaggacatcttctacaccagcaagctgtggtgcaacagccacagacccgagctggtgagacccgccctggagagaagcctgaagaacctgcagctggactacgtggacctgtacctgatccacttccccgtgagcgtgaagcccggcgaggaggtgatccccaaggacgagaacggcaagatcctgttcgacaccgtggacctgtgcgccacctgggaggccgtggagaagtgcaaggacgccggcctggccaagagcatcggcgtgagcaacttcaacagaagacagctggagatgatcctgaacaagcccggcctgaagtacaagcccgtgtgcaaccaggtggagtgccacccctacttcaaccagagaaagctgctggacttctgcaagagcaaggacatcgtgctggtggcctacagcgccctgggcagccacagagaggagccctgggtggaccccaacagccccgtgctgctggaggaccccgtgctgtgcgccctggccaagaagcacaagagaacccccgccctgatcgccctgagataccagctgcagagaggcgtggtggtgctggccaagagctacaacgagcagagaatcagacagaacgtgtag

SEQ ID NO: 72463 - DNA, 972 bp, synthetic construct
  misc_feature 1..972: note = Description of Artificial Sequence: Synthetic coding sequence
  source 1..972: mol_type = other DNA
atggacagcaagtaccagtgcgtgaagctgaacgacggccacttcatgcccgtgctgggcttcggcacctacgcccccgccgaggtgcccaagagcaaggccctggaggccgtgaagctggccatcgaggccggcttccaccacatcgacagcgcccacgtgtacaacaacgaggagcaggtgggcctggccatcagaagcaagatcgccgacggcagcgtgaagagagaggacatcttctacaccagcaagctgtggagcaacagccacagacccgagctggtgagacccgccctggagagaagcctgaagaacctgcagctggactacgtggacctgtacctgatccacttccccgtgagcgtgaagcccggcgaggaggtgatccccaaggacgagaacggcaagatcctgttcgacaccgtggacctgtgcgccacctgggaggccatggagaagtgcaaggacgccggcctggccaagagcatcggcgtgagcaacttcaaccacagactgctggagatgatcctgaacaagcccggcctgaagtacaagcccgtgtgcaaccaggtggagtgccacccctacttcaaccagagaaagctgctggacttctgcaagagcaaggacatcgtgctggtggcctacagcgccctgggcagccacagagaggagccctgggtggaccccaacagccccgtgctgctggaggaccccgtgctgtgcgccctggccaagaagcacaagagaacccccgccctgatcgccctgagataccagctgcagagaggcgtggtggtgctggccaagagctacaacgagcagagaatcagacagaacgtgcaggtgttcgagttccagctgaccagcgaggagatgaaggccatcgacggcctgaacagaaacgtgagatacctgaccctggacatcttcgccggcccccccaactaccccttcagcgacgagtactag

SEQ ID NO: 72464 - DNA, 972 bp, synthetic construct; identical to SEQ ID NO: 72463
  misc_feature 1..972: note = Description of Artificial Sequence: Synthetic coding sequence
  source 1..972: mol_type = other DNA

SEQ ID NO: 72465 - DNA, 894 bp, synthetic construct
  misc_feature 1..894: note = Description of Artificial Sequence: Synthetic coding sequence
  source 1..894: mol_type = other DNA
atggacagcaagtaccagtgcgtgaagctgaacgacggccacttcatgcccgtgctgggcttcggcacctacgcccccgccgaggtgcccaagagcaaggccctggaggccgtgaagctggccatcgaggccggcttccaccacatcgacagcgcccacgtgtacaacaacgaggagcaggtgggcctggccatcagaagcaagatcgccgacggcagcgtgaagagagaggacatcttctacaccagcaagctgtggagcaacagccacagacccgagctggtgagacccgccctggagagaagcctgaagaacctgcagctggactacgtggacctgtacctgatccacttccccgtgagcgtgaaggccatggagaagtgcaaggacgccggcctggccaagagcatcggcgtgagcaacttcaaccacagactgctggagatgatcctgaacaagcccggcctgaagtacaagcccgtgtgcaaccaggtggagtgccacccctacttcaaccagagaaagctgctggacttctgcaagagcaaggacatcgtgctggtggcctacagcgccctgggcagccacagagaggagccctgggtggaccccaacagccccgtgctgctggaggaccccgtgctgtgcgccctggccaagaagcacaagagaacccccgccctgatcgccctgagataccagctgcagagaggcgtggtggtgctggccaagagctacaacgagcagagaatcagacagaacgtgcaggtgttcgagttccagctgaccagcgaggagatgaaggccatcgacggcctgaacagaaacgtgagatacctgaccctggacatcttcgccggcccccccaactaccccttcagcgacgagtactag

SEQ ID NO: 72466 - DNA, 420 bp, synthetic construct
  misc_feature 1..420: note = Description of Artificial Sequence: Synthetic coding sequence
  source 1..420: mol_type = other DNA
atggacagcaagtaccagtgcgtgaagctgaacgacggccacttcatgcccgtgctgggcttcggcacctacgcccccgccgaggtgcccaagagcaaggccctggaggccgtgaagctggccatcgaggccggcttccaccacatcgacagcgcccacgtgtacaacaacgaggagcaggtgggcctggccatcagaagcaagatcgccgacggcagcgtgaagagagaggacatcttctacaccagcaagctgtggagcaacagccacagacccgagctggtgagacccgccctggagagaagcctgaagaacctgcagctggactacgtggacctgtacctgatccacttccccgtgagcgtgaaggaggacatcggcatcctgacctggaagaagagccccaagcacaacagctag

SEQ ID NO: 72467 - DNA, 972 bp, synthetic construct
  misc_feature 1..972: note = Description of Artificial Sequence: Synthetic coding sequence
  source 1..972: mol_type = other DNA
atggacagcaagcaccagtgcgtgaagctgaacgacggccacttcatgcccgtgctgggcttcggcacctacgccccccccgaggtgcccagaagcaaggccctggaggtgaccaagctggccatcgaggccggcttcagacacatcgacagcgcccacctgtacaacaacgaggagcaggtgggcctggccatcagaagcaagatcgccgacggcagcgtgaagagagaggacatcttctacaccagcaagctgtggagcaccttccacagacccgagctggtgagacccgccctggagaacagcctgaagaaggcccagctggactacgtggacctgtacctgatccacagccccatgagcctgaagcccggcgaggagctgagccccaccgacgagaacggcaaggtgatcttcgacatcgtggacctgtgcaccacctgggaggccatggagaagtgcaaggacgccggcctggccaagagcatcggcgtgagcaacttcaacagaagacagctggagatgatcctgaacaagcccggcctgaagtacaagcccgtgtgcaaccaggtggagtgccacccctacttcaacagaagcaagctgctggacttctgcaagagcaaggacatcgtgctggtggcctacagcgccctgggcagccagagagacaagagatgggtggaccccaacagccccgtgctgctggaggaccccgtgctgtgcgccctggccaagaagcacaagagaacccccgccctgatcgccctgagataccagctgcagagaggcgtggtggtgctggccaagagctacaacgagcagagaatcagacagaacgtgcaggtgttcgagttccagctgaccgccgaggacatgaaggccatcgacggcctggacagaaacctgcactacttcaacagcgacagcttcgccagccaccccaactacccctacagcgacgagtactag

SEQ ID NO: 72468 - DNA, 615 bp, synthetic construct
  misc_feature 1..615: note = Description of Artificial Sequence: Synthetic coding sequence
  source 1..615: mol_type = other DNA
atgagcctgaagcccggcgaggagctgagccccaccgacgagaacggcaaggtgatcttcgacatcgtggacctgtgcaccacctgggaggccatggagaagtgcaaggacgccggcctggccaagagcatcggcgtgagcaacttcaacagaagacagctggagatgatcctgaacaagcccggcctgaagtacaagcccgtgtgcaaccaggtggagtgccacccctacttcaacagaagcaagctgctggacttctgcaagagcaaggacatcgtgctggtggcctacagcgccctgggcagccagagagacaagagatgggtggaccccaacagccccgtgctgctggaggaccccgtgctgtgcgccctggccaagaagcacaagagaacccccgccctgatcgccctgagataccagctgcagagaggcgtggtggtgctggccaagagctacaacgagcagagaatcagacagaacgtgcaggtgttcgagttccagctgaccgccgaggacatgaaggccatcgacggcctggacagaaacctgcactacttcaacagcgacagcttcgccagccaccccaactacccctacagcgacgagtactag

SEQ ID NO: 72469 - DNA, 972 bp, synthetic construct
  misc_feature 1..972: note = Description of Artificial Sequence: Synthetic coding sequence
  source 1..972: mol_type = other DNA
atggaccccaagtaccagagagtggagctgaacgacggccacttcatgcccgtgctgggcttcggcacctacgccccccccgaggtgcccagaaacagagccgtggaggtgaccaagctggccatcgaggccggcttcagacacatcgacagcgcctacctgtacaacaacgaggagcaggtgggcctggccatcagaagcaagatcgccgacggcagcgtgaagagagaggacatcttctacaccagcaagctgtggtgcaccttcttccagccccagatggtgcagcccgccctggagagcagcctgaagaagctgcagctggactacgtggacctgtacctgctgcacttccccatggccctgaagcccggcgagacccccctgcccaaggacgagaacggcaaggtgatcttcgacaccgtggacctgagcgccacctgggaggtgatggagaagtgcaaggacgccggcctggccaagagcatcggcgtgagcaacttcaactgcagacagctggagatgatcctgaacaagcccggcctgaagtacaagcccgtgtgcaaccaggtggagtgccacccctacctgaaccagagcaagctgctggacttctgcaagagcaaggacatcgtgctggtggcccacagcgccctgggcacccagagacacaagctgtgggtggaccccaacagccccgtgctgctggaggaccccgtgctgtgcgccctggccaagaagcacaagcagacccccgccctgatcgccctgagataccagctgcagagaggcgtggtggtgctggccaagagctacaacgagcagagaatcagagagaacatccaggtgttcgagttccagctgaccagcgaggacatgaaggtgctggacggcctgaacagaaactacagatacgtggtgatggacttcctgatggaccaccccgactaccccttcagcgacgagtactag

SEQ ID NO: 72470 - DNA, 972 bp, synthetic construct; identical to SEQ ID NO: 72469
  misc_feature 1..972: note = Description of Artificial Sequence: Synthetic coding sequence
  source 1..972: mol_type = other DNA

SEQ ID NO: 72471 - DNA, 381 bp, synthetic construct
  misc_feature 1..381: note = Description of Artificial Sequence: Synthetic coding sequence
  source 1..381: mol_type = other DNA
atggaccccaagtaccagagagtggagctgaacgacggccacttcatgcccgtgctgggcttcggcacctacgccccccccgaggtgcccagaaacagagccgtggaggtgaccaagctggccatcgaggccggcttcagacacatcgacagcgcctacctgtacaacaacgaggagcaggtgggcctggccatcagaagcaagatcgccgacggcagcgtgaagagagaggacatcttctacaccagcaagctgtggtgcaccttcttccagccccagatggtgcagcccgccctggagagcagcctgaagaagctgcagctggactacgtggacctgtacctgctgcacttccccatggccctgaagagcaccacctag

SEQ ID NO: 72472 - DNA, 981 bp, synthetic construct
  misc_feature 1..981: note = Description of Artificial Sequence: Synthetic coding sequence
  source 1..981: mol_type = other DNA
atggacctgagcgccgccagccacagaatccccctgagcgacggcaacagcatccccatcatcggcctgggcacctacagcgagcccaagagcacccccaagggcgcctgcgccaccagcgtgaaggtggccatcgacaccggctacagacacatcgacggcgcctacatctaccagaacgagcacgaggtgggcgaggccatcagagagaagatcgccgagggcaaggtgagaagagaggacatcttctactgcggcaagctgtgggccaccaaccacgtgcccgagatggtgagacccaccctggagagaaccctgagagtgctgcagctggactacgtggacctgtacatcatcgaggtgcccatggccttcaagcccggcgacgagatctaccccagagacgagaacggcaagtggctgtaccacaagagcaacctgtgcgccacctgggaggccatggaggcctgcaaggacgccggcctggtgaagagcctgggcgtgagcaacttcaacagaagacagctggagctgatcctgaacaagcccggcctgaagcacaagcccgtgagcaaccaggtggagtgccacccctacttcacccagcccaagctgctgaagttctgccagcagcacgacatcgtgatcaccgcctacagccccctgggcaccagcagaaaccccatctgggtgaacgtgagcagcccccccctgctgaaggacgccctgctgaacagcctgggcaagagatacaacaagaccgccgcccagatcgtgctgagattcaacatccagagaggcgtggtggtgatccccaagagcttcaacctggagagaatcaaggagaacttccagatcttcgacttcagcctgaccgaggaggagatgaaggacatcgaggccctgaacaagaacgtgagattcgtggagctgctgatgtggagagaccaccccgagtaccccttccacgacgagtactag

SEQ ID NO: 72473 - DNA, 441 bp, synthetic construct
  misc_feature 1..441: note = Description of Artificial Sequence: Synthetic coding sequence
  source 1..441: mol_type = other DNA
atggccttcaagcccggcgacgagatctaccccagagacgagaacggcaagtggctgtaccacaagagcaacctgtgcgccacctgggaggccatggaggcctgcaaggacgccggcctggtgaagagcctgggcgtgagcaacttcaacagaagacagctggagctgatcctgaacaagcccggcctgaagcacaagcccgtgagcaaccaggtggagtgccacccctacttcacccagcccaagctgctgaagttctgccagcagcacgacatcgtgatcaccgcctacagccccctgggcaccagcagaaaccccatctggagacagctgcacaagctggccctgctggacctgcccatcctgagagtgaccctgcacagcgtgcacaccctgcacagcgagaagctggtgaccggcgacctgcagtgccccggctag

SEQ ID NO: 72474 - DNA, 672 bp, synthetic construct
  misc_feature 1..672: note = Description of Artificial Sequence: Synthetic coding sequence
  source 1..672: mol_type = other DNA
atggcccacagattccccgccctgacccaggagcagaagaaggacagccagggcaagctgttcagaaacatcctgaaggagaagggcatcgtggtgggcatcaagctggaccagggcggcgcccccctggccggcaccaacaaggagaccaccatccagggcctggacggcctgagcgagagatgcgcccagtacaagaaggacggcgtggacttcggcaagtggagagccgtgctgagaatcgccgaccagtgccccagcagcctggccatccaggagaacgccaacgccctggccagatacgccagcatctgccagcagaacggcctggtgcccatcgtggagcccgaggtgatccccgacggcgaccacgacctggagcactgccagtacgtgaccgagaaggtgctggccgccgtgtacaaggccctgaacgaccaccacgtgtacctggagggcaccctgctgaagcccaacatggtgaccgccggccacgcctgcaccaagaagtacacccccgagcaggtggccatggccaccgtgaccgccctgcacagaaccgtgcccgccgccgtgcccggcatctgcttcctgagcggcggcatgagcgaggaggacgccaccctgaacctgaacgccatccccaccagagtgcagtgcccccccgcctag

SEQ ID NO: 72475 - DNA, 1095 bp, synthetic construct
  misc_feature 1..1095: note = Description of Artificial Sequence: Synthetic coding sequence
  source 1..1095: mol_type = other DNA
atggcccacagattccccgccctgacccaggagcagaagaaggagctgagcgagatcgcccagagcatcgtggccaacggcaagggcatcctggccgccgacgagagcgtgggcaccatgggcaacagactgcagagaatcaaggtggagaacaccgaggagaacagaagacagttcagagagatcctgttcagcgtggacagcagcatcaaccagagcatcggcggcgtgatcctgttccacgagaccctgtaccagaaggacagccagggcaagctgttcagaaacatcctgaaggagaagggcatcgtggtgggcatcaagctggaccagggcggcgcccccctggccggcaccaacaaggagaccaccatccagggcctggacggcctgagcgagagatgcgcccagtacaagaaggacggcgtggacttcggcaagtggagagccgtgctgagaatcgccgaccagtgccccagcagcctggccatccaggagaacgccaacgccctggccagatacgccagcatctgccagcagaacggcctggtgcccatcgtggagcccgaggtgatccccgacggcgaccacgacctggagcactgccagtacgtgaccgagaaggtgctggccgccgtgtacaaggccctgaacgaccaccacgtgtacctggagggcaccctgctgaagcccaacatggtgaccgccggccacgcctgcaccaagaagtacacccccgagcaggtggccatggccaccgtgaccgccctgcacagaaccgtgcccgccgccgtgcccggcatctgcttcctgagcggcggcatgagcgaggaggacgccaccctgaacctgaacgccatcaacctgtgccccctgcccaagccctggaagctgagcttcagctacggcagagccctgcaggccagcgccctggccgcctggggcggcaaggccgccaacaaggaggccacccaggaggccttcatgaagagagccatggccaactgccaggccgccaagggccagtacgtgcacaccggcagcagcggcgccgccagcacccagagcctgttcaccgcctgctacacctactag

SEQ ID NO: 72476 - DNA, 951 bp, synthetic construct
  misc_feature 1..951: note = Description of Artificial Sequence: Synthetic coding sequence
  source 1..951: mol_type = other DNA
atggcccacagattccccgccctgacccaggagcagaagaaggagctgagcgagatcgcccagagcatcgtggccaacggcaagggcatcctggccgccgacgagagcgtgggcaccatgggcaacagactgcagagaatcaaggtggagaacaccgaggagaacagaagacagttcagagagatcctgttcagcgtggacagcagcatcaaccagagcatcggcggcgtgatcctgttccacgagaccctgtaccagaaggacagccagggcaagctgttcagaaacatcctgaaggagaagggcatcgtggtgggcatcaagctggaccagggcggcgcccccctggccggcaccaacaaggagaccaccatccagggcctggacggcctgagcgagagatgcgcccagtacaagaaggacggcgtggacttcggcaagtggagagccgtgctgagaatcgccgaccagtgccccagcagcctggccatccaggagaacgccaacgccctggccagatacgccagcatctgccagcagaacggcctggtgcccatcgtggagcccgaggtgatccccgacggcgaccacgacctggagcactgccagtacgtgaccgagaaggtgctggccgccgtgtacaaggccctgaacgaccaccacgtgtacctggagggcaccctgctgaagcccaacatggtgaccgccggccacgcctgcaccaagaagtacacccccgagcaggtggccatggccaccgtgaccgccctgcacagaaccgtgcccgccgccgtgcccggcatctgcttcctgagcggcggcatgagcgaggaggacgccaccctgaacctgaacgccatcaacctgtgccccctgcccaagccctggaagctgagcttcagcggcgtggccagactgcagaccagaagacagcccagaagactgctgtag

SEQ ID NO: 72477 - DNA, 1947 bp, synthetic construct
  misc_feature 1..1947: note = Description of Artificial Sequence: Synthetic coding sequence
  source 1..1947: mol_type = other DNA
atggtgagcctgccccccccccagagcgacgtgaccctgcccggccccaccagactggagggcgagagacagggcgacctgatgcaggcccccggcctgcccggcagccccgccccccagagcaagcacgccggcttcagctgcagcagcttcgtgagcgacggcccccccgagagaacccccagcctgcccccccacagccccagaatcgccagccccggccccgagcaggtgcagggccactgccccgccggccccggccccggccccttcagactgagccccagcgacaagtaccccggcttcggcttcgaggaggccgccgccagcagccccggcagattcctgaagggcagccacgcccccttccacccctacaagagacccttccacgaggacgtgttccccgaggccgagaccaccctggccctgaagggccacagcttcaagacccccggccccctggaggccttcgaggagatccccgtggacgtggccgaggccgaggccttcctgcccggcttcagcgccgaggcctggtgcaacggcctgccctaccccagccaggagcacggcccccaggtgctgggcagcgaggtgaaggtgaagccccccgtgctggagagcggcgccggcatgttctgctaccagccccccctgcagcacatgtactgcagcagccagccccccttccaccagtacagccccggcggcggcagctaccccatcccctacctgggcagcagccactaccagtaccagagaatggccccccaggccagcaccgacggccaccagcccctgttccccaagcccatctacagctacagcatcctgatcttcatggccctgaagaacagcaagaccggcagcctgcccgtgagcgagatctacaacttcatgaccgagcacttcccctacttcaagaccgcccccgacggctggaagaacagcgtgagacacaacctgagcctgaacaagtgcttcgagaaggtggagaacaagagcggcagcagcagcagaaagggctgcctgtgggccctgaaccccgccaagatcgacaagatgcaggaggagctgcagaagtggaagagaaaggaccccatcgccgtgagaaagagcatggccaagcccgaggagctggacagcctgatcggcgacaagagagagaagctgggcagccccctgctgggctgccccccccccggcctgagcggcagcggccccatcagacccctggccccccccgccggcctgagcccccccctgcacagcctgcaccccgcccccggccccatccccggcaagaaccccctgcaggacctgctgatgggccacacccccagctgctacggccagacctacctgcacctgagccccggcctggccccccccggccccccccagcccctgttcccccagcccgacggccacctggagctgagagcccagcccggcaccccccaggacagccccctgcccgcccacaccccccccagccacagcgccaagctgctggccgagcccagccccgccagaaccatgcacgacaccctgctgcccgacggcgacctgggcaccgacctggacgccatcaaccccagcctgaccgacttcgacttccagggcaacctgtgggagcagctgaaggacgacagcctggccctggaccccctggtgctggtgaccagcagccccaccagcagcagcatgccccccccccagccccccccccactgcttcccccccggcccctgcctgaccgagaccggcagcggcgccggcgacctggccgcccccggcagcggcggcagcggcgccctgggcgacctgcacctgaccaccctgtacagcgccttcatggagctggagcccaccccccccaccgcccccgccggccccagcgtgtacctgagccccagcagcaagcccgtggccctggcctag

SEQ ID NO: 72478 - DNA, 1095 bp, synthetic construct
  misc_feature 1..1095: note = Description of Artificial Sequence: Synthetic coding sequence
  source 1..1095: mol_type = other DNA
atgccccacagctaccccgccctgagcgccgagcagaagaaggagctgagcgacatcgccctgagaatcgtggcccccggcaagggcatcctggccgccgacgagagcgtgggcagcatggccaagagactgagccagatcggcgtggagaacaccgaggagaacagaagactgtacagacaggtgctgttcagcgccgacgacagagtgaagaagtgcatcggcggcgtgatcttcttccacgagaccctgtaccagaaggacgacaacggcgtgcccttcgtgagaaccatccaggacaagggcatcgtggtgggcatcaaggtggacaagggcgtggtgcccctggccggcaccgacggcgagaccaccacccagggcctggacggcctgagcgagagatgcgcccagtacaagaaggacggcgccgacttcgccaagtggagatgcgtgctgaagatcagcgagagaacccccagcgccctggccatcctggagaacgccaacgtgctggccagatacgccagcatctgccagcagaacggcatcgtgcccatcgtggagcccgagatcctgcccgacggcgaccacgacctgaagagatgccagtacgtgaccgagaaggtgctggccgccgtgtacaaggccctgagcgaccaccacgtgtacctggagggcaccctgctgaagcccaacatggtgacccccggccacgcctgccccatcaagtacacccccgaggagatcgccatggccaccgtgaccgccctgagaagaaccgtgccccccgccgtgcccggcgtgaccttcctgagcggcggccagagcgaggaggaggccagcttcaacctgaacgccatcaacagatgccccctgcccagaccctgggccctgaccttcagctacggcagagccctgcaggccagcgccctgaacgcctggagaggccagagagacaacgccggcgccgccaccgaggagttcatcaagagagccgaggtgaacggcctggccgcccagggcaagtacgagggcagcggcgaggacggcggcgccgccgcccagagcctgtacatcgccaaccacgcctactag

SEQ ID NO: 72479 - DNA, 450 bp, synthetic construct
  misc_feature 1..450: note = Description of Artificial Sequence: Synthetic coding sequence
  source 1..450: mol_type = other DNA
atgccccacagctaccccgccctgagcgccgagcagaagaaggagctgagcgacatcgccctgagaatcgtggcccccggcaagggcatcctggccgccgacgagagcgtgggcagcatggccaagagactgagccagatcggcgtggagaacaccgaggagaacagaagactgtacagacaggtgctgttcagcgccgacgacagagtgaagaagtgcatcggcggcgtgatcttcttccacgagaccctgtaccagaaggacgacaacggcgtgcccttcgtgagaaccatccaggacaagggcatcgtggtgggcatcaaggtggacaagggcgtggtgcccctggccggcaccgacggcgagaccaccacccagggcctggacggcctgagcgagagatgcgcccagtacaagaaggacggcgccgacttcgccaagtggagatag

SEQ ID NO: 72480 - DNA, 795 bp, synthetic construct
  misc_feature 1..795: note = Description of Artificial Sequence: Synthetic coding sequence
  source 1..795: mol_type = other DNA
atgcccagcatcttcgcctaccagagcagcgaggtggactggtgcgagagcaacttccagtacagcgagctggtggccgagttctacaacaccttcagcaacatccccttcttcatcttcggccccctgatgatgctgctgatgcacccctacgcccagaagagaagcagatacatctacgtggtgtgggtgctgttcatgatcatcggcctgttcagcatgtacttccacatgaccctgagcttcctgggccagctgctggacgagatcgccatcctgtggctgctgggcagcggctacagcatctggatgcccagatgctacttccccagcttcctgggcggcaacagaagccagttcatcagactggtgttcatcaccaccgtggtgagcaccctgctgagcttcctgagacccaccgtgaacgcctacgccctgaacagcatcgccctgcacatcctgtacatcgtgtgccaggagtacagaaagaccagcaacaaggagctgagacacctgatcgaggtgagcgtggtgctgtgggccgtggccctgaccagctggatcagcgacagactgctgtgcagcttctggcagagaatccacttcttctacctgcacagcatctggcacgtgctgatcagcatcaccttcccctacggcatggtgaccatggccctggtggacgccaactacgagatgcccggcgagaccctgaaggtgagatactggcccagagacagctggcccgtgggcctgccctacgtggagatcagaggcgacgacaaggactgctag

SEQ ID NO: 72481 - DNA, 828 bp, synthetic construct
  misc_feature 1..828: note = Description of Artificial Sequence: Synthetic coding sequence
  source 1..828: mol_type = other DNA
atgggcgccccccactggtgggaccagctgcaggccggcagcagcgaggtggactggtgcgaggacaactacaccatcgtgcccgccatcgccgagttctacaacaccatcagcaacgtgctgttcttcatcctgccccccatctgcatgtgcctgttcagacagtacgccacctgcttcaacagcggcatctacctgatctggaccctgctggtggtggtgggcatcggcagcgtgtacttccacgccaccctgagcttcctgggccagatgctggacgagctggccgtgctgtgggtgctgatgtgcgccctggccatgtggttccccagaagatacctgcccaagatcttcagaaacgacagaggcagattcaaggtggtggtgagcgtgctgagcgccgtgaccacctgcctggccttcgtgaagcccgccatcaacaacatcagcctgatgaccctgggcgtgccctgcaccgccctgctgatcgccgagctgaagagatgcgacaacatgagagtgttcaagctgggcctgttcagcggcctgtggtggaccctggccctgttctgctggatcagcgacagagccttctgcgagctgctgagcagcttcaacttcccctacctgcactgcatgtggcacatcctgatctgcctggccgcctacctgggctgcgtgtgcttcgcctacttcgacgccgccagcgagatccccgagcagggccccgtgatcaagttctggcccaacgagaagtgggccttcatcggcgtgccctacgtgagcctgctgtgcgccaacaagaagagcagcgtgaagatcacctag

SEQ ID NO: 72482 - DNA, 423 bp, synthetic construct
  misc_feature 1..423: note = Description of Artificial Sequence: Synthetic coding sequence
  source 1..423: mol_type = other DNA
atgtgcctgttcagacagtacgccacctgcttcaacagcggcatctacctgatctggaccctgctggtggtggtgggcatcggcagcgtgtacttccacgccaccctgagcttcctgggccagatgctggacgagctggccgtgctgtgggtgctgatgtgcgccctggccatgtggttccccagaagatacctgcccaagatcttcagaaacgacagaggcagattcaaggtggtggtgagcgtgctgagcgccgtgaccacctgcctggccttcgtgaagcccgccatcaacaacatcagcctgatgaccctgggcgtgccctgcaccgccctgctgatcgccgagctgaagagacacgagagaaaccagagaagaagacacagaaagggcggccagcagggcggcggcgacaaggtgtag

SEQ ID NO: 72483 - DNA, 1587 bp, synthetic construct
  misc_feature 1..1587: note = Description of Artificial Sequence: Synthetic coding sequence
  source 1..1587: mol_type = other DNA
atgcagggcccctgggtgctgctgctgctgggcctgagactgcagctgagcctgggcgtgatccccgccgaggaggagaaccccgccttctggaacagacaggccgccgaggccctggacgccgccaagaagctgcagcccatccagaaggtggccaagaacctgatcctgttcctgggcgacggcctgggcgtgcccaccgtgaccgccaccagaatcctgaagggccagaagaacggcaagctgggccccgagacccccctggccatggacagattcccctacctggccctgagcaagacctacaacgtggacagacaggtgcccgacagcgccgccaccgccaccgcctacctgtgcggcgtgaaggccaacttccagaccatcggcctgagcgccgccgccagattcaaccagtgcaacaccaccagaggcaacgaggtgatcagcgtgatgaacagagccaagcaggccggcaagagcgtgggcgtggtgaccaccaccagagtgcagcacgccagccccgccggcacctacgcccacaccgtgaacagaaactggtacagcgacgccgacatgcccgccagcgccagacaggagggctgccaggacatcgccacccagctgatcagcaacatggacatcgacgtgatcctgggcggcggcagaaagtacatgttccccatgggcacccccgaccccgagtaccccgccgacgccagccagaacggcatcagactggacggcaagaacctggtgcaggagtggctggccaagcaccagggcgcctggtacgtgtggaacagaaccgagctgatgcaggccagcctggaccagagcgtgacccacctgatgggcctgttcgagcccggcgacaccaagtacgagatccacagagaccccaccctggaccccagcctgatggagatgaccgaggccgccctgagactgctgagcagaaaccccagaggcttctacctgttcgtggagggcggcagaatcgaccacggccaccacgagggcgtggcctaccaggccctgaccgaggccgtgatgttcgacgacgccatcgagagagccggccagctgaccagcgaggaggacaccctgaccctggtgaccgccgaccacagccacgtgttcagcttcggcggctacaccctgagaggcagcagcatcttcggcctggcccccagcaaggcccaggacagcaaggcctacaccagcatcctgtacggcaacggccccggctacgtgttcaacagcggcgtgagacccgacgtgaacgagagcgagagcggcagccccgactaccagcagcaggccgccgtgcccctgagcagcgagacccacggcggcgaggacgtggccgtgttcgccagaggcccccaggcccacctggtgcacggcgtgcaggagcagagcttcgtggcccacgtgatggccttcgccgcctgcctggagccctacaccgcctgcgacctggccccccccgcctgcaccaccgacgccgcccaccccgtggccgccagcctgcccctgctggccggcaccctgctgctgctgggcgccagcgccgccccctag

SEQ ID NO: 72484 - DNA, 513 bp, synthetic construct
  misc_feature 1..513: note = Description of Artificial Sequence: Synthetic coding sequence
  source 1..513: mol_type = other DNA
atggacagagccatcggccaggccggcagcctgaccagcagcgaggacaccctgaccgtggtgaccgccgaccacagccacgtgttcaccttcggcggctacacccccagaggcaacagcatcttcggcctggcccccatgctgagcgacaccgacaagaagcccttcaccgccatcctgtacggcaacggccccggctacaaggtggtgggcggcgagagagagaacgtgagcatggtggactacgcccacaacaactaccaggcccagagcgccgtgcccctgagacacgagacccacggcggcgaggacgtggccgtgttcagcaagggccccatggcccacctgctgcacggcgtgcacgagcagaactacgtgccccacgtgatggcctacgccgcctgcatcggcgccaacctgggccactgcgcccccgccagcagcgccggcagcctggccgccggccccctgctgctggccctggccctgtaccccctgagcgtgctgttctag

SEQ ID NO: 72485 - DNA, 513 bp, synthetic construct; identical to SEQ ID NO: 72484
  misc_feature 1..513: note = Description of Artificial Sequence: Synthetic coding sequence
  source 1..513: mol_type = other DNA

SEQ ID NO: 72486 - DNA, 1575 bp, synthetic construct
  misc_feature 1..1575: note = Description of Artificial Sequence: Synthetic coding sequence
  source 1..1575: mol_type = other DNA
atgatcagccccttcctggtgctggccatcggcacctgcctgaccaacagcctggtgcccgagaaggagaaggaccccaagtactggagagaccaggcccaggagaccctgaagtacgccctggagctgcagaagctgaacaccaacgtggccaagaacgtgatcatgttcctgggcgacggcatgggcgtgagcaccgtgaccgccgccagaatcctgaagggccagctgcaccacaaccccggcgaggagaccagactggagatggacaagttccccttcgtggccctgagcaagacctacaacaccaacgcccaggtgcccgacagcgccggcaccgccaccgcctacctgtgcggcgtgaaggccaacgagggcaccgtgggcgtgagcgccgccaccgagagaagcagatgcaacaccacccagggcaacgaggtgaccagcatcctgagatgggccaaggacgccggcaagagcgtgggcatcgtgaccaccaccagagtgaaccacgccacccccagcgccgcctacgcccacagcgccgacagagactggtacagcgacaacgagatgccccccgaggccctgagccagggctgcaaggacatcgcctaccagctgatgcacaacatcagagacatcgacgtgatcatgggcggcggcagaaagtacatgtaccccaagaacaagaccgacgtggagtacgagagcgacgagaaggccagaggcaccagactggacggcctggacctggtggacacctggaagagcttcaagcccagatacaagcacagccacttcatctggaacagaaccgagctgctgaccctggacccccacaacgtggactacctgctgggcctgttcgagcccggcgacatgcagtacgagctgaacagaaacaacgtgaccgaccccagcctgagcgagatggtggtggtggccatccagatcctgagaaagaaccccaagggcttcttcctgctggtggagggcggcagaatcgaccacggccaccacgagggcaaggccaagcaggccctgcacgaggccgtggagatggacagagccatcggccaggccggcagcctgaccagcagcgaggacaccctgaccgtggtgaccgccgaccacagccacgtgttcaccttcggcggctacacccccagaggcaacagcatcttcggcctggcccccatgctgagcgacaccgacaagaagcccttcaccgccatcctgtacggcaacggccccggctacaaggtggtgggcggcgagagagagaacgtgagcatggtggactacgcccacaacaactaccaggcccagagcgccgtgcccctgagacacgagacccacggcggcgaggacgtggccgtgttcagcaagggccccatggcccacctgctgcacggcgtgcacgagcagaactacgtgccccacgtgatggcctacgccgcctgcatcggcgccaacctgggccactgcgcccccgccagcagcgccggcagcctggccgccggccccctgctgctggccctggccctgtaccccctgagcgtgctgttctag

SEQ ID NO: 72487 - DNA, 1575 bp, synthetic construct; identical to SEQ ID NO: 72486
  misc_feature 1..1575: note = Description of Artificial Sequence: Synthetic coding sequence
  source 1..1575: mol_type = other DNA

SEQ ID NO: 72488 - DNA, 1575 bp, synthetic construct; identical to SEQ ID NO: 72486
  misc_feature 1..1575: note = Description of Artificial Sequence: Synthetic coding sequence
  source 1..1575: mol_type = other DNA

SEQ ID NO: 72489 - DNA, 1344 bp, synthetic construct
  misc_feature 1..1344: note = Description of Artificial Sequence: Synthetic coding sequence
  source 1..1344: mol_type = other DNA
atgccctggagcttcagaagcagcacccccacctggctgagaatgagcagctgcagctgggagatgacctacaacaccaacgcccaggtgcccgacagcgccggcaccgccaccgcctacctgtgcggcgtgaaggccaacgagggcaccgtgggcgtgagcgccgccaccgagagaagcagatgcaacaccacccagggcaacgaggtgaccagcatcctgagatgggccaaggacgccggcaagagcgtgggcatcgtgaccaccaccagagtgaaccacgccacccccagcgccgcctacgcccacagcgccgacagagactggtacagcgacaacgagatgccccccgaggccctgagccagggctgcaaggacatcgcctaccagctgatgcacaacatcagagacatcgacgtgatcatgggcggcggcagaaagtacatgtaccccaagaacaagaccgacgtggagtacgagagcgacgagaaggccagaggcaccagactggacggcctggacctggtggacacctggaagagcttcaagcccagatacaagcacagccacttcatctggaacagaaccgagctgctgaccctggacccccacaacgtggactacctgctgggcctgttcgagcccggcgacatgcagtacgagctgaacagaaacaacgtgaccgaccccagcctgagcgagatggtggtggtggccatccagatcctgagaaagaaccccaagggcttcttcctgctggtggagggcggcagaatcgaccacggccaccacgagggcaaggccaagcaggccctgcacgaggccgtggagatggacagagccatcggccaggccggcagcctgaccagcagcgaggacaccctgaccgtggtgaccgccgaccacagccacgtgttcaccttcggcggctacacccccagaggcaacagcatcttcggcctggcccccatgctgagcgacaccgacaagaagcccttcaccgccatcctgtacggcaacggccccggctacaaggtggtgggcggcgagagagagaacgtgagcatggtggactacgcccacaacaactaccaggcccagagcgccgtgcccctgagacacgagacccacggcggcgaggacgtggccgtgttcagcaagggccccatggcccacctgctgcacggcgtgcacgagcagaactacgtgccccacgtgatggcctacgccgcctgcatcggcgccaacctgggccactgcgcccccgccagcagcgccggcagcctggccgccggccccctgctgctggccctggccctgtaccccctgagcgtgctgttctag

SEQ ID NO: 72490 - DNA, 1410 bp, synthetic construct
  misc_feature 1..1410: note = Description of Artificial Sequence: Synthetic coding sequence
  source 1..1410: mol_type = other DNA
atgttcctgggcgacggcatgggcgtgagcaccgtgaccgccgccagaatcctgaagggccagctgcaccacaaccccggcgaggagaccagactggagatggacaagttccccttcgtggccctgagcaagacctacaacaccaacgcccaggtgcccgacagcgccggcaccgccaccgcctacctgtgcggcgtgaaggccaacgagggcaccgtgggcgtgagcgccgccaccgagagaagcagatgcaacaccacccagggcaacgaggtgaccagcatcctgagatgggccaaggacgccggcaagagcgtgggcatcgtgaccaccaccagagtgaaccacgccacccccagcgccgcctacgcccacagcgccgacagagactggtacagcgacaacgagatgccccccgaggccctgagccagggctgcaaggacatcgcctaccagctgatgcacaacatcagagacatcgacgtgatcatgggcggcggcagaaagtacatgtaccccaagaacaagaccgacgtggagtacgagagcgacgagaaggccagaggcaccagactggacggcctggacctggtggacacctggaagagcttcaagcccagatacaagcacagccacttcatctggaacagaaccgagctgctgaccctggacccccacaacgtggactacctgctgggcctgttcgagcccggcgacatgcagtacgagctgaacagaaacaacgtgaccgaccccagcctgagcgagatggtggtggtggccatccagatcctgagaaagaaccccaagggcttcttcctgctggtggagggcggcagaatcgaccacggccaccacgagggcaaggccaagcaggccctgcacgaggccgtggagatggacagagccatcggccaggccggcagcctgaccagcagcgaggacaccctgaccgtggtgaccgccgaccacagccacgtgttcaccttcggcggctacacccccagaggcaacagcatcttcggcctggcccccatgctgagcgacaccgacaagaagcccttcaccgccatcctgtacggcaacggccccggctacaaggtggtgggcggcgagagagagaacgtgagcatggtggactacgcccacaacaactaccaggcccagagcgccgtgcccctgagacacgagacccacggcggcgaggacgtggccgtgttcagcaagggccccatggcccacctgctgcacggcgtgcacgagcagaactacgtgccccacgtgatggcctacgccgcctgcatcggcgccaacctgggccactgcgcccccgccagcagcgccggcagcctggccgccggccccctgctgctggccctggccctgtaccccctgagcgtgctgttctag

SEQ ID NO: 72491 - DNA, 1608 bp, synthetic construct
  misc_feature 1..1608: note = Description of Artificial Sequence: Synthetic coding sequence
  source 1..1608: mol_type = other DNA
atgctgggcccctgcatgctgctgctgctgctgctgctgggcctgagactgcagctgagcctgggcatcatccccgtggaggaggagaaccccgacttctggaacagagaggccgccgaggccctgggcgccgccaagaagctgcagcccgcccagaccgccgccaagaacctgatcatcttcctgggcgacggcatgggcgtgagcaccgtgaccgccgccagaatcctgaagggccagaagaaggacaagctgggccccgagatccccctggccatggacagattcccctacgtggccctgagcaagacctacaacgtggacaagcacgtgcccgacagcggcgccaccgccaccgcctacctgtgcggcgtgaagggcaacttccagaccatcggcctgagcgccgccgccagattcaaccagtgcaacaccaccagaggcaacgaggtgatcagcgtgatgaacagagccaagaaggccggcaagagcgtgggcgtggtgaccaccaccagagtgcagcacgccagccccgccggcacctacgcccacaccgtgaacagaaactggtacagcgacgccgacgtgcccgccagcgccagacaggagggctgccaggacatcgccacccagctgatcagcaacatggacatcgacgtgatcctgggcggcggcagaaagtacatgttcagaatgggcacccccgaccccgagtaccccgacgactacagccagggcggcaccagactggacggcaagaacctggtgcaggagtggctggccaagagacagggcgccagatacgtgtggaacagaaccgagctgatgcaggccagcctggaccccagcgtgacccacctgatgggcctgttcgagcccggcgacatgaagtacgagatccacagagacagcaccctggaccccagcctgatggagatgaccgaggccgccctgagactgctgagcagaaaccccagaggcttcttcctgttcgtggagggcggcagaatcgaccacggccaccacgagagcagagcctacagagccctgaccgagaccatcatgttcgacgacgccatcgagagagccggccagctgaccagcgaggaggacaccctgagcctggtgaccgccgaccacagccacgtgttcagcttcggcggctaccccctgagaggcagcagcatcttcggcctggcccccggcaaggccagagacagaaaggcctacaccgtgctgctgtacggcaacggccccggctacgtgctgaaggacggcgccagacccgacgtgaccgagagcgagagcggcagccccgagtacagacagcagagcgccgtgcccctggacgaggagacccacgccggcgaggacgtggccgtgttcgccagaggcccccaggcccacctggtgcacggcgtgcaggagcagaccttcatcgcccacgtgatggccttcgccgcctgcctggagccctacaccgcctgcgacctggccccccccgccggcaccaccgacgccgcccaccccggcagaagcgtggtgcccgccctgctgcccctgctggccggcaccctgctgctgctggagaccgccaccgccccctag

SEQ ID NO: 72492 - DNA, 1599 bp, synthetic construct
  misc_feature 1..1599: note = Description of Artificial Sequence: Synthetic coding sequence
  source 1..1599: mol_type = other DNA
atgcagggcccctgggtgctgctgctgctgggcctgagactgcagctgagcctgggcatcatccccgtggaggaggagaaccccgacttctggaacagacaggccgccgaggccctgggcgccgccaagaagctgcagcccgcccagaccgccgccaagaacctgatcatcttcctgggcgacggcatgggcgtgagcaccgtgaccgccgccagaatcctgaagggccagaagaaggacaagctgggccccgagaccttcctggccatggacagattcccctacgtggccctgagcaagacctacagcgtggacaagcacgtgcccgacagcggcgccaccgccaccgcctacctgtgcggcgtgaagggcaacttccagaccatcggcctgagcgccgccgccagattcaaccagtgcaacaccaccagaggcaacgaggtgatcagcgtgatgaacagagccaagaaggccggcaagagcgtgggcgtggtgaccaccaccagagtgcagcacgccagccccgccggcgcctacgcccacaccgtgaacagaaactggtacagcgacgccgacgtgcccgccagcgccagacaggagggctgccaggacatcgccacccagctgatcagcaacatggacatcgacgtgatcctgggcggcggcagaaagtacatgttccccatgggcacccccgaccccgagtaccccgacgactacagccagggcggcaccagactggacggcaagaacctggtgcaggagtggctggccaagcaccagggcgccagatacgtgtggaacagaaccgagctgctgcaggccagcctggaccccagcgtgacccacctgatgggcctgttcgagcccggcgacatgaagtacgagatccacagagacagcaccctggaccccagcctgatggagatgaccgaggccgccctgctgctgctgagcagaaaccccagaggcttcttcctgttcgtggagggcggcagaatcgaccacggccaccacgagagcagagcctacagagccctgaccgagaccatcatgttcgacgacgccatcgagagagccggccagctgaccagcgaggaggacaccctgagcctggtgaccgccgaccacagccacgtgttcagcttcggcggctaccccctgagaggcagcagcatcttcggcctggcccccggcaaggccagagacagaaaggcctacaccgtgctgctgtacggcaacggccccggctacgtgctgaaggacggcgccagacccgacgtgaccgagagcgagagcggcagccccgagtacagacagcagagcgccgtgcccctggacggcgagacccacgccggcgaggacgtggccgtgttcgccagaggcccccaggcccacctggtgcacggcgtgcaggagcagaccttcatcgcccacgtgatggccttcgccgcctgcctggagccctacaccgcctgcgacctggcccccagagccggcaccaccgacgccgcccaccccggccccagcgtggtgcccgccctgctgcccctgctggccggcaccctgctgctgctgggcaccgccaccgccccctag

SEQ ID NO: 72493 - DNA, 474 bp, synthetic construct
  misc_feature 1..474: note = Description of Artificial Sequence: Synthetic coding sequence
  source 1..474: mol_type = other DNA
atggacagattcctggtgaagggcgcccagggcggcctgctgagaaagcaggaggagcaggagcccaccggcgaggagcccgccgtgctgggcggcgacaaggagagcaccagaaagagacccagaagagaggcccccggcaacggcggccacagcgccggccccagctggagacacatcagagccgagggcctggactgcagctacaccgtgctgttcggcaaggccgaggccgacgagatcttccaggagctggagaaggaggtggagtacttcaccggcatcaagatggccgtgaccaccagcggcagcaccgagatgatgaaggagaactggcccctgggcgcccccctgcccctgagccccagcgtgcccgccgagaccctgagcagcggcatcagaatccccgtgggcaaggccccccccggcggctggagatggagcggctgcagatggcccaccggcgcctactag

SEQ ID NO: 72494 - DNA, 2958 bp, synthetic construct
  misc_feature 1..2958: note = Description of Artificial Sequence: Synthetic coding sequence
  source 1..2958: mol_type = other DNA
atgatcagacacgccggcgcccccgccagaggcgaccccaccggccccgtgcccgtggtgggcaagggcgaggaggaggaggaggaggacggcatgagactgtgcctgcccgccaaccccaagaactgcctgccccacagaagaggcatcagcatcctggagaagctgatcaagacctgccccgtgtggctgcagctgagcctgggccaggccgaggtggccagaatcctgcacagagtggtggccggcatgttcctggtgagaagagacagcagcagcaagcagctggtgctgtgcgtgcacttccccagcctgaacgagagcagcgccgaggtgctggagtacaccatcaaggaggagaagagcatcctgtacctggagggcagcgccctggtgttcgaggacatcttcagactgatcgccttctactgcgtgagcagagacctgctgcccttcaccctgagactgccccaggccatcctggaggccagcagcttcaccgacctggagaccatcgccaacctgggcctgggcttctgggacagcagcctgaaccccccccaggagagaggcaagcccgccgagccccccagagacagagcccccggcttccccctggtgagcagcctgagacccaccgcccacgacgccaactgcgcctgcgagatcgagctgagcgtgggcaacgacagactgtggttcgtgaaccccatcttcatcgaggactgcagcagcgccctgcccaccgaccagccccccctgggcaactgccccgccagacccctgccccccaccagcgacgccaccagccccaccagcagatgggcccccagaagaccccccccccccccccccgtgctgcccctgcagccctgcagccccgcccagccccccgtgctgcccgccctggcccccgcccccgcctgccccctgcccaccagcccccccgtgcccgccccccacgtgaccccccacgcccccggcccccccgaccaccccaaccagccccccatgatgacctgcgagagactgccctgccccaccgccggcctgggccccctgagagaggaggccatgaagcccggcgccgccagcagccccctgcagcaggtgcccgccccccccctgcccgccaagaagaacctgcccaccgccccccccagaagaagagtgagcgagagagtgagcctggaggaccagagccccggcatggccgccgagggcgaccagctgagcctgcccccccagggcaccagcgacggccccgaggacacccccagagagagcaccgagcagggccaggacaccgaggtgaaggccagcgacccccacagcatgcccgagctgcccagaaccgccaagcagccccccgtgcccccccccagaaagaagagaatcagcagacagctggccagcaccctgcccgcccccctggagaacgccgagctgtgcacccaggccatggccctggagacccccacccccggcccccccagagagggccagagccccgccagccaggccggcacccagcacccccccgcccaggccaccgcccacagccagagcagccccgagttcaagggcagcctggccagcctgagcgacagcctgggcgtgagcgtgatggccaccgaccaggacagctacagcaccagcagcaccgaggaggagctggagcagttcagcagccccagcgtgaagaagaagcccagcatgatcctgggcaaggccagacacagactgagcttcgccagcttcagcagcatgttccacgccttcctgagcaacaacagaaagctgtacaagaaggtggtggagctggcccaggacaagggcagctacttcggcagcctggtgcaggactacaaggtgtacagcctggagatgatggccagacagaccagcagcaccgagatgctgcaggagatcagaaccatgatgacccagctgaagagctacctgctgcagagcaccgagctgaaggccctggtggaccccgccctgcacagcgaggaggagctggaggccatcgtggagagcgccctgtacaagtgcgtgctgaagcccctgaaggaggccatcaacagctgcctgcaccagatccacagcaaggacggcagcctgcagcagctgaaggagaaccagctggtgatcctggccaccaccaccaccgacctgggcgtgaccaccagcgtgcccgaggtgcccatgatggagaagatcctgcagaagttcaccagcatgcacaaggcctacagccccgagaagaagatcagcatcctgctgaagacctgcaagctgatctacgacagcatggccctgggcaaccccggcaagccctacggcgccgacgacttcctgcccgtgctgatgtacgtgctggccagaagcaacctgaccgagatgctgctgaacgtggagtacatgatggagctgatggaccccgccctgcagctgggcgagggcagctactacctgaccaccacctacggcgccctggagcacatcaagagctacgacaagatcaccgtgaccagacagctgagcgtggaggtgcaggacagcatccacagatgggagagaagaagaaccctgaacaaggccagagccagcagaagcagcgtgcaggacttcatctgcgtgagctacctggagcccgagcagcaggccagaaccctggccagcagagccgacacccaggcccaggccctgtgcgcccagtgcgccgagaagttcgccgtggagagaccccaggcccacagactgttcgtgctggtggacggcagatgcttccagctggccgacgacgccctgccccactgcatcaagggctacctgctgagaagcgagcccaagagagacttccacttcgtgtacagacccctggacggcggcggcggcggcggcggcggcagccccccctgcctggtggtgagagagcccaacttcctgtag

SEQ ID NO: 72495 - DNA, 786 bp, synthetic construct
  misc_feature 1..786: note = Description of Artificial Sequence: Synthetic coding sequence
  source 1..786: mol_type = other DNA
atggacagattcctggtgaagggcgcccagggcggcctgctgagaaagcaggaggagcaggagcccaccggcgaggagcccgccgtgctgggcggcgacaaggagagcaccagaaagagacccagaagagaggcccccggcaacggcggccacagcgccggccccagctggagacacatcagagccgagggcctggactgcagctacaccgtgctgttcggcaaggccgaggccgacgagatcttccaggagctggagaaggaggtggagtacttcaccggcgccctggccagagtgcaggtgttcggcaagtggcacagcgtgcccagaaagcaggccacctacggcgacgccggcctgacctacaccttcagcggcctgaccctgagccccaagccctggatccccgtgctggagagaatcagagaccacgtgagcggcgtgaccggccagaccttcaacttcgtgctgatcaacagatacaaggacggctgcgaccacatcggcgagcacagagacgacgagagagagctggcccccggcagccccatcgccagcgtgagcttcggcgcctgcagagacttcgtgttcagacacaaggacagcagaggcaagagccccagcagaagagtggccgtggtgagactgcccctggcccacggcagcctgctgatgatgaaccaccccaccaacacccactggtaccacagcctgcccgtgagaaagaaggtgctggcccccagagtgaacctgaccttcagaaagatcctgctgaccaagaagtag

SEQ ID NO: 72496 - DNA, 786 bp, synthetic construct; identical to SEQ ID NO: 72495
  misc_feature 1..786: note = Description of Artificial Sequence: Synthetic coding sequence
  source 1..786: mol_type = other DNA

SEQ ID NO: 72497 - DNA, 786 bp, synthetic construct; identical to SEQ ID NO: 72495
  misc_feature 1..786: note = Description of Artificial Sequence: Synthetic coding sequence
  source 1..786: mol_type = other DNA

SEQ ID NO: 72498 - DNA, 453 bp, synthetic construct
  misc_feature 1..453: note = Description of Artificial Sequence: Synthetic coding sequence
  source 1..453: mol_type = other DNA
atggacagattcctggtgaagggcgcccagggcggcctgctgagaaagcaggaggagcaggagcccaccggcgaggagcccgccgtgctgggcggcgacaaggagagcaccagaaagagacccagaagagaggcccccggcaacggcggccacagcgccggccccagctggagacacatcagagccgagggcctggactgcagctacaccgtgctgttcggcaaggccgaggccgacgagatcttccaggagctggagaaggaggtggagtacttcaccggcgccctggccagagtgcaggtgttcggcaagtggcacagcgtgcccagaaagcaggccacctacggcgacgccggcctgacctacaccttcagcggcctgaccctgagccccaagccctggatccccgtgctggagagaatcagagaccacgtgagcggcgtgaccggctag

SEQ ID NO: 72499 - DNA, 366 bp, synthetic construct
  misc_feature 1..366: note = Description of Artificial Sequence: Synthetic coding sequence
  source 1..366: mol_type = other DNA
atggacagattcctggtgaagggcgcccagggcggcctgctgagaaagcaggaggagcaggagcccaccggcgaggagcccgccgtgctgggcggcgacaaggagagcaccagaaagagacccagaagagaggcccccggcaacggcggccacagcgccggccccagctggagacacatcagagccgagggcctggactgcagctacaccgtgctgttcggcaaggccgaggccgacgagatcttccaggagctggagaaggaggtggagtacttcaccggcgccctggccagagtgcaggtgttcggcaagtggcacagcgtgcccagaaagcaggccacctacggcgacgccggcctgacctag

SEQ ID NO: 72500 - DNA, 483 bp, synthetic construct
  misc_feature 1..483: note = Description of Artificial Sequence: Synthetic coding sequence
  source 1..483: mol_type = other DNA
atggacagattcctggtgaagggcgcccagggcggcctgctgagaaagcaggaggagcaggagcccaccggcgaggagcccgccgtgctgggcggcgacaaggagagcaccagaaagagacccagaagagaggcccccggcaacggcggccacagcgccggccccagctggagacacatcagagccgagggcctggactgcagctacaccgtgctgttcggcaaggccgaggccgacgagatcttccaggagctggagaaggaggtggagtacttcaccggcgccctggccagagtgcaggtgttcggcaagtggcacagcgtgcccagaaagcaggccacctacggcgacgccggcctgacctacaccttcagcggcctgaccctgagccccaagccctggatccccgtgctggagagaatcagagaccacgtgagcggcgtgaccggccagaccttcaacttcgtgctgatcaacagatag

SEQ ID NO: 72501 - DNA, 861 bp, synthetic construct
  misc_feature 1..861: note = Description of Artificial Sequence: Synthetic coding sequence
  source 1..861: mol_type = other DNA
atggaggagaagagaagaagagccagagtgcagggcgcctgggccgcccccgtgaagagccaggccatcgcccagcccgccaccaccgccaagagccacctgcaccagaagcccggccagacctggaagaacaaggagcaccacctgagcgacagagagttcgtgttcaaggagccccagcaggtggtgagaagagcccccgagcccagagtgatcgacagagagggcgtgtacgagatcagcctgagccccaccggcgtgagcagagtgtgcctgtaccccggcttcgtggacgtgaaggaggccgactggatcctggagcagctgtgccaggacgtgccctggaagcagagaaccggcatcagagaggacatcacctaccagcagcccagactgaccgcctggtacggcgagctgccctacacctacagcagaatcaccatggagcccaacccccactggcaccccgtgctgagaaccctgaagaacagaatcgaggagaacaccggccacaccttcaacagcctgctgtgcaacctgtacagaaacgagaaggacagcgtggactggcacagcgacgacgagcccagcctgggcagatgccccatcatcgccagcctgagcttcggcgccaccagaaccttcgagatgagaaagaagcccccccccgaggagaacggcgactacacctacgtggagagagtgaagatccccctggaccacggcaccctgctgatcatggagggcgccacccaggccgactggcagcacagagtgcccaaggagtaccacagcagagagcccagagtgaacctgaccttcagaaccgtgtaccccgaccccagaggcgccccctggtag

SEQ ID NO: 72502 - DNA, 513 bp, synthetic construct
  misc_feature 1..513: note = Description of Artificial Sequence: Synthetic coding sequence
  source 1..513: mol_type = other DNA
atggaggagaagagaagaagagccagagtgcagggcgcctgggccgcccccgtgaagagccaggccatcgcccagcccgccaccaccgccaagagccacctgcaccagaagcccggccagacctggaagaacaaggagcaccacctgagcgacagagagttcgtgttcaaggagccccagcaggtggtgagaagagcccccgagcccagagtgatcgaggagggcgtgtacgagatcagcctgagccccaccggcgtgagcagagtgtgcctgtaccccggcttcgtggacgtgaaggaggccgactggatcctggagcagctgtgccaggacgtgccctggaagcagagaaccggcatcagagaggacagcatcctgcagctgaccttcaagaagagcgcccccgtgagcggcaccgccaccgccccccagagctgctggtacgagagacccagccccccccacatccccggccccgccatcctgaccagaaccagactgtgggccccctag

SEQ ID NO: 72503 - DNA, 183 bp, synthetic construct
  misc_feature 1..183: note = Description of Artificial Sequence: Synthetic coding sequence
  source 1..183: mol_type = other DNA
atggaggagaagagaagaagagccagagtgcagggcgcctgggccgcccccgtgaagagccaggccatcgcccagcccgccaccaccgccaagagccacctgcaccagaagcccggccagacctggaagaacaaggagcaccacctgagcgacagagagttcgtgttcaaggagccccagtag

SEQ ID NO: 72504 - DNA, 909 bp, synthetic construct
  misc_feature 1..909: note = Description of Artificial Sequence: Synthetic coding sequence
  source 1..909: mol_type = other DNA
atggccgccgccgccgccgagacccccgaggtgctgagagagtgcggctgcaagggcatcagaacctgcctgatctgcgagagacagagaggcagcgaccccccctgggagctgccccccgccaagacctacagattcatctactgcagcgacaccggctgggccgtgggcaccgaggagagcgacttcgagggctgggccttccccttccccggcgtgatgctgatcgaggacttcgtgaccagagaggaggaggccgagctggtgagactgatggacagagacccctggaagctgagccagagcggcagaagaaagcaggactacggccccaaggtgaacttcagaaagcagaagctgaagaccgagggcttctgcggcctgcccagcttcagcagagaggtggtgagaagaatgggcctgtaccccggcctggagggcttcagacccgtggagcagtgcaacctggactactgccccgagagaggcagcgccatcgacccccacctggacgacgcctggctgtggggcgagagactggtgagcctgaacctgctgagccccaccgtgctgagcatgtgcagagaggcccccggcagcctgctgctgtgcagcgcccccagcgccgcccccgaggccctggtggacagcgtgatcgcccccagcagaagcgtgctgtgccaggaggtggaggtggccatccccctgcccgccagaagcctgctggtgctgaccggcgccgccagacaccagtggaagcacgccatccacagaagacacatcgaggccagaagagtgtgcgtgaccttcagagagctgagcgccgagttcggccccggcggcagacagcaggagctgggccaggagctgctgagaatcgccctgagcttccagggcagacccgtgtag

SEQ ID NO: 72505 - DNA, 1377 bp, synthetic construct
  misc_feature 1..1377: note = Description of Artificial Sequence: Synthetic coding sequence
  source 1..1377: mol_type = other DNA
atggccgccgccagcggctacaccgacctgagagagaagctgaagagcatgaccagcagagacaactacaaggccggcagcagagaggccgccgccgccgccgccgccgccgtggccgccgccgccgccgccgccgccgccgccgagccctaccccgtgagcggcgccaagagaaagtaccaggaggacagcgaccccgagagaagcgactacgaggagcagcagctgcagaaggaggaggaggccagaaaggtgaagagcggcatcagacagatgagactgttcagccaggacgagtgcgccaagatcgaggccagaatcgacgaggtggtgagcagagccgagaagggcctgtacaacgagcacaccgtggacagagcccccctgagaaacaagtacttcttcggcgagggctacacctacggcgcccagctgcagaagagaggccccggccaggagagactgtacccccccggcgacgtggacgagatccccgagtgggtgcaccagctggtgatccagaagctggtggagcacagagtgatccccgagggcttcgtgaacagcgccgtgatcaacgactaccagcccggcggctgcatcgtgagccacgtggaccccatccacatcttcgagagacccatcgtgagcgtgagcttcttcagcgacagcgccctgtgcttcggctgcaagttccagttcaagcccatcagagtgagcgagcccgtgctgagcctgcccgtgagaagaggcagcgtgaccgtgctgagcggctacgccgccgacgagatcacccactgcatcagaccccaggacatcaaggagagaagagccgtgatcatcctgagaaagaccagactggacgcccccagactggagaccaagagcctgagcagcagcgtgctgccccccagctacgccagcgacagactgagcggcaacaacagagaccccgccctgaagcccaagagaagccacagaaaggccgaccccgacgccgcccacagacccagaatcctggagatggacaaggaggagaacagaagaagcgtgctgctgcccacccacagaagaagaggcagcttcagcagcgagaactactggagaaagagctacgagagcagcgaggactgcagcgaggccgccggcagccccggcaacagcggcagcagcctgagaagctgccccagcttctgcttcgagggcttcgtgttcgtgcactggggcgtgttcgtgttctgcttcctgttcttcctgatcctgtacatcttcccctggttctgctgcctgctgggcctgaagaacagaatcggccaggacctgggcagccacatcctgggcatcccccccggctggaagggctgctggcaccagtag

SEQ ID NO: 72506 - DNA, 1185 bp, synthetic construct
  misc_feature 1..1185: note = Description of Artificial Sequence: Synthetic coding sequence
  source 1..1185: mol_type = other DNA
atggccgccgccagcggctacaccgacctgagagagaagctgaagagcatgaccagcagagacaactacaaggccggcagcagagaggccgccgccgccgccgccgccgccgtggccgccgccgccgccgccgccgccgccgccgagccctaccccgtgagcggcgccaagagaaagtaccaggaggacagcgaccccgagagaagcgactacgaggagcagcagctgcagaaggaggaggaggccagaaaggtgaagagcggcatcagacagatgagactgttcagccaggacgagtgcgccaagatcgaggccagaatcgacgaggtggtgagcagagccgagaagggcctgtacaacgagcacaccgtggacagagcccccctgagaaacaagtacttcttcggcgagggctacacctacggcgcccagctgcagaagagaggccccggccaggagagactgtacccccccggcgacgtggacgagatccccgagtgggtgcaccagctggtgatccagaagctggtggagcacagagtgatccccgagggcttcgtgaacagcgccgtgatcaacgactaccagcccggcggctgcatcgtgagccacgtggaccccatccacatcttcgagagacccatcgtgagcgtgagcttcttcagcgacagcgccctgtgcttcggctgcaagttccagttcaagcccatcagagtgagcgagcccgtgctgagcctgcccgtgagaagaggcagcgtgaccgtgctgagcggctacgccgccgacgagatcacccactgcatcagaccccaggacatcaaggagagaagagccgtgatcatcctgagaaagaccagactggacgcccccagactggagaccaagagcctgagcagcagcgtgctgccccccagctacgccagcgacagactgagcggcaacaacagagaccccgccctgaagcccaagagaagccacagaaaggccgaccccgacgccgcccacagacccagaatcctggagatggacaaggaggagaacagaagaagcgtgctgctgcccacccacagaagaagaggcagcttcagcagcgagaactactggagaaagagctacgagagcagcgaggactgcagcgaggccgccggcagccccgccagaaaggtgaagatgagaagacactag

SEQ ID NO: 72507 - DNA, 1152 bp, synthetic construct
  misc_feature 1..1152: note = Description of Artificial Sequence: Synthetic coding sequence
  source 1..1152: mol_type = other DNA
atgagaagatgcagaagaccctgccccgccggcagaggcgagggcggcggcggcagaagccccgccgccgccgccgccgtggccgccgccgccgccgccgccgccgccgccgagccctaccccgtgagcggcgccaagagaaagtaccaggaggacagcgaccccgagagaagcgactacgaggagcagcagctgcagaaggaggaggaggccagaaaggtgaagagcggcatcagacagatgagactgttcagccaggacgagtgcgccaagatcgaggccagaatcgacgaggtggtgagcagagccgagaagggcctgtacaacgagcacaccgtggacagagcccccctgagaaacaagtacttcttcggcgagggctacacctacggcgcccagctgcagaagagaggccccggccaggagagactgtacccccccggcgacgtggacgagatccccgagtgggtgcaccagctggtgatccagaagctggtggagcacagagtgatccccgagggcttcgtgaacagcgccgtgatcaacgactaccagcccggcggctgcatcgtgagccacgtggaccccatccacatcttcgagagacccatcgtgagcgtgagcttcttcagcgacagcgccctgtgcttcggctgcaagttccagttcaagcccatcagagtgagcgagcccgtgctgagcctgcccgtgagaagaggcagcgtgaccgtgctgagcggctacgccgccgacgagatcacccactgcatcagaccccaggacatcaaggagagaagagccgtgatcatcctgagaaagaccagactggacgcccccagactggagaccaagagcctgagcagcagcgtgctgccccccagctacgccagcgacagactgagcggcaacaacagagaccccgccctgaagcccaagagaagccacagaaaggccgaccccgacgccgcccacagacccagaatcctggagatggacaaggaggagaacagaagaagcgtgctgctgcccacccacagaagaagaggcagcttcagcagcgagaactactggagaaagagctacgagagcagcgaggactgcagcgaggccgccggcagccccgccagaaaggtgaagatgagaagacactag

SEQ ID NO: 72508 - DNA, 717 bp, synthetic construct
  misc_feature 1..717: note = Description of Artificial Sequence: Synthetic coding sequence
  source 1..717: mol_type = other DNA
atggaggagcaggacgccagagtgcccgccctggagcccttcagagtggagcaggccccccccgtgatctactacgtgcccgacttcatcagcaaggaggaggaggagtacctgctgagacaggtgttcaacgcccccaagcccaagtggacccagctgagcggcagaaagctgcagaactggggcggcctgccccaccccagaggcatggtgcccgagagactgcccccctggctgcagagatacgtggacaaggtgagcaacctgagcctgttcggcggcctgcccgccaaccacgtgctggtgaaccagtacctgcccggcgagggcatcatgccccacgaggacggccccctgtactaccccaccgtgagcaccatcagcctgggcagccacaccgtgctggacttctacgagcccagaagacccgaggacgacgaccccaccgagcagcccagacccccccccagacccaccaccagcctgctgctggagcccagaagcctgctggtgctgagaggccccgcctacaccagactgctgcacggcatcgccgccgccagagtggacgccctggacgccgccagcagcccccccaacgccgccgcctgccccagcgccagacccggcgcctgcctggtgagaggcaccagagtgagcctgaccatcagaagagtgcccagagtgctgagagccggcctgctgctgggcaagtag

SEQ ID NO: 72509 - DNA, 801 bp, synthetic construct
  misc_feature 1..801: note = Description of Artificial Sequence: Synthetic coding sequence
  source 1..801: mol_type = other DNA
atggccggcagaggcatgggcatgctgaacctggagatcggcggcgacgccggcggcagaatcggctgcaaggagctggtgctgatggaggagcaggacgccagagtgcccgccctggagcccttcagagtggagcaggccccccccgtgatctactacgtgcccgacttcatcagcaaggaggaggaggagtacctgctgagacaggtgttcaacgcccccaagcccaagtggacccagctgagcggcagaaagctgcagaactggggcggcctgccccaccccagaggcatggtgcccgagagactgcccccctggctgcagagatacgtggacaaggtgagcaacctgagcctgttcggcggcctgcccgccaaccacgtgctggtgaaccagtacctgcccggcgagggcatcatgccccacgaggacggccccctgtactaccccaccgtgagcaccatcagcctgggcagccacaccgtgctggacttctacgagcccagaagacccgaggacgacgaccccaccgagcagcccagacccccccccagacccaccaccagcctgctgctggagcccagaagcctgctggtgctgagaggccccgcctacaccagactgctgcacggcatcgccgccgccagagtggacgccctggacgccgccagcagcccccccaacgccgccgcctgccccagcgccagacccggcgcctgcctggtgagaggcaccagagtgagcctgaccatcagaagagtgcccagagtgctgagagccggcctgctgctgggcaagtag

SEQ ID NO: 72510 - DNA, 717 bp, synthetic construct; identical to SEQ ID NO: 72508
  misc_feature 1..717: note = Description of Artificial Sequence: Synthetic coding sequence
  source 1..717: mol_type = other DNA

SEQ ID NO: 72511 - DNA, 666 bp, synthetic construct
  misc_feature 1..666: note = Description of Artificial Sequence: Synthetic coding sequence
  source 1..666: mol_type = other DNA
atggccggcaccggcctgctggccctgagaaccctgcccggccccagctgggtgagaggcagcggccccagcgtgctgagcagactgcaggacgccgccgtggtgagacccggcttcctgagcaccgccgaggaggagaccctgagcagagagctggagcccgagctgagaagaagaagatacgagtacgaccactgggacgccgccatccacggcttcagagagaccgagaagagcagatggagcgaggccagcagagccatcctgcagagagtgcaggccgccgccttcggccccggccagaccctgctgagcagcgtgcacgtgctggacctggaggccagaggctacatcaagccccacgtggacagcatcaagttctgcggcgccaccatcgccggcctgagcctgctgagccccagcgtgatgagactggtgcacacccaggagcccggcgagtggctggagctgctgctggagcccggcagcctgtacatcctgagaggcagcgccagatacgacttcagccacgagatcctgagagacgaggagagcttcttcggcgagagaagaatccccagaggcagaagaatcagcgtgatctgcagaagcctgcccgagggcatgggccccggcgagagcggccagcccccccccgcctgctag

SEQ ID NO: 72512 - DNA, 1995 bp, synthetic construct
  misc_feature 1..1995: note = Description of Artificial Sequence: Synthetic coding sequence
  source 1..1995: mol_type = other DNA
atggacagcaaccaccagagcaactacaagctgagcaagaccgagaagaagttcctgagaaagcagatcaaggccaagcacaccctgctgagacacgagggcatcgagaccgtgagctacgccacccagagcctggtggtggccaacggcggcctgggcaacggcgtgagcagaaaccagctgctgcccgtgctggagaagtgcggcctggtggacgccctgctgatgccccccaacaagccctacagcttcgccagatacagaaccaccgaggagagcaagagagcctacgtgaccctgaacggcaaggaggtggtggacgacctgggccagaagatcaccctgtacctgaacttcgtggagaaggtgcagtggaaggagctgagaccccaggccctgccccccggcctgatggtggtggaggagatcatcagcagcgaggaggagaagatgctgctggagagcgtggactggaccgaggacaccgacaaccagaacagccagaagagcctgaagcacagaagagtgaagcacttcggctacgagttccactacgagaacaacaacgtggacaaggacaagcccctgagcggcggcctgcccgacatctgcgagagcttcctggagaagtggctgagaaagggctacatcaagcacaagcccgaccagatgaccatcaaccagtacgagcccggccagggcatccccgcccacatcgacacccacagcgccttcgaggacgagatcgtgagcctgagcctgggcagcgagatcgtgatggacttcaagcaccccgacggcatcgccgtgcccgtgatgctgcccagaagaagcctgctggtgatgaccggcgagagcagatacctgtggacccacggcatcacctgcagaaagttcgacaccgtgcaggccagcgagagcctgaagagcggcatcatcaccagcgacgtgggcgacctgaccctgagcaagagaggcctgagaaccagcttcaccttcagaaaggtgagacagaccccctgcaactgcagctaccccctggtgtgcgacagccagagaaaggagaccccccccagcttccccgagagcgacaaggaggccagcagactggagcaggagtacgtgcaccaggtgtacgaggagatcgccggccacttcagcagcaccagacacaccccctggccccacatcgtggagttcctgaaggccctgcccagcggcagcatcgtggccgacatcggctgcggcaacggcaagtacctgggcatcaacaaggagctgtacatgatcggctgcgacagaagccagaacctggtggacatctgcagagagagacagttccaggccttcgtgtgcgacgccctggccgtgcccgtgagaagcggcagctgcgacgcctgcatcagcatcgccgtgatccaccacttcgccaccgccgagagaagagtggccgccctgcaggagatcgtgagactgctgagacccggcggcaaggccctgatctacgtgtgggccatggagcaggagtacaacaagcagaagagcaagtacctgagaggcaacagaaacagccagggcaagaaggaggagatgaacagcgacaccagcgtgcagagaagcctggtggagcagatgagagacatgggcagcagagacagcgccagcagcgtgcccagaatcaacgacagccaggagggcggctgcaacagcagacaggtgagcaacagcaagctgcccgtgcacgtgaacagaaccagcttctacagccaggacgtgctggtgccctggcacctgaagggcaaccccgacaagggcaagcccgtggagcccttcggccccatcggcagccaggaccccagccccgtgttccacagatactaccacgtgttcagagagggcgagctggagggcgcctgcagaaccgtgagcgacgtgagaatcctgcagagctactacgaccagggcaactggtgcgtgatcctgcagaaggcctag

SEQ ID NO: 72513 - DNA, 2004 bp, synthetic construct
  misc_feature 1..2004: note = Description of Artificial Sequence: Synthetic coding sequence
  source 1..2004: mol_type = other DNA
atgttcgccatggacagcaaccaccagagcaactacaagctgagcaagaccgagaagaagttcctgagaaagcagatcaaggccaagcacaccctgctgagacacgagggcatcgagaccgtgagctacgccacccagagcctggtggtggccaacggcggcctgggcaacggcgtgagcagaaaccagctgctgcccgtgctggagaagtgcggcctggtggacgccctgctgatgccccccaacaagccctacagcttcgccagatacagaaccaccgaggagagcaagagagcctacgtgaccctgaacggcaaggaggtggtggacgacctgggccagaagatcaccctgtacctgaacttcgtggagaaggtgcagtggaaggagctgagaccccaggccctgccccccggcctgatggtggtggaggagatcatcagcagcgaggaggagaagatgctgctggagagcgtggactggaccgaggacaccgacaaccagaacagccagaagagcctgaagcacagaagagtgaagcacttcggctacgagttccactacgagaacaacaacgtggacaaggacaagcccctgagcggcggcctgcccgacatctgcgagagcttcctggagaagtggctgagaaagggctacatcaagcacaagcccgaccagatgaccatcaaccagtacgagcccggccagggcatccccgcccacatcgacacccacagcgccttcgaggacgagatcgtgagcctgagcctgggcagcgagatcgtgatggacttcaagcaccccgacggcatcgccgtgcccgtgatgctgcccagaagaagcctgctggtgatgaccggcgagagcagatacctgtggacccacggcatcacctgcagaaagttcgacaccgtgcaggccagcgagagcctgaagagcggcatcatcaccagcgacgtgggcgacctgaccctgagcaagagaggcctgagaaccagcttcaccttcagaaaggtgagacagaccccctgcaactgcagctaccccctggtgtgcgacagccagagaaaggagaccccccccagcttccccgagagcgacaaggaggccagcagactggagcaggagtacgtgcaccaggtgtacgaggagatcgccggccacttcagcagcaccagacacaccccctggccccacatcgtggagttcctgaaggccctgcccagcggcagcatcgtggccgacatcggctgcggcaacggcaagtacctgggcatcaacaaggagctgtacatgatcggctgcgacagaagccagaacctggtggacatctgcagagagagacagttccaggccttcgtgtgcgacgccctggccgtgcccgtgagaagcggcagctgcgacgcctgcatcagcatcgccgtgatccaccacttcgccaccgccgagagaagagtggccgccctgcaggagatcgtgagactgctgagacccggcggcaaggccctgatctacgtgtgggccatggagcaggagtacaacaagcagaagagcaagtacctgagaggcaacagaaacagccagggcaagaaggaggagatgaacagcgacaccagcgtgcagagaagcctggtggagcagatgagagacatgggcagcagagacagcgccagcagcgtgcccagaatcaacgacagccaggagggcggctgcaacagcagacaggtgagcaacagcaagctgcccgtgcacgtgaacagaaccagcttctacagccaggacgtgctggtgccctggcacctgaagggcaaccccgacaagggcaagcccgtggagcccttcggccccatcggcagccaggaccccagccccgtgttccacagatactaccacgtgttcagagagggcgagctggagggcgcctgcagaaccgtgagcgacgtgagaatcctgcagagctactacgaccagggcaactggtgcgtgatcctgcagaaggcctag

SEQ ID NO: 72514 - DNA, 1995 bp, synthetic construct; identical to SEQ ID NO: 72512
  misc_feature 1..1995: note = Description of Artificial Sequence: Synthetic coding sequence
  source 1..1995: mol_type = other DNA

SEQ ID NO: 72515 - DNA, 675 bp, synthetic construct
  misc_feature 1..675: note = Description of Artificial Sequence: Synthetic coding sequence
  source 1..675: mol_type = other DNA
atggacagcaaccaccagagcaactacaagctgagcaagaccgagaagaagttcctgagaaagcagatcaaggccaagcacaccctgctgagacacgagggcatcgagaccgtgagctacgccacccagagcctggtggtggccaacggcggcctgggcaacggcgtgagcagaaaccagctgctgcccgtgctggagaagtgcggcctggtggacgccctgctgatgccccccaacaagccctacagcttcgccagatacagaaccaccgaggagagcaagagagcctacgtgaccctgaacggcaaggaggtggtggacgacctgggccagaagatcaccctgtacctgaacttcgtggagaaggtgcagtggaaggagctgagaccccaggccctgccccccggcctgatggtggtggaggagatcatcagcagcgaggaggagaagatgctgctggagagcgtggactggaccgaggacaccgacaaccagaacagccagaagagcctgaagcacagaagagtgaagcacttcggctacgagttccactacgagaacaacaacgtggacaaggacaagcccctgagcggcggcctgcccgacatctgcgagagcttcctggagaagtggctgagaaaggccgagaagaacctggaggtgggcatccactag

SEQ ID NO: 72516 - DNA, 1338 bp, synthetic construct
  misc_feature 1..1338: note = Description of Artificial Sequence: Synthetic coding sequence
  source 1..1338: mol_type = other DNA
atgaagaaccccgaggcccagcaggacgtgagcgtgagccagggcttcagaatgctgttctacaccatgaagcccagcgagaccagcttccagaccctggaggaggtgcccgactacgtgaagaaggccacccccttcttcatcagcctgatgctgctggagctggtggtgagctggatcctgaagggcaagccccccggcagactggacgacgccctgaccagcatcagcgccggcgtgctgagcagactgcccagcctgttcttcagaagcatcgagctgaccagctacatctacatctgggagaactacagactgttcaacctgccctgggacagcccctggacctggtacagcgccttcctgggcgtggacttcggctactactggttccacagaatggcccacgaggtgaacatcatgtgggccggccaccagacccaccacagcagcgaggactacaacctgagcaccgccctgagacagagcgtgctgcagatctacaccagctggatcttctacagccccctggccctgttcatcccccccagcgtgtacgccgtgcacctgcagttcaacctgctgtaccagttctggatccacaccgaggtgatcaacaacctgggccccctggagctgatcctgaacacccccagccaccacagagtgcaccacggcagaaacagatactgcatcgacaagaactacgccggcgtgctgatcatctgggacaagatcttcggcaccttcgaggccgagaacgagaaggtggtgtacggcctgacccaccccatcaacaccttcgagcccatcaaggtgcagttccaccacctgttcagcatctggaccaccttctgggccacccccggcttcttcaacaagttcagcgtgatcttcaagggccccggctggggccccggcaagcccagactgggcctgagcgaggagatccccgaggtgaccggcaaggaggtgcccttcagcagcagcagcagccagctgctgaagatctacaccgtggtgcagttcgccctgatgctggccttctacgaggagaccttcgccgacaccgccgccctgagccaggtgaccctgctgctgagagtgtgcttcatcatcctgaccctgaccagcatcggcttcctgctggaccagagacccaaggccgccatcatggagaccctgagatgcctgatgttcctgatgctgtacagattcggccacctgaagcccctggtgcccagcctgagcagcgccttcgagatcgtgttcagcatctgcatcgccttctggggcgtgagaagcatgaagcagctgaccagccacccctggaagtag

SEQ ID NO: 72517 - DNA, 1977 bp, synthetic construct
  misc_feature 1..1977: note = Description of Artificial Sequence: Synthetic coding sequence
  source 1..1977: mol_type = other DNA
atggccgaggccgccgccgccgccggcggcaccggcctgggcgccggcgccagctacggcagcgccgccgacagagacagagaccccgaccccgacagagccggcagaagactgagagtgctgagcggccacctgctgggcagacccagagaggccctgagcaccaacgagtgcaaggccagaagagccgccagcgccgccaccgccgcccccaccgccacccccgccgcccaggagagcggcaccatccccaagaagagacaggaggtgatgaagtggaacggctggggctacaacgacagcaagttcatcttcaacaagaagggccagatcgagctgaccggcaagagataccccctgagcggcatgggcctgcccaccttcaaggagtggatccagaacaccctgggcgtgaacgtggagcacaagaccaccagcaaggccagcctgaaccccagcgacaccccccccagcgtggtgaacgaggacttcctgcacgacctgaaggagaccaacatcagctacagccaggaggccgacgacagagtgttcagagcccacggccactgcctgcacgagatcttcctgctgagagagggcatgttcgagagaatccccgacatcgtgctgtggcccacctgccacgacgacgtggtgaagatcgtgaacctggcctgcaagtacaacctgtgcatcatccccatcggcggcggcaccagcgtgagctacggcctgatgtgccccgccgacgagaccagaaccatcatcagcctggacaccagccagatgaacagaatcctgtgggtggacgagaacaacctgaccgcccacgtggaggccggcatcaccggccaggagctggagagacagctgaaggagagcggctactgcaccggccacgagcccgacagcctggagttcagcaccgtgggcggctgggtgagcaccagagccagcggcatgaagaagaacatctacggcaacatcgaggacctggtggtgcacatcaagatggtgacccccagaggcatcatcgagaagagctgccagggccccagaatgagcaccggccccgacatccaccacttcatcatgggcagcgagggcaccctgggcgtgatcaccgaggccaccatcaagatcagacccgtgcccgagtaccagaagtacggcagcgtggccttccccaacttcgagcagggcgtggcctgcctgagagagatcgccaagcagagatgcgcccccgccagcatcagactgatggacaacaagcagttccagttcggccacgccctgaagccccaggtgagcagcatcttcaccagcttcctggacggcctgaagaagttctacatcaccaagttcaagggcttcgaccccaaccagctgagcgtggccaccctgctgttcgagggcgacagagagaaggtgctgcagcacgagaagcaggtgtacgacatcgccgccaagttcggcggcctggccgccggcgaggacaacggccagagaggctacctgctgacctacgtgatcgcctacatcagagacctggccctggagtactacgtgctgggcgagagcttcgagaccagcgccccctgggacagagtggtggacctgtgcagaaacgtgaaggagagaatcaccagagagtgcaaggagaagggcgtgcagttcgcccccttcagcacctgcagagtgacccagacctacgacgccggcgcctgcatctacttctacttcgccttcaactacagaggcatcagcgaccccctgaccgtgttcgagcagaccgaggccgccgccagagaggagatcctggccaacggcggcagcctgagccaccaccacggcgtgggcaagctgagaaagcagtggctgaaggagagcatcagcgacgtgggcttcggcatgctgaagagcgtgaaggagtacgtggaccccaacaacatcttcggcaacagaaacctgctgtag

SEQ ID NO: 72518 - DNA, 966 bp, synthetic construct
  misc_feature 1..966: note = Description of Artificial Sequence: Synthetic coding sequence
  source 1..966: mol_type = other DNA
atggaccccaagtacccctggagcaagtgcggccacaagaccaccagcaaggccagcctgaaccccagcgacaccccccccagcgtggtgaacgaggacttcctgcacgacctgaaggagaccaacatcagctacagccaggaggccgacgacagagtgttcagagcccacggccactgcctgcacgagatcttcctgctgagagagggcatgttcgagagaatccccgacatcgtgctgtggcccacctgccacgacgacgtggtgaagatcgtgaacctggcctgcaagtacaacctgtgcatcatccccatcggcggcggcaccagcgtgagctacggcctgatgtgccccgccgacgagaccagaaccatcatcagcctggacaccagccagatgaacagaatcctgtgggtggacgagaacaacctgaccgcccacgtggaggccggcatcaccggccaggagctggagagacagctgaaggagagcggctactgcaccggccacgagcccgacagcctggagttcagcaccgtgggcggctgggtgagcaccagagccagcggcatgaagaagaacatctacggcaacatcgaggacctggtggtgcacatcaagatggtgacccccagaggcatcatcgagaagagctgccagggccccagaatgagcaccggccccgacatccaccacttcatcatgggcagcgagggcaccctgggcgtgatcaccgaggccaccatcaagatcagacccgtgcccgagtaccagaagtacggcagcgtggccttccccaacttcgagcagggcgtggcctgcctgagagagatcgccaagcagagatgcgcccccgccagcatcagactgatggacaacaagcagttccagttcggccacgccctgaagccccaggtgagcagcatcttcaccagcttcctggacggcctgaagaagttctactag

SEQ ID NO: 72519 - DNA, 1176 bp, synthetic construct
  misc_feature 1..1176: note = Description of Artificial Sequence: Synthetic coding sequence
  source 1..1176: mol_type = other DNA
atggacatggccagcgagagcgtgggcggcaagatcctgttcgccaccgacgacttcttcgcccccgccgagaacctgatcaagagcgacagcccctgcttcaaggagcacgagtacaccgagttcggcaagtggatggacggctgggagaccagaagaaagagaatccccggccacgactggtgcgtgctgagactgggcatccagggcgtgatcagaggcttcgacgtggacgtgagctacttcaccggcgactacgcccccagagtgagcatccaggccgccaacctggaggaggacaagctgcccgagatccccgagagaggcaccagaaccggcgccgccgccacccccgaggagttcgaggccatcgccgagctgaagagcgacgactggagctacctggtgcccatgaccgagctgaagcccggcaaccccgccagcggccacaactacttcctggtgaacagccagcagagatggacccacatcagactgaacatcttccccgacggcggcatcgccagactgagagtgttcggcaccggccagaaggactggaccgccaccgaccccaaggagcccgccgacctggtggccatcgccttcggcggcgtgtgcgtgggcttcagcaacgccaagttcggccaccccaacaacatcatcggcgtgggcggcgccaagagcatggccgacggctgggagaccgccagaagactggacagaccccccatcctggagaacgacgagaacggcatcctgctggtgcccggctgcgagtgggccgtgttcagactggcccaccccggcgtgatcaccagaatcgagatcgacaccaagtacttcgagggcaacgcccccgacagctgcaaggtggacggctgcatcctgaccacccaggaggaggaggccgtgatcagacagaagtggatcctgcccgcccacaagtggaagcccctgctgcccgtgaccaagctgagccccaaccagagccacctgttcgacagcctgaccctggagctgcaggacgtgatcacccacgccagactgaccatcgtgcccgacggcggcgtgagcagactgagactgagaggcttccccagcagcatctgcctgctgagacccagagagaagcccatgctgaagttcagcgtgagcttcaaggccaacccctag

SEQ ID NO: 72520 - DNA, 486 bp, synthetic construct
  misc_feature 1..486: note = Description of Artificial Sequence: Synthetic coding sequence
  source 1..486: mol_type = other DNA
ggcagaaaggccagcgagaagaccggcggcagagagggcgagcccgccgacagaggcctgcagctgggcggcaaggccttcggcctgctgaaggcccagcaggaggagagactggacgagatcaacaagcagttcctggacgaccccaagtacagcagcgacgaggacctgcccagcaagctggagggcttcaaggagaagtacatggagttcgacctgaacggcaacggcgacatcgacatcatgagcctgaagagaatgctggagaagctgggcgtgcccaagacccacctggagctgaagaagctgatcggcgaggtgagcagcggcagcggcgagaccttcagctaccccgacttcctgagaatgatgctgggcaagagaagcgccatcctgaagatgatcctgatgtacgaggagaaggccagagagaaggagaagcccaccggcccccccgccaagaaggccatcagcgagctgccctag

SEQ ID NO: 72521 - DNA, 282 bp, synthetic construct
  misc_feature 1..282: note = Description of Artificial Sequence: Synthetic coding sequence
  source 1..282: mol_type = other DNA
atggagttcgacctgaacggcaacggcgacatcgacatcatgagcctgaagagaatgctggagaagctgggcgtgcccaagacccacctggagctgaagaagctgatcggcgaggtgagcagcggcagcggcgagaccttcagctaccccgacttcctgagaatgatgctgggcaagagaagcgccatcctgaagatgatcctgatgtacgaggagaaggccagagagaaggagaagcccaccggcccccccgccaagaaggccatcagcgagctgccctag

SEQ ID NO: 72522 - DNA, 444 bp, synthetic construct
  misc_feature 1..444: note = Description of Artificial Sequence: Synthetic coding sequence
  source 1..444: mol_type = other DNA
atgagccagaccagagacctgcagggcggcaaggccttcggcctgctgaaggcccagcaggaggagagactggacgagatcaacaagcagttcctggacgaccccaagtacagcagcgacgaggacctgcccagcaagctggagggcttcaaggagaagtacatggagttcgacctgaacggcaacggcgacatcgacatcatgagcctgaagagaatgctggagaagctgggcgtgcccaagacccacctggagctgaagaagctgatcggcgaggtgagcagcggcagcggcgagaccttcagctaccccgacttcctgagaatgatgctgggcaagagaagcgccatcctgaagatgatcctgatgtacgaggagaaggccagagagaaggagaagcccaccggcccccccgccaagaaggccatcagcgagctgccctag

SEQ ID NO: 72523 - DNA, 282 bp, synthetic construct; identical to SEQ ID NO: 72521
  misc_feature 1..282: note = Description of Artificial Sequence: Synthetic coding sequence
  source 1..282: mol_type = other DNA

SEQ ID NO: 72524 - DNA, 444 bp, synthetic construct; identical to SEQ ID NO: 72522
  misc_feature 1..444: note = Description of Artificial Sequence: Synthetic coding sequence
  source 1..444: mol_type = other DNA

SEQ ID NO: 72525 - DNA, 486 bp, synthetic construct; identical to SEQ ID NO: 72520
  misc_feature 1..486: note = Description of Artificial Sequence: Synthetic coding sequence
  source 1..486: mol_type = other DNA

SEQ ID NO: 72526 - DNA, 444 bp, synthetic construct; identical to SEQ ID NO: 72522
  misc_feature 1..444: note = Description of Artificial Sequence: Synthetic coding sequence
  source 1..444: mol_type = other DNA

SEQ ID NO: 72527 - DNA, 444 bp, synthetic construct; identical to SEQ ID NO: 72522
  misc_feature 1..444: note = Description of Artificial Sequence: Synthetic coding sequence
  source 1..444: mol_type = other DNA

SEQ ID NO: 72528 - DNA, 282 bp, synthetic construct; identical to SEQ ID NO: 72521
  misc_feature 1..282: note = Description of Artificial Sequence: Synthetic coding sequence
  source 1..282: mol_type = other DNA

SEQ ID NO: 72529 - DNA, 282 bp, synthetic construct; identical to SEQ ID NO: 72521
  misc_feature 1..282: note = Description of Artificial Sequence: Synthetic coding sequence
  source 1..282: mol_type = other DNA

SEQ ID NO: 72530 - DNA, 486 bp, synthetic construct; identical to SEQ ID NO: 72520
  misc_feature 1..486: note = Description of Artificial Sequence: Synthetic coding sequence
  source 1..486: mol_type = other DNA

SEQ ID NO: 72531 - DNA, 282 bp, synthetic construct; identical to SEQ ID NO: 72521
  misc_feature 1..282: note = Description of Artificial Sequence: Synthetic coding sequence
  source 1..282: mol_type = other DNA

SEQ ID NO: 72532 - DNA, 282 bp, synthetic construct; identical to SEQ ID NO: 72521
  misc_feature 1..282: note = Description of Artificial Sequence: Synthetic coding sequence
  source 1..282: mol_type = other DNA

SEQ ID NO: 72533 - DNA, 444 bp, synthetic construct; identical to SEQ ID NO: 72522
  misc_feature 1..444: note = Description of Artificial Sequence: Synthetic coding sequence
  source 1..444: mol_type = other DNA

SEQ ID NO: 72534 - DNA, 486 bp, synthetic construct; identical to SEQ ID NO: 72520
  misc_feature 1..486: note = Description of Artificial Sequence: Synthetic coding sequence
  source 1..486: mol_type = other DNA

SEQ ID NO: 72535 - DNA, 444 bp, synthetic construct; identical to SEQ ID NO: 72522
  misc_feature 1..444: note = Description of Artificial Sequence: Synthetic coding sequence
  source 1..444: mol_type = other DNA

SEQ ID NO: 72536 - DNA, 486 bp, synthetic construct; identical to SEQ ID NO: 72520
  misc_feature 1..486: note = Description of Artificial Sequence: Synthetic coding sequence
  source 1..486: mol_type = other DNA

SEQ ID NO: 72537 - DNA, 486 bp, synthetic construct; identical to SEQ ID NO: 72520
  misc_feature 1..486: note = Description of Artificial Sequence: Synthetic coding sequence
  source 1..486: mol_type = other DNA

SEQ ID NO: 72538 - DNA, 282 bp, synthetic construct; identical to SEQ ID NO: 72521
  misc_feature 1..282: note = Description of Artificial Sequence: Synthetic coding sequence
  source 1..282: mol_type = other DNA

SEQ ID NO: 72539 - DNA, 1062 bp, synthetic construct
  misc_feature 1..1062: note = Description of Artificial Sequence: Synthetic coding sequence
  source 1..1062: mol_type = other DNA
atgagcaagccccccgacctgctgctgagactgctgagaggcgcccccagacagagagtgtgcaccctgttcatcatcggcttcaagttcaccttcttcgtgagcatcatgatctactggcacgtggtgggcgagcccaaggagaagggccagctgtacaacctgcccgccgagatcccctgccccaccctgaccccccccaccccccccagccacggccccacccccggcaacatcttcttcctggagaccagcgacagaaccaaccccaacttcctgttcatgtgcagcgtggagagcgccgccagaacccaccccgagagccacgtgctggtgctgatgaagggcctgcccggcggcaacgccagcctgcccagacacctgggcatcagcctgctgagctgcttccccaacgtgcagatgctgcccctggacctgagagagctgttcagagacacccccctggccgactggtacgccgccgtgcagggcagatgggagccctacctgctgcccgtgctgagcgacgccagcagaatcgccctgatgtggaagttcggcggcatctacctggacaccgacttcatcgtgctgaagaacctgagaaacctgaccaacgtgctgggcacccagagcagatacgtgctgaacggcgccttcctggccttcgagagaagacacgagttcatggccctgtgcatgagagacttcgtggaccactacaacggctggatctggggccaccagggcccccagctgctgaccagagtgttcaagaagtggtgcagcatcagaagcctggccgagagcagagcctgcagaggcgtgaccaccctgccccccgaggccttctaccccatcccctggcaggactggaagaagtacttcgaggacatcaaccccgaggagctgcccagactgctgagcgccacctacgccgtgcacgtgtggaacaagaagagccagggcaccagattcgaggccaccagcagagccctgctggcccagctgcacgccagatactgccccaccacccacgaggccatgaagatgtacctgtag

SEQ ID NO: 72540 - DNA, 1062 bp, synthetic construct; identical to SEQ ID NO: 72539
  misc_feature 1..1062: note = Description of Artificial Sequence: Synthetic coding sequence
  source 1..1062: mol_type = other DNA

SEQ ID NO: 72541 - DNA, 1062 bp, synthetic construct; identical to SEQ ID NO: 72539
  misc_feature 1..1062: note = Description of Artificial Sequence: Synthetic coding sequence
  source 1..1062: mol_type = other DNA

SEQ ID NO: 72542 - DNA, 1311 bp, synthetic construct
  misc_feature 1..1311: note = Description of Artificial Sequence: Synthetic coding sequence
  source 1..1311: mol_type = other DNA
atgagcaagccccccgacctgctgctgagactgctgagaggcgcccccagacagagagtgtgcaccctgttcatcatcggcttcaagttcaccttcttcgtgagcatcatgatctactggcacgtggtgggcgagcccaaggagaagggccagctgtacaacctgcccgccgagatcccctgccccaccctgaccccccccaccccccccagccacggccccacccccggcaacatcttcttcctggagaccagcgacagaaccaaccccaacttcctgttcatgtgcagcgtggagagcgccgccagaacccaccccgagagccacgtgctggtgctgatgaagggcctgcccggcggcaacgccagcctgcccagacacctgggcatcagcctgctgagctgcttccccaacgtgcagatgctgcccctggacctgagagagctgttcagagacacccccctggccgactggtacgccgccgtgcagggcagatgggagccctacctgctgcccgtgctgagcgacgccagcagaatcgccctgatgtggaagttcggcggcatctacctggacaccgacttcatcgtgctgaagaacctgagaaacctgaccaacgtgctgggcacccagagcagatacgtgctgaacggcgccttcctggccttcgagagaagacacgagttcatggccctgtgcatgagagacttcgtggaccactacaacggctggatctggggccaccagggcccccagctgctgaccagagtgttcaagaagtggtgcagcatcagaagcctggccgagagcagagcctgcagaggcgtgaccaccctgccccccgaggccttctaccccatcccctggcaggactggaagaagtacttcgaggacatcaaccccgaggagctgcccagactgctgagcgccacctacgccgtgcacgtgtggaacaagaagagccagggcaccgccggccccgccgcctgccccctgctgccccacgacgccagaggccacgagaacgtgctggtgagaggcccccccggccacctgcccaacctgctgctgatgggccactgggccgccctgcccggcgaggccagactgagagccagagagagagaggccagagccgccaccggcctgagacaggccgtggaggagctgtgggagcaggcccagtgggaggccgtggacacccccagaaccgtgagctgcctggaggccggcctgacccacggcgccatcgccagcggcggcagaagcgtgagcgcccccggcctgctggacaacagacaggagggctag

SEQ ID NO: 72543 - DNA, 309 bp, synthetic construct
  misc_feature 1..309: note = Description of Artificial Sequence: Synthetic coding sequence
  source 1..309: mol_type = other DNA
atggccctgctgaaggccaacaaggacctgatcagcgccggcctgaaggagttcagcgtgctgctgaaccagcaggtgttcaacgaccccctggtgagcgaggaggacatggtgaccgtggtggaggactggatgaacttctacatcaactactacagacagcaggtgaccggcgagccccaggagagagacaaggccctgcaggagctgagacaggagctgaacaccctggccaaccccttcctggccaagtacagagacttcctgaagagccacgagctgcccagccaccccccccccagcagctag

SEQ ID NO: 72544 - DNA, 1488 bp, synthetic construct
  misc_feature 1..1488: note = Description of Artificial Sequence: Synthetic coding sequence
  source 1..1488: mol_type = other DNA
atgagcatgctggtggtgttcctgctgctgtggggcgtgacctggggccccgtgaccgaggccgccatcttctacgagacccagcccagcctgtgggccgagagcgagagcctgctgaagcccctggccaacgtgaccctgacctgccaggcccacctggagacccccgacttccagctgttcaagaacggcgtggcccaggagcccgtgcacctggacagccccgccatcaagcaccagttcctgctgaccggcgacacccagggcagatacagatgcagaagcggcctgagcaccggctggacccagctgagcaagctgctggagctgaccggccccaagagcctgcccgccccctggctgagcatggcccccgtgagctggatcacccccggcctgaagaccaccgccgtgtgcagaggcgtgctgagaggcgtgaccttcctgctgagaagagagggcgaccacgagttcctggaggtgcccgaggcccaggaggacgtggaggccaccttccccgtgcaccagcccggcaactacagctgcagctacagaaccgacggcgagggcgccctgagcgagcccagcgccaccgtgaccatcgaggagctggccgccccccccccccccgtgctgatgcaccacggcgagagcagccaggtgctgcaccccggcaacaaggtgaccctgacctgcgtggcccccctgagcggcgtggacttccagctgagaagaggcgagaaggagctgctggtgcccagaagcagcaccagccccgacagaatcttcttccacctgaacgccgtggccctgggcgacggcggccactacacctgcagatacagactgcacgacaaccagaacggctggagcggcgacagcgcccccgtggagctgatcctgagcgacgagaccctgcccgcccccgagttcagccccgagcccgagagcggcagagccctgagactgagatgcctggcccccctggagggcgccagattcgccctggtgagagaggacagaggcggcagaagagtgcacagattccagagccccgccggcaccgaggccctgttcgagctgcacaacatcagcgtggccgacagcgccaactacagctgcgtgtacgtggacctgaagccccccttcggcggcagcgcccccagcgagagactggagctgcacgtggacggccccccccccagaccccagctgagagccacctggagcggcgccgtgctggccggcagagacgccgtgctgagatgcgagggccccatccccgacgtgaccttcgagctgctgagagagggcgagaccaaggccgtgaagaccgtgagaacccccggcgccgccgccaacctggagctgatcttcgtgggcccccagcacgccggcaactacagatgcagatacagaagctgggtgccccacaccttcgagagcgagctgagcgaccccgtggagctgctggtggccgagagctag
